United States Patent Application Publication US 2026/0125700 A1 - sequence listing, part 3

SEQ ID NO: 10339 - protein, 276 aa, Homo sapiens
MESRMWPALLLSHLLPLWPLLLLPLPPPAQGSSSSPRTPPAPARPPCARGGPSAPRHVCVWERAPPPSRSPRVPRSRRQVLPGTAPPATPSGFEEGPPSSQYPWAIVWGPTVSREDGGDPNSANPGFLDYGFAAPHGLATPHPNSDSMRGDGDGLILGEAPATLRPFLFGGRGEGVDPQLYVTITISIIIVLVATGIIFKFCWDRSQKRRRPSGQQGALRQEESQQPLTDLSPAGVTVLGAFGDSPTPTPDHEEPRGGPRPGMPHPKGAPAFQLNR

SEQ ID NO: 10340 - protein, 27 aa, Homo sapiens
KNMELNVYGDDVEVDYRSYEGMVEMVS

SEQ ID NO: 10341 - protein, 395 aa, Homo sapiens
MAVTDSLSRAATVLATVLLLSFGSVAASHIEDQAEQFFRSGHTNNWAVLVCTSRFWFNYRHVANTLSVYRSVKRLGIPDSHIVLMLADDMACNPRNPKPATVFSHKNMELNVYGDDVEVDYRSYEVTVENFLRVLTGRIPPSTPRSKRLLSDDRSNILIYMTGHGGNGFLKFQDSEEITNIELADAFEQMWQKRRYNELLFIIDTCQGASMYERFYSPNIMALASSQVGEDSLSHQPDPAIGVHLMDRYTFYVLEFLEEINPASQTNMNDLFQVCPKSLCVSTPGHRTDLFQRDPKNVLITDFFGSVRKVEITTETIKLQQDSEIMESSYKEDQMDEKLMEPLKYAEQLPVAQIIHQKPKLKDWHPPGGFILGLWALIIMVFFKTYGIKHMKFIF

SEQ ID NO: 10342 - protein, 332 aa, Homo sapiens
MAVTDSLSRAATVLATVLLLSFGSVAASHIEDQAEQFFRSGHTNNWAVLVCTSRFWFNYRHVANTLSVYRSVKRLGIPDSHIVLMLADDMACNPRNPKPATVFSHKNMELNVYGDDVEVDYRSYEVTVENFLRVLTGRIPPSTPRSKRLLSDDRSNILIYMTGHGGNGFLKFQDSEEITNIELADAFEQMWQKRRYNELLFIIDTCQGASMYERFYSPNIMALASSQVGEDSLSHQPDPAIGVHLMDRYTFYVLEFLEEINPASQTNMNDLFQVCPKSLCVSTPGHRTDLFQRDPKNVLITDFFGSVRKVEITTETIKLQQDSEIMESRYSS

SEQ ID NO: 10343 - protein, 301 aa, Homo sapiens
MAVTDSLSRAATVLATVLLLSFGSVAASHIEVTVENFLRVLTGRIPPSTPRSKRLLSDDRSNILIYMTGHGGNGFLKFQDSEEITNIELADAFEQMWQKRRYNELLFIIDTCQGASMYERFYSPNIMALASSQVGEDSLSHQPDPAIGVHLMDRYTFYVLEFLEEINPASQTNMNDLFQVCPKSLCVSTPGHRTDLFQRDPKNVLITDFFGSVRKVEITTETIKLQQDSEIMESSYKEDQMDEKLMEPLKYAEQLPVAQIIHQKPKLKDWHPPGGFILGLWALIIMVFFKTYGIKHMKFIF

SEQ ID NO: 10344 - protein, 101 aa, Homo sapiens
MEAMWLLCVALAVLAWGFLWVWDSSERMKSREQGGRLGAESRTLLVIAHPDDEAMFFAPTVLGLARLRHWVYLLCFSAGISQMTQACSGTQSTWPESSFST

SEQ ID NO: 10345 - protein, 150 aa, Homo sapiens
MEAMWLLCVALAVLAWGFLWVWDSSERMKSREQGGRLGAESRTLLVIAHPDDEAMFFAPTVLGLARLRHWVYLLCFSAGNYYNQGETRKKELLQSCDVLGIPLSSVMIIDNRDFPDDPGMQWDTEHVARVLLQHIEVNGINLKDRANSRL

SEQ ID NO: 10346 - protein, 188 aa, Homo sapiens
MEAMWLLCVALAVLAWGFLWVWDSSERMKSREQGGRLGAESRTLLVIAHPDDEAMFFAPTVLGLARLRHWVYLLCFSAGNYYNQGETRKKELLQSCDVLGIPLSSVMIIDNRDFPDDPGMQWDTEHVARVLLQHIEVNGINLVVTFDAGGVSGHSNHIALYAAVRALHSEGKLPKESCPQPSRGSGWG

SEQ ID NO: 10347 - protein, 252 aa, Homo sapiens
MEAMWLLCVALAVLAWGFLWVWDSSERMKSREQGGRLGAESRTLLVIAHPDDEAMFFAPTVLGLARLRHWVYLLCFSAGNYYNQGETRKKELLQSCDVLGIPLSSVMIIDNRDFPDDPGMQWDTEHVARVLLQHIEVNGINLVVTFDAGGVSGHSNHIALYAAVRALHSEGKLPKGCSVLTLQSVNVLRKYISLLDLPLSLLHTQDVLFVLNSKEVAQAKKAMSCHRSQLLWFRRLYIIFSRYMRINSLSFL

SEQ ID NO: 10348 - protein, 244 aa, Homo sapiens
MEAMWLLCVALAVLAWGFLWVWDSSERMKSREQGGRLGAESRTLLVIAHPDDEAMFFAPTVLGLARLRHWVYLLCFSAGNYYNQGETRKKELLQSCDVLGIPLSSVMIIDNRDFPDDPGMQWDTEHVARVLLQHIEVNGINLVVTFDAGGVSGHSNHIALYAAVRVLCAHASVCECAAQVHLPSGSALVSASYAGCPLRAQQQRSGTGQESHVLPPQPAPLVPPPLHYLLPVHENQLTELPLKP

SEQ ID NO: 10349 - protein, 145 aa, Homo sapiens
MEAMWLLCVALAVLAWGFLWVWDSSERMKSREQGGRLGAESRTLLVIAHPDDEAMFFAPTVLGLARLRHWVYLLCFSAGNYYNQGETRKKELLQSCDVLGIPLSSVMIIDNRLSYLRLMCLSEAQGPQQHTPVSQSSDYSSLGMG

SEQ ID NO: 10350 - protein, 102 aa, Homo sapiens
VVTFDAGGVSGHSNHIALYAAVRVLCAHASVCECAAQVHLPSGSALVSASYAGCPLRAQQQRSGTGQESHVLPPQPAPLVPPPLHYLLPVHENQLTELPLKP

SEQ ID NO: 10351 - protein, 92 aa, Homo sapiens
  VARIANT 1: note = misc_feature - Xaa can be any naturally occurring amino acid
XCVALAVLAWGFLWVWDSSERMKSREQGGRLGAESRTLLVIAHPDDEAMFFAPTVLGLARLRHWVYLLCFSAVFRRELSEYTEGLTSEPLTA

SEQ ID NO: 10352 - protein, 580 aa, Homo sapiens
LALLVLLLLGPGGWCLAEPPRDSLREELVITPLPSGDVAATFQFRTRWDSELQREGVSHYRLFPKALGQLISKYSLRELHLSFTQGFWRTRYWGPPFLQAPSGAELWVWFQDTVTEREGSPTPSWDCPDCGARGGVGSRRVIPISGMWIPRGQSPRPTPDRPLSPSDTDHYFLRYAVLPREVVCTENLTPWKKLLPCSSKAGLSVLLKADRLFHTSYHSQAVHIRPVCRNARCTSISWELRQTLSVVFDAFITGQGKKDWSLFRMFSRTLTEPCPLASESRVYVDITTYNQDNETLEVHPPPTTTYQDVILGTRKTYAIYDLLDTAMINNSRNLNIQLKWKRPPENEAPPVPFLHAQRYVSGYGLQKGELSTLLYNTHPYRAFPVLLLDTVPWYLRLYVHTLTITSKGKENKPSYIHYQPAQDRLQPHLLEMLIQLPANSVTKVSIQFERALLKWTEYTPDPNHGFYVSPSVLSALVPSMVAAKPVDWEESPLFNSLFPVSDGSNYFVRLYTEPLLVNLPTPDFSMPYNVICLTCTVVAVCYGSFYNLLTRTFHIEEPRTGGLAKRLANLIRRARGVPPL

SEQ ID NO: 10353 - protein, 329 aa, Homo sapiens
LRYAVLPREVVCTENLTPWKKLLPCSSKAGLSVLLKADRLFHTSYHSQAVHIRPVCRNARCTSISWELRQTLSVVFDAFITGQGKKDWSLFRMFSRTLTEPCPLASESRVYVDITTYNQDNETLEVHPPPTTTYQDVILGTRKTYAIYDLLDTAMINNSRNLNIQLKWKRPPENEAPPVPFLHAQRYVSGYGLQKGELSTLLYNTHPYRAFPVLLLDTVPWYLRLYVHTLTITSKGKENKPSYIHYQPAQDRLQPHLLEMLIQLPANSVTKVSIQFERALLKWTEYTPDPNHGFYVSPSVLSALVPSMVAAKPVDWEESPLFNSLLPWT

SEQ ID NO: 10354 - protein, 476 aa, Homo sapiens
MAAAMPLALLVLLLLGPGGWCLAEPPRDSLREELVITPLPSGDVAATFQFRTRWDSELQREGDTDHYFLRYAVLPREVVCTENLTPWKKLLPCSSKAGLSVLLKADRLFHTSYHSQAVHIRPVCRNARCTSISWELRQTLSVVFDAFITGQGKKDWSLFRMFSRTLTEPCPLASESRVYVDITTYNQDNETLEVHPPPTTTYQDVILGTRKTYAIYDLLDTAMINNSRNLNIQLKWKRPPENEAPPVPFLHAQRYVSGYGLQKGELSTLLYNTHPYRAFPVLLLDTVPWYLRLYVHTLTITSKGKENKPSYIHYQPAQDRLQPHLLEMLIQLPANSVTKVSIQFERALLKWTEYTPDPNHGFYVSPSVLSALVPSMVAAKPVDWEESPLFNSLFPVSDGSNYFVRLYTEPLLVNLPTPDFSMPYNVICLTCTVVAVCYGSFYNLLTRTFHIEEPRTGGLAKRLANLIRRARGVPPL

SEQ ID NO: 10355 - protein, 275 aa, Homo sapiens
MAAAMPLALLVLLLLGPGGWCLAEPPRDSLREELVITPLPSGDVAATFQFRTRWDSELQREGDTDHYFLRYAVLPREVVCTENLTPWKKLLPCSSKAGLSVLLKADRLFHTSYHSQAVHIRPVCRNARCTSISWELRQTLSVVFDAFITGQGKKDWSLFRMFSRTLTEPCPLASESRVYVDITTYNQDNETLEVHPPPTTTYQDVILGTRKTYAIYDLLDTAMINNSRNLNIQLKWKRPPENGYIHYQPAQDRLQPHLLEMLIQLPANSVTKVSI

SEQ ID NO: 10356 - protein, 101 aa, Homo sapiens
MAAAMPLALLVLLLLGPGGWCLAEPPRDSLREELVITPLPSGDVAATFQFRTRWDSELQREGDTDHYFLRYAVLPREVVCTENLTPWKKLLPCSSKASLCC

SEQ ID NO: 10357 - protein, 384 aa, Homo sapiens
MAAAMPLALLVLLLLGPGGWCLAEPPRDSLREELVITPLPSGDVAATFQFRTRWDSELQREGDWSLFRMFSRTLTEPCPLASESRVYVDITTYNQDNETLEVHPPPTTTYQDVILGTRKTYAIYDLLDTAMINNSRNLNIQLKWKRPPENEAPPVPFLHAQRYVSGYGLQKGELSTLLYNTHPYRAFPVLLLDTVPWYLRLYVHTLTITSKGKENKPSYIHYQPAQDRLQPHLLEMLIQLPANSVTKVSIQFERALLKWTEYTPDPNHGFYVSPSVLSALVPSMVAAKPVDWEESPLFNSLFPVSDGSNYFVRLYTEPLLVNLPTPDFSMPYNVICLTCTVVAVCYGSFYNLLTRTFHIEEPRTGGLAKRLANLIRRARGVPPL

SEQ ID NO: 10358 - protein, 441 aa, Homo sapiens
MAAAMPLALLVLLLLGPGGWCLAEPPRDSLREELVITPLPSGDVAATFQFRTRWDSELQREGGLSVLLKADRLFHTSYHSQAVHIRPVCRNARCTSISWELRQTLSVVFDAFITGQGKKDWSLFRMFSRTLTEPCPLASESRVYVDITTYNQDNETLEVHPPPTTTYQDVILGTRKTYAIYDLLDTAMINNSRNLNIQLKWKRPPENEAPPVPFLHAQRYVSGYGLQKGELSTLLYNTHPYRAFPVLLLDTVPWYLRLYVHTLTITSKGKENKPSYIHYQPAQDRLQPHLLEMLIQLPANSVTKVSIQFERALLKWTEYTPDPNHGFYVSPSVLSALVPSMVAAKPVDWEESPLFNSLFPVSDGSNYFVRLYTEPLLVNLPTPDFSMPYNVICLTCTVVAVCYGSFYNLLTRTFHIEEPRTGGLAKRLANLIRRARGVPPL

SEQ ID NO: 10359 - protein, 96 aa, Homo sapiens
MAAAMPLALLVLLLLGPGGWCLAEPPRDSLREELVITPLPSGDVAATFQFRTRWDSELQREGGRPLCAAEGRSLVPHQLPLPGSAYPPCLQKCTLY

SEQ ID NO: 10360 - protein, 522 aa, Homo sapiens
MAAAMPLALLVLLLLGPGGWCLAEPPRDSLREELVITPLPSGDVAATFQFRTRWDSELQREGVSHYRLFPKALGQLISKYSLRELHLSFTQGFWRTRYWGPPFLQAPSDTDHYFLRYAVLPREVVCTENLTPWKKLLPCSSKAGLSVLLKADRLFHTSYHSQAVHIRPVCRNARCTSISWELRQTLSVVFDAFITGQGKKDWSLFRMFSRTLTEPCPLASESRVYVDITTYNQDNETLEVHPPPTTTYQDVILGTRKTYAIYDLLDTAMINNSRNLNIQLKWKRPPENEAPPVPFLHAQRYVSGYGLQKGELSTLLYNTHPYRAFPVLLLDTVPWYLRLYVHTLTITSKGKENKPSYIHYQPAQDRLQPHLLEMLIQLPANSVTKVSIQFERALLKWTEYTPDPNHGFYVSPSVLSALVPSMVAAKPVDWEESPLFNSLFPVSDGSNYFVRLYTEPLLVNLPTPDFSMPYNVICLTCTVVAVCYGSFYNLLTRTFHIEEPRTGGLAKRLANLIRRARGVPPL

SEQ ID NO: 10361 - protein, 314 aa, Homo sapiens
MAAAMPLALLVLLLLGPGGWCLAEPPRDSLREELVITPLPSGDVAATFQFRTRWDSELQREGVSHYRLFPKALGQLISKYSLRELHLSFTQGFWRTRYWGPPFLQAPSGAELVDKSWKELSNVLSGIFCASLNFIDSTNTVTPTASFKPLGLANDTDHYFLRYAVLPREVVCTENLTPWKKLLPCSSKAGLSVLLKADRLFHTSYHSQAVHIRPVCRNARCTSISWELRQTLSVVFDAFITGQGKKDWSLFRMFSRTLTEPCPLASESRVYVDITTYNQDNETLEVHPPPTTTYQDVILGTRKTYAIYDLLDTA

SEQ ID NO: 10362 - protein, 240 aa, Homo sapiens
MAAAMPLALLVLLLLGPGGWCLAEPPRDSLREELVITPLPSGDVAATFQFRTRWDSELQREGVSHYRLFPKALGQLISKYSLRELHLSFTQGFWRTRYWGPPFLQAPSGAELWVWFQDTVTDVDKSWKELSNVLSGIFCASLNFIDSTNTVTPTASFKPLGLANDTDHYFLRYAVLPREVVCTENLTPWKKLLPCSSKAGLSVLLKADRLFHTSYHSQAVHIRPVCRHLLGAEADPVSCI

SEQ ID NO: 10363 - protein, 578 aa, Homo sapiens
MAAAMPLALLVLLLLGPGGWCLAEPPRDSLREELVITPLPSGDVAATFQFRTRWDSELQREGVSHYRLFPKALGQLISKYSLRELHLSFTQGFWRTRYWGPPFLQAPSGAELWVWFQDTVTDVDKSWKELSNVLSGIFCASLNFIDSTNTVTPTASFKPLGLANDTDHYFLRYAVLPREVVCTENLTPWKKLLPCSSKAGLSVLLKADRLFHTSYHSQAVHIRPVCRNARCTSISWELRQTLSVVFDAFITGQGKKDWSLFRMFSRTLTEPCPLASESRVYVDITTYNQDNETLEVHPPPTTTYQDVILGTRKTYAIYDLLDTAMINNSRNLNIQLKWKRPPENEAPPVPFLHAQRYVSGYGLQKGELSTLLYNTHPYRAFPVLLLDTVPWYLRLYVHTLTITSKGKENKPSYIHYQPAQDRLQPHLLEMLIQLPANSVTKVSIQFERALLKWTEYTPDPNHGFYVSPSVLSALVPSMVAAKPVDWEESPLFNSLFPVSDGSNYFVRLYTEPLLVNLPTPDFSMPYNVICLTCTVVAVCYGSFYNLLTRTFHIEEPRTGGLAKRLANLIRRARGVPPL

SEQ ID NO: 10364 - protein, 511 aa, Homo sapiens
MAAAMPLALLVLLLLGPGGWCLAEPPRDSLREELVITPLPSGDVAATFQFRTRWDSELQREGVSHYRLFPKALGQLISKYSLRELHLSFTQGFWRTRYWGPPFLQAPSGAELWVWFQDTVTDVDKSWKELSNVLSGIFCASLNFIDSTNTVTPTASFKPLGLANDTDHYFLRYAVLPREVVCTENLTPWKKLLPCSSKAGLSVLLKADRLFHTSYHSQAVHIRPVCRNARCTSISWELRQTLSVVFDAFITGQGKKDWSLFRMFSRTLTEPCPLASESRVYVDITTYNQDNETLEVHPPPTTTYQDVILGTRKTYAIYDLLDTAMINNSRNLNIQLKWKRPPENGYIHYQPAQDRLQPHLLEMLIQLPANSVTKVSIQFERALLKWTEYTPDPNHGFYVSPSVLSALVPSMVAAKPVDWEESPLFNSLFPVSDGSNYFVRLYTEPLLVNLPTPDFSMPYNVICLTCTVVAVCYGSFYNLLTRTFHIEEPRTGGLAKRLANLIRRARGVPPL

SEQ ID NO: 10365 - protein, 331 aa, Homo sapiens
MAAAMPLALLVLLLLGPGGWCLAEPPRDSLREELVITPLPSGDVAATFQFRTRWDSELQREGVSHYRLFPKALGQLISKYSLRELHLSFTQGFWRTRYWGPPFLQAPSGAELWVWFQDTVTDVDKSWKELSNVLSGIFCASLNFIDSTNTVTPTASFKPLGLANDTDHYFLRYAVLPREVVCTENLTPWKKLLPCSSKAGLSVLLKADRLFHTSYHSQAVHIRPVCRNARCTSISWELRQTLSVVFDAFITGQGKKALRSVSQTGPSSGCSPEPSRSPAPWLQRAESMWTSPPTTSPAFVSPGQRDIRGAPTPDHYISGRHPRHSEDLCHL

SEQ ID NO: 10366 - protein, 300 aa, Homo sapiens
MAAAMPLALLVLLLLGPGGWCLAEPPRDSLREELVITPLPSGDVAATFQFRTRWDSELQREGVSHYRLFPKALGQLISKYSLRELHLSFTQGFWRTRYWGPPFLQAPSGAELWVWFQDTVTDVDKSWKELSNVLSGIFCASLNFIDSTNTVTPTASFKPLGLANDTDHYFLRYAVLPREVVCTENLTPWKKLLPCSSKAGLSVLLKADRLFHTSYHSQAVHIRPVCRNARCTSISWELRQTLSVVFDAFITGQGKKDWSLFRMFSRTLTEPCPLASESRVYVDITTYNQPCLCVPRTTRH

SEQ ID NO: 10367 - protein, 505 aa, Homo sapiens
MAAAMPLALLVLLLLGPGGWCLAEPPRDSLREELVITPLPSGDVAATFQFRTRWDSELQREGVSHYRLFPKALGQLISKYSLRELHLSFTQGFWRTRYWGPPFLQAPSGAELWVWFQDTVTDVDKSWKELSNVLSGIFCASLNFIDSTNTVTPTASFKPLGLANDTDHYFLRYAVLPREVVCTENLTPWKKLLPCSSKAGLSVLLKADRLFHTSYHSQAVHIRPVCRNARCTSISWELRQTLSVVFDAFITGQGKKDWSLFRMFSRTLTEPCPLASESRVYVDITTYNQDNETLEVHPPPTTTYQDVILGTRKTYAIYDLLDTAMINNSRNLNIQLKWKRPPENEAPPVPFLHAQRYVSGYGLQKGELSTLLYNTHPYRAFPVLLLDTVPWYLRLYVHTLTITSKGKENKPSYIHYQPAQDRLQPHLLEMLIQLPANSVTKVSIQFERALLKWTEYTPDPNHGFYVSPSVLSALVPSMVAAKPVDWEESPLFNSLEPVTCAALRC

SEQ ID NO: 10368 - protein, 499 aa, Homo sapiens
MAAAMPLALLVLLLLGPGGWCLAEPPRDSLREELVITPLPSGDVAATFQFRTRWDSELQREGVSHYRLFPKALGQLISKYSLRELHLSFTQGFWRTRYWGPPFLQAPSGAELWVWFQDTVTDVDKSWKELSNVLSGIFCASLNFIDSTNTVTPTASFKPLGLANDTDHYFLRYAVLPREVVCTENLTPWKKLLPCSSKAGLSVLLKADRLFHTSYHSQAVHIRPVCRNARCTSISWELRQTLSVVFDAFITGQGKKDWSLFRMFSRTLTEPCPLASESRVYVDITTYNQDNETLEVHPPPTTTYQDVILGTRKTYAIYDLLDTAMINNSRNLNIQLKWKRPPENEAPPVPFLHAQRYVSGYGLQKGELSTLLYNTHPYRAFPVLLLDTVPWYLRLYVHTLTITSKGKENKPSYIHYQPAQDRLQPHLLEMLIQLPANSVTKVSIQFERALLKWTEYTPDPNHGFYVSPSVLSALVPSMVAAKPVDWEESPLFNSLLPWT

SEQ ID NO: 10369 - protein, 499 aa, Homo sapiens; identical to SEQ ID NO: 10368

SEQ ID NO: 10370 - protein, 300 aa, Homo sapiens; identical to SEQ ID NO: 10366

SEQ ID NO: 10371 - protein, 429 aa, Homo sapiens
MAAAMPLALLVLLLLGPGGWCLAEPPRDSLREELVITPLPSGDVAATFQFRTRWDSELQREGVSHYRLFPKALGQLISKYSLRELHLSFTQGFWRTRYWGPPFLQAPSGAELWVWFQDTVTDVDKSWKELSNVLSGIFCASLNFIDSTNTVTPTASFKPLGLANDTDHYFLRYAVLPREVVCTENLTPWKKLLPCSSKAGLSVLLKADRLFHTSYHSQAVHIRPVCRNARCTSISWELRQTLSVVFDAFITGQGKKDWSLFRMFSRTLTEPCPLASESRVYVDITTYNQDNETLEVHPPPTTTYQDVILGTRKTYAIYDLLDTAMINNSRNLNIQLKWKRPPENEAPPVPFLHAQRYVSGYGLQKGELSTLLYNTHPYRAFPVLLLDTVPWYLRLLHPLPACPGPAATPPPGDADSAAGQLSHQGFHPV

SEQ ID NO: 10372 - protein, 432 aa, Homo sapiens
MAAAMPLALLVLLLLGPGGWCLAEPPRDSLREELVITPLPSGDVAATFQFRTRWDSELQREGVSHYRLFPKALGQLISKYSLRELHLSFTQGFWRTRYWGPPFLQAPSGAELWVWFQDTVTDVDKSWKELSNVLSGIFCASLNFIDSTNTVTPTASFKPLGLANDTDHYFLRYAVLPREVVCTENLTPWKKLLPCSSKAGLSVLLKADRLFHTSYHSQAVHIRPVCRNARCTSISWELRQTLSVVFDAFITGQGKKDWSLFRMFSRTLTEPCPLASESRVYVDITTYNQDNETLEVHPPPTTTYQDVILGTRKTYAIYDLLDTAMINNSRNLNIQLKWKRPPENGYIHYQPAQDRLQPHLLEMLIQLPANSVTKVSIQFERALLKWTEYTPDPNHGFYVSPSVLSALVPSMVAAKPVDWEESPLFNSLLPWT

SEQ ID NO: 10373 - protein, 495 aa, Homo sapiens
MAAAMPLALLVLLLLGPGGWCLAEPPRDSLREELVITPLPSGDVAATFQFRTRWDSELQREGVSHYRLFPKALGQLISKYSLRELHLSFTQGFWRTRYWGPPFLQAPSGAELWVWFQDTVTDVDKSWKELSNVLSGIFCASLNFIDSTNTVTPTASFKPLGLANDTDHYFLRYAVLPREVVCTENLTPWKKLLPCSSKAGLSVLLKADRLFHTSYHSQAVHIRPVCRNARCTSISWELRQTLSVVFDAFITGQGKKDWSLFRMFSRTLTEPCPLASESRVYVDITTYNQDNETLEVHPPPTTTYQDVILGTRKTYAIYDLLDTAMINNSRNLNIQLKWKRPPENEAPPVPFLHAQRYVSGYGLQKGELSTLLYNTHPYRAFPVLLLDTVPWYLRLYVHTLTITSKGKENKPSYIHYQPAQDRLQPHLLEMLIQLPANSVTKVSIQFERALLKWTEYTPDPNHGFYVSPSVLSALVPSMVAAKPVDWEESPLFNSL

SEQ ID NO: 10374 - protein, 232 aa, Homo sapiens
MAAAMPLALLVLLLLGPGGWCLAEPPRDSLREELVITPLPSGDVAATFQFRTRWDSELQREGVSHYRLFPKALGQLISKYSLRELHLSFTQGFWRTRYWGPPFLQAPSGAELWVWFQDTVTDVDKSWKELSNVLSGIFCASLNFIDSTNTVTPTASFKPLGLANDTDHYFLRYAVLPREVVCTENLTPWKKLLPCSSKAGLSVLLKADRLFHTSYHSQAVHIRPVCRVSHGE

SEQ ID NO: 10375 - protein, 203 aa, Homo sapiens
MAAAMPLALLVLLLLGPGGWCLAEPPRDSLREELVITPLPSGDVAATFQFRTRWDSELQREGVSHYRLFPKALGQLISKYSLRELHLSFTQGFWRTRYWGPPFLQAPSGAELWVWFQDTVTDVDKSWKELSNVLSGIFCASLNFIDSTNTVTPTASFKPLGLANDTDHYFLRYAVLPREVVCTENLTPWKKLLPCSSKASLCC

SEQ ID NO: 10376 - protein, 242 aa, Homo sapiens
MAAAMPLALLVLLLLGPGGWCLAEPPRDSLREELVITPLPSGDVAATFQFRTRWDSELQREGVSHYRLFPKALGQLISKYSLRELHLSFTQGFWRTRYWGPPFLQAPSGAELWVWFQDTVTDVDKSWKELSNVLSGIFCASLNFIDSTNTVTPTASFKPLGLANDTDHYFLRYAVLPREVVCTENLTPWKKLLPCSSKGFSYLFPSPPGRPLCAAEGRSLVPHQLPLPGSAYPPCLQKCTLY

SEQ ID NO: 10377 - protein, 355 aa, Homo sapiens [sequence omitted]

SEQ ID NO: 10378 - protein, 198 aa, Homo sapiens
MAAAMPLALLVLLLLGPGGWCLAEPPRDSLREELVITPLPSGDVAATFQFRTRWDSELQREGVSHYRLFPKALGQLISKYSLRELHLSFTQGFWRTRYWGPPFLQAPSGAELWVWFQDTVTDVDKSWKELSNVLSGIFCASLNFIDSTNTVTPTASFKPLGLANGRPLCAAEGRSLVPHQLPLPGSAYPPCLQKCTLY

SEQ ID NO: 10379 - protein, 140 aa, Homo sapiens
MAAAMPLALLVLLLLGPGGWCLAEPPRDSLREELVITPLPSGDVAATFQFRTRWDSELQREGVSHYRLFPKALGQLISKYSLRELHLSFTQGFWRTRYWGPPFLQAPSGAELWVWFQDTVTEFSSQLWTLKEGAEVAPGQ

SEQ ID NO: 10380 - protein, 140 aa, Homo sapiens; identical to SEQ ID NO: 10379

SEQ ID NO: 10381 - protein, 140 aa, Homo sapiens; identical to SEQ ID NO: 10379

SEQ ID NO: 10382 - protein, 140 aa, Homo sapiens; identical to SEQ ID NO: 10379

SEQ ID NO: 10383 - protein, 123 aa, Homo sapiens
MAAAMPLALLVLLLLGPGGWCLAEPPRDSLREELVITPLPSGDVAATFQFRTRWDSELQREGVSHYRLFPKALGQLISKYSLRELHLSFTQGFWRTRYWGPPFLQAPSGAELWVWFQDTVTEH

SEQ ID NO: 10384 - protein, 123 aa, Homo sapiens; identical to SEQ ID NO: 10383

SEQ ID NO: 10385 - protein, 123 aa, Homo sapiens; identical to SEQ ID NO: 10383

SEQ ID NO: 10386 - protein, 183 aa, Homo sapiens
MAAAMPLALLVLLLLGPGGWCLAEPPRDSLREELVITPLPSGDVAATFQFRTRWDSELQREGVSHYRLFPKALGQLISKYSLRELHLSFTQGFWRTRYWGPPFLQAPSGAELWVWFQDTVTELVPLPDVLPNPHGALPPGFREPSLCGHHHLQPGQRDIRGAPTPDHYISGRHPRHSEDLCHL

SEQ ID NO: 10387 - protein, 316 aa, Homo sapiens
MAAAMPLALLVLLLLGPGGWCLAEPPRDSLREELVITPLPSGDVAATFQFRTRWDSELQREGVSHYRLFPKALGQLISKYSLRELHLSFTQGFWRTRYWGPPFLQAPSGAELWVWFQDTVTEPLSPSDTDHYFLRYAVLPREVVCTENLTPWKKLLPCSSKAGLSVLLKADRLFHTSYHSQAVHIRPVCRNARCTSISWELRQTLSVVFDAFITGQGKKDWSLFRMFSRTLTEPCPLASESRVYVDITTYNQDNETLEVHPPPTTTYQDVILGTRKTYAIYDLLDTAMINNSRNLNIQLKWKRPPENEAPPVPFLH

SEQ ID NO: 10388 - protein, 128 aa, Homo sapiens
MAAAMPLALLVLLLLGPGGWCLAEPPRDSLREELVITPLPSGDVAATFQFRTRWDSELQREGVSHYRLFPKALGQLISKYSLRELHLSFTQGFWRTRYWGPPFLQAPSGAELWVWFQDTVTEQASLCC

SEQ ID NO: 10389 - protein, 116 aa, Homo sapiens
MAAAMPLALLVLLLLGPGGWCLAEPPRDSLREELVITPLPSGDVAATFQFRTRWDSELQREGVSHYRLFPKALGQLISKYSLRELHLSFTQGFWRTRYWGPPFLQAPSGLAASCGL

SEQ ID NO: 10390 - protein, 393 aa, Homo sapiens
MAAAMPLALLVLLLLGPGGWCLAEPPRDSLREELVITPLPSGDVAATFQFRTRWDSELQREGVSHYRLFPKALGQLISKYSLRELHLSFTQGFWRTRYWGPPFLQAPSVWINLGRSSVMSSQGSSAPLSTSSTPPTQSLPLPPSNPWVWPMAGLSVLLKADRLFHTSYHSQAVHIRPVCRNARCTSISWELRQTLSVVFDAFITGQGKKDWSLFRMFSRTLTEPCPLASESRVYVDITTYNQDNETLEVHPPPTTTYQDVILGTRKTYAIYDLLDTAMINNSRNLNIQLKWKRPPENEAPPVPFLHAQRYVSGYGLQKGELSTLLYNTHPYRAFPVLLLDTVPWYLRLYVHTLTITSKGKENKPSYIHYQPAQDRLQPHLLEMLIQLPANSVT

SEQ ID NO: 10391 - protein, 191 aa, Homo sapiens
MAAAMPLALLVLLLLGPGGWCLAEPPRDSLREELVITPLPSGDVAATFQFRTRWDSELQREGVSHYRLFPKALGQLISKYSLRELHLSFTQGFWRTRYWGPPFLQAPSVWINLGRSSVMSSQGSSAPLSTSSTPPTQSLPLPPSNPWVWPMTLTTTFCAMLCCRGRWSAPKTSPPGRSSCPVVPRQASLCC

SEQ ID NO: 10392 - protein, 318 aa, Homo sapiens
MAAAMPLALLVLLLLGPGGWCLAEPPRDSLREELVITPLPSGDVAATFQFRTRWDSELQREGVWINLGRSSVMSSQGSSAPLSTSSTPPTQSLPLPPSNPWVWPMAGLSVLLKADRLFHTSYHSQAVHIRPVCRNARCTSISWELRQTLSVVFDAFITGQGKKDWSLFRMFSRTLTEPCPLASESRVYVDITTYNQDNETLEVHPPPTTTYQDVILGTRKTYAIYDLLDTAMINNSRNLNIQLKWKRPPENEAPPVPFLHAQRYVSGYGLQKGELSTLLYNTHPYRAFPVLLLDTVPWYLRLYVHTLTITSKGKENKP

SEQ ID NO: 10393 - protein, 171 aa, Homo sapiens
MAAAMPLALLVLLLLGPGGWCLAEPPRDSLREELVITPLPSGDVAATFQFRTRWDSELQREGVWINLGRSSVMSSQGSSAPLSTSSTPPTQSLPLPPSNPWVWPMTLTTTFCAMLCCRGRWSAPKTSPPGRSSCPVVPRPLCAAEGRSLVPHQLPLPGSAYPPCLQKCTLY

SEQ ID NO: 10394 - protein, 145 aa, Homo sapiens
MAAAMPLALLVLLLLGPGGWCLAEPPRDSLREELVITPLPSGDVAATFQFRTRWDSELQREGVWINLGRSSVMSSQGSSAPLSTSSTPPTQSLPLPPSNPWVWPMTLTTTFCAMLCCRGRWSAPKTSPPGRSSCPVVPRQASLCC

SEQ ID NO: 10395 - protein, 145 aa, Homo sapiens; identical to SEQ ID NO: 10394

SEQ ID NO: 10396 - protein, 18 aa, Homo sapiens
RWDSELQREGGLAASCGL

SEQ ID NO: 10397 - protein, 77 aa, Homo sapiens
SHYRLFPKALGQLISKYSLRELHLSFTQGFWRTRYWGPPFLQAPSGAELWVWFQDTVTEFSSQLWTLKEGAEVAPGQ

SEQ ID NO: 10398 - protein, 61 aa, Homo sapiens
  VARIANT 1: note = misc_feature - Xaa can be any naturally occurring amino acid
XLIQLPANSVTKVSIQFERALLKWTEYTPDPNHGFYVRWEHGPSLCFSVAHLSSAPLCPAW

SEQ ID NO: 10399 - protein, 78 aa, Homo sapiens
  VARIANT 1: note = misc_feature - Xaa can be any naturally occurring amino acid
XLQPHLLEMLIQLPANSVTKVSIQFERALLKWTEYTPDPNHGFYVSPSVLSALVPSMVAAKPVDWEESPLFNSLLPWT

SEQ ID NO: 10400 - protein, 532 aa, Homo sapiens
  VARIANT 1: note = misc_feature - Xaa can be any naturally occurring amino acid
XQLISKYSLRELHLSFTQGFWRTRYWGPPFLQAPSGAELWVWFQDTVTDVDKSWKELSNVLSGIFCASLNFIDSTNTVTPTASFKPLGLANDTDHYFLRYAVLPREVVCTENLTPWKKLLPCSSKAGLSVLLKADRLFHTSYHSQAVHIRPVCRNARCTSISWELRQTLSVVFDAFITGQGKKDWSLFRMFSRTLTEPCPLASESRVYVDITTYNQDNETLEVHPPPTTTYQDVILGTRKTYAIYDLLDTAMINNSRNLNIQLKWKRPPENEAPPVPFLHAQRYVSGYGLQKGELSTLLYNTHPYRAFPVLLLDTVPWYLRLYVHTLTITSKGKENKPSEDLSPEPGPQPALSCPLQVPQTLISQGYIHYQPAQDRLQPHLLEMLIQLPANSVTKVSIQFERALLKWTEYTPDPNHGFYVSPSVLSALVPSMVAAKPVDWEESPLFNSLFPVSDGSNYFVRLYTEPLLVNLPTPDFSMPYNVICLTCTVVAVCYGSFYNLLTRTFHIEEPRTGGLAKRLANLIRRARGVPPL

SEQ ID NO: 10401 - skipped

SEQ ID NO: 10402 - protein, 12 aa, Homo sapiens
  VARIANT 1: note = misc_feature - Xaa can be any naturally occurring amino acid
XWVWFQDTVTEH

SEQ ID NO: 10403 - protein, 128 aa, Homo sapiens
  VARIANT 1: note = misc_feature - Xaa can be any naturally occurring amino acid
XYAIYDLLDTAMINNSRNLNIQLKWKRPPENEAPPVPFLHAQRYVSGYGLQKGELSTLLYNTHPYRAFPVLLLDTVPWYLRLYVHTLTITSKGKENKPSEDLSPEPGPQPALSCPLQVPQTLISQGSS

SEQ ID NO: 10404 - protein, 136 aa, Homo sapiens
  VARIANT 1: note = misc_feature - Xaa can be any naturally occurring amino acid
XYQPAQDRLQPHLLEMLIQLPANSVTKVSIQFERALLKWTEYTPDPNHGFYVRFPVSDGSNYFVRLYTEPLLVNLPTPDFSMPYNVICLTCTVVAVCYGSFYNLLTRTFHIEEPRTGGLAKRLANLIRRARGVPPL

SEQ ID NO: 10405 - protein, 144 aa, Homo sapiens
  VARIANT 1: note = misc_feature - Xaa can be any naturally occurring amino acid
XYVSGYGLQKGELSTLLYNTHPYRAFPVLLLDTVPWYLRLYVHTLTITSKGKENKPSYIHYQPAQDRLQPHLLEMLIQLPANSVTKVSIQFERALLKWTEYTPDPNHGFYVSPSVLSALVPSMVAAKPVDWEESPLFNSLLPWT

SEQ ID NO: 10406 - protein, 213 aa, Homo sapiens
YNQDNETLEVHPPPTTTYQDVILGTRKTYAIYDLLDTAMINNSRNLNIQLKWKRPPENEAPPVPFLHAQRYVSGYGLQKGELSTLLYNTHPYRAFPVLLLDTVPWYLRLYVHTLTITSKGKENKPSYIHYQPAQDRLQPHLLEMLIQLPANSVTKVSIQFERALLKWTEYTPDPNHGFYVSPSVLSALVPSMVAAKPVDWEESPLFNSLLPWT

SEQ ID NO: 10407 - protein, 579 aa, Homo sapiens
MQICGSSVASVAAGTSFQVLGPVCWQQLDLKMAVRVLWGGLSLLRVLWCLLPQTGYVHPDEFFQSPEVMAEDILGVQAARPWEFYPSSSCRSVLFPLLISGSTFWLLRLWEELGPWPGLVSGYALLVGPRLLLTALSFALDGAVYHLAPPMGADRWNALALLSGSYVTLVFYTRTFSNTIEGLLFTWLLVLVSSHVTWGPTRKEPAPGPRWRSWLLGGIVAAGFFNRPTFLAFAVVPLYLWGTRGATNPGLKSLTREALVLLPGAALTAAVFVATDSWYFSSPATSRNLVLTPVNFLHYNLNPQNLARHGTHARLTHLAVNGFLLFGVLHAQALQAAWQRLQVGLQASAQMGLLRALGARSLLSSPRSYLLLLYFMPLALLSAFSHQEARFLIPLLVPLVLLCSPQTQPVPWKGTVVLFNALGALLFGCLHQGGLVPGLEYLEQVVHAPVLPSTPTHYTLLFTHTYMPPRHLLHLPGLGAPVEVVDMGGTEDWALCQTLKSFTRQPACQVAGGPWLCRLFVVTPGTTRRAVEKCSFPFKNETLLFPHLTLEDPPALSSLLSGAWRDHLSLHIVELGEET

SEQ ID NO: 10408 - protein, 92 aa, Homo sapiens
MQICGSSVASVAAGTSFQVLGPVCWQQLDLKMAVRVLWGGLSLLRVLWCLLPQTGYVHPDEFFQSPEVMAGPSPTPLRDSSSRGCWCWYPPM

SEQ ID NO: 10409 - protein, 49 aa, Homo sapiens
  VARIANT 1: note = misc_feature - Xaa can be any naturally occurring amino acid
XRVLWGGLSLLRVLWCLLPQTGYVHPDEFFQSPEVMAGSGRSWGRGLAW

SEQ ID NO: 10410 - protein, 805 aa, Homo sapiens
MAASGVPRGCDILIVYSPDAEEWCQYLQTLFLSSRQVRSQKILTHRLGPEASFSAEDLSLFLSTRCVVVLLSAELVQHFHKPALLPLLQRAFHPPHRVVRLLCGVRDSEEFLDFFPDWAHWQELTCDDEPETYVAAVKKAISEDSGCDSVTDTEPEDEKVVSYSKQQNLPTVTSPGNLMVVQPDRIRCGAETTVYVIVRCKLDDRVATEAEFSPEDSPSVRMEAKVENEYTISVKAPNLSSGNVSLKIYSGDLVVCETVISYYTDMEEIGNLLSNAANPVEFMCQAFKIVPYNTETLDKLLTESLKNNIPASGLHLFGINQLEEEDMMTNQRDEELPTLLHFAAKYGLKNLTALLLTCPGALQAYSVANKHGHYPNTIAEKHGFRDLRQFIDEYVETVDMLKSHIKEELMHGEEADAVYESMAHLSTDLLMKCSLNPGCDEDLYESMAAFVPAATEDLYVEMLQASTSNPIPGDGFSRATKDSMIRKFLEGNSMGMTNLERDQCHLGQEEDVYHTVDDDEAFSVDLASRPPVPVPRPETTAPGAHQLPDNEPYIFKVFAEKSQERPGNFYVSSESIRKGPPVRPWRDRPQSSIYDPFAGMKTPGQRQLITLQEQVKLGIVNVDEAVLHFKEWQLNQKKRSESFRFQQENLKRLRDSITRRQREKQKSGKQTDLEITVPIRHSQHLPAKVEFGVYESGPRKSVIPPRTELRRGDWKTDSTSSTASSTSNRSSTRSLLSVSSGMEGDNEDNEVPEVTRSRSPGPPQVDGTPTMSLERPPRVPPRAASQRPPTRETFHPPPPVPPRGR

SEQ ID NO: 10411 - protein, 404 aa, Homo sapiens
MRFFTSVACYGSCLFASELLIRCKDWLKGRPALFTALLACVLYLCEWTGAKHVPGSSYVEMLQASTSNPIPGDGFSRATKDSMIRKFLEGNSMGMTNLERDQCHLGQEEDVYHTVDDDEAFSVDLASRPPVPVPRPETTAPGAHQLPDNEPYIFKVFAEKSQERPGNFYVSSESIRKGPPVRPWRDRPQSSIYDPFAGMKTPGQRQLITLQEQVKLGIVNVDEAVLHFKEWQLNQKKRSESFRFQQENLKRLRDSITRRQREKQKSGKQTDLEITVPIRHSQHLPAKVEFGVYESGPRKSVIPPRTELRRGDWKTDSTSSTASSTSNRSSTRSLLSVSSGMEGDNEDNEVPEVTRSRSPGPPQVDGTPTMSLERPPRVPPRAASQRPPTRETFHPPPPVPPRGR

SEQ ID NO: 10412 - protein, 627 aa, Homo sapiens
MVVQPDRIRCGAETTVYVIVRCKLDDRVATEAEFSPEDSPSVRMEAKVENEYTISVKAPNLSSGNVSLKIYSGDLVVCETVISYYTDMEEIGNLLSNAANPVEFMCQAFKIVPYNTETLDKLLTESLKNNIPASGLHLFGINQLEEEDMMTNQRDEELPTLLHFAAKYGLKNLTALLLTCPGALQAYSVANKHGHYPNTIAEKHGFRDLRQFIDEYVETVDMLKSHIKEELMHGEEADAVYESMAHLSTDLLMKCSLNPGCDEDLYESMAAFVPAATEDLYVEMLQASTSNPIPGDGFSRATKDSMIRKFLEGNSMGMTNLERDQCHLGQEEDVYHTVDDDEAFSVDLASRPPVPVPRPETTAPGAHQLPDNEPYIFKVFAEKSQERPGNFYVSSESIRKGPPVRPWRDRPQSSIYDPFAGMKTPGQRQLITLQEQVKLGIVNVDEAVLHFKEWQLNQKKRSESFRFQQENLKRLRDSITRRQREKQKSGKQTDLEITVPIRHSQHLPAKVEFGVYESGPRKSVIPPRTELRRGDWKTDSTSSTASSTSNRSSTRSLLSVSSGMEGDNEDNEVPEVTRSRSPGPPQVDGTPTMSLERPPRVPPRAASQRPPTRETFHPPPPVPPRGR

SEQ ID NO: 10413 - protein, 173 aa, Homo sapiens
MLLAWVQAFLVSNMLLAEAYGSGGCFWDNGHLYREDQTSPAPGLRCLNWLDAQSGLASAPVSGAGNHSYCRNPDEDPRGPWCYVSGEAGVPEKRPCEDLRCPETTSQALPAFTTEIQEASEGPGADEVQVFAPANALPARSEAAAVQPVIGISQRVRMNSKEKKDLGTLGGRI

SEQ ID NO: 10414 - protein, 263 aa, Homo sapiens
MLLAWVQAFLVSNMLLAEAYGSGGCFWDNGHLYREDQTSPAPGLRCLNWLDAQSGLASAPVSGAGNHSYCRNPDEDPRGPWCYVSGEAGVPEKRPCEDLRCPETTSQALPAFTTEIQEASEGPGADEVQVFAPANALPARSEAAAVQPVIGISQRVRMNSKEKKDLGTLGYVLGITMMVIIIAIGAGIILGYSYKRGKDLKEQHDQKVCEREMQRITLPLSAFTNPTCEIVDEKTVVVHTSQTPVDPQEGTTPLMGQAGTPGA

SEQ ID NO: 10415 - protein, 234 aa, Homo sapiens
MLLAWVQAFLVSNMLLAEAYGSGGCFWDNGHLYREDQTSPAPGLRCLNWLDAQSGLASAPVSGAGNHSYCRNPDEDPRGPWCYVSGEAGVPEKRPCEDLRCPETTSQALPAFTTEIQEASEGPGADEVQVFAPANALPARSEAAAVQPVIGISQRVRMNSKEKKDLGTLGYVLGITMMVIIIAIGAGIILGYSYKRSVASLLGPLRRRGGRYTKSNFVAFLPKRKQDVENQLKM

SEQ ID NO: 10416 - protein, 145 aa, Homo sapiens [sequence omitted]

SEQ ID NO: 10417 - protein, 303 aa, Homo sapiens
MGRPLLLPLLPLLLPPAFLQPSGSTGSGPSYLYGVTQPKHLSASMGGSVEIPFSFYYPWELATAPDVRISWRRGHFHRQSFYSTRPPSIHKDYVNRLFLNWTEGQKSGFLRISNLQKQDQSVYFCRVELDTRSSGRQQWQSIEGTKLSITQAVTTTTQRPSSMTTTWRLSSTTTTTGLRVTQGKRRSDSWHISLETAVGVAVAVTVLGIMILGLICLLRWRRRKGQQRTKATTPAREPFQNTEEPYENIRNEGQNTDPKLNPKDDGIVYASLALSSSTSPRAPPSHRPLKSPQNETLYSVLKA

SEQ ID NO: 10418 - protein, 175 aa, Homo sapiens
MGRPLLLPLLPLLLPPAFLQPSGSTGSGPSYLYGVTQPKHLSASMGGSVEIPFSFYYPWELATAPDVRISWRRGHFHRQSFYSTRPPSIHKDYVNRLFLNWTEGQKSGFLRISNLQKQDQSVYFCRVELDTRSSGRQQWQSIEGTKLSITQGNPSKTQRSHMRISGMKDKIQIPS

SEQ ID NO: 10419 - protein, 166 aa, Homo sapiens
MGRPLLLPLLPLLLPPAFLQPSGSTGSGPSYLYGVTQPKHLSASMGGSVEIPFSFYYPWELATAPDVRISWRRGHFHRQSFYSTRPPSIHKDYVNRLFLNWTEGQKSGFLRISNLQKQDQSVYFCRVELDTRSSGRQQWQSIEGTKLSITQGQQRTKATTPAREPF

SEQ ID NO: 10420 - protein, 230 aa, Homo sapiens
MGRPLLLPLLPLLLPPAFLQPSGSTGSGPSYLYGVTQPKHLSASMGGSVEIPFSFYYPWELATAPDVRISWRRGHFHRQSFYSTRPPSIHKDYVNRLFLNWTEGQKSGFLRISNLQKQDQSVYFCRVELDTRSSGRQQWQSIEGTKLSITQGQQRTKATTPAREPFQNTEEPYENIRNEGQNTDPKLNPKDDGIVYASLALSSSTSPRAPPSHRPLKSPQNETLYSVLKA

SEQ ID NO: 10421 - protein, 226 aa, Homo sapiens
MGRPLLLPLLPLLLPPAFLQPSGSTGSGPSYLYGVTQPKHLSASMGGSVEIPFSFYYPWELATAPDVRISWRRGHFHRQSFYSTRPPSIHKDYVNRLFLNWTEGQKSGFLRISNLQKQDQSVYFCRVELDTRSSGRQQWQSIEGTKLSITQGQQRTKATTPAREPFQNTEEPYENIRNEGQNTDPKLNPKLHLTQSTSQPPSPQEPPERDPVLCLKGLTNGQPSQD

SEQ ID NO: 10422 - protein, 108 aa, Homo sapiens
MGRASYGGSPVGHQSSSDHPRAKTCRSPVRDGPRTLCGVPTVALSLHFLREASSGSRTCGRRTSLCTSAKSSWTYRSGRLSWQSIKGTHLTITQALRQPLHRAPLLPG

SEQ ID NO: 10423 - protein, 271 aa, Homo sapiens
MGRASYGGSPVGHQSSSDHPRAKTCRSPVRDGPRTLCGVPTVALSLHFLREASSGSRTCGRRTSLCTSAKSSWTYRSGRLSWQSIKGTHLTITQALRQPLHRAPLLPGQLCWSPRPLEKNKAMGRPLLLPLLLLLQPPAFLQPGLCEPALSELDRGSGERLPQDLKPAEGGPVCVFLPSRAGHPEIREAAVAVHQGDQTHHHPGCHNHHHLEAQQHNHHSRPQGHRKQRALRIMAPKSGHCHQGCIGCRCAQNCHFGTAVPPPPVVEEKER

SEQ ID NO: 10424 - protein, 46 aa, Homo sapiens
MGRPLLLPLLLLLQPPAFLQPEGQESGFLRISNLRKEDQSVYFCRV

SEQ ID NO: 10425 - protein, 121 aa, Homo sapiens
MGRPLLLPLLLLLQPPAFLQPGGSTGSGPSYLYGVTQPKHLSASMGGSVEIPFSFYYPWELAIVPNVRISWRRGHFHGQSFYSTRPPSIHKDYVNRLFLNWTEGQESGFLRISNLRKEDQS

SEQ ID NO: 10426 - protein, 127 aa, Homo sapiens
MGRPLLLPLLLLLQPPAFLQPGGSTGSGPSYLYGVTQPKHLSASMGGSVEIPFSFYYPWELAIVPNVRISWRRGHFHGQSFYSTRPPSIHKDYVNRLFLNWTEGQESGFLRISNLRKEDQSVYFCRV

SEQ ID NO: 10427 - protein, 127 aa, Homo sapiens; identical to SEQ ID NO: 10426

SEQ ID NO: 10428 - protein, 127 aa, Homo sapiens; identical to SEQ ID NO: 10426

SEQ ID NO: 10429 - protein, 127 aa, Homo sapiens; identical to SEQ ID NO: 10426

SEQ ID NO: 10430 - protein, 138 aa, Homo sapiens
MGRPLLLPLLLLLQPPAFLQPGGSTGSGPSYLYGVTQPKHLSASMGGSVEIPFSFYYPWELAIVPNVRISWRRGHFHGQSFYSTRPPSIHKDYVNRLFLNWTEGQESGFLRISNLRKEDQSVYFCRVELDTRRSGRQQ

SEQ ID NO: 10431 - protein, 227 aa, Homo sapiens
MGRPLLLPLLLLLQPPAFLQPGGSTGSGPSYLYGVTQPKHLSASMGGSVEIPFSFYYPWELAIVPNVRISWRRGHFHGQSFYSTRPPSIHKDYVNRLFLNWTEGQESGFLRISNLRKEDQSVYFCRVELDTRRSGRQQLQSIKGTKLTITQAVTTTTTWRPSSTTTIAGLRVTESKGHSESWHLSLDTAIRVALAVAVLKTVILGLLCLLLLWWRRRKGSRAPSSDF

SEQ ID NO: 10432 - protein, 227 aa, Homo sapiens; identical to SEQ ID NO: 10431

SEQ ID NO: 10433 - protein, 60 aa, Homo sapiens
MGRPLLLPLLLLLQPPAFLQPGLCEPALSELDRGSGERLPQDLKPAEGGPVCVFLPSRAG

SEQ ID NO: 10434 - protein, 116 aa, Homo sapiens
MGPKDHMVTSSFCCQSDGCNSAFLSVPLTNLTENGLMCPACTASFRDKCMGPMTHCTGKENHCVSLSGHVQAGIFKPRFAMRGCATESMCFTKPGAEVPTGTNVLFLHHIECTHSP

SEQ ID NO: 10435 - protein, 116 aa, Homo sapiens; identical to SEQ ID NO: 10434

SEQ ID NO: 10436 - protein, 116 aa, Homo sapiens; identical to SEQ ID NO: 10434

SEQ ID NO: 10437 - protein, 204 aa, Homo sapiens
MRLSRRPETFLLAFVLLCTLLGLGCPLHCEICTAAGSRCHGQMKTCSSDKDTCVLLVGKATSKGKELVHTYKGCIRSQDCYSGVISTTMGPKDHMVTSSFCCQSDGCNSAFLSVPLTNLTENGLMCPACTASFRDKCMGPMTHCTGKENHCVSLSGHVQAGIFKPRFAMRGCATESMCFTKPGAEVPTGTNVLFLHHIECTHSP

SEQ ID NO: 10438 - protein, 228 aa, Homo sapiens
MWVQTHPSSASYKSWGPGTADTHTMRLSRRPETFLLAFVLLCTLLGLGCPLHCEICTAAGSRCHGQMKTCSSDKDTCVLLVGKATSKGKELVHTYKGCIRSQDCYSGVISTTMGPKDHMVTSSFCCQSDGCNSAFLSVPLTNLTENGLMCPACTASFRDKCMGPMTHCTGKENHCVSLSGHVQAGIFKPRFAMRGCATESMCFTKPGAEVPTGTNVLFLHHIECTHSP

SEQ ID NO: 10439 - protein, 146 aa, Homo sapiens
MRLLQLLFRASPATLLLVLCLQLGANKAQDNTRKIIIKNFDIPKSVRPNDEVTAVLAVQTELKECMVVKTYLISSIPLQGAFNYKYTACLCDDNPKTFYWDFYTNRTVQIAAVVDVIRELGICPDDAAVIPIKNNRFYTIEILKVE

SEQ ID NO: 10440 - protein, 118 aa, Homo sapiens
MERGVKNKQDFMDLSICTREKLAHVRNCKTGSSGIPVKLVTNLFNLDFPQDWQLYQYHVTYIPDLASRRLRIALLYSHSELSNKAKAFDGAILFLSQKLEEKVTELSSETQRGETIKM

SEQ ID NO: 10441 - protein, 453 aa, Homo sapiens
MERGVKNKQDFMDLSICTREKLAHVRNCKTGSSGIPVKLVTNLFNLDFPQDWQLYQYHVTYIPDLASRRLRIALLYSHSELSNKAKAFDGAILFLSQKLEEKVTELSSETQRGETIKMTITLKRELPSSSPVCIQVFNIIFRKILKKLSMYQIGRNFYNPSEPMEIPQHKLSLWPGFAISVSYFERKLLFSADVSYKVLRNETVLEFMTALCQRTGLSCFTQTCEKQLIGLIVLTRYNNRTYSIDDIDWSVKPTHTFQKRDGTEITYVDYYKQQYDITVSDLNQPMLVSLLKKKRNDNSEAQLAHLIPELCFLTGLTDQATSDFQLMKAVAEKTRLSPSGRQQRLARLVDNIQRNTNARFELETWGLHFGSQISLTGRIVPSEKILMQDHICQPVSAADWSKDIRTCKILNAQSLNTWLILCSDRTEYVAESFLNCLRRVAGSMGFNVDYPKM

SEQ ID NO: 10442 - protein, 203 aa, Homo sapiens
MGMLFFVGIRKVILFLLTPNSAGALNKWYKYNHDLPARIIVYRAGVGDGQLKTLIEYEVPQLLSSVAESSSNTSSRLSVIVVRKKCMPRFFTEMNRTVQNPPLGTVVDSEATRNEWYDFYLISQVACRGTVSPTYYNVIYDDNGLKPDHMQRLTFKLCHLYYNWPGIVSVPAPCQYAHKLTFLVAQSIHKEPSLELANHLFYL

SEQ ID NO: 10443 - protein, 495 aa, Homo sapiens
MGPRSVDLSNNEASSSNGFLGTSRISTNDKYGISSGDAGSTFMERGVKNKQDFMDLSICTREKLAHVRNCKTGSSGIPVKLVTNLFNLDFPQDWQLYQYHVTYIPDLASRRLRIALLYSHSELSNKAKAFDGAILFLSQKLEEKVTELSSETQRGETIKMTITLKRELPSSSPVCIQVFNIIFRKILKKLSMYQIGRNFYNPSEPMEIPQHKLSLWPGFAISVSYFERKLLFSADVSYKVLRNETVLEFMTALCQRTGLSCFTQTCEKQLIGLIVLTRYNNRTYSIDDIDWSVKPTHTFQKRDGTEITYVDYYKQQYDITVSDLNQPMLVSLLKKKRNDNSEAQLAHLIPELCFLTGLTDQATSDFQLMKAVAEKTRLSPSGRQQRLARLVDNIQRNTNARFELETWGLHFGSQISLTGRIVPSEKILMQDHICQPVSAADWSKDIRTCKILNAQSLNTWLILCSDRTEYVAESFLNCLRRVAGSMGFNVDYPKM

SEQ ID NO: 10444 - protein, 852 aa, Homo sapiens
MSGRARVKARGIARSPSATEVGRIQASPLPRSVDLSNNEASSSNGFLGTSRISTNDKYGISSGDAGSTFMERGVKNKQDFMDLSICTREKLAHVRNCKTGSSGIPVKLVTNLFNLDFPQDWQLYQYHVTYIPDLASRRLRIALLYSHSELSNKAKAFDGAILFLSQKLEEKVTELSSETQRGETIKMTITLKRELPSSSPVCIQVFNIIFRKILKKLSMYQIGRNFYNPSEPMEIPQHKLSLWPGFAISVSYFERKLLFSADVSYKVLRNETVLEFMTALCQRTGLSCFTQTCEKQLIGLIVLTRYNNRTYSIDDIDWSVKPTHTFQKRDGTEITYVDYYKQQYDITVSDLNQPMLVSLLKKKRNDNSEAQLAHLIPELCFLTGLTDQATSDFQLMKAVAEKTRLSPSGRQQRLARLVDNIQRNTNARFELETWGLHFGSQISLTGRIVPSEKILMQDHICQPVSAADWSKDIRTCKILNAQSLNTWLILCSDRTEYVAESFLNCLRRVAGSMGFNVDYPKIIKVQENPAAFVRAIQQYVDPDVQLVMCILPSNQKTYYDSIKKYLSSDCPVPSQCVLARTLNKQGMMMSIATKIAMQMTCKLGGELWAVEIPLKSLMVVGIDVCKDALSKDVMVVGCVASVNPRITRWFSRCILQRTMTDVADCLKVFMTGALNKWYKYNHDLPARIIVYRAGVGDGQLKTLIEYEVPQLLSSVAESSSNTSSRLSVIVVRKKCMPRFFTEMNRTVQNPPLGTVVDSEATRNEWYDFYLISQVACRGTVSPTYYNVIYDDNGLKPDHMQRLTFKLCHLYYNWPGIVSVPAPCQYAHKLTFLVAQSIHKEPSLELANHLFYL

SEQ ID NO: 10445 - protein, 181 aa, Homo sapiens
MRRRRAAVAAGFCASFLLGSVLNVLFAPGSEPPRPGQSPEPSPAPGPGRRGGRGELARQIRARYEEAGPRLPAQAPPARARAWAAPRFATCPARSTWAQATPRPCTGSACPAVPRWRSRRWTLAATIWAAACASSGYGGAAIGWRPTSCLRRWCCWSGCGTPTCCSSMATATRTARTSQTP

SEQ ID NO: 10446 - protein, 493 aa, Homo sapiens
MRRRRAAVAAGFCASFLLGSVLNVLFAPGSEPPRPGQSPEPSPAPGPGRRGGRGELARQIRARYEEVQRYSRGGPGPGAGRPERRRLMDLAPGGPGLPRPRPPWARPLSDGAPGWPPAPGPGSPGPGPRLGCAALRNVSGAQYMGSGYTKAVYRVRLPGGAAVALKAVDFSGHDLGSCVREFGVRRGCYRLAAHKLLKEMVLLERLRHPNVLQLYGYCYQDSEDIPDTLTTITELGAPVEMIQLLQTSWEDRFRICLSLGRLLHHLAHSPLGSVTLLDFRPRQFVLVDGELKVTDLDDARVEETPCAGSTDCILEFPARNFTLPCSAQGWCEGMNEKRNLYNAYRFFFTYLLPHSAPPSLRPLLDSIVNATGELAWGVDETLAQLEKVLHLYRSGQYLQNSTASSSTEYQCIPDSTIPQEDYRCWPSYHHGSCLLSVFNLAEAVDVCESHAQCRAFVVTNQTTWTGRQLVFFKTGWSQVVPDPNKTTYVKASG

SEQ ID NO: 10447 - protein, 4074 aa, Homo sapiens
MTAWLISLMSIEVLLLAVRHLSLHIEPEEGSLAGGTWITVIFDGLELGVLYPNNGSQLEIHLVNVNMVVPALRSVPCDVFPVFLDLPVVTCRTRSVLSEAHEGLYFLEAYFGGQLVSSPNPGPRDSCTFKFSKAQTPIVHQVYPPSGVPGKLIHVYGWIITGRLETFDFDAEYIDSPVILEAQGDKWVTPCSLINRQMGSCYPIQEDHGLGTLQCHVEGDYIGSQNVSFSVFNKGKSMVHKKAWLISAKQDLFLYQTHSEILSVFPETGSLGGRTNITITGDFFDNSAQVTIAGIPCDIRHVSPRKIECTTRAPGKDVRLTTPQPGNRGLLFEVGDAVEGLELTEATPGYRWQIVPNASSPFGFWSQEGQPFRARLSGFFVAPETNNYTFWIQADSQASLHFSWSEEPRTKVKVASISVGTADWFDSWEQNRDEGTWQQKTPKLELLGGAMYYLEAEHHGIAPSRGMRIGVQIHNTWLNPDVVTTYLREKHQIRVRAQRLPEVQVLNVSGRGNFFLTWDNVSSQPIPANATAHLIQTTIEELLAVKCKLEPLWSNILLRLGFERGPEVSNSDGDLTSGTEPFCGRFSLRQPRHLVLTPPAAQKGYRLDQYTHLCLAYKGHMNKILKMIVSFTIGFQNMVKNTTCDWSLTRTSPESWQFDCTDLWETCVRCFGDLQPPPANSPVLVHQINLLPLAQETGLFYVDEIIIADTNVTVSQADSGTARPGGNLVESVSVVGSPPVYSVTSWLAGCGTELPLITARSVPTEGTEEGSGLVLVTTQRRQRTSPPLGGHFRIQLPNTVISDVPVQISAHHLHQLLQNNADDFTSRYLNASDFTVKEDLYTCYEHVWTLSWSTQIGDLPNFIRVSDENLTGVNPAAATRVVYDGGVFLGPIFGDMLATANQHTQVVVRVNDVPAHCPGSCSFQYLQGSTPCVHSVWYSIDGDINLMIYITGTGFSGDSQFLQVTVNKTSCKVIFSNQTNVVCQTDLLPVGMHRILMLVRPSGLAISATGEDLFLNVKPRLDMVEPSRAADIGGLWATIRGSSLEGVSLILFGSYSCAINVATSNSSRIQCKVPPRGKDGRIVNVTVIRGDYSAVLPRAFTYVSSLNPVIVTLSRNISNIAGGETLVIGVARLMNYTDLDVEVHVQDALAPVHTQSAWGLEVALPPLPAGLHRISVSINGVSIHSQGVDLHIQYLTEVFSIEPCCGSLLGGTILSISGIGFSRDPALVWVLVGNRSCDIVNLTEASIWCETLPAPQIPDAGAPTVPAAVEVWAGNRFFARGPSPSLVGKGFTFMYEAAATPVVTAMQGEITNSSLSLHVGGSNLSNSVILLGNLNCDVETQSFQGNVSLSGCSIPLHSLEAGIYPLQVRQKQMGFANMSVVLQQFAVMPRIMAIFPSQGSACGGTILTVRGLLLNSRRRSVRVDLSGPFTCVILSLGDHTILCQVSLEGDPLPGASFSLNVTVLVNGLTSECQGNCTLFIREEASPVMDALSTNTSGSLTTVLIRGQRLATTADEPMVFVDDQLPCNVTFFNASHVVCQTRDLAPGPHYLSVFYTRNGYACSGNVSRHFYIMPQVFHYFPKNFSLHGGSLLTIEGTGLRGQNTTSVYIDQQTCLTVNIGAELIRCIVPTGNGSVALEIEVDGLWYHIGVIGYNKAFTPELISISQSDDILTFAVAQISGAANIDIFIGMSPCVGVSGNHTVLQCVVPSLPAGEYHVRGYDCIRGWASSALVFTSRVIITAVTENFGCLGGRLVHVFGAGFSPGNVSAAVCGAPCRVLANATVSAFSCLVLPLDVSLAFLCGLKREEDSCEAARHTYVQCDLTVAMATEQLLESWPYLYICEESSQCLFVPDHWAESMFPSFSGLFISPKLERDEVLIYNSSCNITMETEAEMECETPNQPITVKITEIRKRWGQNTQGNFSLQFCRRWSRTHSWFPERLPQDGDNVTVENGQLLLLDTNTSILNLLHIKGGKLIFMAPGPIELRAHAILVSDGGELRIGSEDKPFQGRAQITLYGSSYSTPFFPYGVKFLAVRNGTLSLHGSLPEVIVTCLRATAHALDTVLALEDAVDWNPGDEVVIISGTGVKGAKPMEEIVTVETVQDTDLYLKSPLRYSHNFTENWVAGEHHILKATVALLSRSITIQGNLTNEREKLLVSCQEANAPEGNLQHCLYSMSEKMLGSRDMGARVIVQSFPEEPSQVQLKGVQFQVLGQAFHKHLSSLTLVGAMRESFIQGCTVRNSFSRGLSMCGTLGLKVDSNVFYNILGHALLVGTCTEMRYISWEAIHGRKDDWSGHGNIIRNNVIIQVSGAEGLSNPEMLTPSGIYICSPTNVIEGNRVCGAGYGYFFHLMTNQTSQAPLLSFTQNIAHSCTRYGLFVYPKFQPPWDNVTGTTLFQSFTVWESAGGAQIFRSSNLRLKNFKVYSCRDFGIDVLESDANTSVTDSLLLGHFAHKGSLCMSSGIKTPKRWELMVSNTTFVNFDLINCVAIRTCSDCSQGQGGFTVKTSQLKFTNSSNLVAFPFPHAAILEDLDGSLSGKNRSHILASMETLSASCLVNSSFGRVVHGSACGGGVLFHRMSIGLANTPEVSYDLTMTDSRNKTTTVNYVRDTLSNPRGWMALLLDQETYSLQSENLWINRSLQYSATFDNFAPGNYLLLVHTDLPPYPDILLRCGSRVGLSFPFLPSPGQNQGCDWFFNSQLRQLTYLVSGEGQVQVILRVKEGMPPTISASTSAPESALKWSLPETWQGVEEGWGGYNNTIPGPGDDVLILPNRTVLVDTDLPFFKGLYVMGTLDFPVDRSNVLSVACMVIAGGELKVGTLENPLEKEQKLLILLRASEGVFCDRMNGIHIDPGTIGVYGKVHLYSAYPKNSWTHLGADIASGNERIIVEDAVDWRPHDKIVLSSSSYEPHEAEVLTVKEVKGHHVRIYERLKHRHIGSVHVTEDGRHIRLAAEVGLLTRNIQIQPDVSCRGRLFVGSFRKSSREEFSGVLQLLNVEIQNFGSPLYSSVEFSNVSAGSWIISSTLHQSCGGGIHAAASHGVLLNDNIVFGTAGHGIDLEGQAYTVTNNLVVLMTQPAWSTIWVAGIKVNQVKDINLHGNVVAGSERLGFHIRGHKCSSCELLWSDNVAHSSLHGLHLYKESGLDNCTRISGFLAFKNFDYGAMLHVENSVEIENITLVDNTIGLLAVVYVFSAPQNSVKKVQIVLRNSVIVATSSSFDCIQDKVKPHSANLTSTDRAPSNPRGGRIGILWPVFTSEPNQWPQEPWHKVRNDHSISGIMKLQDVTFSSFVKSCYSDDLDVCILPNAENSGIMHPITAERTRMLKIKDKNKFYFPSLQPRKDLGKVVCPELDCASPRKYLFKDLDGRALGLPPPVSVFPKTEAEWTASFFNAGTFREEQKCTYQFLMQGFICKQTDQVVLILDSADAIWAIQKLYPVVSVTSGFVDVFSSVNANIPCSTSGSVSTFYSILPIRQITKVCFMDQTPQVLRFFLLGNKSTSKLLLAVFYHELQSPHVFLGESFIPPTLVQSASLLLNESIGANYFNIMDNLLYVVLQGEEPIEIRSGVSIHLALTVMVSVLEKGWEIVILERLTNFLQIGQNQIRFIHEMPGHEETLKAIADSRAKRKRNCPTVTCTSHYRRVGQRRPLMMEMNSHRASPPMTVETISKVIVIEIGDSPTVRSTGMISSLSSNKLQNLAHRVITAQQTGVLENVLNMTIGALLVTQSKGVIGYGNTSSFKTGNLIYIRPYALSILVQPSDGEVGNELPVQPQLVFLDEQNRRVESLGPPSEPWTISASLEGASDSVLKGCTQAETQDGYVSFYNLAVLISGSNWHFIFTVTSPPGVNFTARSKPFAVLPVTRKEKSTIILAASLSSVASWLALSCLVCCWLKRSKSRKTKPEEIPESQTNNQNIHIHISSKRRESQGPKKEDTVVGEDMRMKVMLGKVNQCPHQLMNGVSRRKVSRHIVREEEAAVPAPGTTGITSHGHICAPGAPAQQVYLQETGNWKEGQEQLLRYQLAGQNQLLLLCPDFRQERQQLPGQSRLSKQSGSLGLSQEKKASCGATEAFCLHSVHPETIQEQL

SEQ ID NO: 10448 - protein, 3396 aa, Homo sapiens
MTAWLISLMSIEVLLLAVRHLSLHIEPEEGSLAGGTWITVIFDGLELGVLYPNNGSQLEIHLVNVNMVVPALRSVPCDVFPVFLDLPVVTCRTRSVLSEAHEGLYFLEAYFGGQLVSSPNPGPRDSCTFKFSKAQTPIVHQVYPPSGVPGKLIHVYGWIITGRLETFDFDAEYIDSPVILEAQGDKWVTPCSLINRQMGSCYPIQEDHGLGTLQCHVEGDYIGSQNVSFSVFNKGKSMVHKKAWLISAKQDLFLYQTHSEILSVFPETGSLGGRTNITITGDFFDNSAQVTIAGIPCDIRHVSPRKIECTTRAPGKDVRLTTPQPGNRGLLFEVGDAVEGLELTEATPGYRWQIVPNASSPFGFWSQEGQPFRARLSGFFVAPETNNYTFWIQADSQASLHFSWSEEPRTKVKVASISVGTADWFDSWEQNRDEGTWQQKTPKLELLGGAMYYLEAEHHGIAPSRGMRIGVQIHNTWLNPDVVTTYLREKHQIRVRAQRLPEVQVLNVSGRGNFFLTWDNVSSQPIPANATAHLIQTTIEELLAVKCKLEPLWSNILLRLGFERGPEVSNSDGDLTSGTEPFCGRFSLRQPRHLVLTPPAAQKGYRLDQYTHLCLAYKGHMNKILKMIVSFTIGFQNMVKNTTCDWSLTRTSPESWQFDCTDLWETCVRCFGDLQPPPANSPVLVHQINLLPLAQETGLFYVDEIIIADTNVTVSQADSGTARPGGNLVESVSVVGSPPVYSVTSWLAGCGTELPLITARSVPTEGTEEGSGLVLVTTQRRQRTSPPLGGHFRIQLPNTVISDVPVQISAHHLHQLLQNNADDFTSRYLNASDFTVKEDLYTCYEHVWTLSWSTQIGDLPNFIRVSDENLTGVNPAAATRVVYDGGVFLGPIFGDMLATANQHTQVVVRVNDVPAHCPGSCSFQYLQGSTPCVHSVWYSIDGDINLMIYITGTGFSGDSQFLQVTVNKTSCKVIFSNQTNVVCQTDLLPVGMHRILMLVRPSGLAISATGEDLFLNVKPRLDMVEPSRAADIGGLWATIRGSSLEGVSLILFGSYSCAINVATSNSSRIQCKVPPRGKDGRIVNVTVIRGDYSAVLPRAFTYVSSLNPVIVTLSRNISNIAGGETLVIGVARLMNYTDLDVEVHVQDALAPVHTQSAWGLEVALPPLPAGLHRISVSINGVSIHSQGVDLHIQYLTEVFSIEPCCGSLLGGTILSISGIGFSRDPALVWVLVGNRSCDIVNLTEASIWCETLPAPQIPDAGAPTVPAAVEVWAGNRFFARGPSPSLVGKGFTFMYEAAATPVVTAMQGEITNSSLSLHVGGSNLSNSVILLGNLNCDVETQSFQGNVSLSGCSIPLHSLEAGIYPLQVRQKQMGFANMSVVLQQFAVMPRIMAIFPSQGSACGGTILTVRGLLLNSRRRSVRVDLSGPFTCVILSLGDHTILCQVSLEGDPLPGASFSLNVTVLVNGLTSECQGNCTLFIREEASPVMDALSTNTSGSLTTVLIRGQRLATTADEPMVFVDDQLPCNVTFFNASHVVCQTRDLAPGPHYLSVFYTRNGYACSGNVSRHFYIMPQVFHYFPKNFSLHGGSLLTIEGTGLRGQNTTSVYIDQQTCLTVNIGAELIRCIVPTGNGSVALEIEVDGLWYHIGVIGYNKAFTPELISISQSDDILTFAVAQISGAANIDIFIGMSPCVGVSGNHTVLQCVVPSLPAGEYHVRGYDCIRGWASSALVFTSRVIITAVTENFGCLGGRLVHVFGAGFSPGNVSAAVCGAPCRVLANATVSAFSCLVLPLDVSLAFLCGLKREEDSCEAARHTYVQCDLTVAMATEQLLESWPYLYICEESSQCLFVPDHWAESMFPSFSGLFISPKLERDEVLIYNSSCNITMETEAEMECETPNQPITVKITEIRKRWGQNTQGNFSLQFCRRWSRTHSWFPERLPQDGDNVTVENGQLLLLDTNTSILNLLHIKGGKLIFMAPGPIELRAHAILVSDGGELRIGSEDKPFQGRAQITLYGSSYSTPFFPYGVKFLAVRNGTLSLHGSLPEVIVTCLRATAHALDTVLALEDAVDWNPGDEVVIISGTGVKGAKPMEEIVTVETVQDTDLYLKSPLRYSHNFTENWVAGEHHILKATVALLSRSITIQGNLTNEREKLLVSCQEANAPEGNLQHCLYSMSEKMLGSRDMGARVIVQSFPEEPSQVQLKGVQFQVLGQAFHKHLSSLTLVGAMRESFIQGCTVRNSFSRGLSMCGTLGLKVDSNVFYNILGHALLVGTCTEMRYISWEAIHGRKDDWSGHGNIIRNNVIIQVSGAEGLSNPEMLTPSGIYICSPTNVIEGNRVCGAGYGYFFHLMTNQTSQAPLLSFTQNIAHSCTRYGLFVYPKFQPPWDNVTGTTLFQSFTVWESAGGAQIFRSSNLRLKNFKVYSCRDFGIDVLESDANTSVTDSLLLGHFAHKGSLCMSSGIKTPKRWELMVSNTTFVNFDLINCVAIRTCSDCSQGQGGFTVKTSQLKFTNSSNLVAFPFPHAAILEDLDGSLSGKNRSHILASMETLSASCLVNSSFGRVVHGSACGGGVLFHRMSIGLANTPEVSYDLTMTDSRNKTTTVNYVRDTLSNPRGWMALLLDQETYSLQSENLWINRSLQYSATFDNFAPGNYLLLVHTDLPPYPDILLRCGSRVGLSFPFLPSPGQNQGCDWFFNSQLRQLTYLVSGEGQVQVILRVKEGMPPTISASTSAPESALKWSLPETWQGVEEGWGGYNNTIPGPGDDVLILPNRTVLVDTDLPFFKGLYVMGTLDFPVDRSNVLSVACMVIAGGELKVGTLENPLEKEQKLLILLRASEGVFCDRMNGIHIDPGTIGVYGKVHLYSAYPKNSWTHLGADIASGNERIIVEDAVDWRPHDKIVLSSSSYEPHEAEVLTVKEVKGHHVRIYERLKHRHIGSVHVTEDGRHIRLAAEVGLLTRNIQIQPDVSCRGRLFVGSFRKSSREEFSGVLQLLNVEIQNFGSPLYSSVEFSNVSAGSWIISSTLHQSCGGGIHAAASHGVLLNDNIVFGTAGHGIDLEGQAYTVTNNLVVLMTQPAWSTIWVAGIKVNQVKDINLHGNVVAGSERLGFHIRGHKCSSCELLWSDNVAHSSLHGLHLYKESGLDNCTRISGFLAFKNFDYGAMLHVENSVEIENITLVDNTIGLLAVVYVFSAPQNSVKKVQIVLRNSVIVATSSSFDCIQDKVKPHSANLTSTDRAPSNPRGGRIGILWPVFTSEPNQWPQEPWHKVRNDHSISGIMKLQDVTFSSFVKSCYSDDLDVCILPNAENSGIMHPITAERTRMLKIKDKNKFYFPSLQPRKDLGKVVCPELDCASPRKYLFKDLDGRALGLPPPVSVFPKTEAEWTASFFNAVTTEQALKISE

SEQ ID NO: 10449 - protein, 440 aa, Homo sapiens
MHKSSSIWGDAPPTPQPKCADFQSANLFEGTDLKVQFLLFVPSNPSCGQLVEGSSDLQNSGFNATLGTKLIIHGFRVLGTKPSWIDTFIRTLLRATNANVIAVDWIYGSTGVYFSAVKNVIKLSLEISLFLNKLLVLGVSESSIHIIGVSLGAHVGGMVGQLFGGQLGQITGLDPAGPEYTRASVEERLDAGDALFVEAIHTDTDNLGIRIPVGHVDYFVNGGQDQPGCPTFFYAGYSYLICDHMRAVHLYISALENSCPLMAFPCASYKAFLAGRCLDCFNPFLLSCPRIGLVEQGGVKIEPLPKEVKVYLLTTSSAPYCMHHSLVEFHLKELRNKDTNIEVTFLSSNITSSSKITIPKQQRYGKGIIAHATPQCQINQVKFKFQSSNRVWKKDRTTIIGKFCTALLPVNDREKMVCLPEPVNLQASVTVSCDLKIACV

SEQ ID NO: 10450 - protein, 456 aa, Homo sapiens
MPPGPWESCFWVGGLILWLSVGSSGDAPPTPQPKCADFQSANLFEGTDLKVQFLLFVPSNPSCGQLVEGSSDLQNSGFNATLGTKLIIHGFRVLGTKPSWIDTFIRTLLRATNANVIAVDWIYGSTGVYFSAVKNVIKLSLEISLFLNKLLVLGVSESSIHIIGVSLGAHVGGMVGQLFGGQLGQITGLDPAGPEYTRASVEERLDAGDALFVEAIHTDTDNLGIRIPVGHVDYFVNGGQDQPGCPTFFYAGYSYLICDHMRAVHLYISALENSCPLMAFPCASYKAFLAGRCLDCFNPFLLSCPRIGLVEQGGVKIEPLPKEVKVYLLTTSSAPYCMHHSLVEFHLKELRNKDTNIEVTFLSSNITSSSKITIPKQQRYGKGIIAHATPQCQINQVKFKFQSSNRVWKKDRTTIIGKFCTALLPVNDREKMVCLPEPVNLQASVTVSCDLKIACV

SEQ ID NO: 10451 - protein, 440 aa, Homo sapiens
MPPGPWESCFWVGGLILWLSVGSSGDAPPTPQPKCADFQSANLFEGTDLKVQFLLFVPSNPSCGQLVEGSSDLQNSGFNATLGTKLIIHGFRVLGTKPSWIDTFIRTLLRATNANVIAVDWIYGSTGVYFSAVKNVLGVSESSIHIIGVSLGAHVGGMVGQLFGGQLGQITGLDPAGPEYTRASVEERLDAGDALFVEAIHTDTDNLGIRIPVGHVDYFVNGGQDQPGCPTFFYAGYSYLICDHMRAVHLYISALENSCPLMAFPCASYKAFLAGRCLDCFNPFLLSCPRIGLVEQGGVKIEPLPKEVKVYLLTTSSAPYCMHHSLVEFHLKELRNKDTNIEVTFLSSNITSSSKITIPKQQRYGKGIIAHATPQCQINQVKFKFQSSNRVWKKDRTTIIGKFCTALLPVNDREKMVCLPEPVNLQASVTVSCDLKIACV

SEQ ID NO: 10452 - protein, 283 aa, Homo sapiens
MVGQLFGGQLGQITGLDPAGPEYTRASVEERLDAGDALFVEAIHTDTDNLGIRIPVGHVDYFVNGGQDQPGCPTFFYAGYSYLICDHMRAVHLYISALENSCPLMAFPCASYKAFLAGRCLDCFNPFLLSCPRIGLVEQGGVKIEPLPKEVKVYLLTTSSAPYCMHHSLVEFHLKELRNKDTNIEVTFLSSNITSSSKITIPKQQRYGKGIIAHATPQCQINQVKFKFQSSNRVWKKDRTTIIGKFCTALLPVNDREKMVCLPEPVNLQASVTVSCDLKIACV

SEQ ID NO: 10453 - protein, 224 aa, Homo sapiens
NVIKLSLEISLFLNKLLVLGVSESSIHIIGVSLGAHVGGMVGQLFGGQLGQITGLDPAGPEYTRASVEERLDAGDALFVEAIHTDTDNLGIRIPVGHVDYFVNGGQDQPGCPTFFYAGYSYLICDHMRAVHLYISALENSCPLMAFPCASYKAFLAGRCLDCFNPFLLSCPRIGLVEQGGVKIEPLPKEVKVYLLTTSSAPYCNAFQLLTVAPNHGISLKLGCW

SEQ ID NO: 10454 - protein, 165 aa, Homo sapiens
MGPLPVCLPIMLLLLLPSLLLLLLLPGPGSGEASRILRVHRRGILELAGTVGCVGPRTPIAYMKYGCFCGLGGHGQPRDAIDWCCHGHDCCYTRAEEAGCSPKTERYSWQCVNQSVLCGPAENKCQELLCKCDQEIANCLAQTEYNLKYLFYPQFLCEPDSPKCD

SEQ ID NO: 10455 - protein, 130 aa, Homo sapiens
MGPLPVCLPIMLLLLLPSLLLLLLLPGPGSGEASRILRVHRRGILELAGTVGCVGPRTPIAYMKYGCFCGLGGHGQPRDAIDWCCHGHDCCYTRAEEAGCSPKTERYSWQCVNQSVLCVLLCHPGWSAVV

SEQ ID NO: 10456 - protein, 70 aa, Homo sapiens
MALLSRPALTLLLLLMAAVVRCQEQAQTTDWRATLKTIRNGVHKIDTYLNAALDLLGGEDGLCQYKCSDA

SEQ ID NO: 10457 - protein, 187 aa, Homo sapiens
MALLSRPALTLLLLLMAAVVRCQEQAQTTDWRATLKTIRNGVHKIDTYLNAALDLLGGEDGLCQYKCSDGSKPFPRYGYKPSPPNGCGSPLFGLNIGIPSLTKCCNQHDRCYETCGKSKNDCDEEFQYCLSKICRDVQKTLGLTQHVQACETTVELLFDSVIHLGCKPYLDSQRAACRCHYEEKTDL

SEQ ID NO: 10458 - protein, 189 aa, Homo sapiens
MALLSRPALTLLLLLMAAVVRCQEQAQTTDWRATLKTIRNGVHKIDTYLNAALDLLGGEDGLCQYKCSDGSKPFPRYGYKPSPPNGCGSPLFGVHLNIGIPSLTKCCNQHDRCYETCGKSKNDCDEEFQYCLSKICRDVQKTLGLTQHVQACETTVELLFDSVIHLGCKPYLDSQRAACRCHYEEKTDL

SEQ ID NO: 10459 - protein, 195 aa, Homo sapiens
MKLASGFLVLWLSLGGGLAQSDTSPDTEESYSDWGLRHLRGSFESVNSYFDSFLELLGGKNGVCQYRCRYGKAPMPRPGYKPQEPNGCGSYFLGLKVPESMDLGIPAMTKCCNQLDVCYDTCGANKYRCDAKFRWCLHSICSDLKRSLGFVSKVEAACDSLVDTVFNTVWTLGCRPFMNSQRAACICAEEEKEEL

SEQ ID NO: 10460 - protein, 212 aa, Homo sapiens
MGLHLRPYRVGLLPDGLLFLLLLLMLLADPALPAGRHPPVVLGDNNRIPVIGPLKIREQQRSAVSTSWLLPYNYTWSPEKVFVQTPTINYTLRDYRKFFQDIGFEDGWLMRQDTEGLVEATMPPGVQLHCLYGTGVPTPDSFYYESFPDRDPKICFGDGDGTVNLKSALQCQAWQSRQEHQVLLQELPGSEHIEMLANATTLAYLKRVLLGP

SEQ ID NO: 10461 - protein, 318 aa, Homo sapiens
MGLHLRPYRVGLLPDGLLFLLLLLMLLADPALPAGRHPPVVLGWFTTKHPGPPSFLMVWMYVSLALGRPSHWSSWTPAKAAWVPISTPWWRALWAGATHGVRMSEGLPMTGAEPQRQPQAWKDKYIRAFVSLGAPWGGVAKTLRVLASGDNNRIPVIGPLKIREQQRSAVSTSWLLPYNYTWSPEKVFVQTPTINYTLRDYRKFFQDIGFEDGWLMRQDTEGLVEATMPPGVQLHCLYGTGVPTPDSFYYESFPDRDPKICFGDGDGTVNLKSALQCQAWQSRQEHQVLLQELPGSEHIEMLANATTLAYLKRVLLGP

SEQ ID NO: 10462 - protein, 86 aa, Homo sapiens
MGLHLRPYRVGLLPDGLLFLLLLLMLLADPALPAGRHPPVVLVEMGFHHIGQAGLELLTASDPLTSASQSAGITGMSPCALPRSPW

SEQ ID NO: 10463 - protein, 242 aa, Homo sapiens
MGLHLRPYRVGLLPDGLLFLLLLLMLLADPALPAGRHPPVVLVPGDLGNQLEAKLDKPTVVHYLCSKKTESYFTIWLNLELLLPVIIDCWIDNIRLECSGAISAHYTSASQAQALLLPQTPDNWDYRLVYNKTSRATQFPDGVDVRVPGFGKTFSLEFLDPSKSSVGSYFHTMVESLVGWGYTRGEDVRGAPYDWRRAPTAAAGLEGQVYPGLRVTGCALGGRGQDPARPGFRRQQPDPSHR

SEQ ID NO: 10464 - protein, 163 aa, Homo sapiens
MGLHLRPYRVGLLPDGLLFLLLLLMLLADPALPAGRHPPVVLVPGDLGNQLEAKLDKPTVVHYLCSKKTESYFTIWLNLELLLPVIIDCWIDNIRLVYNKTSRATQFPDGVDVRVPGFGKTFSLEFLDPSKSSVDENGPYFLALREMIEEMYQLYGGPVVLVA

SEQ ID NO: 10465 - protein, 412 aa, Homo sapiens
MGLHLRPYRVGLLPDGLLFLLLLLMLLADPALPAGRHPPVVLVPGDLGNQLEAKLDKPTVVHYLCSKKTESYFTIWLNLELLLPVIIDCWIDNIRLVYNKTSRATQFPDGVDVRVPGFGKTFSLEFLDPSKSSVGSYFHTMVESLVGWGYTRGEDVRGAPYDWRRAPNENGPYFLALREMIEEMYQLYGGPVVLVAHSMGNMYTLYFLQRQPQAWKDKYIRAFVSLGAPWGGVAKTLRVLASGDNNRIPVIGPLKIREQQRSAVSTSWLLPYNYTWSPEKVFVQTPTINYTLRDYRKFFQDIGFEDGWLMRQDTEGLVEATMPPGVQLHCLYGTGVPTPDSFYYESFPDRDPKICFGDGDGTVNLKSALQCQAWQSRQEHQVLLQELPGSEHIEMLANATTLAYLKRVLLGP

SEQ ID NO: 10466 - protein, 236 aa, Homo sapiens
MGLHLRPYRVGLLPDGLLFLLLLLMLLADPALPAGRHPPVVLVPGDLGNQLEAKLDKPTVVHYLCSKKTESYFTIWLNLELLLPVIIDCWIDNIRLVYNKTSRATQFPDGVDVRVPGFGKTFSLEFLDPSKSSVGSYFHTMVESLVGWGYTRGEDVRGAPYDWRRAPTAAAGLEGQVYPGLRVTGCALGGRGQDPARPGFRRQQPDPSHRAPEDPGAAAVSCLHQLAAALQLHMVT

SEQ ID NO: 10467 - protein, 298 aa, Homo sapiens
MGLHLRPYRVGLLPDGLLFLLLLLMLLADPALPAGRHPPVVLVPGDLGNQLEAKLDKPTVVHYLCSKKTESYFTIWLNLELLLPVIIDCWIDNIRLVYNKTSRATQFPDGVDVRVPGFGKTFSLEFLDPSKSSVGSYFHTMVESLVGWGYTRGEDVRGAPYDWRRAPTQWFRLQDPSHLTPAWLWPADENGPYFLALREMIEEMYQLYGGPVVLVAHSMGNMYTLYFLQRQPQAWKDKYIRAFVSLGAPWGGVAKTLRVLASGDNNRIPVIGPLKIREQQRSAVSTSWLLPYNYTWSP

SEQ ID NO: 10468 - protein, 119 aa, Homo sapiens
MIKCVIPGSDPFLEYNNYGCYCGLGGSGTPVDELDKCCQTHDNCYDQAKKLDSCKFLLDNPYTHTYSYSCSGSAITCSSKNKECEAFICNCDRNAAICFSKAPYNKAHKNLDTKKYCQS

SEQ ID NO: 10469 - protein, 148 aa, Homo sapiens
MKLLVLAVLLTVAAADSGISPRAVWQFRKMIKCVIPGSDPFLEYNNYGCYCGLGGSGTPVDELDKCCQTHDNCYDQAKKLDSCKFLLDNPYTHTYSYSCSGSAITCSSKNKECEAFICNCDRNAAICFSKAPYNKAHKNLDTKKYCQS

SEQ ID NO: 10470 - protein, 70 aa, Homo sapiens
MKLLVLAVLLTVAAADSGISPRAVWQFRKMIKCVIPGSDPFLEYNNYGCYCGLGGSGTPVDELDKQKQRV

SEQ ID NO: 10471 - protein, 144 aa, Homo sapiens
MKTLLLLAVIMIFGLLQAHGNLVNFHRMIKLTTGKEAALSYGFYGCHCGVGGRGSPKDATDRCCVTHDCCYKRLEKRGCGTKFLSYKFSNSGSRITCAKQDSCRSQLCECDKAAATCFARNKTTYNKKYQYYSNKHCRGSTPRC

SEQ ID NO: 10472 - protein, 144 aa, Homo sapiens; identical to SEQ ID NO: 10471

SEQ ID NO: 10473 - protein, 149 aa, Homo sapiens
MKVIAILTLLLFCSPTHSSFWQFQRRVKHITGRSAFFSYYGYGCYCGLGDKGIPVDDTDRHSPSSPSPYEKLKEFSCQPVLNSYQFHIVNGAVVCGCTLGPGASCHCRLKACECDKQSVHCFKESLPTYEKNFKQFSSQPRCGRHKPWC

SEQ ID NO: 10474 - protein, 150 aa, Homo sapiens
MLIATSFFLFFSSVVAAPTHSSFWQFQRRVKHITGRSAFFSYYGYGCYCGLGDKGIPVDDTDSPSSPSPYEKLKEFSCQPVLNSYQFHIVNGAVVCGCTLGPGASCHCRLKACECDKQSVHCFKESLPTYEKNFKQFSSQPRCGRHKPWC

SEQ ID NO: 10475 - protein, 62 aa, Homo sapiens
MELALLCGLVVMAGVIPIQGGILNLNKMVKQVTGKMPILSYWPYGCHCGLGGRGQPKDATDC

SEQ ID NO: 10476 - protein, 145 aa, Homo sapiens
MELALLCGLVVMAGVIPIQGGILNLNKMVKQVTGKMPILSYWPYGCHCGLGGRGQPKDATDWCCQTHDCCYDHLKTQGCSIYKDYYRYNFSQGNIHCSDKGSWCEQQLCACDKEVAFCLKRNLDTYQKRLRFYWRPHCRGQTPGC

SEQ ID NO: 10477 - protein, 142 aa, Homo sapiens
MKSPHVLVFLCLLVALVTGNLVQFGVMIEKMTGKSALQYNDYGCYCGIGGSHWPVDQTDWCCHAHDCCYGRLEKLGCEPKLEKYLFSVSERGIFCAGRTTCQRLTCECDKRAALCFRRNLGTYNRKYAHYPNKLCTGPTPPC

SEQ ID NO: 10478 - protein, 509 aa, Homo sapiens
MGVQAGLFGMLGFLGVALGGSPALRWYRTSCHLTKAVPGNPLGYLSFLAKDAQGLALIHARWDAHRRLQSCSWEDEPELTAAYGALCAHETAWGSFIHTPGPELQRALATLQSQWEACRALEESPAGARKKRAAGQSGVPGGGHQREKRGWTMPGTLWCGVGDSAGNSSELGVFQGPDLCCREHDRCPQNISPLQYNYGIRNYRFHTISHCDCDTRFQQCLQNQHDSISDIVGVAFFNVLEIPCFVLEEQEACVAWYWWGGCRMYGTVPLARLQPRTFYNASWSSRATSPTPSSRSPAPPKPRQKQHLRKGPPHQKGSKRPSKANTTALQDPMVSPRLDVAPTGLQGPQGGLKPQGARWVCRSFRRHLDQCEHQIGPREIEFQLLNSAQEPLFHCNCTRRLARFLRLHSPPEVTNMLWELLGTTCFKLAPPLDCVEGKNCSRDPRAIRVSARHLRRLQQRRHQLQDKGTDERQPWPSEPLRGPMSFYNQCLQLTQAARRPDRQQKSWSQ

SEQ ID NO: 10479 - protein, 138 aa, Homo sapiens
MKGLLPLAWFLACSVPAVQGGLLDLKSMIEKVTGKNALTNYGFYGCYCGWGGRGTPKDGTDWCCWAHDHCYGRLEEKGCNIRTQSYKYRFAWGVVTCEPGPFCHVNLCACDRKLVYCLKRNLRSYNPQYQYFPNILCS

SEQ ID NO: 10480 - protein, 441 aa, Homo sapiens
MVPPKLHVLFCLCGCLAVVYPFDWQYINPVAHMKSSAWVNKIQVLMAAASFGQTKIPRGNGPYSVGCTDLMFDHTNKGTFLRLYYPSQDNDRLDTLWIPNKEYFWGLSKFLGTHWLMGNILRLLFGSMTTPANWNSPLRPGEKYPLVVFSHGLGAFRTLYSAIGIDLASHGFIVAAVEHRDRSASATYYFKDQSAAEIGDKSWLYLRTLKQEEETHIRNEQVRQRAKECSQALSLILDIDHGKPVKNALDLKFDMEQLKDSIDREKIAVIGHSFGGATVIQTLSEDQRFRCGIALDAWMFPLGDEVYSRIPQPLFFINSEYFQYPANIIKMKKCYSPDKERKMITIRGSVHQNFADFTFATGKIIGHMLKLKGDIDSNVAIDLSNKASLAFLQKHLGLHKDFDQWDCLIEGDDENLIPGTNINTTNQHIMLQNSSGIEKYN

SEQ ID NO: 10481 - protein, 441 aa, Homo sapiens; identical to SEQ ID NO: 10480

SEQ ID NO: 10482 - protein, 1463 aa, Homo sapiens
MLLSPSLLLLLLLGAPRGCAEGVAAALTPERLLEWQDKGIFVIQSESLKKCIQAGKSVLTLENCKQANKHMLWKWVSNHGLFNIGGSGCLGLNFSAPEQPLSLYECDSTLVSLRWRCNRKMITGPLQYSVQVAHDNTVVASRKYIHKWISYGSGGGDICEYLHKDLHTIKGNTHGMPCMFPFQYNHQWHHECTREGREDDLLWCATTSRYERDEKWGFCPDPTSAEVGCDTIWEKDLNSHICYQFNLLSSLSWSEAHSSCQMQGGTLLSITDETEENFIREHMSSKTVEVWMGLNQLDEHAGWQWSDGTPLNYLNWSPEVNFEPFVEDHCGTFSSFMPSAWRSRDCESTLPYICKKYLNHIDHEIVEKDAWKYYATHCEPGWNPYNRNCYKLQKEEKTWHEALRSCQADNSALIDITSLAEVEFLVTLLGDENASETWIGLSSNKIPVSFEWSNDSSVIFTNWHTLEPHIFPNRSQLCVSAEQSEGHWKVKNCEERLFYICKKAGHVLSDAESGCQEGWERHGGFCYKIDTVLRSFDQASSGYYCPPALVTITNRFEQAFITSLISSVVKMKDSYFWIALQDQNDTGEYTWKPVGQKPEPVQYTHWNTHQPRYSGGCVAMRGRHPLGRWEVKHCRHFKAMSLCKQPVENQEKAEYEERWPFHPCYLDWESEPGLASCFKVFHSEKVLMKRTWREAEAFCEEFGAHLASFAHIEEENFVNELLHSKFNWTEERQFWIGFNKRNPLNAGSWEWSDRTPVVSSFLDNTYFGEDARNCAVYKANKTLLPLHCGSKREWICKIPRDVKPKIPFWYQYDVPWLFYQDAEYLFHTFASEWLNFEFVCSWLHSDLLTIHSAHEQEFIHSKIKALSKYGASWWIGLQEERANDEFRWRDGTPVIYQNWDTGRERTVNNQSQRCGFISSITGLWGSEECSVSMPSICKRKKVWLIEKKKDTPKQHGTCPKGWLYFNYKCLLLNIPKDPSSWKNWTHAQHFCAEEGGTLVAIESEVEQAFITMNLFGQTTSVWIGLQNDDYETWLNGKPVVYSNWSPFDIINIPSHNTTEVQKHIPLCALLSSNPNFHFTGKWYFEDCGKEGYGFVCEKMQDTSGHGVNTSDMYPMPNTLEYGNRTYKIINANMTWYAAIKTCLMHKAQLVSITDQYHQSFLTVVLNRLGYAHWIGLFTTDNGLNFDWSDGTKSSFTFWKDEESSLLGDCVFADSNGRWHSTACESFLQGAICHVPPETRQSEHPELCSETSIPWIKFKSNCYSFSTVLDSMSFEAAHEFCKKEGSNLLTIKDEAENAFLLEELFAFGSSVQMVWLNAQFDGNNETIKWFDGTPTDQSNWGIRKPDTDYFKPHHCVALRIPEGLWQLSPCQEKKGFICKMEADIHTAEALPEKGPSHSIIPLAVVLTLIVIVAICTLSFCIYKHNGGFFRRLAGFRNPYYPATNFSTVYLEENILISDLEKSDQ

SEQ ID NO: 10483 - protein, 1324 aa, Homo sapiens
MLLSPSLLLLLLLGAPRGCAEGVAAALTPERLLEWQDKGIFVIQSESLKKCIQAGKSVLTLENCKQANKHMLWKWVSNHGLFNIGGSGCLGLNFSAPEQPLSLYECDSTLVSLRWRCNRKMITGPLQYSVQVAHDNTVVASRKYIHKWISYGSGGGDICEYLHKDLHTIKGNTHGMPCMFPFQYNHQWHHECTREGREDDLLWCATTSRYERDEKWGFCPDPTSAEVGCDTIWEKDLNSHICYQFNLLSSLSWSEAHSSCQMQGGTLLSITDETEENFIREHMSSKTVEVWMGLNQLDEHAGWQWSDGTPLNYLNWSPEVNFEPFVEDHCGTFSSFMPSAWRSRDCESTLPYICKKYLNHIDHEIVEKDAWKYYATHCEPGWNPYNRNCYKLQKEEKTWHEALRSCQADNSALIDITSLAEVEFLVTLLGDENASETWIGLSSNKIPVSFEWSNDSSVIFTNWHTLEPHIFPNRSQLCVSAEQSEGHWKVKNCEERLFYICKKAGHVLSDAESGCQEGWERHGGFCYKIDTVLRSFDQASSGYYCPPALVTITNRFEQAFITSLISSVVKMKDSYFWIALQDQNDTGEYTWKPVGQKPEPVQYTHWNTHQPRYSGGCVAMRGRHPLGRWEVKHCRHFKAMSLCKQPVENQEKAEYEERWPFHPCYLDWESEPGLASCFKVFHSEKVLMKRTWREAEAFCEEFGAHLASFAHIEEENFVNELLHSKFNWTEERQFWIGFNKRNPLNAGSWEWSDRTPVVSSFLDNTYFGEDARNCAVYKANKTLLPLHCGSKREWICKIPRDVKPKIPFWYQYDVPWLFYQDAEYLFHTFASEWLNFEFVCSWLHSDLLTIHSAHEQEFIHSKIKALSKYGASWWIGLQEERANDEFRWRDGTPVIYQNWDTGRERTVNNQSQRCGFISSITGLWGSEECSVSMPSICKRKKVWLIEKKKDTPKQHGTCPKGWLYFNYKCLLLNIPKDPSSWKNWTHAQHFCAEEGGTLVAIESEVEQAFITMNLFGQTTSVWIGLQNDDYETWLNGKPVVYSNWSPFDIINIPSHNTTEVQKHIPLCALLSSNPNFHFTGKWYFEDCGKEGYGFVCEKMQDTSGHGVNTSDMYPMPNTLEYGNRTYKIINANMTWYAAIKTCLMHKAQLVSITDQYHQSFLTVVLNRLGYAHWIGLFTTDNGLNFDWSDGTKSSFTFWKDEESSLLGDCVFADSNGRWHSTACESFLQGAICHVPPETRQSEHPELCSETSIPWIKFKSNCYSFSTVLDSMSFEAAHEFCKKEGSNLLTIKDEAENAFLLEELFAFGSSVQMVWLNAQFDGNSK

SEQ ID NO: 10484 - protein, 212 aa, Homo sapiens
MKVFKFIGLMILLTSAFSAGSGQSPMTVLCSIDWFMVTVHPFMLNNDVCVHFHELHLGLGCPPNHVQPHAYQFTYRVTECGIRAKAVSQDMVIYSTEIHYSSKGTPSKFVIPVSCAAPQKSPWLTKPCSMRVASKSRATAQKDEKCYEVFSLSQSSQRPNCDCPPCVFSEEEHTQVPCHQAGAQEAQPLQPSHFLDISEDWSLHTDDMIGSM

SEQ ID NO: 10485 - protein, 55 aa, Homo sapiens
MAVQRRLDVMEEMVEKTVDHLGTEVKGLLGLLEELAWNLPPGPFSPAPDLLGDGF

SEQ ID NO: 10486 - protein, 87 aa, Homo sapiens
MRPLLCALTGLALLRAAGSLAAAEPFSPPRGDSAQSTACDRHMAVQRRLDVMEEMASEPWSWSPAVGGGAPARQRPQNQPCPLDFLP

SEQ ID NO: 10487 - protein, 97 aa, Homo sapiens
MRPLLCALTGLALLRAAGSLAAAEPFSPPRGDSAQSTACDRHMAVQRRLDVMEEMVEKTVDHLGTEVKGLLGLLEELAWNLPPGPFSPAPDLLGDGF

SEQ ID NO: 10488 - protein, 516 aa, Homo sapiens
MDAMKRGLCCVLLLCGAVFVSPSQEIHARFRRGARSYQGCSEPRCFNGGTCQQALYFSDFVCQCPEGFAGKCCEIDTRATCYEDQGISYRGTWSTAESGAECTNWNSSALAQKPYSGRRPDAIRLGLGNHNYCRNPDRDSKPWCYVFKAGKYSSEFCSTPACSEGNSDCYFGNGSAYRGTHSLTESGASCLPWNSMILIGKVYTAQNPSAQALGLGKHNYCRNPDGDAKPWCHVLKNRRLTWEYCDVPSCSTCGLRQYSQPQFRIKGGLFADIASHPWQAAIFAKHRRSPGERFLCGGILISSCWILSAAHCFQERFPPHHLTVILGRTYRVVPGEEEQKFEVEKYIVHKEFDDDTYDNDIALLQLKSDSSRCAQESSVVRTVCLPPADLQLPDWTECELSGYGKHEALSPFYSERLKEAHVRLYPSSRCTSQHLLNRTVTDNMLCAGDTRSGGPQANLHDACQGDSGGPLVCLNDGRMTLVGIISWGLGCGQKDVPGVYTKVTNYLDWIRDNMRP

SEQ ID NO: 10489 - protein, 436 aa, Homo sapiens
MDAMKRGLCCVLLLCGAVFVSPSQEIHARFRRGARSYQVICRDEKTQMIYQQHQSWLRPVLRSNRVEYCWCNSGRAQCHSVPVKRNSDCYFGNGSAYRGTHSLTESGASCLPWNSMILIGKVYTAQNPSAQALGLGKHNYCRNPDGDAKPWCHVLKNRRLTWEYCDVPSCSTCGLRQYSQPQFRIKGGLFADIASHPWQAAIFAKHRRSPGERFLCGGILISSCWILSAAHCFQERFPPHHLTVILGRTYRVVPGEEEQKFEVEKYIVHKEFDDDTYDNDIALLQLKSDSSRCAQESSVVRTVCLPPADLQLPDWTECELSGYGKHEALSPFYSERLKEAHVRLYPSSRCTSQHLLNRTVTDNMLCAGDTRSGGPQANLHDACQGDSGGPLVCLNDGRMTLVGIISWGLGCGQKDVPGVYTKVTNYLDWIRDNMRP

SEQ ID NO: 10490 - protein, 499 aa, Homo sapiens
MDAMKRGLCCVLLLCGAVFVSPSQEIHARFRRGARSYQVICRDEKTQMIYQQHQSWLRPVLRSNRVEYCWCNSGRAQCHSVPVKSCSEPRCFNGGTCQQALYFSDFVCQCPEGFAGKCCEIDSKPWCYVFKAGKYSSEFCSTPACSEGNSDCYFGNGSAYRGTHSLTESGASCLPWNSMILIGKVYTAQNPSAQALGLGKHNYCRNPDGDAKPWCHVLKNRRLTWEYCDVPSCSTCGLRQYSQPQFRIKGGLFADIASHPWQAAIFAKHRRSPGERFLCGGILISSCWILSAAHCFQERFPPHHLTVILGRTYRVVPGEEEQKFEVEKYIVHKEFDDDTYDNDIALLQLKSDSSRCAQESSVVRTVCLPPADLQLPDWTECELSGYGKHEALSPFYSERLKEAHVRLYPSSRCTSQHLLNRTVTDNMLCAGDTRSGGPQANLHDACQGDSGGPLVCLNDGRMTLVGIISWGLGCGQKDVPGVYTKVTNYLDWIRDNMRP

SEQ ID NO: 10491 - protein, 157 aa, Homo sapiens
MDAMKRGLCCVLLLCGAVFVSPSQEIHARFRRGARSYQVICRDEKTQMIYQQHQSWLRPVLRSNRVEYCWCNSGRAQCHSVPVKSCSEPRCFNGGTCQQALYFSDFVCQCPEGFAGKCCEIDTRATCYEDQGISYRGTWSTAESGAECTNWNSSALA

SEQ ID NO: 10492 - protein, 178 aa, Homo sapiens
MDAMKRGLCCVLLLCGAVFVSPSQEIHARFRRGARSYQVICRDEKTQMIYQQHQSWLRPVLRSNRVEYCWCNSGRAQCHSVPVKSCSEPRCFNGGTCQQALYFSDFVCQCPEGFAGKCCEIDTRATCYEDQGISYRGTWSTAESGAECTNWNSSALAQKPYSGRRPDAIRLGLGNHNY

SEQ ID NO: 10493 - protein, 562 aa, Homo sapiens
MDAMKRGLCCVLLLCGAVFVSPSQEIHARFRRGARSYQVICRDEKTQMIYQQHQSWLRPVLRSNRVEYCWCNSGRAQCHSVPVKSCSEPRCFNGGTCQQALYFSDFVCQCPEGFAGKCCEIDTRATCYEDQGISYRGTWSTAESGAECTNWNSSALAQKPYSGRRPDAIRLGLGNHNYCRNPDRDSKPWCYVFKAGKYSSEFCSTPACSEGNSDCYFGNGSAYRGTHSLTESGASCLPWNSMILIGKVYTAQNPSAQALGLGKHNYCRNPDGDAKPWCHVLKNRRLTWEYCDVPSCSTCGLRQYSQPQFRIKGGLFADIASHPWQAAIFAKHRRSPGERFLCGGILISSCWILSAAHCFQERFPPHHLTVILGRTYRVVPGEEEQKFEVEKYIVHKEFDDDTYDNDIALLQLKSDSSRCAQESSVVRTVCLPPADLQLPDWTECELSGYGKHEALSPFYSERLKEAHVRLYPSSRCTSQHLLNRTVTDNMLCAGDTRSGGPQANLHDACQGDSGGPLVCLNDGRMTLVGIISWGLGCGQKDVPGVYTKVTNYLDWIRDNMRP

SEQ ID NO: 10494 - protein, 562 aa, Homo sapiens; identical to SEQ ID NO: 10493

SEQ ID NO: 10495 - protein, 473 aa, Homo sapiens
MDAMKRGLCCVLLLCGAVFVSPSQEIHARFRRGARSYQVICRDEKTQMIYQQHQSWLRPVLRSNRVEYCWCNSGRAQCHSVPVKSCSEPRCFNGGTCQQALYFSDFVCQCPEGFAGKCCEIGNSDCYFGNGSAYRGTHSLTESGASCLPWNSMILIGKVYTAQNPSAQALGLGKHNYCRNPDGDAKPWCHVLKNRRLTWEYCDVPSCSTCGLRQYSQPQFRIKGGLFADIASHPWQAAIFAKHRRSPGERFLCGGILISSCWILSAAHCFQERFPPHHLTVILGRTYRVVPGEEEQKFEVEKYIVHKEFDDDTYDNDIALLQLKSDSSRCAQESSVVRTVCLPPADLQLPDWTECELSGYGKHEALSPFYSERLKEAHVRLYPSSRCTSQHLLNRTVTDNMLCAGDTRSGGPQANLHDACQGDSGGPLVCLNDGRMTLVGIISWGLGCGQKDVPGVYTKVTNYLDWIRDNMRP

SEQ ID NO: 10496 - protein, 96 aa, Homo sapiens
  VARIANT 1: note = misc_feature - Xaa can be any naturally occurring amino acid
XFAGKCCEIDTRATCYEDQGISYRGTWSTAESGAECTNWNSSALAQKPYSGRRPDAIRLGLGNHNYCRTPVPRHWAWANIITAGILMGMPSPGATC

SEQ ID NO: 10497 - protein, 106 aa, Homo sapiens
MRALLARLLLCVLVVSDSKGSNELHQVPSNCDCLNGGTCVSNKYFSNIHWCNCPKKFGGQHCEIDKSKTCYEGNGHFYRGKASTDTMGRPCLPWNSATVLQQTYHA

SEQ ID NO: 10498 - protein, 431 aa, Homo sapiens
MRALLARLLLCVLVVSDSKGSNELHQVPSNCDCLNGGTCVSNKYFSNIHWCNCPKKFGGQHCEIDKSKTCYEGNGHFYRGKASTDTMGRPCLPWNSATVLQQTYHAHRSDALQLGLGKHNYCRNPDNRRRPWCYVQVGLKLLVQECMVHDCADGKKPSSPPEELKFQCGQKTLRPRFKIIGGEFTTIENQPWFAAIYRRHRGGSVTYVCGGSLISPCWVISATHCFIDYPKKEDYIVYLGRSRLNSNTQGEMKFEVENLILHKDYSADTLAHHNDIALLKIRSKEGRCAQPSRTIQTICLPSMYNDPQFGTSCEITGFGKENSTDYLYPEQLKMTVVKLISHRECQQPHYYGSEVTTKMLCAADPQWKTDSCQGDSGGPLVCSLQGRMTLTGIVSWGRGCALKDKPGVYTRVSHFLPWIRSHTKEENGLAL

SEQ ID NO: 10499 - protein, 414 aa, Homo sapiens
MVFHLRTRYEQANCDCLNGGTCVSNKYFSNIHWCNCPKKFGGQHCEIDKSKTCYEGNGHFYRGKASTDTMGRPCLPWNSATVLQQTYHAHRSDALQLGLGKHNYCRNPDNRRRPWCYVQVGLKLLVQECMVHDCADGKKPSSPPEELKFQCGQKTLRPRFKIIGGEFTTIENQPWFAAIYRRHRGGSVTYVCGGSLISPCWVISATHCFIDYPKKEDYIVYLGRSRLNSNTQGEMKFEVENLILHKDYSADTLAHHNDIALLKIRSKEGRCAQPSRTIQTICLPSMYNDPQFGTSCEITGFGKENSTDYLYPEQLKMTVVKLISHRECQQPHYYGSEVTTKMLCAADPQWKTDSCQGDSGGPLVCSLQGRMTLTGIVSWGRGCALKDKPGVYTRVSHFLPWIRSHTKEENGLAL

SEQ ID NO: 10500 - protein, 78 aa, Homo sapiens
MDGAWRLASWGLRCMQCKTNGDCRVEECALGQDLCRTTIVRLWEEGEELELVEKSCTHSEKTNRTLSYRTGLKITSLT

SEQ ID NO: 10501 - protein, 152 aa, Homo sapiens
MDTNLNGRGLETWSSWGLRCMQCKTNGDCRVEECALGQDLCRTTIVRLWEEGEELELVEKSCTHSEKTNRTLSYRTGLKITSLTEVVCGLDLCNQGNSGRAVTYSRSRYLECISCGSSDMSCERGRHQSLQCRSPEEQCLDVVTHWIQEGEE

SEQ ID NO: 10502 - protein, 335 aa, Homo sapiens
MGHPPLLPLLLLLHTCVPASWGLRCMQCKTNGDCRVEECALGQDLCRTTIVRLWEEGEELELVEKSCTHSEKTNRTLSYRTGLKITSLTEVVCGLDLCNQGNSGRAVTYSRSRYLECISCGSSDMSCERGRHQSLQCRSPEEQCLDVVTHWIQEGEEGRPKDDRHLRGCGYLPGCPGSNGFHNNDTFHFLKCCNTTKCNEGPILELENLPQNGRQCYSCKGNSTHGCSSEETFLIDCRGPMNQCLVATGTHEPKNQSYMVRGCATASMCQHAHLGDAFSMNHIDVSCCTKSGCNHPDLDVQYRSGAAPQPGPAHLSLTITLLMTARLWGGTLLWT

SEQ ID NO: 10503 - protein, 281 aa, Homo sapiens
MGHPPLLPLLLLLHTCVPASWGLRCMQCKTNGDCRVEECALGQDLCRTTIVRLWEEGEELELVEKSCTHSEKTNRTLSYRTGLKITSLTEVVCGLDLCNQGNSGRAVTYSRSRYLECISCGSSDMSCERGRHQSLQCRSPEEQCLDVVTHWIQEGEEGRPKDDRHLRGCGYLPGCPGSNGFHNNDTFHFLKCCNTTKCNEGPILELENLPQNGRQCYSCKGNSTHGCSSEETFLIDCRGPMNQCLVATGTHERSLWGSWLPCKSTTALRPPCCEEAQATHV

SEQ ID NO: 10504 - protein, 286 aa, Homo sapiens
MGHPPLLPLLLLLHTCVPASWGLRCMQCKTNGDCRVEECALGQDLCRTTIVRLWEEGEELELVEKSCTHSEKTNRTLSYRTGLKITSLTEVVCGLDLCNQGNSGRAVTYSRSRYLECISCGSSDMSCERGRHQSLQCRSPEEQCLDVVTHWIQEGEEGRPKDDRHLRGCGYLPGCPGSNGFHNNDTFHFLKCCNTTKCNEGPKPKNQSYMVRGCATASMCQHAHLGDAFSMNHIDVSCCTKSGCNHPDLDVQYRSGAAPQPGPAHLSLTITLLMTARLWGGTLLWT

SEQ ID NO: 10505 - protein, 290 aa, Homo sapiens
MGHPPLLPLLLLLHTCVPASWGLRCMQCKTNGDCRVEECALGQDLCRTTIVRLWEEGEELELVEKSCTHSEKTNRTLSYRTGLKITSLTEVVCGLDLCNQGNSGRAVTYSRSRYLECISCGSSDMSCERGRHQSLQCRSPEEQCLDVVTHWIQEGEEVLELENLPQNGRQCYSCKGNSTHGCSSEETFLIDCRGPMNQCLVATGTHEPKNQSYMVRGCATASMCQHAHLGDAFSMNHIDVSCCTKSGCNHPDLDVQYRSGAAPQPGPAHLSLTITLLMTARLWGGTLLWT

SEQ ID NO: 10506 - protein, 46 aa, Homo sapiens
MGHPPLLPLLLLLHTCVPAWATARDSISKKKKRKKKERRNLRRYNL

SEQ ID NO: 10507 - protein, 153 aa, Homo sapiens
MQCKTNGDCRVEECALGQDLCRTTIVRLWEEGEELELVEKSCTHSEKTNRTLSYRTGLKITSLTEVVCGLDLCNQGNSGRAVTYSRSRYLECISCGSSDMSCERGRHQSLQCRSPEEQCLDVVTHWIQEGEEGRPKDDRHLRGCGYLPGCPGS

SEQ ID NO: 10508 - protein, 226 aa, Homo sapiens
MQCKTNGDCRVEECALGQDLCRTTIVRLWEEGEELELVEKSCTHSEKTNRTLSYRTGLKITSLTEVVCGLDLCNQGNSGRAVTYSRSRYLECISCGSSDMSCERGRHQSLQCRSPEEQCLDVVTHWIQEGEEGRPKDDRHLRGCGYLPGCPGSNGFHNNDTFHFLKCCNTTKCNEGPILELENLPQNGRQCYSCKGNSTHGCSSEETFLIDCRGPMNQCLVATGTH

SEQ ID NO: 10509 - protein, 154 aa, Homo sapiens
  VARIANT 1: note = misc_feature - Xaa can be any naturally occurring amino acid
XCERGRHQSLQCRSPEEQCLDVVTHWIQEGEEGRPKDDRHLRGCGYLPGCPGSNGFHNNDTFHFLKCCNTTKCNEGPILELENLPQNGRQCYSCKGNSTHGCSSEETFLIDCRGPMNQCLVATGTHGCGHFCHGKVEFRLGAVAEACTLSTLGG

SEQ ID NO: 10510 - protein, 133 aa, Homo sapiens
  VARIANT 1: note = misc_feature - Xaa can be any naturally occurring amino acid
XRYLECISCGSSDMSCERGRHQSLQCRSPEEQCLDVVTHWIQEGEEGRPKDDRHLRGCGYLPGCPGSNGFHNNDTFHFLKCCNTTKCNEGPILELENLPQNGRQCYSCKGNSTHGCSSEETFLIDCRGTLLWT

SEQ ID NO: 10511 - protein, 185 aa, Homo sapiens
  VARIANT 1: note = misc_feature - Xaa can be any naturally occurring amino acid
XSWGLRCMQCKTNGDCRVEECALGQDLCRTTIVRLWEGRAVTYSRSRYLECISCGSSDMSCERGRHQSLQCRSPEEQCLDVVTHWIQEGEEGRPKDDRHLRGCGYLPGCPGSNGFHNNDTFHFLKCCNTTKCNEGPILELENLPQNGRQCYSCKGNSTHGCSSEETFLIDCRGPMNQCLVATGTH

SEQ ID NO: 10512 - protein, 144 aa, Homo sapiens
MPAEKTVQVKNVMDKNGDAYGFYNNSVKTTGWGILEIRAGYGSQTLSNEIIMFVAGFLEGYLTAPHMNDHYTNLYPQLITKPSIMDKVQDFMEKQDKWTRKNIKEYKTDSFWRHTGYVMAQIDGLYVGAKKRAILEGTKPMTLF

SEQ ID NO: 10513 - protein, 40 aa, Homo sapiens
MTRGGPGGRPGLPQPPPLLLLLLLLPLLLVTAEPPKPADT

SEQ ID NO: 10514 - protein, 553 aa, Homo sapiens
MTRGGPGGRPGLPQPPPLLLLLLLLPLLLVTAEPPKPAGVYYATAYWMPAEKTVQVKNVMDKNGDAYGFYNNSVKTTGWGILEIRAGYGSQTLSNEIIMFVAGFLEGYLTAPHMNDHYTNLYPQLITKPSIMDKVQDFMEKQDKWTRKNIKEYKTDSFWRHTGYVMAQIDGLYVGAKKRAILEGTKPMTLFQIQFLNSVGDLLDLIPSLSPTKNGSLKVFKRWDMGHCSALIKVLPGFENILFAHSSWYTYAAMLRIYKHWDFNVIDKDTSSSRLSFSSYPGFLESLDDFYILSSGLILLQTTNSVFNKTLLKQVIPETLLSWQRVRVANMMADSGKRWADIFSKYNSGTYNNQYMVLDLKKVKLNHSLDKGTLYIVEQIPTYVEYSEQTDVLRKGYWPSYNVPFHEKIYNWSGYPLLVQKLGLDYSYDLAPRAKIFRRDQGKVTDTASMKYIMRYNNYKKDPYSRGDPCNTICCREDLNSPNPSPGGCYDTKVADIYLASQYTSYAISGPTVQGGLPVFRWDRFNKTLHQGMPEVYNFDFITMKPILKLDIK

SEQ ID NO: 10515 - protein, 52 aa, Homo sapiens
DGQVPPASRSRSVLLDVSAGQLLMVDGRHPDAVAWANLTNAIRETGSSTCTG

SEQ ID NO: 10516 - protein, 589 aa, Homo sapiens
MVGQMYCYPGSHLARALTRALALALVLALLVGPFLSGLAGAIPAPGGRWARDGQVPPASRSRSVLLDVSAGQLLMVDGRHPDAVAWANLTNAIRETGWAFLELGTSGQYNDSLQAYAAGVVEAAVSEELIYMHWMNTVVNYCGPFEYEVGYCERLKSFLEANLEWMQEEMESNPDSPYWHQVRLTLLQLKGLEDSYEGRVSFPAGKFTIKPLGFLLLQLSGDLEDLELALNKTKIKPSLGSGSCSALIKLLPGQSDLLVAHNTWNNYQHMLRVIKKYWLQFREGPWGDYPLVPGNKLVFSSYPGTIFSCDDFYILGSGLVTLETTIGNKNPALWKYVRPRGCVLEWVRNIVANRLASDGATWADIFKRFNSGTYNNQWMIVDYKAFIPGGPSPGSRVLTILEQIPGMVVVADKTSELYQKTYWASYNIPSFETVFNASGLQALVAQYGDWFSYDGSPRAQIFRRNQSLVQDMDSMVRLMRYNDFLHDPLSLCKACNPQPNGENAISARSDLNPANGSYPFQALRQRSHGGIDVKVTSMSLARILSLLAASGPTWDQVPPFQWSTSPFSGLLHMGQPDLWKFAPVKVSWD

SEQ ID NO: 10517 - protein, 557 aa, Homo sapiens
MVGQMYCYPGSHLARALTRALALALVLALLVGPFLSGLAGAIPAPGGRWARDGQVPPASRSRSVLLDVSAGQLLMVDGRHPDAVAWANLTNAIRETGWAFLELGTSGQYNDSLQAYAAGVVEAAVSEELIYMHWMNTVVNYCGPFEYEVGYCERLKSFLEANLEWMQEEMESNPDSPYWHQVRLTLLQLKGLEDSYEGRVSFPAGKFTIKPLGFLLLQLSGDLEDLELALNKTKIKPSLGSGSCSALIKLLPGQSDLLVAHNTWNNYQHMLRVIKKYWLQFREGPWGDYPLVPGNKLVFSSYPGTIFSCDDFYILGSGLVTLETTIGNKNPALWKYVRPRGCVLEWVRNIVANRLASDGATWADIFKRFNSGTGMVVVADKTSELYQKTYWASYNIPSFETVFNASGLQALVAQYGDWFSYDGSPRAQIFRRNQSLVQDMDSMVRLMRYNDFLHDPLSLCKACNPQPNGENAISARSDLNPANGSYPFQALRQRSHGGIDVKVTSMSLARILSLLAASGPTWDQVPPFQWSTSPFSGLLHMGQPDLWKFAPVKVSWD

SEQ ID NO: 10518 - protein, 136 aa, Homo sapiens
MEHKEVVLLLLLFLKSGQGEPLDDYVNTQGASLFSVTKKQLGAGSIEECAAKCEEDEEFTCRAFQYHSKEQQCVIMAENRKSSIIIRMRDVVLFEKKVYLSECKTGNGKNYRGTMSKTKNGITCQKWSSTSPHRPR

SEQ ID NO: 10519 - protein, 810 aa, Homo sapiens
MEHKEVVLLLLLFLKSGQGEPLDDYVNTQGASLFSVTKKQLGAGSIEECAAKCEEDEEFTCRAFQYHSKEQQCVIMAENRKSSIIIRMRDVVLFEKKVYLSECKTGNGKNYRGTMSKTKNGITCQKWSSTSPHRPRFSPATHPSEGLEENYCRNPDNDPQGPWCYTTDPEKRYDYCDILECEEECMHCSGENYDGKISKTMSGLECQAWDSQSPHAHGYIPSKFPNKNLKKNYCRNPDRELRPWCFTTDPNKRWELCDIPRCTTPPPSSGPTYQCLKGTGENYRGNVAVTVSGHTCQHWSAQTPHTHNRTPENFPCKNLDENYCRNPDGKRAPWCHTTNSQVRWEYCKIPSCDSSPVSTEQLAPTAPPELTPVVQDCYHGDGQSYRGTSSTTTTGKKCQSWSSMTPHRHQKTPENYPNAGLTMNYCRNPDADKGPWCFTTDPSVRWEYCNLKKCSGTEASVVAPPPVVLLPDVETPSEEDCMFGNGKGYRGKRATTVTGTPCQDWAAQEPHRHSIFTPETNPRAGLEKNYCRNPDGDVGGPWCYTTNPRKLYDYCDVPQCAAPSFDCGKPQVEPKKCPGRVVGGCVAHPHSWPWQVSLRTRFGMHFCGGTLISPEWVLTAAHCLEKSPRPSSYKVILGAHQEVNLEPHVQEIEVSRLFLEPTRKDIALLKLSSPAVITDKVIPACLPSPNYVVADRTECFITGWGETQGTFGAGLLKEAQLPVIENKVCNRYEFLNGRVQSTELCAGHLAGGTDSCQGDSGGPLVCFEKDKYILQGVTSWGLGCARPNKPGVYVRVSRFVTWIEGVMRNN

SEQ ID NO: 10520 - protein, 166 aa, Homo sapiens
MEHKEVVLLLLLFLKSGQGEPLDDYVNTQGASLFSVTKKQLGAGSIEECAAKCEEDEEFTCRYFHCRCTYAGICNSDGKAFQYHSKEQQCVIMAENRKSSIIIRMRDVVLFEKKVYLSECKTGNGKNYRGTMSKTKNGITCQKWSSTSPHRPRFSPATHPSEGLEE

SEQ ID NO: 10521 - protein, 96 aa, Homo sapiens
MEHKEVVLLLLLFLKSGQGEPLDDYVNTQGPSLFSVTKKQLGAGSREECAAKCEEDKEFTCRAFQYHSKEQQCVIMAENRKSSIIIRMRDAVLFEK

SEQ ID NO: 10522 - protein, 96 aa, Homo sapiens; identical to SEQ ID NO: 10521

SEQ ID NO: 10523 - protein, 96 aa, Homo sapiens; identical to SEQ ID NO: 10521

SEQ ID NO: 10524 - protein, 89 aa, Homo sapiens
MEHKEVVLLLLLFLKSGQGEPLDDYVNTQGPSLFSVTKKQLGAGSREECAAKCEEDKEFTCRYFHRRCTYPEICNSDGHSNITVKSNNV

SEQ ID NO: 10525 - protein, 96 aa, Homo sapiens; identical to SEQ ID NO: 10521

SEQ ID NO: 10526 - protein, 96 aa, Homo sapiens; identical to SEQ ID NO: 10521

SEQ ID NO: 10527 - protein, 225 aa, Homo sapiens
MRPLLLLALLGWLLLAEAKGDAKPEAPCCQEGLRAGGSGSLHLGRDFTVLAGARGSPSPSVSSIPRFWIPGSDNLLVLTVATKETEGFRRFKRSAQFFNYKIQALGLGEDWNVEKGTSAGGGQKVRLLKKALEKHADKEDLVILFADSYDVLFASGPRELLKKFRQARSQVVFSAEELIYPDRRLETKYPVVSDGKRFLGSGGFIGYAPNLSKLVAEWEGQDSDS

SEQ ID NO: 10528 - protein, 727 aa, Homo sapiens
MRPLLLLALLGWLLLAEAKGDAKPEDNLLVLTVATKETEGFRRFKRSAQFFNYKIQALGLGEDWNVEKGTSAGGGQKVRLLKKALEKHADKEDLVILFADSYDVLFASGPRELLKKFRQARSQVVFSAEELIYPDRRLETKYPVVSDGKRFLGSGGFIGYAPNLSKLVAEWEGQDSDSDQLFYTKIFLDPEKREQINITLDHRCRIFQNLDGALDEVVLKFEMGHVRARNLAYDTLPVLIHGNGPTKLQLNYLGNYIPRFWTFETGCTVCDEGLRSLKGIGDEALPTVLVGVFIEQPTPFVSLFFQRLLRLHYPQKHMRLFIHNHEQHHKAQVEEFLAQHGSEYQSVKLVGPEVRMANADARNMGADLCRQDRSCTYYFSVDADVALTEPNSLRLLIQQNKNVIAPLMTRHGRLWSNFWGALSADGYYARSEDYVDIVQGRRVGVWNVPYISNIYLIKGSALRGELQSSDLFHHSKLDPDMAFCANIRQQDVFMFLTNRHTLGHLLSLDSYRTTHLHNDLWEVFSNPEDWKEKYIHQNYTKALAGKLVETPCPDVYWFPIFTEVACDELVEEMEHFGQWSLGNNKDNRIQGGYENVPTIDIHMNQIGFEREWHKFLLEYIAPMTEKLYPGYYTRAQFDLAFVVRYKPDEQPSLMPHHDASTFTINIALNRVGVDYEGGGCRFLRYNCSIRAPRKGWTLMHPGRLTHYHEGLPTTRGTRYIAVSFVDP

SEQ ID NO: 10529 - protein, 283 aa, Homo sapiens
MRPLLLLALLGWLLLAEAKGDAKPEDNLLVLTVATKETEGFRRFKRSAQFFNYKIQALGLGEDWNVEKGTSAGGGQKVRLLKKALEKHADKEDLVILFADSYDVLFASGPRELLKKFRQARSQVVFSAEELIYPDRRLETKYPVVSDGKRFLGSGGFIGYAPNLSKLVAEWEGQDSDSDQLFYTKIFLDPEKREQINITLDHRCRIFQNLDGALVSPWGQGHLPGACYELTASVLTSELSVMPSFPAVVLQLNYLGNYIPRFWTFETGCTVCDEGLRSLKGIG

SEQ ID NO: 10530 - protein, 98 aa, Homo sapiens
MGGCTVKPQLLLLALVLHPWNPCLGADSEKPSSIPTDKLLVITVATKESDGFHRFMQSAKYFNYTVKKEGSVSQVFSTNKRRTRRYLGPWSRRRMERW

SEQ ID NO: 10531 - protein, 758 aa, Homo sapiens
MGGCTVKPQLLLLALVLHPWNPCLGADSEKPSSIPTDKLLVITVATKESDGFHRFMQSAKYFNYTVKVLGQGEEWRGGDGINSIGGGQKVRLMKEVMEHYADQDDLVVMFTECFDVIFAGGPEEVLKKFQKANHKVVFAADGILWPDKRLADKYPVVHIGKRYLNSGGFIGYAPYVNRIVQQWNLQDNDDDQLFYTKVYIDPLKREAINITLDHKCKIFQTLNGAVDEVVLKFENGKARAKNTFYETLPVAINGNGPTKILLNYFGNYVPNSWTQDNGCTLCEFDTVDLSAVDVHPNVSIGVFIEQPTPFLPRFLDILLTLDYPKEALKLFIHNKEVYHEKDIKVFFDKAKHEIKTIKIVGPEENLSQAEARNMGMDFCRQDEKCDYYFSVDADVVLTNPRTLKILIEQNRKIIAPLVTRHGKLWSNFWGALSPDGYYARSEDYVDIVQGNRVGVWNVPYMANVYLIKGKTLRSEMNERNYFVRDKLDPDMALCRNAREMTLQREKDSPTPETFQMLSPPKGVFMYISNRHEFGRLLSTANYNTSHYNNDLWQIFENPVDWKEKYINRDYSKIFTENIVEQPCPDVFWFPIFSEKACDELVEEMEHYGKWSGGKHHDSRISGGYENVPTDDIHMKQVDLENVWLHFIREFIAPVTLKVFAGYYTKGFALLNFVVKYSPERQRSLRPHHDASTFTINIALNNVGEDFQGGGCKFLRYNCSIESPRKGWSFMHPGRLTHLHEGLPVKNGTRYIAVSFIDP

SEQ ID NO: 10532 - protein, 737 aa, Homo sapiens
MGGCTVKPQLLLLALVLHPWNPCLGADSEKPSSIPTDKLLVITVATKESDGFHRFMQSAKYFNYTVKVLGQGEEWRGGDGINSIGGGQKVRLMKEVMEHYADQDDLVVMFTECFDVIFAGGPEEVLKKFQKANHKVVFAADGILWPDKRLADKYPVVHIGKRYLNSGGFIGYAPYVNRIVQQWNLQDNDDDQLFYTKVYIDPLKREAINITLDHKCKIFQTLNGAVDEVVLKFENGKARAKNTFYETLPVAINGNGPTKILLNYFGNYVPNSWTQDNGCTLCEFDTVDLSAVDVHPNVSIGVFIEQPTPFLPRFLDILLTLDYPKEALKLFIHNKEVYHEKDIKVFFDKAKHEIKTIKIVGPEENLSQAEARNMGMDFCRQDEKCDYYFSVDADVVLTNPRTLKILIEQNRKIIAPLVTRHGKLWSNFWGALSPDGYYARSEDYVDIVQGNRVGVWNVPYMANVYLIKGKTLRSEMNERNYFVRDKLDPDMALCRNAREMGVFMYISNRHEFGRLLSTANYNTSHYNNDLWQIFENPVDWKEKYINRDYSKIFTENIVEQPCPDVFWFPIFSEKACDELVEEMEHYGKWSGGKHHDSRISGGYENVPTDDIHMKQVDLENVWLHFIREFIAPVTLKVFAGYYTKGFALLNFVVKYSPERQRSLRPHHDASTFTINIALNNVGEDFQGGGCKFLRYNCSIESPRKGWSFMHPGRLTHLHEGLPVKNGTRYIAVSFIDP

SEQ ID NO: 10533 - protein, 418 aa, Homo sapiens
MLENHILHKRIYILTFFSQQIFILCHAHFIFFFTVRDFCRQDEKCDYYFSVDADVVLTNPRTLKILIEQNRKIIAPLVTRHGKLWSNFWGALSPDGYYARSEDYVDIVQGNRVGVWNVPYMANVYLIKGKTLRSEMNERNYFVRDKLDPDMALCRNAREMTLQREKDSPTPETFQMLSPPKGVFMYISNRHEFGRLLSTANYNTSHYNNDLWQIFENPVDWKEKYINRDYSKIFTENIVEQPCPDVFWFPIFSEKACDELVEEMEHYGKWSGGKHHDSRISGGYENVPTDDIHMKQVDLENVWLHFIREFIAPVTLKVFAGYYTKGFALLNFVVKYSPERQRSLRPHHDASTFTINIALNNVGEDFQGGGCKFLRYNCSIESPRKGWSFMHPGRLTHLHEGLPVKNGTRYIAVSFIDP

SEQ ID NO: 10534 - protein, 703 aa, Homo sapiens
MQSAKYFNYTVKVLGQGEEWRGGDGINSIGGGQKVRLMKEVMEHYADQDDLVVMFTECFDVIFAGGPEEVLKKFQKANHKVVFAADGILWPDKRLADKYPVVHIGKRYLNSGGFIGYAPYVNRIVQQWNLQDNDDDQLFYTKVYIDPLKREAINITLDHKCKIFQTLNGAVDEVVLKFENGKARAKNTFYETLPVAINGNGPTKILLNYFGNYVPNSWTQDNGCTLCEFDTVDLSAVDVHPNVSIGVFIEQPTPFLPRFLDILLTLDYPKEALKLFIHNKEVYHEKDIKVFFDKAKHEIKTIKIVGPEENLSQAEARNMGMDFCRQDEKCDYYFSVDADVVLTNPRTLKILIEQNRKIIAPLVTRHGKLWSNFWGALSPDGYYARSEDYVDIVQGNRVGVWNVPYMANVYLIKGKTLRSEMNERNYFVRDKLDPDMALCRNAREMTLQREKDSPTPETFQMLSPPKGVFMYISNRHEFGRLLSTANYNTSHYNNDLWQIFENPVDWKEKYINRDYSKIFTENIVEQPCPDVFWFPIFSEKACDELVEEMEHYGKWSGGKHHDSRISGGYENVPTDDIHMKQVDLENVWLHFIREFIAPVTLKVFAGYYTKGFALLNFVVKYSPERQRSLRPHHDASTFTINIALNNVGEDFQGGGCKFLRYNCSIESPRKGWSFMHPGRLTHLHEGLPVKNGTRYIAVSFIDP

SEQ ID NO: 10535 - protein, 229 aa, Homo sapiens
MTRFGVRLYKLLVITVATKESDGFHRFMQSAKYFNYTVKVLGQGEEWRGGDGINSIGGGQKVRLMKEVMEHYADQDDLVVMFTECFDVIFAGGPEEVLKKFQKANHKVVFAADGILWPDKRLADKYPVVHIGKRYLNSGGFIGYAPYVNRIVQQWNLQDNDDDQLFYTKVYIDPLKREAINITLDHKCKIFQTLNGAVDEVVLKFENGKARAKNTFYETLPVAINGNGP

SEQ ID NO: 10536 - protein, 171 aa, Homo sapiens
MGHFKDVVTVFLQEILFSFGPCEDAVITKAAPGASPGRRGEKLLVITVATAETEGYLRFLRSAEFFNYTVRTLGLGEEWRGGDVARTVGGGQKVRWLKKEMEKYADREDMIIMFVDSYDVILAGSPTELLKKFVQSGSRLLFSAESFCWPEWGLAEQYPEVGTGKRFLNSG

SEQ ID NO: 10537 - protein, 76 aa, Homo sapiens
MTSSGPGPRFLLLLPLLLPPAASASDRPRGRDPVNPEKLLVITVATAETEGYLRFLRSAEFFNYTVRTLGLGEEWR

SEQ ID NO: 10538 - protein, 738 aa, Homo sapiens
MTSSGPGPRFLLLLPLLLPPAASASDRPRGRDPVNPEKLLVITVATAETEGYLRFLRSAEFFNYTVRTLGLGEEWRGGDVARTVGGGQKVRWLKKEMEKYADREDMIIMFVDSYDVILAGSPTELLKKFVQSGSRLLFSAESFCWPEWGLAEQYPEVGTGKRFLNSGGFIGFATTIHQIVRQWKYKDDDDDQLFYTRLYLDPGLREKLSLNLDHKSRIFQNLNGALDEVVLKFDRNRVRIRNVAYDTLPIVVHGNGPTKLQLNYLGNYVPNGWTPEGGCGFCNQDRRTLPGGQPPPRVFLAVFVEQPTPFLPRFLQRLLLLDYPPDRVTLFLHNNEVFHEPHIADSWPQLQDHFSAVKLVGPEEALSPGEARDMAMDLCRQDPECEFYFSLDADAVLTNLQTLRILIEENRKVIAPMLSRHGKLWSNFWGALSPDEYYARSEDYVELVQRKRVGVWNVPYISQAYVIRGDTLRMELPQRDVFSGSDTDPDMAFCKSFRDKGIFLHLSNQHEFGRLLATSRYDTEHLHPDLWQIFDNPVDWKEQYIHENYSRALEGEGIVEQPCPDVYWFPLLSEQMCDELVAEMEHYGQWSGGRHEDSRLAGGYENVPTVDIHMKQVGYEDQWLQLLRTYVGPMTESLFPGYHTKARAVMNFVVRYRPDEQPSLRPHHDSSTFTLNVALNHKGLDYEGGGCRFLRYDCVISSPRKGWALLHPGRLTHYHEGLPTTWGTRYIMVSFVDP

SEQ ID NO: 10539 - protein, 125 aa, Homo sapiens
TLGLGEEWRGGDVARTVGGGQKVRWLKKEMEKYADREDMIIMFVDSYDVILAGSPTELLKKFVQSGSRLLFSAESFCWPEWGLAEQYPEDSSVLPPPSTKSCASGSTRMMTTTSCSTHGSTWTQD

SEQ ID NO: 10540 - protein, 270 aa, Homo sapiens
  VARIANT 1: note = misc_feature - Xaa can be any naturally occurring amino acid
XFIGFATTIHQIVRQWKYKDDDDDQLFYTRLYLDPGLREKLSLNLDHKSRIFQNLNGALDEVVLKFDRNRVRIRNVAYDTLPIVVHGNGPTKLQLNYLGNYVPNGWTPEGGCGFCNQDRRTLPGGQEVFHEPHIADSWPQLQDHFSAVKLVGPEEALSPGEARDMAMDLCRQDPECEFYFSLDADAVLTNLQTLRILIEENRKVIAPMLSRHGKLWSNFWGALSPDEYYARSEDYVELVQRKRVGVWNVPYISQAYVIRGDTLRMELPQR

SEQ ID NO: 10541 - protein, 66 aa, Homo sapiens
  VARIANT 1: note = misc_feature - Xaa can be any naturally occurring amino acid
XFSLDADAVLTNLQTLRILIEENRKVIAPMLSRHGKLWSNFWGALSPDEYYARSEDYVELVQRKRV

SEQ ID NO: 10542 - protein, 264 aa, Homo sapiens
  VARIANT 1: note = misc_feature - Xaa can be any naturally occurring amino acid
XNFWGALSPDEYYARSEDYVELVQRKRVGVWNVPYISQAYVIRGDTLRMELPQRDVFSGSDTDPDMAFCKSFRDKGIFLHLSNQHEFGRLLATSRYDTEHLHPDLWQIFDNPVDWKEQYIHENYSRALEGEGIVEQPCPDVYWFPLLSEQMCDELVAEMEHYGQWSGGRHEARAVMNFVVRYRPDEQPSLRPHHDSSTFTLNVALNHKGLDYEGGGCRFLRYDCVISSPRKGWALLHPGRLTHYHEGLPTTWGTRYIMVSFVDP

SEQ ID NO: 10543 - protein, 398 aa, Homo sapiens
MALFGALFLALLAGAHAEFPGCKIRVTSKALELVKQEGLRFLEQELETITIPDLRGKEGHFYYNISEKVYDFLSTFITSGMRFLLNQQICPVLYHAGTVLLNSLLDTVPVRSSVDELVGIDYSLMKDPVASTSNLDMDFRGAFFPLTERNWSLPNRAVEPQLQEEERMVYVAFSEFFFDSAMESYFRAGALQLLLVGDKVPHDLDMLLRATYFGSIVLLSPAVIDSPLKLELRVLAPPRCTIKPSGTTISVTASVTIALVPPDQPEVQLSSMTMDARLSAKMALRGKALRTQLDLRRFRIYSNHSALESLALIPLQAPLKTMLQIGVMPMLNERTWRGVQIPLPEGINFVHEVVTNHAGFLTIGADLHFAKGLREVIEKNRPADVRASTAPTPSTAAV

SEQ ID NO: 10544 - protein, 493 aa, Homo sapiens
MALFGALFLALLAGAHAEFPGCKIRVTSKALELVKQEGLRFLEQELETITIPDLRGKEGHFYYNISEVKVTELQLTSSELDFQPQQELMLQITNASLGLRFRRQLLYWFFYDGGYINASAEGVSIRTGLELSRDPAGRMKVSNVSCQASVSRMHAAFGGTFKKVYDFLSTFITSGMRFLLNQQICPVLYHAGTVLLNSLLDTVPVRSSVDELVGIDYSLMKDPVASTSNLDMDFRGAFFPLTERNWSLPNRAVEPQLQEEERMVYVAFSEFFFDSAMESYFRAGALQLLLVGDKVPHDLDMLLRATYFGSIVLLSPAVIDSPLKLELRVLAPPRCTIKPSGTTISVTASVTIALVPPDQPEVQLSSMTMDARLSAKMALRGKALRTQLDLRRFRIYSNHSALESLALIPLQAPLKTMLQIGVMPMLNERTWRGVQIPLPEGINFVHEVVTNHAGFLTIGADLHFAKGLREVIEKNRPADVRASTAPTPSTAAV

SEQ ID NO: 10545 - protein, 493 aa, Homo sapiens; identical to SEQ ID NO: 10544

SEQ ID NO: 10546 - protein, 441 aa, Homo sapiens
MALFGALFLALLAGAHAEFPGCKIRVTSKALELVKQEGLRFLEQELETITIPDLRGKEGHFYYNISEVKVTELQLTSSELDFQPQQELMLQITNASLGLRFRRQLLYWFLKVYDFLSTFITSGMRFLLNQQICPVLYHAGTVLLNSLLDTVPVRSSVDELVGIDYSLMKDPVASTSNLDMDFRGAFFPLTERNWSLPNRAVEPQLQEEERMVYVAFSEFFFDSAMESYFRAGALQLLLVGDKVPHDLDMLLRATYFGSIVLLSPAVIDSPLKLELRVLAPPRCTIKPSGTTISVTASVTIALVPPDQPEVQLSSMTMDARLSAKMALRGKALRTQLDLRRFRIYSNHSALESLALIPLQAPLKTMLQIGVMPMLNERTWRGVQIPLPEGINFVHEVVTNHAGFLTIGADLHFAKGLREVIEKNRPADVRASTAPTPSTAAV

SEQ ID NO: 10547 - protein, 405 aa, Homo sapiens
MLQITNASLGLRFRRQLLYWFFYDGGYINASAEGVSIRTGLELSRDPAGRMKVSNVSCQASVSRMHAAFGGTFKKVYDFLSTFITSGMRFLLNQQICPVLYHAGTVLLNSLLDTVPVRSSVDELVGIDYSLMKDPVASTSNLDMDFRGAFFPLTERNWSLPNRAVEPQLQEEERMVYVAFSEFFFDSAMESYFRAGALQLLLVGDKVPHDLDMLLRATYFGSIVLLSPAVIDSPLKLELRVLAPPRCTIKPSGTTISVTASVTIALVPPDQPEVQLSSMTMDARLSAKMALRGKALRTQLDLRRFRIYSNHSALESLALIPLQAPLKTMLQIGVMPMLNERTWRGVQIPLPEGINFVHEVVTNHAGFLTIGADLHFAKGLREVIEKNRPADVRASTAPTPSTAAV

SEQ ID NO: 10548 - protein, 1894 aa, Homo sapiens
MKAMPWNWTCLLSHLLMVGMGSSTLLTRQPAPLSQKQRSFVTFRGEPAEGFNHLVVDERTGHIYLGAVNRIYKLSSDLKVLVTHETGPDEDNPKCYPPRIVQTCNEPLTTTNNVNKMLLIDYKENRLIACGSLYQGICKLLRLEDLFKLGEPYHKKEHYLSGVNESGSVFGVIVSYSNLDDKLFIATAVDGKPEYFPTISSRKLTKNSEADGMFAYVFHDEFVASMIKIPSDTFTIIPDFDIYYVYGFSSGNFVYFLTLQPEMVSPPGSTTKEQVYTSKLVRLCKEDTAFNSYVEVPIGCERSGVEYRLLQAAYLSKAGAVLGRTLGVHPDDDLLFTVFSKGQKRKMKSLDESALCIFILKQINDRIKERLQSCYRGEGTLDLAWLKVKDIPCSSALLTIDDNFCGLDMNAPLGVSDMVRGIPVFTEDRDRMTSVIAYVYKNHSLAFVGTKSGKLKKIRVDGPRGNALQYETVQVVDPGPVLRDMAFSKDHEQLYIMSERQLTRVPVESCGQYQSCGECLGSGDPHCGWCVLHNTCTRKERCERSKEPRRFASEMKQCVRLTVHPNNISVSQYNVLLVLETYNVPELSAGVNCTFEDLSEMDGLVVGNQIQCYSPAAKEVPRIITENGDHHVVQLQLKSKETGMTFASTSFVFYNCSVHNSCLSCVESPYRCHWCKYRHVCTHDPKTCSFQEGRVKLPEDCPQLLRVDKILVPVEVIKPITLKAKNLPQPQSGQRGYECILNIQGSEQRVPALRFNSSSVQCQNTSYSYEGMEINNLPVELTVVWNGHFNIDNPAQNKVHLYKCGAMRESCGLCLKADPDFACGWCQGPGQCTLRQHCPAQESQWLELSGAKSKCTNPRITEIIPVTGPREGGTKVTIRGENLGLEFRDIASHVKVAGVECSPLVDGYIPAEQIVCEMGEAKPSQHAGFVEICVAVCRPEFMARSSQLYYFMTLTLSDLKPSRGPMSGGTQVTITGTNLNAGSNVVVMFGKQPCLFHRRSPSYIVCNTTSSDEVLEMKVSVQVDRAKIHQDLVFQYVEDPTIVRIEPEWSIVSGNTPIAVWGTHLDLIQNPQIRAKHGGKEHINICEVLNATEMTCQAPALALGPDHQSDLTERPEEFGFILDNVQSLLILNKTNFTYYPNPVFEAFGPSGILELKPGTPIILKGKNLIPPVAGGNVKLNYTVLVGEKPCTVTVSDVQLLCESPNLIGRHKVMARVGGMEYSPGMVYIAPDSPLSLPAIVSIAVAGGLLIIFIVAVLIAYKRKSRESDLTLKRLQMQMDNLESRVALECKEAFAELQTDIHELTSDLDGAGIPFLDYRTYTMRVLFPGIEDHPVLRDLEVPGYRQERVEKGLKLFAQLINNKVFLLSFIRTLESQRSFSMRDRGNVASLIMTVLQSKLEYATDVLKQLLADLIDKNLESKNHPKLLLRRTESVAEKMLTNWFTFLLYKFLKECAGEPLFSLFCAIKQQMEKGPIDAITGEARYSLSEDKLIRQQIDYKTLVLSCVSPDNANSPEVPVKILNCDTITQVKEKILDAIFKNVPCSHRPKAADMDLEWRQGSGARMILQDEDITTKIENDWKRLNTLAHYQVPDGSVVALVSKQVTAYNAVNNSTVSRTSASKYENMIRYTGSPDSLRSRTPMITPDLESGVKMWHLVKNHEHGDQKEGDRGSKMVSEIYLTRLLATKGTLQKFVDDLFETIFSTAHRGSALPLAIKYMFDFLDEQADKHGIHDPHVRHTWKSNCLPLRFWVNMIKNPQFVFDIHKNSITDACLSVVAQTFMDSCSTSEHRLGKDSPSNKLLYAKDIPSYKNWVERYYSDIGKMPAISDQDMNAYLAEQSRMHMNEFNTMSALSEIFSYVGKYSEEILGPLDHDDQCGKQKLAYKLEQVITLMSLDS

SEQ ID NO: 10549 - protein, 1894 aa, Homo sapiens; identical to SEQ ID NO: 10548

SEQ ID NO: 10550 - protein, 522 aa, Homo sapiens
MKAMPWNWTCLLSHLLMVGMGSSTLLTRQPAPLSQKQRSFVTFRGEPAEGFNHLVVDERTGHIYLGAVNRIYKLSSDLKVLVTHETGPDEDNPKCYPPRIVQTCNEPLTTTNNVNKMLLIDYKENRLIACGSLYQGICKLLRLEDLFKLGEPYHKKEHYLSGVNESGSVFGVIVSYSNLDDKLFIATAVDGKPEYFPTISSRKLTKNSEADGMFAYVFHDEFVASMIKIPSDTFTIIPDFDIYYVYGFSSGNFVYFLTLQPEMVSPPGSTTKEQVYTSKLVRLCKEDTAFNSYVEVPIGCERSGVEYRLLQAAYLSKAGAVLGRTLGVHPDDDLLFTVFSKGQKRKMKSLDESALCIFILKQINDRIKERLQSCYRGEGTLDLAWLKVKDIPCSSALLTIDDNFCGLDMNAPLGVSDMVRGIPVFTEDRDRMTSVIAYVYKNHSLAFVGTKSGKLKKSFGTGPQGGITQEWIGVEGDPPGANIASQEQMLCVYLQCSSHKAISDQRVQPLLCCFLNVPGNSS

SEQ ID NO: 10551 - protein, 492 aa, Homo sapiens
MKAMPWNWTCLLSHLLMVGMGSSTLLTRQPAPLSQKQRSFVTFRGEPAEGFNHLVVDERTGHIYLGAVNRIYKLSSDLKVLVTHETGPDEDNPKCYPPRIVQTCNEPLTTTNNVNKMLLIDYKENRLIACGSLYQGICKLLRLEDLFKLGEPYHKKEHYLSGVNESGSVFGVIVSYSNLDDKLFIATAVDGKPEYFPTISSRKLTKNSEADGMFAYVFHDEFVASMIKIPSDTFTIIPDFDIYYVYGFSSGNFVYFLTLQPEMVSPPGSTTKEQVYTSKLVRLCKEDTAFNSYVEVPIGCERSGVEYRLLQAAYLSKAGAVLGRTLGVHPDDDLLFTVFSKGQKRKMKSLDESALCIFILKQINDRIKERLQSCYRGEGTLDLAWLKVKDIPCSSALLTIDDNFCGLDMNAPLGVSDMVRGIPVFTEDRDRMTSVIAYVYKNHSLAFVGTKSGKLKKMPGTSLCPTLELQTGPRSHRATVTLELLFSSCSSN

SEQ ID NO: 10552 - protein, 160 aa, Homo sapiens
GPDVTAGGPVEARQHPYALQCPGWSHPHPVQGGGLPAAGGQPAGPAWGAPCPPGGGEPGVAPGAADRRGGRGQVQERQREREGADEGHHRDLPDAAALSQGHTAAVCGQLLPERAGLGTRCHLQSSTSSTSWTSRQRSTTSRMKTPSTSGRRTAYRSGSG

SEQ ID NO: 10553 - protein, 162 aa, Homo sapiens
MALQLWALTLLGLLGAGASLRPRKLDFFRSEKELNHLAVDEASGVVYLGAVNALYQLDAKLQLEQQVATGPALDNKKCTPPIEASQCHEAEMTDNVNQLLLLDPPRKRLVECGSLFKGICALRALSNISLRLFYEDGSGEKSFVASNDEGVATVGLVSSTGP

SEQ ID NO: 10554 - protein, 1838 aa, Homo sapiens
MALQLWALTLLGLLGAGASLRPRKLDFFRSEKELNHLAVDEASGVVYLGAVNALYQLDAKLQLEQQVATGPALDNKKCTPPIEASQCHEAEMTDNVNQLLLLDPPRKRLVECGSLFKGICALRALSNISLRLFYEDGSGEKSFVASNDEGVATVGLVSSTGPGGDRVLFVGKGNGPHDNGIIVSTRLLDRTDSREAFEAYTDHATYKAGYLSTNTQQFVAAFEDGPYVFFVFNQQDKHPARNRTLLARMCREDPNYYSYLEMDLQCRDPDIHAAAFGTCLAASVAAPGSGRVLYAVFSRDSRSSGGPGAGLCLFPLDKVHAKMEANRNACYTGTREARDIFYKPFHGDIQCGGHAPGSSKSFPCGSEHLPYPLGSRDGLRGTAVLQRGGLNLTAVTVAAENNHTVAFLGTSDGRILKVYLTPDGTSSEYDSILVEINKRVKRDLVLSGDLGSLYAMTQDKVFRLPVQECLSYPTCTQCRDSQDPYCGWCVVEGRCTRKAECPRAEEASHWLWSRSKSCVAVTSAQPQNMSRRAQGEVQLTVSPLPALSEEDELLCLFGESPPHPARVEGEAVICNSPSSIPVTPPGQDHVAVTIQLLLRRGNIFLTSYQYPFYDCRQAMSLEENLPCISCVSNRWTCQWDLRYHECREASPNPEDGIVRAHMEDSCPQFLGPSPLVIPMNHETDVNFQGKNLDTVKGSSLHVGSDLLKFMEPVTMQESGTFAFRTPKLSHDANETLPLHLYVKSYGKNIDSKLHVTLYNCSFGRSDCSLCRAANPDYRCAWCGGQSRCVYEALCNTTSECPPPVITRIQPETGPLGGGIRITILGSNLGVQAGDIQRISVAGRNCSFQPERYSVSTRIVCVIEAAETPFTGGVEVDVFGKLGRSPPNVQFTFQQPKPLSVEPQQGPQAGGTTLTIHGTHLDTGSQEDVRVTLNGVPCKVTKFGAQLQCVTGPQATRGQMLLEVSYGGSPVPNPGIFFTYRENPVLRAFEPLRSFASGGRSINVTGQGFSLIQRFAMVVIAEPLQSWQPPREAESLQPMTVVGTDYVFHNDTKVVFLSPAVPEEPEAYNLTVLIEMDGHRALLRTEAGAFEYVPDPTFENFTGGVKKQVNKLIHARGTNLNKAMTLQEAEAFVGAERCTMKTLTETDLYCEPPEVQPPPKRRQKRDTTHNLPEFIVKFGSREWVLGRVEYDTRVSDVPLSLILPLVIVPMVVVIAVSVYCYWRKSQQAEREYEKIKSQLEGLEESVRDRCKKEFTDLMIEMEDQTNDVHEAGIPVLDYKTYTDRVFFLPSKDGDKDVMITGKLDIPEPRRPVVEQALYQFSNLLNSKSFLINFIHTLENQREFSARAKVYFASLLTVALHGKLEYYTDIMHTLFLELLEQYVVAKNPKLMLRRSETVVERMLSNWMSICLYQYLKDSAGEPLYKLFKAIKHQVEKGPVDAVQKKAKYTLNDTGLLGDDVEYAPLTVSVIVQDEGVDAIPVKVLNCDTISQVKEKIIDQVYRGQPCSCWPRPDSVVLEWRPGSTAQILSDLDLTSQREGRWKRVNTLMHYNVRDGATLILSKVGVSQQPEDSQQDLPGERHALLEEENRVWHLVRPTDEVDEGKSKRGSVKEKERTKAITEIYLTRLLSVKGTLQQFVDNFFQSVLAPGHAVPPAVKYFFDFLDEQAEKHNIQDEDTIHIWKTNSLPLRFWVNILKNPHFIFDVHVHEVVDASLSVIAQTFMDACTRTEHKLSRDSPSNKLLYAKEISTYKKMVEDYYKGIRQMVQVSDQDMNTHLAEISRAHTDSLNTLVALHQLYQYTQKYYDEIINALEEDPAAQKMQLAFRLQQIAAALENKVTDL

SEQ ID NO: 10555 - protein, 477 aa, Homo sapiens
MALQLWALTLLGLLGAGASLRPRKLDFFRSEKELNHLAVDEASGVVYLGAVNALYQLDAKLQLEQQVATGPALDNKKCTPPIEASQCHEAEMTDNVNQLLLLDPPRKRLVECGSLFKGICALRALSNISLRLFYEDGSGEKSFVASNDEGVATVGLVSSTGPGGDRVLFVGKGNGPHDNGIIVSTRLLDRTDSREAFEAYTDHATYKAGYLSTNTQQFVAAFEDGPYVFFVFNQQDKHPARNRTLLARMCREDPNYYSYLEMDLQCRDPDIHAAAFGTCLAASVAAPGSGRVLYAVFSRDSRSSGGPGAGLCLFPLDKVHAKMEANRNACYTGTREARDIFYKPFHGDIQCGGHAPGSSKSFPCGSEHLPYPLGSRDGLRGTAVLQRGGLNLTAVTVAAENNHTVAFLGTSDGRILKVYLTPDGTSSEYDSILVEINKRVKRDLVLSGDLGSLYAMTQDKVFRLPVQECLSYPTCTQ

SEQ ID NO: 10556 - protein, 1838 aa, Homo sapiens; identical to SEQ ID NO: 10554

SEQ ID NO: 10557 - protein, 347 aa, Homo sapiens [sequence omitted]

SEQ ID NO: 10558 - protein, 189 aa, Homo sapiens
  VARIANT 1: note = misc_feature - Xaa can be any naturally occurring amino acid
XEVWGAAPVCHWPPGDTGPDASGGLLRGVPRAQPRHLLHLPRKPRTASLRAATKLCQVVGTDYVFHNDTKVVFLSPAVPEEPEAYNLTVLIEMDGHRALLRTEAGAFEYVPDPTFENFTGGVKKQVNKLIHARGTNLNKAMTLQEAEAFVGAERCTMKTLTETDLYCEPPEVQPPPKRRQKRDTTHNLP

SEQ ID NO: 10559 - protein, 84 aa, Homo sapiens
  VARIANT 1: note = misc_feature - Xaa can be any naturally occurring amino acid
XTDVNFQGKNLDTVKVWMSGGGGRGKPTEDVQRLLQTQGSSLHVGSDLLKFMEPVTMQESGTFAFRTPKLSHDANETLPLHLYV

SEQ ID NO: 10560 - protein, 234 aa, Homo sapiens
YKPFHGDIQCGGHAPGSSKSFPCGSEHLPYPLGSRDGLRGTAVLQRGGLNLTAVTVAAENNHTVAFLEWRPGSTAQILSDLDLTSQREGRWKRVNTLMHYNVRDGATLILSKVGVSQQPEDSQQDLPGERHALLEEENRVWHLVRPTDEVDEGKSKRGSVKEKERTKAITEIYLTRLLSVKGTLQQFVDNFFQSVLAPGHAVPPAVKYFFDFLDEQAEKHNIQDEDTIHIWKTN

SEQ ID NO: 10561 - protein, 502 aa, Homo sapiens
MAQRCVCVLALVAMLLLVFPTVSRSMGPRSGEHQRASRIPSQFSKEERVAMKEALKGAIQIPTVTFSSEKSNTTALAEFGKYIHKVFPTVVSTSFIQHEVVEEYSHLFTIQGSDPSLQPYLLMAHFDVVPAPEEGWEVPPFSGLERDGIIYGRGTLDDKNSVMALLQALELLLIRKYIPRRSFFISLGHDEESSGTGAQRISALLQSRGVQLAFIVDEGGFILDDFIPNFKKPIALIAVSEKGSMNLMLQVNMTSGHSSAPPKETSIGILAAAVSRLEQTPMPIIFGSGTVVTVLQQLANEFPFPVNIILSNPWLFEPLISRFMERNPLTNAIIRTTTALTIFKAGVKFNVIPPVAQATVNFRIHPGQTVQEVLELTKNIVADNRVQFHVLSAFDPLPVSPSDDKALGYQLLRQTVQSVFPEVNITAPVTSIGNTDSRFFTNLTTGIYRFYPIYIQPEDFKRIHGVNEKISVQAYETQVKFIFELIQNADTDQEPVSHLHKL

SEQ ID NO: 10562 - protein, 165 aa, Homo sapiens
MAKMNLSSYILILTFSLFSQGILLSASKSIRNLDDDMVFNTFRLGKGFQKEDTAEKSVIAPSLEQYKNDESSFMNEEENKVSKNTGSKHNFLNHGLPLNLAIKPYLALKGSVAFPAENGVQNTESTQEKREIGDEENSAKFPIGRRDFDMLRCMLGRVYRPCWQV

SEQ ID NO: 10563 - protein, 290 aa, Homo sapiens
MDLVLKRCLLHLAVIGALLAVGATKGGQVSLKVSNDGPTLIGANASFSIALNFPGSQKVLPDGQVIWVNNTIINGSQVWGGQPVYPQETDDACIFPDGGPCPSGSWSQKRSFVYVWKTWEGIESAEILQAVPSGEGDAFELTVSCQGGLPKEACMEISSPGCQPPAQRLCQPVLPSPACQLVLHQILKGGSGTYCLNVSLADTNSLAVVSTQLIMPGQEAGLGQVPLIVGILLVLMAVVLASLIYRRRLMKQDFSVPQLPHSSSHWLRLPRIFCSCPIGENSPLLSGQQV

SEQ ID NO: 10564 - protein, 575 aa, Homo sapiens
MDLVLKRCLLHLAVIGALLAVGATKGSQVWGGQPVYPQETDDACIFPDGGPCPSGSWSQKRSFVYVWKTWGQYWQVLGGPVSGLSIGTGRAMLGTHTMEVTVYHRRGSRSYVPLAHSSSAFTITDQVPFSVSVSQLRALDGGNKHFLRNQPLTFALQLHDPSGYLAEADLSYTWDFGDSSGTLISRALVVTHTYLEPGPVTAQVVLQAAIPLTSCGSSPVPGTTDGHRPTAEAPNTTAGQVPTTEVVGTTPGQAPTAEPSGTTSVQVPTTEVISTAPVQMPTAESTGMTPEKVPVSEVMGTTLAEMSTPEATGMTPAEVSIVVLSGTTAAQVTTTEWVETTARELPIPEPEGPDASSIMSTESITGSLGPLLDGTATLRLVKRQVPLDCVLYRYGSFSVTLDIVQGIESAEILQAVPSGEGDAFELTVSCQGGLPKEACMEISSPGCQPPAQRLCQPVLPSPACQLVLHQILKGGSGTYCLNVSLADTNSLAVVSTQLIMPGQEAGLGQVPLIVGILLVLMAVVLASLIYRRRLMKQDFSVPQLPHSSSHWLRLPRIFCSCPIGENSPLLSGQQV

SEQ ID NO: 10565 - protein, 151 aa, Homo sapiens
MDLVLKRCLLHLAVIGALLAVGATKVPRNQDWLGVSRQLRTKAWNRQLYPEWTEAQRLDCWRGGQVSLKVSNDGPTLIGANASFSIALNFPGSQKVLPDGQVIWVNNTIINGSQVWGGQPVYPQETDDACIFPDGGPCPSGSWSQKRSFVY

SEQ ID NO: 10566 - protein, 344 aa, Homo sapiens
MDLVLKRCLLHLAVIGALLAVGATKVPRNQDWLGVSRQLRTKAWNRQLYPEWTEAQRLDCWRGGQVSLKVSNDGPTLIGANASFSIALNFPGSQKVLPDGQVIWVNNTIINGSQVWGGQPVYPQETDDACIFPDGGPCPSGSWSQKRSFVYVWKTWDQVPFSVSVSQLRALDGGNKHFLRNQPLTFALQLHDPSGYLAEADLSYTWDFGDSSGTLISRALVVTHTYLEPGPVTAQVVLQAAIPLTSCGSSPVPGTTDGHRPTAEAPNTTAGQVPTTEVVGTTPGQAPTAEPSGTTSVQVPTTEVISTAPVQMPTAESTGMTPEKVPVSEVMGTTLAEMSTPEAT

SEQ ID NO: 10567 - protein, 668 aa, Homo sapiens
MDLVLKRCLLHLAVIGALLAVGATKVPRNQDWLGVSRQLRTKAWNRQLYPEWTEAQRLDCWRGGQVSLKVSNDGPTLIGANASFSIALNFPGSQKVLPDGQVIWVNNTIINGSQVWGGQPVYPQETDDACIFPDGGPCPSGSWSQKRSFVYVWKTWGQYWQVLGGPVSGLSIGTGRAMLGTHTMEVTVYHRRGSRSYVPLAHSSSAFTITDQVPFSVSVSQLRALDGGNKHFLRNQPLTFALQLHDPSGYLAEADLSYTWDFGDSSGTLISRALVVTHTYLEPGPVTAQVVLQAAIPLTSCGSSPVPGTTDGHRPTAEAPNTTAGQVPTTEVVGTTPGQAPTAEPSGTTSVQVPTTEVISTAPVQMPTAESTGMTPEKVPVSEVMGTTLAEMSTPEATGMTPAEVSIVVLSGTTAAQVTTTEWVETTARELPIPEPEGPDASSIMSTESITGSLGPLLDGTATLRLVKRQVPLDCVLYRYGSFSVTLDIVQGIESAEILQAVPSGEGDAFELTVSCQGGLPKEACMEISSPGCQPPAQRLCQPVLPSPACQLVLHQILKGGSGTYCLNVSLADTNSLAVVSTQLIMPVPGILLTGQEAGLGQVPLIVGILLVLMAVVLASLIYRRRLMKQDFSVPQLPHSSSHWLRLPRIFCSCPIGENSPLLSGQQV

SEQ ID NO: 10568 - protein, 661 aa, Homo sapiens
MDLVLKRCLLHLAVIGALLAVGATKVPRNQDWLGVSRQLRTKAWNRQLYPEWTEAQRLDCWRGGQVSLKVSNDGPTLIGANASFSIALNFPGSQKVLPDGQVIWVNNTIINGSQVWGGQPVYPQETDDACIFPDGGPCPSGSWSQKRSFVYVWKTWGQYWQVLGGPVSGLSIGTGRAMLGTHTMEVTVYHRRGSRSYVPLAHSSSAFTITDQVPFSVSVSQLRALDGGNKHFLRNQPLTFALQLHDPSGYLAEADLSYTWDFGDSSGTLISRALVVTHTYLEPGPVTAQVVLQAAIPLTSCGSSPVPGTTDGHRPTAEAPNTTAGQVPTTEVVGTTPGQAPTAEPSGTTSVQVPTTEVISTAPVQMPTAESTGMTPEKVPVSEVMGTTLAEMSTPEATGMTPAEVSIVVLSGTTAAQVTTTEWVETTARELPIPEPEGPDASSIMSTESITGSLGPLLDGTATLRLVKRQVPLDCVLYRYGSFSVTLDIVQGIESAEILQAVPSGEGDAFELTVSCQGGLPKEACMEISSPGCQPPAQRLCQPVLPSPACQLVLHQILKGGSGTYCLNVSLADTNSLAVVSTQLIMPGQEAGLGQVPLIVGILLVLMAVVLASLIYRRRLMKQDFSVPQLPHSSSHWLRLPRIFCSCPIGENSPLLSGQQV

SEQ ID NO: 10569 - protein, 661 aa, Homo sapiens; identical to SEQ ID NO: 10568

SEQ ID NO: 10570 - protein, 661 aa, Homo sapiens; identical to SEQ ID NO: 10568

SEQ ID NO: 10571 - protein, 296 aa, Homo sapiens
MDLVLKRCLLHLAVIGALLAVGATKVPRNQDWLGVSRQLRTKAWNRQLYPEWTEAQRLDCWRGGQVSLKVSNDGPTLIGANASFSIALNFPGSQKVLPDGQVIWVNNTIINGSQVWGGQPVYPQETDDACIFPDGGPCPSGSWSQKRSFVYVWKTWVPGTTDGHRPTAEAPNTTAGQVPTTEVVGTTPGQAPTAEPSGTTSVQVPTTEVISTAPVQMPTAESTAAQVTTTEWVETTARELPIPEPEGPDASSIMSTESITGSLGPLLDGTATLRLVKRQVPLDCVLYRYGSFSVTL

SEQ ID NO: 10572 - protein, 299 aa, Homo sapiens
MDLVLKRCLLHLAVIGALLAVGATKVPRNQDWLGVSRQLRTKAWNRQLYPEWTEAQRLDCWRGSQVWGGQPVYPQETDDACIFPDGGPCPSGSWSQKRSFVYVWKTWGQYWQVLGGPVSGLSIGTGRAMLGTHTMEVTVYHRRGSRSYVPLAHSSSAFTITDQVPFSVSVSQLRALDGGNKHFLRNQPLTFALQLHDPSGYLAEADLSYTWDFGDSSGTLISRALVVTHTYLEPGPVTAQVVLQAAIPLTSCGSSPVPGTTDGHRPTAEAPNTTAGQVPTTEVVGTTPGQAPTAEPSGT

SEQ ID NO: 10573 - protein, 134 aa, Homo sapiens
MGKEEIPRPTLTSVKTLLYTKEFPQTVKVPRNQDWLGVSRQLRTKAWNRQLYPEWTEAQRLDCWRGGQVSLKVSNDGPTLIGANASFSIALNFPGSQKVLPDGQVIWVNNTIINGSQVWGGQPVYPQETDDACI

SEQ ID NO: 10574 - protein, 452 aa, Homo sapiens
  VARIANT 1: note = misc_feature - Xaa can be any naturally occurring amino acid
XQVWGGQPVYPQETDDACIFPDGGPCPSGSWSQKRSFVYVWKTWGQYWQVLGGPVSGLSIGTGRAMLGTHTMEVTVYHRRGSRSYVPLAHSSSAFTITDQVPFSVSVSQLRALDGGNKHFLRNQPLTFALQLHDPSGYLAEADLSYTWDFGDSSGTLISRALVVTHTYLEPGPVTAQVVLQAAIPLTSCGSSPVPGTTDGHRPTAEAPNTTAGQVPTTEVVGTTPGQAPTAEPSGTTSVQVPTTEVISTAPVQMPTAESTAAQVTTTEWVETTARELPIPEPEGPDASSIMSTESITGSLGPLLDGTATLRLVKRQVPLDCVLYRYGSFSVTLDIVQGIESAEILQAVPSGEGDAFELTVSCQGGLPKEACMEISSPGCQPPAQRLCQPVLPSPACQLVLHQILKGGSGTYCLNVSLADTNSLAVVSTQLIMPVPGILLTGQEAGLGQVPLI

SEQ ID NO: 10575 - protein, 252 aa, Homo sapiens
MAELEFVQIIIIVVVMMVMVVVITCLLSHYKLSARSFISRHSQGRRREDALSSEGCLWPSESTVSGNGIPEPQVYAPPRPTDRLAVPPFAQRERFHRFQPTYPYLQHEIDLPPTISLSDGEEPPPYQGPCTLQLRDPEQQLELNRESVRAPPNRTIFDSDLMDSARLGGPCPPSSNSGISATCYGSGGRMEGPPPTYSEVIGHYPGSSFQHQQSSGPPSLLEGTRLHHTHIAPLESAAIWSKEKDKQKGHPL

SEQ ID NO: 10576 - protein, 227 aa, Homo sapiens
MHRLMGVNSTAAAAAGQPNVSCTCNCKRSLFQSMEISCHGFPVCKSHQHQEWKSLCWSLRSPGGASSITGFGSMKVTNPAMNLPECQWLRIQKAELEFVQIIIIVVVMMVMVVVITCLLSHYKLSARSFISRHSQGRRREDALSSEGCLWPSESTVSGNGIPEPQVYAPPRPTDRLAVPPFAQRERFHRFQPTYPYLQHEIDLPPTISLSDGEEPPPYQGPCTLQLR

SEQ ID NO: 10577 - protein, 287 aa, Homo sapiens
MHRLMGVNSTAAAAAGQPNVSCTCNCKRSLFQSMEITELEFVQIIIIVVVMMVMVVVITCLLSHYKLSARSFISRHSQGRRREDALSSEGCLWPSESTVSGNGIPEPQVYAPPRPTDRLAVPPFAQRERFHRFQPTYPYLQHEIDLPPTISLSDGEEPPPYQGPCTLQLRDPEQQLELNRESVRAPPNRTIFDSDLMDSARLGGPCPPSSNSGISATCYGSGGRMEGPPPTYSEVIGHYPGSSFQHQQSSGPPSLLEGTRLHHTHIAPLESAAIWSKEKDKQKGHPL

SEQ ID NO: 10578 - protein, 237 aa, Homo sapiens
MMVMVVVITCLLSHYKLSARSFISRHSQGRRREDALSSEGCLWPSESTVSGNGIPEPQVYAPPRPTDRLAVPPFAQRERFHRFQPTYPYLQHEIDLPPTISLSDGEEPPPYQGPCTLQLRDPEQQLELNRESVRAPPNRTIFDSDLMDSARLGGPCPPSSNSGISATCYGSGGRMEGPPPTYSEVIGHYPGSSFQHQQSSGPPSLLEGTRLHHTHIAPLESAAIWSKEKDKQKGHPL

SEQ ID NO: 10579 - protein, 237 aa, Homo sapiens; identical to SEQ ID NO: 10578

SEQ ID NO: 10580 - protein, 237 aa, Homo sapiens; identical to SEQ ID NO: 10578

SEQ ID NO: 10581 - protein, 208 aa, Homo sapiens
MPAIPAHGAELEFVQIIIIVVVMMVMVVVITCLLSHYKLSARSFISRHSQGRRREDALSSEGCLWPSESTVSGNGIPEPQVYAPPRPTDRLAVPPFAQRERFHRFQPTYPYLQHEIDLPPTISLSDGEEPPPYQGPCTLQLRDPEQQLELNRESVRAPPNRTIFDSDLMDSARLGGPCPPSSNSGISATCYGSGGRMEGPPPTYSEVI

SEQ ID NO: 10582 - protein, 465 aa, Homo sapiens
MLPLWTLSLLLGAVAGKEVCYERLGCFSDDSPWSGITERPLHILPWSPKDVNTRFLLYTNENPNNFQEVAADSSSISGSNFKTNRKTRFIIHGFIDKGEENWLANVCKNLFKVESVNCICVDWKGGSRTGYTQASQNIRIVGAEVAYFVEFLQSAFGYSPSNVHVIGHSLGAHAAGEAGRRTNGTIGRITGLDPAEPCFQGTPELVRLDPSDAKFVDVIHTDGAPIVPNLGFGMSQVVGHLDFFPNGGVEMPGCKKNILSQIVDIDGIWEGTRDFAACNHLRSYKYYTDSIVNPDGFAGFPCASYNVFTANKCFPCPSGGCPQMGHYADRYPGKTNDVGQKFYLDTGDASNFARWRYKVSVTLSGKKVTGHILVSLFGNKGNSKQYEIFKGTLKPDSTHSNEFDSDVDVGDLQMVKFIWYNNVINPTLPRVGASKIIVETNVGKQFNFCSPETVREEVLLTLTPC

SEQ ID NO: 10583 - protein, 179 aa, Homo sapiens
KLFEVEEVNCICVDWKKGSQATYTQAANNVRVVGAQVAQMLDILLTEYSYPPSKVHLIGHSLGAHVAGEAGSKTPGLSRITGLDPVEASFESTPEEVRLDPSDADFVDVIHTDAAPLIPFLGFGTNQQMGHLDFFPNGGESMPGCKKNALSQIVDLDGIWAGQVLPVSRSRMPTDGSLC

SEQ ID NO: 10584 - protein, 132 aa, Homo sapiens
MLIFWTITLFLLGAAKGKEVCYEDLGCFSDTEPWGGTAIRPLKILPWSPEKIGTRFLLYTNENPNNFQILLLSDPSTIEASNFQMDRKTRFIIHGFIDKGDESWVTDMCKKLFEVEEVNCICVDWKKGSQAT

SEQ ID NO: 10585 - protein, 191 aa, Homo sapiens
MLIFWTITLFLLGAAKGKEVCYEDLGCFSDTEPWGGTAIRPLKILPWSPEKIGTRFLLYTNENPNNFQILLLSDPSTIEASNFQMDRKTRFIIHGFIDKGDESWVTDMCKKLFEVEEVNCICVDWKKGSQATYTQAANNVRVVGAQVAQMLDILLTEYSYPPSKVHLIGHSLGAHVAGEAGSKTPGLSRIT

SEQ ID NO: 10586 - protein, 467 aa, Homo sapiens
MLIFWTITLFLLGAAKGKEVCYEDLGCFSDTEPWGGTAIRPLKILPWSPEKIGTRFLLYTNENPNNFQILLLSDPSTIEASNFQMDRKTRFIIHGFIDKGDESWVTDMCKKLFEVEEVNCICVDWKKGSQATYTQAANNVRVVGAQVAQMLDILLTEYSYPPSKVHLIGHSLGAHVAGEAGSKTPGLSRITGLDPVEASFESTPEEVRLDPSDADFVDVIHTDAAPLIPFLGFGTNQQMGHLDFFPNGGESMPGCKKNALSQIVDLDGIWAGTRDFVACNHLRSYKYYLESILNPDGFAAYPCTSYKSFESDKCFPCPDQGCPQMGHYADKFAGRTSEEQQKFFLNTGEASNFARWRYGVSITLSGRTATGQIKVALFGNKGNTHQYSIFRGILKPGSTHSYEFDAKLDVGTIEKVKFLWNNNVINPTLPKVGATKITVQKGEEKTVYNFCSEDTVREDTLLTLTPC

SEQ ID NO: 10587 - protein, 467 aa, Homo sapiens; identical to SEQ ID NO: 10586

SEQ ID NO: 10588 - protein, 467 aa, Homo sapiens
MLIFWTITLFLLGAAKGKEVCYEDLGCFSDTEPWGGTAIRPLKILPWSPEKIGTRFLLYTNENPNNFQILLLSDPSTIEASNFQMDRKTRFIIHGFIDKGDESWVTDMCKKLFEVEEVNCICVDWKKGSQATYTQAANNVRVVGAQVAQMLDILLVKYSYPPSKVHLIGHSLGAHVAGEAGSKTPGLSRITGLDPVEASFESTPEEVRLDPSDADFVDVIHTDAAPLIPFLGFGTNQQMGHLDFFPNGGESMPGCKKNALSQIVDLDGIWAGTRDFVACNHLRSYKYYLESILNPDGFAAYPCTSYKSFESDKCFPCPDQGCPQMGHYADKFAGRTSEEQQKFFLNTGEASNFARWRYGVSITLSGRTATGQIKVALFGNKGNTHQYSIFRGILKPGSTHSYEFDAKLDVGTIEKVKFLWNNNVINPTLPKVGATKITVQKGEEKTVYNFCSEDTVREDTLLTLTPC

SEQ ID NO: 10589 - protein, 118 aa, Homo sapiens
MLIFWTITLFLLGAAKGKEVCYEDLGCFSDTEPWGGTAIRPLKILPWSPEKIGTRFLLYTNENPNNFQILLLSDPSTIEASNFQMDRKTRFIIHGFIDKGDESWVTDMCKQPGASPRA

SEQ ID NO: 10590 - protein, 185 aa, Homo sapiens
MLIFWTITLFLLGAAKGKEVCYEDLGCFSDTEPWGGTAIRPLKILPWSPEKIGTRFLLYTNENPNNFQILLLSDPSTIEASNFQMDRKTRFIIHGFIDKGDESWVTDMCKTEYSYPPSKVHLIGHSLGAHVAGEAGSKTPGLSRITGLDPVEASFESTPEEVRLDPSDADFVDVIHTDAAPLIPF

SEQ ID NO: 10591 - protein, 163 aa, Homo sapiens
MLIFWTITLFLLGAAKGKEVCYEDLGCFSDTEPWGGTAIRPLKILPWSPEKIGTRFLLYTNENPNNFQILLLSDPSTIEASNFQMDRKTRFIIHGFIDKGDESWVTDMCKTPGLSRITGLDPVEASFESTPEEVRLDPSDADFVDVIHTDAAPLIPFLGFGTN

SEQ ID NO: 10592 - protein, 467 aa, Homo sapiens
MLGIWIVAFLFFGTSRGKEVCYERLGCFKDGLPWTRTFSTELVGLPWSPEKINTRFLLYTIHNPNAYQEISAVNSSTIQASYFGTDKITRINIAGWKTDGKWQRDMCNVLLQLEDINCINLDWINGSREYIHAVNNLRVVGAEVAYFIDVLMKKFEYSPSKVHLIGHSLGAHLAGEAGSRIPGLGRITGLDPAGPFFHNTPKEVRLDPSDANFVDVIHTNAARILFELGVGTIDACGHLDFYPNGGKHMPGCEDLITPLLKFNFNAYKKEMASFFDCNHARSYQFYAESILNPDAFIAYPCRSYTSFKAGNCFFCSKEGCPTMGHFADRFHFKNMKTNGSHYFLNTGSLSPFARWRHKLSVKLSGSEVTQGTVFLRVGGAVRKTGEFAIVSGKLEPGMTYTKLIDADVNVGNITSVQFIWKKHLFEDSQNKLGAEMVINTSGKYGYKSTFCSQDIMGPNILQNLKPC

SEQ ID NO: 10593 - protein, 112 aa, Homo sapiens
MARSSWQLSPAAPEHVAAALYQPRASEMQHLRRMPRVRSLFQEQEEPEPGMEEAGEMEQKQLQKRFGGFTGARKSARKLANQKRFSEFMRQYLVLSMQSSQRRRTLHQNGNV

SEQ ID NO: 10594 - protein, 154 aa, Homo sapiens
MKVLLCDLLLLSLFSSVFSSCQRDCLTCQEKLHPALDSFDLEVCILECEEKVFPSPLWTPCTKVMARSSWQLSPAAPEHVAAALYQPRASEMQHLRRMPRVRSLFQEQEEPEPGMEEAGEMEQKQLQKRFGGFTGARKSARKLANQKRFSEFMR

SEQ ID NO: 10595 - protein, 176 aa, Homo sapiens
MKVLLCDLLLLSLFSSVFSSCQRDCLTCQEKLHPALDSFDLEVCILECEEKVFPSPLWTPCTKVMARSSWQLSPAAPEHVAAALYQPRASEMQHLRRMPRVRSLFQEQEEPEPGMEEAGEMEQKQLQKRFGGFTGARKSARKLANQKRFSEFMRQYLVLSMQSSQRRRTLHQNGNV

SEQ ID NO: 10596 - protein, 93 aa, Homo sapiens
MENGYTYEDYKNTAEWLLSHTKHRPQVAIICGSGLGGLTDKLTQAQIFDYGEIPNFPRSTVPGHAGRLVFGFLNGRACVMMQGRFHMYEGYPL

SEQ ID NO: 10597 - protein, 289 aa, Homo sapiens
MENGYTYEDYKNTAEWLLSHTKHRPQVAIICGSGLGGLTDKLTQAQIFDYGEIPNFPRSTVPGHAGRLVFGFLNGRACVMMQGRFHMYEGYPLWKVTFPVRVFHLLGVDTLVVTNAAGGLNPKFEVGDIMLIRDHINLPGFSGQNPLRGPNDERFGDRFPAMSDAYDRTMRQRALSTWKQMGEQRELQEGTYVMVAGPSFETVAECRVLQKLGADAVGMSTVPEVIVARHCGLRVFGFSLITNKVIMDYESLEKANHEEVLAAGKQAAQKLEQFVSILMASIPLPDKAS

SEQ ID NO: 10598 - protein, 61 aa, Homo sapiens
MMQGRFHMYEGYPLWKVTFPVRVFHLLGVDTLVVTNAAGGLNPKFEVGDIMLIRDHINLPG

SEQ ID NO: 10599 - protein, 221 aa, Homo sapiens
MQRGLALSLVSGARRQSHAAASAGRDARGNRAGVAPPEQEGDRYTYEDYKNTAEWLLSHTKHRPQVAIICGSGLGGLTDKLTQAQIFDYGEIPNFPRSTVPGHAGRLVFGFLNGRACVMMQGRFHMYEGYPLWKVTFPVRVFHLLGVDTLVVTNAAGGLNPKFEVGDIMLIRDHINLPGFSGQNPLRGPNDERFGDRFPAMSDAYDRTMRQRALSTWKQMG

SEQ ID NO: 10600 - protein, 166 aa, Homo sapiens
MARLRSGMESILPPSAHELAQNRLHVSITNAKTRENHLVSTFSSREDLIKVLLASSFVPIYAGLKLVEYKGQKWVDGGLTNALPILPVGRTVTISPFSGRLDISPQDKGQLDLYVNIAKQDIMLSLANLVRLNQALFPPSKRKMESLYQCGFDDTVKFLLKENWFE

SEQ ID NO: 10601 - protein, 190 aa, Homo sapiens
MKHINLSFAACGFLGIYHLGAASALCRHGKKLVKDVKAFAGASAGSLVASVLLTAPEKIEECNQFTYKFAEEIRRQSFGAVTPGYDFMARLRSGMESILPPSAHELAQNRLHVSITNAKTRENHLVSTFSSREDLIKVLLASSFVPIYAGLKLVEYKGQKWVDGGLTNALPILPVGRTVTISPFSGRLDI

SEQ ID NO: 10602 - protein, 253 aa, Homo sapiens
MKHINLSFAACGFLGIYHLGAASALCRHGKKLVKDVKAFAGASAGSLVASVLLTAPEKIEECNQFTYKFAEEIRRQSFGAVTPGYDFMARLRSGMESILPPSAHELAQNRLHVSITNAKTRENHLVSTFSSREDLIKVLLASSFVPIYAGLKLVEYKGQKWVDGGLTNALPILPVGRTVTISPFSGRLDISPQDKGQLDLYVNIAKQDIMLSLANLVRLNQALFPPSKRKMESLYQCGFDDTVKFLLKENWFE

SEQ ID NO: 10603 - protein, 253 aa, Homo sapiens; identical to SEQ ID NO: 10602

SEQ ID NO: 10604 - protein, 135 aa, Homo sapiens
LQLQRNQLRMLEPEPLAGLDQLRELSLAHNRLRVGDIGPGTWHELQALQMLDLSHNELSFVPPDLPEALEELHLEGNRIGHVGPEAFLSTPRLRALFLRCPEGDRRGGGGQGRAWEGHDRLSVQGQQASHDEHRG

SEQ ID NO: 10605 - protein, 512 aa, Homo sapiens
MAESGLAMWPSLLLLLLLPGPPPVAGLEDAAFPHLGESLQPLPRACPLRCSCPRVDTVDCDGLDLRVFPDNITRAAQHLSLQNNQLQELPYNELSRLSGLRTLNLHNNLISSEGLPDEAFESLTQLQHLCVAHNKLSVAPQFLPRSLRVADLAANQVMEIFPLTFGEKPALRSVYLHNNQLSNAGLPPDAFRGSEAIATLSLSNNQLSYLPPSLPPSLERLHLQNNLISKVPRGALSRQTQLRELYLQHNQLTDSGLDATTFSKLHSLEYLDLSHNQLTTVPAGLPRTLAILHLGRNRIRQVEAARLHGARGLRYLLLQHNQLGSSGLPAGALRPLRGLHTLHLYGNGLDRVPPALPRRLRALVLPHNHVAALGARDLVATPGLTELNLAYNRLASARVHHRAFRRLRALRSLDLAGNQLTRLPMGLPTGLRTLQLQRNQLRMLEPEPLAGLDQLRELSLAHNRLRVGDIGPGTWHELQALQVRHRLVSHTVPRAPPSPCLPCHVPNILVSW

SEQ ID NO: 10606 - protein, 32 aa, Homo sapiens
MAWTFECSRTTSPEPLSTSPCRTTSSRNSPTM

SEQ ID NO: 10607 - protein, 430 aa, Homo sapiens
MAWTFECSRTTSPEPLSTSPCRTTSSRNSPTMSCPASVACEPSTSTTTSSPPKLSVAPQFLPRSLRVADLAANQVMEIFPLTFGEKPALRSVYLHNNQLSNAGLPPDAFRGSEAIATLSLSNNQLSYLPPSLPPSLERLHLQNNLISKVPRGALSRQTQLRELYLQHNQLTDSGLDATTFSKLHSLEYLDLSHNQLTTVPAGLPRTLAILHLGRNRIRQVEAARLHGARGLRYLLLQHNQLGSSGLPAGALRPLRGLHTLHLYGNGLDRVPPALPRRLRALVLPHNHVAALGARDLVATPGLTELNLAYNRLASARVHHRAFRRLRALRSLDLAGNQLTRLPMGLPTGLRTLQLQRNQLRMLEPEPLAGLDQLRELSLAHNRLRVGDIGPGTWHELQALQVRHRLVSHTVPRAPPSPCLPCHVPNILVSW

SEQ ID NO: 10608 - protein, 164 aa, Homo sapiens
MAWTFECSRTTSPEPLSTSPCRTTSSRNSPTMSCPASVACEPSTSTTTSSPPKNNLISKVPRGALSRQTQLRELYLQHNQLTDSGLDATTFSKLHSLEYLDLSHNQLTTVPAGLPRTLAILHLGRNRIRQVEAARLHGARGLRYLLLQHNQLGSSGLPAGALRP

SEQ ID NO: 10609 - protein, 123 aa, Homo sapiens
MGRPTQWPSLLLLLLLPGPPPVAGLEDAAFPHLGESLQPLPRACPLRCSCPRVDTVDCDGLDLRVFPDNITRAAQHLSLQNNQLQELPYNELSRLSGLRTLNLHNNLISSEEQSHLQGAPRSP

SEQ ID NO: 10610 - protein, 510 aa, Homo sapiens
MGRPTQWPSLLLLLLLPGPPPVAGLEDAAFPHLGESLQPLPRACPLRCSCPRVDTVDCDGLDLRVFPDNITRAAQHLSLQNNQLQELPYNELSRLSGLRTLNLHNNLISSEGLPDEAFESLTQLQHLCVAHNKLSVAPQFLPRSLRVADLAANQVMEIFPLTFGEKPALRSVYLHNNQLSNAGLPPDAFRGSEAIATLSLSNNQLSYLPPSLPPSLERLHLQNNLISKVPRGALSRQTQLRELYLQHNQLTDSGLDATTFSKLHSLEYLDLSHNQLTTVPAGLPRTLAILHLGRNRIRQVEAARLHGARGLRYLLLQHNQLGSSGLPAGALRPLRGLHTLHLYGNGLDRVPPALPRRLRALVLPHNHVAALGARDLVATPGLTELNLAYNRLASARVHHRAFRRLRALRSLDLAGNQLTRLPMGLPTGLRTLQLQRNQLRMLEPEPLAGLDQLRELSLAHNRLRVGDIGPGTWHELQALQVRHRLVSHTVPRAPPSPCLPCHVPNILVSW

SEQ ID NO: 10611 - protein, 421 aa, Homo sapiens
MGRPTQWPSLLLLLLLPGPPPVAGLEDAAFPHLGESLQPLPRACPLRCSCPRVDTVDCDGLDLRVFPDNITRAAQHLSLQNNQLQELPYNELSRLSGLRTLNLHNNLISSEGLPDEAFESLTQLQHLCVAHNKNNLISKVPRGALSRQTQLRELYLQHNQLTDSGLDATTFSKLHSLEYLDLSHNQLTTVPAGLPRTLAILHLGRNRIRQVEAARLHGARGLRYLLLQHNQLGSSGLPAGALRPLRGLHTLHLYGNGLDRVPPALPRRLRALVLPHNHVAALGARDLVATPGLTELNLAYNRLASARVHHRAFRRLRALRSLDLAGNQLTRLPMGLPTGLRTLQLQRNQLRMLEPEPLAGLDQLRELSLAHNRLRVGDIGPGTWHELQALQVRHRLVSHTVPRAPPSPCLPCHVPNILVSW

SEQ ID NO: 10612 - protein, 505 aa, Homo sapiens
MWPSLLLLLLLPGPPPVAGLEDAAFPHLGESLQPLPRACPLRCSCPRVDTVDCDGLDLRVFPDNITRAAQHLSLQNNQLQELPYNELSRLSGLRTLNLHNNLISSEGLPDEAFESLTQLQHLCVAHNKLSVAPQFLPRSLRVADLAANQVMEIFPLTFGEKPALRSVYLHNNQLSNAGLPPDAFRGSEAIATLSLSNNQLSYLPPSLPPSLERLHLQNNLISKVPRGALSRQTQLRELYLQHNQLTDSGLDATTFSKLHSLEYLDLSHNQLTTVPAGLPRTLAILHLGRNRIRQVEAARLHGARGLRYLLLQHNQLGSSGLPAGALRPLRGLHTLHLYGNGLDRVPPALPRRLRALVLPHNHVAALGARDLVATPGLTELNLAYNRLASARVHHRAFRRLRALRSLDLAGNQLTRLPMGLPTGLRTLQLQRNQLRMLEPEPLAGLDQLRELSLAHNRLRVGDIGPGTWHELQALQVRHRLVSHTVPRAPPSPCLPCHVPNILVSW

SEQ ID NO: 10613 - protein, 574 aa, Homo sapiens
MWPSLLLLLLLPGPPPVAGLEDAAFPHLGESLQPLPRACPLRCSCPRVDTVDCDGLDLRVFPDNITRAAQHLSLQNNQLQELPYNELSRLSGLRTLNLHNNLISSEGLPDEAFESLTQLQHLCVAHNKLSVAPQFLPRSLRVADLAANQVMEIFPLTFGEKPALRSVYLHNNQLSNAGLPPDAFRGSEAIATLSLSNNQLSYLPPSLPPSLERLHLQNNLISKVPRGALSRQTQLRELYLQHNQLTDSGLDATTFSKLHSLEYLDLSHNQLTTVPAGLPRTLAILHLGRNRIRQVEAARLHGARGLRYLLLQHNQLGSSGLPAGALRPLRGLHTLHLYGNGLDRVPPALPRRLRALVLPHNHVAALGARDLVATPGLTELNLAYNRLASARVHHRAFRRLRALRSLDLAGNQLTRLPMGLPTGLRTLQLQRNQLRMLEPEPLAGLDQLRELSLAHNRLRVGDIGPGTWHELQALQMLDLSHNELSFVPPDLPEALEELHLEGNRIGHVGPEAFLSTPRLRALFLRANRLHMTSIAAEAFLGLPNLRVVDTAGNPEQVLIRLPPTTPRGPRAGGP

SEQ ID NO: 10614 - protein, 151 aa, Homo sapiens
RRLPRLRGHRHPQPLQQPAQLPAAQPAALTRAAPPAGSPANNLISKVPRGALSRQTQLRELYLQHNQLTDSGLDATTFSKLHSLEYLDLSHNQLTTVPAGLPRTLAILHLGRNRIRQVEAARLHGARGLRYLLLQHNQLGSSGLPAGALRP

SEQ ID NO: 10615 - protein, 182 aa, Homo sapiens
  VARIANT 1: note = misc_feature - Xaa can be any naturally occurring amino acid
XFESLTQLQHLCVAHNKLSNAGLPPDAFRGSEAIATLSLSNNQLSYLPPSLPPSLERLHLQNNLISKVPRGALSRQTQLRELYLQHNQLTDSGLDATTFSKLHSLEYLDLSHNQLTTVPAGLPRTLAILHLGRNRIRQVEAARLHGARGLRYLLLQHNQLGSSGLPAGALRPLRGLHTLHLY

SEQ ID NO: 10616 - protein, 388 aa, Homo sapiens
MGAAAWARPLSVSFLLLLLPLPGMPAGSWDPAGYLLYCPCMGRFGNQADHFLGSLAFAKLLNRTLAVPPWIEYQHHKPPFTNLHVSYQKYFKLEPLQAYHRVISLEDFMEKLAPTHWPPEKRVAYCFEVAAQRSPDKKTCPMKEGNPFGPFWDQFHVSFNKSELFTGISFSASYREQWSQRFSPKEHPVLALPGAPAQFPVLEEHRPLQKYMVWSDEMVKTGEAQIHAHLVRPYVGIHLRIGSDWKNACAMLKDGTAGSHFMASPQCVGYSRSTAAPLTMTMCLPDLKEIQRAVKLWVRSLDAQSVYVATDSESYVPELQQLFKGKVKVVSLKPEVAQVDLYILGQADHFIGNCVSSFTAFVKRERDLQGRPSSFFGMDRPPKLRDEF

SEQ ID NO: 10617 - protein, 194 aa, Homo sapiens
MGAAAWARPLSVSFLLLLLPLPGMPAGSWDPAGYLLYCPCMGRFGNQADHFLGSLAFAKLLNRTLAVPPWIEYQHHKPPFTNLHVSYQKYFKLEPLQAYHRVISLEDFMEKLAPTHWPPEKRVAYCFEVAAQRSPDKKTCPMKEGNPFGPFWDQFHVSFNKSELFTGISFSASYREQWSQRRENHSCVTLLFPR

SEQ ID NO: 10618 - protein, 424 aa, Homo sapiens
MATLSFVFLLLGAVSWPPASASGQEFWPGQSAADILSGAASRRRYLLYDVNPPEGFNLRRDVYIRIASLLKTLLKTEEWVLVLPPWGRLYHWQSPDIHQVRIPWSEFFDLPSLNKNIPVIEYEQFIAESGGPFIDQVYVLQSYAEGWKEGTWEEKVDERPCIDQLLYSQDKHEYYRGWFWGYEETRGLNVSCLSVQGSASIVAPLLLRNTSARSVMLDRAENLLHDHYGGKEYWDTRRSMVFARHLREVGDEFRSRHLNSTDDADRIPFQEDWMKMKVKLGSALGGPYLGVHLRRKDFIWGHRQDVPSLEGAVRKIRSLMKTHRLDKVFVATDAVRKEYEELKKLLPEMVRFEPTWEELELYKDGGVAIIDQWICAHARCLPTSLSAESGSGGFQRFFCPKYSVSEQMVACVHSGHFHTVCLLV

SEQ ID NO: 10619 - protein, 429 aa, Homo sapiens
MATLSFVFLLLGAVSWPPASASGQEFWPGQSAADILSGAASRRRYLLYDVNPPEGFNLRRDVYIRIASLLKTLLKTEEWVLVLPPWGRLYHWQSPDIHQVRIPWSEFFDLPSLNKNIPVIEYEQFIAESGGPFIDQVYVLQSYAEGWKEGTWEEKVDERPCIDQLLYSQDKHEYYRGWFWGYEETRGLNVSCLSVQGSASIVAPLLLRNTSARSVMLDRAENLLHDHYGGKEYWDTRRSMVFARHLREVGDEFRSRHLNSTDDADRIPFQEDWMKMKVKLGSALGGPYLGVHLRRKDFIWGHRQDVPSLEGAVRKIRSLMKTHRLDKVFVATDAVRKEYEELKKLLPEMVRFEPTWEELELYKDGGVAIIDQWICAHARFFIGTSVSTFSFRIHEEREILGLDPKTTYNRFCGDQEKACEQPTHWKITY

SEQ ID NO: 10620 - protein, 380 aa, Homo sapiens
MATLSFVFLLLGAVSWPPASASGQEFWPGQSAADILSGAASRRRYLLYDVNPPEGFNLRRDVYIRIASLLKTLLKTEEWVLVLPPWGRLYHWQSPDIHQVRIPWSEFFDLPSLNKNIPVIEYEQFIAESGGPFIDQVYVLQSYAEGWKEGTWEEKVDERPCIDQLLYSQDKHEYYRGWFWGYEETRGLNVSCLSVQGSASIVAPLLLRNTSARSVMLDRAENLLHDHYGGKEYWDTRRSMVFARHLREVGDEFRSRHLNSTDDADRIPFQEDWMKMKVKLGSALGGPYLGVHLRRKDFIWGHRQDVPSLEGAVRKIRSLMKTHRLDKVFVATDAVRKEYEELKKLLPEMVRFEPTWEELELYKDGGVAIIDQWICAHASS

SEQ ID NO: 10621 - protein, 212 aa, Homo sapiens
MATLSFVFLLLGAVSWPPASASGQEFWPGQSAADILSGAASRRRYLLYDVNPPEGFNLRRDVYIRIASLLKTLLKTEEWVLVLPPWGRLYHWQSPDIHQVRIPWSEFFDLPSLNKNIPVIEYEQFIAGRRTACGVCFVVSQCSARDKESGGPFIDQVYVLQSYAEGWKEGTWEEKVDERPCIDQLLYSQDKHEYYRCLLRLLPLPQRMVLGL

SEQ ID NO: 10622 - protein, 141 aa, Homo sapiens
MVFARHLREVGDEFRSRHLNSTDDADRIPFQEDWMKMKVKLGSALGGPYLGVHLRRKDFIWGHRQDVPSLEGAVRKIRSLMKTHRLDKVFVATDAVRKEYEELKKLLPEMVRFEPTWEELELYKDGGVAIIDQWICAHASS

SEQ ID NO: 10623 - protein, 265 aa, Homo sapiens
  VARIANT 1: note = misc_feature - Xaa can be any naturally occurring amino acid
XQFIAESGGPFIDQVYVLQSYAEGWKEGTWEEKVDERPCIDQLLYSQDKHEYYRDGGLVSPKCRLPLKALTLPGLLWKSCQLTASMCPVPGQLALKHGRGWFWGYEETRGLNVSCLSVQGSASIVAPLLLRNTSARSVMLDRAENLLHDHYGGKEYWDTRRSMVFARHLREVGDEFRSRHLNSTDDADRIPFQEDWMKMKVKLGSALGGPYLGVHLRRKDFIWGHRQDVPSLEGAVRKIRSLMKTHRLDKVFVATDAVRKEYEEL

SEQ ID NO: 10624 - protein, 111 aa, Homo sapiens
MEWWASSPLRLWLLLFLLPSAQGRQKESGGLRAVPSLPLGLGVWPESRGAPPRGRLPGRCRGRCSSELGRRHRGALRRRVQNGKYLLTKLTGLWRITNHVQVKTAAATMVS

SEQ ID NO: 10625 - protein, 163 aa, Homo sapiens
MEWWASSPLRLWLLLFLLPSAQGRQKESGSKWKVFIDQINRSLENYEPCSSQNCSCYHGVIEEDLTPFRGGISRKMMAEVVRRKLGTHYQITKNRLYRENDCMFPSRCSGVEHFILEVIGRLPDMEMVINVRDYPQVPKWMEPAIPVFSFSKARLWKIGKIYL

SEQ ID NO: 10626 - protein, 187 aa, Homo sapiens
MEWWASSPLRLWLLLFLLPSAQGRQKESGSKWKVFIDQINRSLENYEPCSSQNCSCYHGVIEEDLTPFRGGISRKMMAEVVRRKLGTHYQITKNRLYRENDCMFPSRCSGVEHFILEVIGRLPDMEMVINVRDYPQVPKWMEPAIPVFSFSKTCFISCVASGQRPHLCCISHGLASFLESVWFHCLS

SEQ ID NO: 10627 - protein, 392 aa, Homo sapiens
MEWWASSPLRLWLLLFLLPSAQGRQKESGSKWKVFIDQINRSLENYEPCSSQNCSCYHGVIEEDLTPFRGGISRKMMAEVVRRKLGTHYQITKNRLYRENDCMFPSRCSGVEHFILEVIGRLPDMEMVINVRDYPQVPKWMEPAIPVFSFSKTSEYHDIMYPAWTFWEGGPAVWPIYPTGLGRWDLFREDLVRSAAQWPWKKKNSTAYFRGSRTSPERDPLILLSRKNPKLVDAEYTKNQAWKSMKDTLGKPAAKDVHLVDHCKYKYLFNFRGVAASFRFKHLFLCGSLVFHVGDEWLEFFYPQLKPWVHYIPVKTDLSNVQELLQFVKANDDVAQEIAERGSQFIRNHLQMDDITCYWENLLSEYSKFLSYNVTRRKGYDQIIPKMLKTEL

SEQ ID NO: 10628 - protein, 189 aa, Homo sapiens
  VARIANT 1: note = misc_feature - Xaa can be any naturally occurring amino acid
XCGAALPPAPQRGICSSKWKVFIDQINRSLENYEPCSSQNCSCYHGVIEEDLTPFRGGISRKMMAEVVRRKLGTHYQITKNRLYRENDCMFPSRCSGVEHFILEVIGRLPDMEMVINVRDYPQVPKWMEPAIPVFSFSKTSEYHDIMYPAWTFWEGGPAVWPIYPTGLGRWDLFREDLVRSAAQWPWKK

SEQ ID NO: 10629 - protein, 334 aa, Homo sapiens
MDPRGILKAFPKRQKIHADASSKPSCASALRCLCPESDIGADSACPGPAEWLSSLRAHVVRTGIGRARAELFEKQIVQHGGQLCPAQGPGVTHIVVDEGMDYERALRLLRLPQLPPGAQLVKSAWLSLCLQERRLVDVAGFSIFIPSRYLDHPQPSKAEQDASIPPGTHEALLQTALSPPPPPTRPVSPPQKAKEAPNTQAQPISDDEASDGEETQVSAADLEALISGHYPTSLEGDCEPSPAPAVLDKWVCAQPSSQKATNHNLHITEKLEVLAKAYSVQGDKWRALGYAKAINALKSFHKPVTSYQEACSIPGIGKRMAEKIIEILESGHLR

SEQ ID NO: 10630 - protein, 188 aa, Homo sapiens
MDPRGILKAFPKRQKIHADASSKVLAKIPRREEGEEAEEWLSSLRAHVVRTGIGRARAELFEKQIVQHGGQLCPAQGPGVTHIVVDEGMDYERALRLLRLPQLPPGAQLVKSAWLSLCLQERRLVDVAGFSIFIPSRYLDHPQPSKAEQDASIPPGTHEALLQTALSPPPPPTRPVSPPQKAKEAPNT

SEQ ID NO: 10631 - protein, 470 aa, Homo sapiens
MDPRGILKAFPKRQKIHADASSKVLAKIPRREEGEEAEEWLSSLRAHVVRTGIGRARAELFEKQIVQHGGQLCPAQGPGVTHIVVDEGMDYERALRLLRLPQLPPGAQLVKSAWLSLCLQERRLVDVAGFSIFIPSRYLDHPQPSKAEQDASIPPGTHEALLQTALSPPPPPTRPVSPPQKAKEAPNTQAQPISDDEASDGEETQEACSIPGIGKRMAEKIIEILESGHLRKLDHISESVPVLELFSNIWGAGTKTAQMWYQQGFRSLEDIRSQASLTTQQAIGLKHYSDFLERMPREEATEIEQTVQKAAQAFNSGLLCVACGSYRRGKATCGDVDVLITHPDGRSHRGIFSRLLDSLRQEAVPSVGPGFLTDDLVSQEENGQQQKYLGVCRLPGPGRRHRRLDIIVVPYSEFACALLYFTGSAHFNRSMRALAKTKGMSLSEHALSTAVVRNTHGCKVGPGRVLPTPT

SEQ ID NO: 10632 - protein, 575 aa, Homo sapiens
MDPRGILKAFPKRQKIHADASSKVLAKIPRREEGEEAEEWLSSLRAHVVRTGIGRARAELFEKQIVQHGGQLCPAQGPGVTHIVVDEGMDYERALRLLRLPQLPPGAQLVKSAWLSLCLQERRLVDVAGFSIFIPSRYLDHPQPSKAEQDASIPPGTHEALLQTALSPPPPPTRPVSPPQKAKEAPNTQAQPISDDEASDGEETQVSAADLEALISGHYPTSLEGDCEPSPAPAVLDKWVCAQPSSQKATNHNLHITEKLEVLAKAYSVQGDKWRALGYAKAINALKSFHKPVTSYQEACSIPGIGKRMAEKIIEILESGHLRKLDHISESVPVLELFSNIWGAGTKTAQMWYQQGFRSLEDIRSQASLTTQQAIGLKHYSDFLERMPREEATEIEQTVQKAAQAFNSGLLCVACGSYRRGKATCGDVDVLITHPDGRSHRGIFSRLLDSLRQEGFLTDDLVSQEENGQQQKYLGVCRLPGPGRRHRRLDIIVVPYSEFACALLYFTGSAHFNRSMRALAKTKGMSLSEHALSTAVVRNTHGCKVGPGRVLPTPTEKDVFRLLGLPYREPAERDW

SEQ ID NO: 10633 - protein, 575 aa, Homo sapiens; identical to SEQ ID NO: 10632

SEQ ID NO: 10634 - protein, 575 aa, Homo sapiens; identical to SEQ ID NO: 10632

SEQ ID NO: 10635 - protein, 269 aa, Homo sapiens
MDPRGILKAFPKRQKIHADASSKVLAKIPRREEGEEAEEWLSSLRAHVVRTGIGRARAELFEKQIVQHGGQLCPAQGPGVTHIVVDEGMDYERALRLLRLPQLPPGAQLVKSAWLSLCLQERRLVDVAGFSIFIPSRYLDHPQPSKAEQDASIPPGTHEALLQTALSPPPPPTRPVSPPQKAKEAPNTQAQPISDDEASDGEETQVSAADLEALISGHYPTSLEGDCEPSPAPAVLDKWVCAQPSSQKATNHNLHITEKLEVLAKAYSV

SEQ ID NO: 10636 - protein, 487 aa, Homo sapiens
MDYERALRLLRLPQLPPGAQLVKSAWLSLCLQERRLVDVAGFSIFIPSRYLDHPQPSKAEQDASIPPGTHEALLQTALSPPPPPTRPVSPPQKAKEAPNTQAQPISDDEASDGEETQVSAADLEALISGHYPTSLEGDCEPSPAPAVLDKWVCAQPSSQKATNHNLHITEKLEVLAKAYSVQGDKWRALGYAKAINALKSFHKPVTSYQEACSIPGIGKRMAEKIIEILESGHLRKLDHISESVPVLELFSNIWGAGTKTAQMWYQQGFRSLEDIRSQASLTTQQAIGLKHYSDFLERMPREEATEIEQTVQKAAQAFNSGLLCVACGSYRRGKATCGDVDVLITHPDGRSHRGIFSRLLDSLRQEGFLTDDLVSQEENGQQQKYLGVCRLPGPGRRHRRLDIIVVPYSEFACALLYFTGSAHFNRSMRALAKTKGMSLSEHALSTAVVRNTHGCKVGPGRVLPTPTEKDVFRLLGLPYREPAERDW

SEQ ID NO: 10637 - protein, 152 aa, Homo sapiens
MDYERALRLLRLPQLPPGAQLVKSAWLSLCLQERRLVDVAGFSIFIPSSPSLMMKPVMGKKPRLVQLIWKPSSVATTPPPLREIVSLAQPLLSWISGSVHSPQARRRPITTSISQRSWKFWPKPTVFRETSGGPWAMPRPSMPSRASISLSP

SEQ ID NO: 10638 - protein, 248 aa, Homo sapiens
MEALCVCSLMPLHWSWILTASHLAAFFQGFRSLEDIRSQASLTTQQAIGLKHYSDFLERMPREEATEIEQTVQKAAQAFNSGLLCVACGSYRRGKATCGDVDVLITHPDGRSHRGIFSRLLDSLRQEGFLTDDLVSQEENGQQQKYLGVCRLPGPGRRHRRLDIIVVPYSEFACALLYFTGSAHFNRSMRALAKTKGMSLSEHALSTAVVRNTHGCKVGPGRVLPTPTEKDVFRLLGLPYREPAERDW

SEQ ID NO: 10639 - protein, 218 aa, Homo sapiens
MHHQKYLQRFLGGKREKKQKEACSIPGIGKRMAEKIIEILESGHLRKLDHISESVPVLELFSNIWGAGTKTAQMWYQQGFRSLEDIRSQASLTTQQAIGLKHYSDFLERMPREEATEIEQTVQKAAQAFNSGLLCVACGSYRRGKATCGDVDVLITHPDGRSHRGIFSRLLDSLRQEGFLTDDLVSQEENGQQQKYLGVCRLPGPGRRHRRLDIIVVP

SEQ ID NO: 10640 - protein, 298 aa, Homo sapiens
MHHQKYLQRFLGGKREKKQKEACSIPGIGKRMAEKIIEILESGHLRKLDHISESVPVLELFSNIWGAGTKTAQMWYQQGFRSLEDIRSQASLTTQQAIGLKHYSDFLERMPREEATEIEQTVQKAAQAFNSGLLCVACGSYRRGKATCGDVDVLITHPDGRSHRGIFSRLLDSLRQEGFLTDDLVSQEENGQQQKYLGVCRLPGPGRRHRRLDIIVVPYSEFACALLYFTGSAHFNRSMRALAKTKGMSLSEHALSTAVVRNTHGCKVGPGRVLPTPTEKDVFRLLGLPYREPAERDW

SEQ ID NO: 10641 - protein, 300 aa, Homo sapiens
MLMHHQKYLQRFLGGKREKKQKEACSIPGIGKRMAEKIIEILESGHLRKLDHISESVPVLELFSNIWGAGTKTAQMWYQQGFRSLEDIRSQASLTTQQAIGLKHYSDFLERMPREEATEIEQTVQKAAQAFNSGLLCVACGSYRRGKATCGDVDVLITHPDGRSHRGIFSRLLDSLRQEGFLTDDLVSQEENGQQQKYLGVCRLPGPGRRHRRLDIIVVPYSEFACALLYFTGSAHFNRSMRALAKTKGMSLSEHALSTAVVRNTHGCKVGPGRVLPTPTEKDVFRLLGLPYREPAERDW

SEQ ID NO: 10642 - protein, 246 aa, Homo sapiens
MPRSCCSRSGALLLALLLQASMEVRGWCLESSQCQDLTTESNLLECIRACKPDLSAETPMFPGNGDEQPLTENPRKYVMGHFRWDRFGRRNSSSSGSSGAGQKREDVSAGEDCGPLPEGGPEPRSDGAKPGPREGKRSYSMEHFRWGKPVGKKRRPVKVYPNGAEDESAEAFPLEFKRELTGQRLREGDGPDGPADDGAGAQADLEHSLLVAAEKKDEGPYRMEHFRWGSPPKDKRYGGFMTSEKS

SEQ ID NO: 10643 - protein, 267 aa, Homo sapiens
MPRSCCSRSGALLLALLLQASMEVRGWCLESSQCQDLTTESNLLECIRACKPDLSAETPMFPGNGDEQPLTENPRKYVMGHFRWDRFGRRNSSSSGSSGAGQKREDVSAGEDCGPLPEGGPEPRSDGAKPGPREGKRSYSMEHFRWGKPVGKKRRPVKVYPNGAEDESAEAFPLEFKRELTGQRLREGDGPDGPADDGAGAQADLEHSLLVAAEKKDEGPYRMEHFRWGSPPKDKRYGGFMTSEKSQTPLVTLFKNAIIKNAYKKGE

SEQ ID NO: 10644 - protein, 267 aa, Homo sapiens; identical to SEQ ID NO: 10643

SEQ ID NO: 10645 - protein, 267 aa, Homo sapiens; identical to SEQ ID NO: 10643

SEQ ID NO: 10646 - protein, 267 aa, Homo sapiens; identical to SEQ ID NO: 10643

SEQ ID NO: 10647 - protein, 580 aa, Homo sapiens
MHLSAVFNALLVSVLAAVLWKHVRLREHAATLEEELALSRQATEPAPALRIDYPKALQILMEGGTHMVCTGRTHTDRICRFKWLCYSNEAEEFIFFHGNTSVMLPNLGSRRFQPALLDLSTVEDHNTQYFNFVELPAAALRFMPKPVFVPDVALIANRFNPDNLMHVFHDDLLPLFYTLRQFPGLAHEARLFFMEGWGEGAHFDLYKLLSPKQPLLRAQLKTLGRLLCFSHAFVGLSKITTWYQYGFVQPQGPKANILVSGNEIRQFARFMTEKLNVSHTGVPLGEEYILVFSRTQNRLILNEAELLLALAQEFQMKTVTVSLEDHTFADVVRLVSNASMLVSMHGAQLVTTLFLPRGATVVELFPYAVNPDHYTPYKTLAMLPGMDLQYVAWRNMMPENTVTHPERPWDQGGITHLDRAEQARILQSREVPRHLCCRNPEWLFRIYQDTKVDIPSLIQTIRRVVKGRPGPRKQKWTVGLYPGKVREARCQASVHGASEARLTVSWQIPWNLKYLKVREVKYEVWLQEQGENTYVPYILALQNHTFTENIKPFTTYLVWVRCIFNKILLGPFADVLVCNT

SEQ ID NO: 10648 - protein, 580 aa, Homo sapiens; identical to SEQ ID NO: 10647

SEQ ID NO: 10649 - protein, 355 aa, Homo sapiens [sequence omitted]

SEQ ID NO: 10650 - protein, 77 aa, Homo sapiens
MAKLIALTLLGMGLALFRNHQSSYQTRLNALREVQPVELPNCNLVKGIETGSEDLEILPNGLAFISSSWKNTSDGPE

SEQ ID NO: 10651 - protein, 375 aa, Homo sapiens
MAPPTELLARPERGSAPGSRAMGRLVAVGLLGIALALLGERLLALRNRLKASREVESVDLPHCHLIKGIEAGSEDIDILPNGLAFFSVGLKFPGLHSFAPDKPGGILMMDLKEEKPRARELRISRGFDLASFNPHGISTFIDNDDTVYLFVVNHPEFKNTVEIFKFEEAENSLLHLKTVKHELLPSVNDITAVGPAHFYATNDHYFSDPFLKYLETYLNLHWANVVYYSPNEVKVVAEGFDSANGINISPDDKYIYVADILAHEIHVLEKHTNMNLTQLKVLELDTLVDNLSIDPSSGDIWVGCHPNGQKLFVYDPNNPPSSEVLRIQNILSEKPTVTTVYANNGSVLQGSSVASVYDGKLLIGTLYHRALYCEL

SEQ ID NO: 10652 - protein, 354 aa, Homo sapiens
MGRLVAVGLLGIALALLGERLLALRNRLKASREVESVDLPHCHLIKGIEAGSEDIDILPNGLAFFSVGLKFPGLHSFAPDKPGGILMMDLKEEKPRARELRISRGFDLASFNPHGISTFIDNDDTVYLFVVNHPEFKNTVEIFKFEEAENSLLHLKTVKHELLPSVNDITAVGPAHFYATNDHYFSDPFLKYLETYLNLHWANVVYYSPNEVKVVAEGFDSANGINISPDDKYIYVADILAHEIHVLEKHTNMNLTQLKVLELDTLVDNLSIDPSSGDIWVGCHPNGQKLFVYDPNNPPSSEVLRIQNILSEKPTVTTVYANNGSVLQGSSVASVYDGKLLIGTLYHRALYCEL

SEQ ID NO: 10653 - protein, 354 aa, Homo sapiens; identical to SEQ ID NO: 10652

SEQ ID NO: 10654 - protein, 219 aa, Homo sapiens
MGRLVAVGLLGIALALLGERLLALRNRLKASREVESVDLPHCHLIKGIEAGSEDIDILPNGLAFFSVGLKFPGLHSFAPDKPGGILMMDLKEEKPRARELRISRGFDLASFNPHGISTFIDNDDTVYLFVVNHPEFKNTVEIFKFEEAENSLLHLKTVKHELLPSVNDITAVGPAHFYATNDHYFSDPFLKYLETYLNLHWANVVYYSPNEVKVVYLCC

SEQ ID NO: 10655 - protein, 342 aa, Homo sapiens
MGRLVAVGLLGIALALLGERLLALRNRLKASREVESVDLPHCHLIKGIEAGSEDIDILPNGLAFFSVGLKFPGLHSFAPDKPGGILMMDLKEEKPRARELRISRGFDLASFNPHGISTFIDNEFKNTVEIFKFEEAENSLLHLKTVKHELLPSVNDITAVGPAHFYATNDHYFSDPFLKYLETYLNLHWANVVYYSPNEVKVVAEGFDSANGINISPDDKYIYVADILAHEIHVLEKHTNMNLTQLKVLELDTLVDNLSIDPSSGDIWVGCHPNGQKLFVYDPNNPPSSEVLRIQNILSEKPTVTTVYANNGSVLQGSSVASVYDGKLLIGTLYHRALYCEL

SEQ ID NO: 10656 - protein, 84 aa, Homo sapiens
MGRLVAVGLLGIALALLGERLLALRNRLKASREVESVDLPHCHLIKGIEAGSEDIDILPNGLAFFSVVSVFFLPQIQQRRYKGI

SEQ ID NO: 10657 - protein, 84 aa, Homo sapiens; identical to SEQ ID NO: 10656

SEQ ID NO: 10658 - protein, 50 aa, Homo sapiens
MGRLVAVGLLGIALALLGERLLALRNRLKASREVESVDLPHCHLIKGIVW

SEQ ID NO: 10659 - protein, 32 aa, Homo sapiens
MMDLKEEKPRARELRISRGFDLASFNPHGIST

SEQ ID NO: 10660 - protein, 53 aa, Homo sapiens
MMDLKEEKPRARELRISRGFDLASFNPHGISTFIDNDDTVYLFVVNHPEFKNT

SEQ ID NO: 10661 - protein, 69 aa, Homo sapiens
MMDLKEEKPRARELRISRGFDLASFNPHGISTFIDNDDTVYLFVVNHPEFKNTVEIFKFEEAENSLLHL

SEQ ID NO: 10662 - protein, 113 aa, Homo sapiens
MMDLKEEKPRARELRISRGFDLASFNPHGISTFIDNDDTVYLFVVNHPEFKNTVEIFKFEEAENSLLHLKTVKHELLPSVNDITAVGPAHFYATNDHYFSDPFLKYLETYLNL

SEQ ID NO: 10663 - protein, 122 aa, Homo sapiens
  VARIANT 1: note = misc_feature - Xaa can be any naturally occurring amino acid
XENSLLHLKTVKHELLPSVNDITAVGPAHFYATNDHYFSDPFLKYLETYLNLHWANVVYYSPNEVKVVAEGFDSANGINISPDDKYIYVADILAHEIHVLEKHTNMNLTQLKILTISHLEGT

SEQ ID NO: 10664 - protein, 245 aa, Homo sapiens
MGKLVALVLLGVGLSLVGEMFLAFRERVNASREVEPVEPENCHLIEELESGSEDIDILPSGLAFISSGLKYPGMPNFAPDEPGKIFLMDLNEQNPRAQALEISGGFDKELFNPHGISIFIDKDNTVYLYVVNHPHMKSTVEIFKFEEQQRSLVYLKTIKHELLKSVNDIVVLGPEQFYATRDHYFTNSLLSFFEMILDLRWTYVLFYSPREVKVVAKGFCSANGITVSADQKYFASRMFCLRSPG

SEQ ID NO: 10665 - protein, 354 aa, Homo sapiens
MGKLVALVLLGVGLSLVGEMFLAFRERVNASREVEPVEPENCHLIEELESGSEDIDILPSGLAFISSGLKYPGMPNFAPDEPGKIFLMDLNEQNPRAQALEISGGFDKELFNPHGISIFIDKDNTVYLYVVNHPHMKSTVEIFKFEEQQRSLVYLKTIKHELLKSVNDIVVLGPEQFYATRDHYFTNSLLSFFEMILDLRWTYVLFYSPREVKVVAKGFCSANGITVSADQKYVYVADVAAKNIHIMEKHDNWDLTQLKVIQLGTLVDNLTVDPATGDILAGCHPNPMKLLNYNPEDPPGSEVLRIQNVLSEKPRVSTVYANNGSVLQGTSVASVYHGKILIGTVFHKTLYCEL

SEQ ID NO: 10666 - protein, 270 aa, Homo sapiens
MGKLVALVLLGVGLSLVGEMFLAFRERVNASREVEPVEPENCHLIEELESGSEDIDILPSGLAFISSGLKYPGMPNFAPDEPGKIFLMDLNEQNPRAQALEISGGFDKELFNPHGISIFIDKDNTVYLYVVNHPHMKSTVEIFKFEEQQRSLVYLKTIKHELLKSVNDIVVLGPEQFYATRDHYFTNSLLSFFEMILDLRWTYVLFYSPREVKVVAKGFCSANGITVSADQKYVYVADVAAKNIHIMEKHDNWDLTQLKETFWQDAILIL

SEQ ID NO: 10667 - protein, 61 aa, Homo sapiens
MGKLVALVLLGVGLSLVGEMFLAFRERVNASREVEPVEPENCHLIEELGIKISRHAKLCAR

SEQ ID NO: 10668 - protein, 46 aa, Homo sapiens
MGKLVALVLLGVGLSLVGEMFLAFRVGFYLLQRKGECLSRSGASRT

SEQ ID NO: 10669 - protein, 46 aa, Homo sapiens; identical to SEQ ID NO: 10668

SEQ ID NO: 10670 - protein, 808 aa, Homo sapiens
MIPFLPMFSLLLLLIVNPINANNHYDKILAHSRIRGRDQGPNVCALQQILGTKKKYFSTCKNWYKKSICGQKTTVLYECCPGYMRMEGMKGCPAVLPIDHVYGTLGIVGATTTQRYSDASKLREEIEGKGSFTYFAPSNEAWDNLDSDIRRGLESNVNVELLNALHSHMINKRMLTKDLKNGMIIPSMYNNLGLFINHYPNGVVTVNCARIIHGNQIATNGVVHVIDRVLTQIGTSIQDFIEAEDDLSSFRAAAITSDILEALGRDGHFTLFAPTNEAFEKLPRGVLERIMGDKVASEALMKYHILNTLQCSESIMGGAVFETLEGNTIEIGCDGDSITVNGIKMVNKKDIVTNNGVIHLIDQVLIPDSAKQVIELAGKQQTTFTDLVAQLGLASALRPDGEYTLLAPVNNAFSDDTLSMDQRLLKLILQNHILKVKVGLNELYNGQILETIGGKQLRVFVYRTAVCIENSCMEKGSKQGRNGAIHIFREIIKPAEKSLHEKLKQDKRFSTFLSLLEAADLKELLTQPGDWTLFVPTNDAFKGMTSEEKEILIRDKNALQNIILYHLTPGVFIGKGFEPGVTNILKTTQGSKIFLKEVNDTLLVNELKSKESDIMTTNGVIHVVDKLLYPADTPVGNDQLLEILNKLIKYIQIKFVRGSTFKEIPVTVYTTKIITKVVEPKIKVIEGSLQPIIKTEGPTLTKVKIEGEPEFRLIKEGETITEVIHGEPIIKKYTKIIDGVPVEITEKETREERIITGPEIKYTRISTGGGETEETLKKLLQEDTPVRKLQANKKVQGSRRRLREGRSQ

SEQ ID NO: 10671 - protein, 779 aa, Homo sapiens
MIPFLPMFSLLLLLIVNPINANNHYDKILAHSRIRGRDQGPNVCALQQILGTKKKYFSTCKNWYKKSICGQKTTVLYECCPGYMRMEGMKGCPAVLPIDHVYGTLGIVGATTTQRYSDASKLREEIEGKGSFTYFAPSNEAWDNLDSDIRRGLESNVNVELLNALHSHMINKRMLTKDLKNGMIIPSMYNNLGLFINHYPNGVVTVNCARIIHGNQIATNGVVHVIDRVLTQIGTSIQDFIEAEDDLSSFRAAAITSDILEALGRDGHFTLFAPTNEAFEKLPRGVLERIMGDKVASEALMKYHILNTLQCSESIMGGAVFETLEGNTIEIGCDGDSITVNGIKMVNKKDIVTNNGVIHLIDQVLIPDSAKQVIELAGKQQTTFTDLVAQLGLASALRPDGEYTLLAPVNNAFSDDTLSMDQRLLKLILQNHILKVKVGLNELYNGQILETIGGKQLRVFVYRTAVCIENSCMEKGSKQGRNGAIHIFREIIKPAEKSLHEKLKQDKRFSTFLSLLEAADLKELLTQPGDWTLFVPTNDAFKGMTSEEKEILIRDKNALQNIILYHLTPGVFIGKGFEPGVTNILKTTQGSKIFLKEVNDTLLVNELKSKESDIMTTNGVIHVVDKLLYPADTPVGNDQLLEILNKLIKYIQIKFVRGSTFKEIPVTVYKPIIKKYTKIIDGVPVEITEKETREERIITGPEIKYTRISTGGGETEETLKKLLQEEVTKVTKFIEGGDGHLFEDEEIKRLLQGDTPVRKLQANKKVQGSRRRLREGRSQ

SEQ ID NO: 10672 - protein, 809 aa, Homo sapiens
MIPFLPMFSLLLLLIVNPINANNHYDKILAHSRIRGRDQGPNVCALQQILGTKKKYFSTCKNWYKKSICGQKTTVLYECCPGYMRMEGMKGCPAVLPIDHVYGTLGIVGATTTQRYSDASKLREEIEGKGSFTYFAPSNEAWDNLDSDIRRGLESNVNVELLNALHSHMINKRMLTKDLKNGMIIPSMYNNLGLFINHYPNGVVTVNCARIIHGNQIATNGVVHVIDRVLTQIGTSIQDFIEAEDDLSSFRAAAITSDILEALGRDGHFTLFAPTNEAFEKLPRGVLERIMGDKVASEALMKYHILNTLQCSESIMGGAVFETLEGNTIEIGCDGDSITVNGIKMVNKKDIVTNNGVIHLIDQVLIPDSAKQVIELAGKQQTTFTDLVAQLGLASALRPDGEYTLLAPVNNAFSDDTLSMDQRLLKLILQNHILKVKVGLNELYNGQILETIGGKQLRVFVYRTAVCIENSCMEKGSKQGRNGAIHIFREIIKPAEKSLHEKLKQDKRFSTFLSLLEAADLKELLTQPGDWTLFVPTNDAFKGMTSEEKEILIRDKNALQNIILYHLTPGVFIGKGFEPGVTNILKTTQGSKIFLKEVNDTLLVNELKSKESDIMTTNGVIHVVDKLLYPADTPVGNDQLLEILNKLIKYIQIKFVRGSTFKEIPVTVYRPTLTKVKIEGEPEFRLIKEGETITEVIHGEPIIKKYTKIIDGVPVEITEKETREERIITGPEIKYTRISTGGGETEETLKKLLQEEVTKVTKFIEGGDGHLFEDEEIKRLLQGDTPVRKLQANKKVQGSRRRLREGRSQ

SEQ ID NO: 10673 - protein, 836 aa, Homo sapiens
MIPFLPMFSLLLLLIVNPINANNHYDKILAHSRIRGRDQGPNVCALQQILGTKKKYFSTCKNWYKKSICGQKTTVLYECCPGYMRMEGMKGCPAVLPIDHVYGTLGIVGATTTQRYSDASKLREEIEGKGSFTYFAPSNEAWDNLDSDIRRGLESNVNVELLNALHSHMINKRMLTKDLKNGMIIPSMYNNLGLFINHYPNGVVTVNCARIIHGNQIATNGVVHVIDRVLTQIGTSIQDFIEAEDDLSSFRAAAITSDILEALGRDGHFTLFAPTNEAFEKLPRGVLERIMGDKVASEALMKYHILNTLQCSESIMGGAVFETLEGNTIEIGCDGDSITVNGIKMVNKKDIVTNNGVIHLIDQVLIPDSAKQVIELAGKQQTTFTDLVAQLGLASALRPDGEYTLLAPVNNAFSDDTLSMDQRLLKLILQNHILKVKVGLNELYNGQILETIGGKQLRVFVYRTAVCIENSCMEKGSKQGRNGAIHIFREIIKPAEKSLHEKLKQDKRFSTFLSLLEAADLKELLTQPGDWTLFVPTNDAFKGMTSEEKEILIRDKNALQNIILYHLTPGVFIGKGFEPGVTNILKTTQGSKIFLKEVNDTLLVNELKSKESDIMTTNGVIHVVDKLLYPADTPVGNDQLLEILNKLIKYIQIKFVRGSTFKEIPVTVYTTKIITKVVEPKIKVIEGSLQPIIKTEGPTLTKVKIEGEPEFRLIKEGETITEVIHGEPIIKKYTKIIDGVPVEITEKETREERIITGPEIKYTRISTGGGETEETLKKLLQEEVTKVTKFIEGGDGHLFEDEEIKRLLQGDTPVRKLQANKKVQGSRRRLREGRSQ

SEQ ID NO: 10674 - protein, 781 aa, Homo sapiens
MIPFLPMFSLLLLLIVNPINANNHYDKILAHSRIRGRDQGPNVCALQQILGTKKKYFSTCKNWYKKSICGQKTTVLYECCPGYMRMEGMKGCPAVLPIDHVYGTLGIVGATTTQRYSDASKLREEIEGKGSFTYFAPSNEAWDNLDSDIRRGLESNVNVELLNALHSHMINKRMLTKDLKNGMIIPSMYNNLGLFINHYPNGVVTVNCARIIHGNQIATNGVVHVIDRVLTQIGTSIQDFIEAEDDLSSFRAAAITSDILEALGRDGHFTLFAPTNEAFEKLPRGVLERIMGDKVASEALMKYHILNTLQCSESIMGGAVFETLEGNTIEIGCDGDSITVNGIKMVNKKDIVTNNGVIHLIDQVLIPDSAKQVIELAGKQQTTFTDLVAQLGLASALRPDGEYTLLAPVNNAFSDDTLSMDQRLLKLILQNHILKVKVGLNELYNGQILETIGGKQLRVFVYRTAVCIENSCMEKGSKQGRNGAIHIFREIIKPAEKSLHEKLKQDKRFSTFLSLLEAADLKELLTQPGDWTLFVPTNDAFKGMTSEEKEILIRDKNALQNIILYHLTPGVFIGKGFEPGVTNILKTTQGSKIFLKEVNDTLLVNELKSKESDIMTTNGVIHVVDKLLYPADTPVGNDQLLEILNKLIKYIQIKFVRGSTFKEIPVTVYRPTLTKVKIEGEPEFRLIKEGETITEVIHGEPIIKKYTKIIDGVPVEITEKETREERIITGPEIKYTRISTGGGETEETLKKLLQEDTPVRKLQANKKVQGSRRRLREGRSQ

SEQ ID NO: 10675 - protein, 749 aa, Homo sapiens
MIPFLPMFSLLLLLIVNPINANNHYDKILAHSRIRGRDQGPNVCALQQILGTKKKYFSTCKNWYKKSICGQKTTVLYECCPGYMRMEGMKGCPAVLPIDHVYGTLGIVGATTTQRYSDASKLREEIEGKGSFTYFAPSNEAWDNLDSDIRRGLESNVNVELLNALHSHMINKRMLTKDLKNGMIIPSMYNNLGLFINHYPNGVVTVNCARIIHGNQIATNGVVHVIDRVLTQIGTSIQDFIEAEDDLSSFRAAAITSDILEALGRDGHFTLFAPTNEAFEKLPRGVLERIMGDKVASEALMKYHILNTLQCSESIMGGAVFETLEGNTIEIGCDGDSITVNGIKMVNKKDIVTNNGVIHLIDQVLIPDSAKQVIELAGKQQTTFTDLVAQLGLASALRPDGEYTLLAPVNNAFSDDTLSMDQRLLKLILQNHILKVKVGLNELYNGQILETIGGKQLRVFVYRTAVCIENSCMEKGSKQGRNGAIHIFREIIKPAEKSLHEKLKQDKRFSTFLSLLEAADLKELLTQPGDWTLFVPTNDAFKGMTSEEKEILIRDKNALQNIILYHLTPGVFIGKGFEPGVTNILKTTQGSKIFLKEVNDTLLVNELKSKESDIMTTNGVIHVVDKLLYPADTPVGNDQLLEILNKLIKYIQIKFVRGSTFKEIPVTVYSPEIKYTRISTGGGETEETLKKLLQEEVTKVTKFIEGGDGHLFEDEEIKRLLQGDTPVRKLQANKKVQGSRRRLREGRSQ

SEQ ID NO: 10676 - protein, 128 aa, Homo sapiens
MSLRLDTTPSCNSARPLHALQVLLLLSLLLTALASSTKGQTKRNLAKGKEESLDSDLYAELRCMCIKTTSGIHPKNIQSLEVIGKGTHCNQVEVIATLKDGRKICLDPDAPRIKKIVQKKLAGDESAD

SEQ ID NO: 10677 - protein, 216 aa, Homo sapiens
MLRLSERNMKVLLAAALIAGSVFFLLLPGPSAADEKKKGPKVTVKVYFDLRIGDEDVGRVIFGLFGKTVPKTVDNFVALATGEKGFGYKNSKFHRVIKDFMIQGGDFTRGDGTGGKSIYGERFPDENFKLKHYGPGWVSMANAGKDTNGSQFFITTVKTAWLDGKHVVFGKVLEGMEVVRKVESTKTDSRDKPLKDVIIADCGKIEVEKPFAIAKE

SEQ ID NO: 10678 - protein, 212 aa, Homo sapiens
MGPGPRLLLPLVLCVGLGALVFSSGAEGFRKRGPSVTAKVFFDVRIGDKDVGRIVIGLFGKVVPKTVENFVALATGEKGYGYKGSKFHRVIKDFMIQGGDITTGDGTGGVSIYGETFPDENFKLKHYGIGWVSMANAGPDTNGSQFFITLTKPTWLDGKHVVFGKVIDGMTVVHSIELQATDGHDRPLTNCSIINSGKIDVKTPFVVEIADW

SEQ ID NO: 10679 - protein, 140 aa, Homo sapiens
MGRTVVVLGGGISGLAASYHLSRAPCPPKVMLGGSWLQTLEASGCVLSQELFQQRAQEAAATQLGLKEMPSHCLVHLHKNCIPQYTLGHWQKLESARQFLTAHRLPLTLAGASYEGVAVNDCIESGRQAAVSVLGTEPNS

SEQ ID NO: 10680 - protein, 156 aa, Homo sapiens
MGRTVVVLGGGISGLAASYHLSRAPCPPKVMLGGSWLQTLEASGCVLSQELFQQRAQEAAATQLGLKEMPSHCLVHLHKTKNQLKWRQSHDRTVEWPKEYPGRSRKQAPSILHVPGCQLLRCRDRDHLGAVSEQPRSSAESRVGVASSTFSTFPLF

SEQ ID NO: 10681 - protein, 78 aa, Homo sapiens
MGRTVVVLGGGISGLAASYHLSRAPCPPKVVLVESSERLGGWIRSVRGPNGAIFELGPRGIRPAGALGARTLLLFLLF

SEQ ID NO: 10682 - protein, 185 aa, Homo sapiens
MGRTVVVLGGGISGLAASYHLSRAPCPPKVVLVESSERLGGWIRSVRGPNGAIFELGPRGIRPAGALGARTLLLVMLGGSWLQTLEASGCVLSQELFQQRAQEAAATQLGLKEMPSHCLVHLHKNCIPQYTLGHWQKLESARQFLTAHRLPLTLAGASYEGVAVNDCIESGRQAAVSVLGTEPNS

SEQ ID NO: 10683 - protein, 188 aa, Homo sapiens
MGRTVVVLGGGISGLAASYHLSRAPCPPKVVLVESSERLGGWIRSVRGPNGAIFELGPRGIRPAGALGARTLLLVMLGGSWLQTLEASGCVLSQELFQQRAQEAAATQLGLKEMPSHCLVHLHKTKNQLKWRQSHDRTVEWPKEYPGRSRKQAPSILHVPGCQLLRCRDRDHLGAVSEQPRSSAESRV

SEQ ID NO: 10684 - protein, 184 aa, Homo sapiens
MGRTVVVLGGGISGLAASYHLSRAPCPPKVVLVESSERLGGWIRSVRGPNGAIFELGPRGIRPAGALGARTLLLVSELGLDSEVLPVRGDHPAAQNRFLYVGGALHALPTGLRGLLRPSPPFSKPLFWAGLRELTKPRGKEPDETVHSFAQRRLGPEGGPHSQTQHSFARPWLSAGASGHFVEV

SEQ ID NO: 10685 - protein, 477 aa, Homo sapiens
MGRTVVVLGGGISGLAASYHLSRAPCPPKVVLVESSERLGGWIRSVRGPNGAIFELGPRGIRPAGALGARTLLLVSELGLDSEVLPVRGDHPAAQNRFLYVGGALHALPTGLRGLLRPSPPFSKPLFWAGLRELTKPRGKEPDETVHSFAQRRLGPEVASLAMDSLCRGVFAGNSRELSIRSCFPSLFQAEQTHRSILLGLLLGAGRTPQPDSALIRQALAERWSQWSLRGGLEMLPQALETHLTSRGVSVLRGQPVCGLSLQAEGRWKVSLRDSSLEADHVISAIPASVLSELLPAEAAPLARALSAITAVSVAVVNLQYQGAHLPVQGFGHLVPSSEDPGVLGIVYDSVAFPEQDGSPPGLRVTVMLGGSWLQTLEASGCVLSQELFQQRAQEAAATQLGLKEMPSHCLVHLHKNCIPQYTLGHWQKLESARQFLTAHRLPLTLAGASYEGVAVNDCIESGRQAAVSVLGTEPNS

SEQ ID NO: 10686 - protein, 477 aa, Homo sapiens; identical to SEQ ID NO: 10685

SEQ ID NO: 10687 - protein, 113 aa, Homo sapiens
MGRTVVVLGGGISGLAASYHLSRAPCPPKVVLVESSERLGGWIRSVRGPNGAIFELGPRGIRPAGALGARTLLLVSLRDSSLEADHVISAIPASGIWTFGAIFRRSRSPGNRV

SEQ ID NO: 10688 - protein, 161 aa, Homo sapiens
  VARIANT 1: note = misc_feature - Xaa can be any naturally occurring amino acid
XADHVISAIPASVLSELLPAEAAPLARALSAITAVSVAVVNLQYQGAHLPVQGFGHLVPSSEDPGVLGIVYDSVAFPEQDGSPPGLRVTVMLGGSWLQTLEASGCVLSQELFQQRAQEAAATQLGLKEMPSHCLVHLHKNCIPQYTLGHWQKLGKLGKQLG

SEQ ID NO: 10689 - protein, 230 aa, Homo sapiens
  VARIANT 1: note = misc_feature - Xaa can be any naturally occurring amino acid
XQAEQTHRSILLGLLLGAGRTPQPDSALIRQALAERWSQWSLRGGLEMLPQALETHLTSRGVSVLRGQPVCGLSLQAEGRWKGFGHLVPSSEDPGVLGIVYDSVAFPEQDGSPPGLRVTVMLGGSWLQTLEASGCVLSQELFQQRAQEAAATQLGLKEMPSHCLVHLHKNCIPQYTLGHWQKLESARQFLTAHRLPLTLAGASYEGVAVNDCIESGRQAAVSVLGTEPNS

SEQ ID NO: 10690 - protein, 180 aa, Homo sapiens [sequence omitted]

SEQ ID NO: 10691 - protein, 169 aa, Homo sapiens
MRQRADRRSMVSTSGAATASSAAGPSRGAAHSPSSAPHASRHRPPFSSRATGLLQQRQHCVHHCTQLCPRVQTPCLPPPPAPATELHSYLQQGGERGLLDTTPVQGSRPGKNVQLTENEIRGLCLKSREIFLSQPILLELEAPLKICGDIHGQYYDLLRLFEYGGFPPE

SEQ ID NO: 10692 - protein, 286 aa, Homo sapiens
MSDSEKLNLDSIIGRLLEGDIHGQYYDLLRLFEYGGFPPESNYLFLGDYVDRGKQSLETICLLLAYKIKYPENFFLLRGNHECASINRIYGFYDECKRRYNIKLWKTFTDCFNCLPIAAIVDEKIFCCHGGLSPDLQSMEQIRRIMRPTDVPDQGLLCDLLWSDPDKDVQGWGENDRGVSFTFGAEVVAKFLHKHDLDLICRAHQVVEDGYEFFAKRQLVTLFSAPNYCGEFDNAGAMMSVDETLMCSFQILKPADKNKGKYGQFSGLNPGGRPITPPRNSAKAKK

SEQ ID NO: 10693 - protein, 341 aa, Homo sapiens
MSDSEKLNLDSIIGRLLEGSRVLTPHCAPVQGSRPGKNVQLTENEIRGLCLKSREIFLSQPILLELEAPLKICGDIHGQYYDLLRLFEYGGFPPESNYLFLGDYVDRGKQSLETICLLLAYKIKYPENFFLLRGNHECASINRIYGFYDECKRRYNIKLWKTFTDCFNCLPIAAIVDEKIFCCHGGLSPDLQSMEQIRRIMRPTDVPDQGLLCDLLWSDPDKDVQGWGENDRGVSFTFGAEVVAKFLHKHDLDLICRAHQVVEDGYEFFAKRQLVTLFSAPNYCGEFDNAGAMMSVDETLMCSFQILKPADKNKGKYGQFSGLNPGGRPITPPRNSAKAKK

SEQ ID NO: 10694 - protein, 330 aa, Homo sapiens
MSDSEKLNLDSIIGRLLEVQGSRPGKNVQLTENEIRGLCLKSREIFLSQPILLELEAPLKICGDIHGQYYDLLRLFEYGGFPPESNYLFLGDYVDRGKQSLETICLLLAYKIKYPENFFLLRGNHECASINRIYGFYDECKRRYNIKLWKTFTDCFNCLPIAAIVDEKIFCCHGGLSPDLQSMEQIRRIMRPTDVPDQGLLCDLLWSDPDKDVQGWGENDRGVSFTFGAEVVAKFLHKHDLDLICRAHQVVEDGYEFFAKRQLVTLFSAPNYCGEFDNAGAMMSVDETLMCSFQILKPADKNKGKYGQFSGLNPGGRPITPPRNSAKAKK

SEQ ID NO: 10695 - protein, 253 aa, Homo sapiens
MSDSEKLNLDSIIGRLLEVQGSRPGKNVQLTENEIRGLCLKSREIFLSQPILLELEAPLKICGDIHGQYYDLLRLFEYGGFPPESNYLFLGDYVDRGKQSLETICLLLAYKIKYPENFFLLRGNHECASINRIYGFYDECLSPDLQSMEQIRRIMRPTDVPDQGLLCDLLWSDPDKDVQGWGENDRGVSFTFGAEVVAKFLHKHDLDLICRAHQVVEDGYEFFAKRQLVTLFSAPNYCGEFDNAGAMMSVDET

SEQ ID NO: 10696 - protein, 87 aa, Homo sapiens
MALKKFVMVKFLNDSIVDPVDSEWFGFYRSGQAKETIPLQETSLYTQDRLGLKEMDNAGQLVFLATEGDHLQLSEEWFYAHIIPFLG

SEQ ID NO: 10697 - protein, 52 aa, Homo sapiens
MASPGCLWLLAVALLPWTCASRALQHLDPPAPLPLVIWHGMASCKPNTGMTP

SEQ ID NO: 10698 - protein, 46 aa, Homo sapiens
MASPGCLWLLAVALLPWTCASRALQHLDPPAPLPLVIWHGMAVAIP

SEQ ID NO: 10699 - protein, 46 aa, Homo sapiens; identical to SEQ ID NO: 10698

SEQ ID NO: 10700 - protein, 305 aa, Homo sapiens
MASPGCLWLLAVALLPWTCASRALQHLDPPAPLPLVIWHGMDSCCNPLSMGAIKKMVEKKIPGIYVLSLEIGKTLMEDVENSFFLNVNSQVTTVCQALAKDPKLQQGYNAMGFSQGGQFLRAVAQRCPSPPMINLISVGGQHQGVFGLPRCPGESSHICDFIRKTLNAGAYSKVVQERLVQAEYWHDPIKEDVYRNHSIFLADINQERGINESYKKNLMALKKFVMVKFLNDSIVDPVDSEWFGFYRSGQAKETIPLQETSLYTQDRLGLKEMDNAGQLVFLATEGDHLQLSEEWFYAHIIPFLG

SEQ ID NO: 10701 - protein, 282 aa, Homo sapiens
MASPGCLWLLAVALLPWTCASRALQHLDPPAPLPLVIWHGMGDSCCNPLSMGAIKKMVEKKIPGIYVLSLEIGKTLMEDVENSFFLNVNSQVTTVCQALAKDPKLQQGYNAMGFSQGGQFLRAVAQRCPSPPMINLISVGGQHQGVFGLPRCPGESSHICDFIRKTLNAGAYSKVVQERLVQAEYWHDPIKEDVYRNHSIFLADINQERGINESYKKNLMALKKFVMVKFLNDSIVDPVDSEDRLGLKEMDNAGQLVFLATEGDHLQLSEEWFYAHIIPFLG

SEQ ID NO: 10702 - protein, 306 aa, Homo sapiens
MASPGCLWLLAVALLPWTCASRALQHLDPPAPLPLVIWHGMGDSCCNPLSMGAIKKMVEKKIPGIYVLSLEIGKTLMEDVENSFFLNVNSQVTTVCQALAKDPKLQQGYNAMGFSQGGQFLRAVAQRCPSPPMINLISVGGQHQGVFGLPRCPGESSHICDFIRKTLNAGAYSKVVQERLVQAEYWHDPIKEDVYRNHSIFLADINQERGINESYKKNLMALKKFVMVKFLNDSIVDPVDSEWFGFYRSGQAKETIPLQETSLYTQDRLGLKEMDNAGQLVFLATEGDHLQLSEEWFYAHIIPFLG

SEQ ID NO: 10703 - protein, 301 aa, Homo sapiens
MASPGCLWLLAVALLPWTCASRALQHLDPPAPLPLVIWHGMGDSCCNPLSMGAIKKMVEKKIPGIYVLSLEIGKTLMEDVENSFFLNVNSQVTTVCQALAKDPKLQQGYNAMGFSQGGQFLRAVAQRCPSPPMINLISVGGQHQGVFGLPRCPGESSHICDFIRKTLNAGAYSKVVQERLVQAEYWHDPIKEDVYRNHSIFLADINQERGINESYKKNLMALKKFVMVKFLNDSIVDPVDSEWFGFYRSGQAKETIPLQETSLYTQFCSLPRLECNGMISAHCNLRLPGSSEFSCLSLPSS

SEQ ID NO: 10704 - protein, 306 aa, Homo sapiens; identical to SEQ ID NO: 10702

SEQ ID NO: 10705 - protein, 148 aa, Homo sapiens
MASPGCLWLLAVALLPWTCASRALQHLDPPAPLPLVIWHGMGDSCCNPLSMGAIKKMVEKKIPGIYVLSLEIGKTLMEDVENSFFLNVNSQVTTVCQALAKDPKLQQGYNAMGFSQGGQFLRAVAQRCPSPPMINLISVGGQHQVPCA

SEQ ID NO: 10706 - protein, 208 aa, Homo sapiens
MASPGCLWLLAVALLPWTCASRALQHLDPPAPLPLVIWHGMGDSCCNPLSMGAIKKMVEKKIPGIYVLSLEIGKTLMEEGSGSEMPFTSHDQSDLGWGTTSSLVQAEYWHDPIKEDVYRNHSIFLADINQERGINESYKKNLMALKKFVMVKFLNDSIVDPVDSEWFGFYRSGQAKETIPLQETSLYTQDRLGLKEMDNAGQLVFLAT

SEQ ID NO: 10707 - protein, 55 aa, Homo sapiens
MASPGCLWLLAVALLPWTCASRALQHLDPPAPLPLVIWHGMGERQLLQSLKHGCY

SEQ ID NO: 10708 - protein, 335 aa, Homo sapiens
MASPGCLWLLAVALLPWTCASRALQHLDPPAPLPLVIWHGMGSRYVAQTGLELLASSNPPASSYQSAGMIGDSCCNPLSMGAIKKMVEKKIPGIYVLSLEIGKTLMEDVENSFFLNVNSQVTTVCQALAKDPKLQQGYNAMGFSQGGQFLRAVAQRCPSPPMINLISVGGQHQGVFGLPRCPGESSHICDFIRKTLNAGAYSKVVQERLVQAEYWHDPIKEDVYRNHSIFLADINQERGINESYKKNLMALKKFVMVKFLNDSIVDPVDSEWFGFYRSGQAKETIPLQETSLYTQDRLGLKEMDNAGQLVFLATEGDHLQLSEEWFYAHIIPFLG

SEQ ID NO: 10709 - protein, 203 aa, Homo sapiens
MASPGCLWLLAVALLPWTCASRALQHLDPPAPLPLVIWHGMGVFGLPRCPGESSHICDFIRKTLNAGAYSKVVQERLVQAEYWHDPIKEDVYRNHSIFLADINQERGINESYKKNLMALKKFVMVKFLNDSIVDPVDSEWFGFYRSGQAKETIPLQETSLYTQDRLGLKEMDNAGQLVFLATEGDHLQLSEEWFYAHIIPFLG

SEQ ID NO: 10710 - protein, 35 aa, Homo sapiens
  VARIANT 1: note = misc_feature - Xaa can be any naturally occurring amino acid
XLAVALLPWTCASRALQHLDPPAPLPLVIWHGMGE

SEQ ID NO: 10711 - protein, 323 aa, Homo sapiens
  VARIANT 1: note = misc_feature - Xaa can be any naturally occurring amino acid
XLLAVALLPWTCASRALQHLDPPAPLPLVIWHGMGDSCCNPLSMGAIKKMVEKKIPGIYVLSLEIGKTLMEDVENSFFLNVNSQVTTVCQALAKDPKLQQGYNAMGFSQGGQFLRAVAQRCPSPPMINLISVGGQHQGVFGLPRCPGESSHICDFIRKTLNAGAYSKVVQERLVQAEYWHDPIKEDVYRNHSIFLADINQERGINESYKKNLMALKKFVMVKFLNDSIVDPVDSEWFGFYRSGQAKETIPLQETSLYTQVTGRESILGGWCFFSSQFLKLLCSLVLEPFPLHLRALGPPGAKGNGQCRTASVSGYRRGPSSVV

SEQ ID NO: 10712 - protein, 78 aa, Homo sapiens
  VARIANT 1: note = misc_feature - Xaa can be any naturally occurring amino acid
XPPMINLISVGGQHQGVFGLPRCPGESSHICDFIRKTLNAGAYSKVVQERGLDFTEVAKPRKPFPYRRPPCTHRTAWG

SEQ ID NO: 10713 - protein, 308 aa, Homo sapiens
MKSCGSMLGLCGQRLPAAWVLLLLPFLPLLLLAAPAPHRASYKPVIVVHGLFDSSYSFRHLLEYINETHPGTVVTVLDLFDGRESLRPLWEQVQGFREAVVPIMAKAPQGVHLICYSQGGLVCRALLSVMDDHNVDSFISLSSPQMGQYGDTDYLKWLFPTSMRSNLYRICYSPWGQEFSICNYWHDPHHDDLYLNASSFLALINGERDHPNATVWRKNFLRVGHLVLIGGPDDGVITPWQSSFFGFYDANETVLEMEEQLVYLRDSFGLKTLLARGAIVRCPMAGISHTAWHSNRTLYETCIEPWLS

SEQ ID NO: 10714 - protein, 97 aa, Homo sapiens
MLGLCGQRLPAAWVLLLLPFLPLLLLAAPAPHRASYKPVIVVHGLFDSSYSFRHLLEYINEGALCAGLCFLSWMITTWILSSPSPLHRWDSMETRTT

SEQ ID NO: 10715 - protein, 158 aa, Homo sapiens
MLGLCGQRLPAAWVLLLLPFLPLLLLAAPAPHRASYKPVIVVHGLFDSSYSFRHLLEYINEMGQYGDTDYLKWLFPTSMRSNLYRICYSPWGQEFSICNYWHDPHHDDLYLNASSFLALINGERDHPNATVWRKNFLRVGHLVLIGGPDDGVITPWQS

SEQ ID NO: 10716 - protein, 180 aa, Homo sapiens
MLGLCGQRLPAAWVLLLLPFLPLLLLAAPAPHRASYKPVIVVHGLFDSSYSFRHLLEYINETHPGTVVTVLDLFDGRESLRPLWEQVQGFREAVVPIMAKAPQGVHLICYSQGGLVCRALLSVMDDHNVDSFISLSSPQMGQYGDTDYLKWLFPTSMRSNLYRICYSPWGQEFSICNYWH

SEQ ID NO: 10717 - protein, 302 aa, Homo sapiens
MLGLCGQRLPAAWVLLLLPFLPLLLLAAPAPHRASYKPVIVVHGLFDSSYSFRHLLEYINETHPGTVVTVLDLFDGRESLRPLWEQVQGFREAVVPIMAKAPQGVHLICYSQGGLVCRALLSVMDDHNVDSFISLSSPQMGQYGDTDYLKWLFPTSMRSNLYRICYSPWGQEFSICNYWHDPHHDDLYLNASSFLALINGERDHPNATVWRKNFLRVGHLVLIGGPDDGVITPWQSSFFGFYDANETVLEMEEQLVYLRDSFGLKTLLARGAIVRCPMAGISHTAWHSNRTLYETCIEPWLS

SEQ ID NO: 10718 - protein, 302 aa, Homo sapiens; identical to SEQ ID NO: 10717

SEQ ID NO: 10719 - protein, 302 aa, Homo sapiens; identical to SEQ ID NO: 10717

SEQ ID NO: 10720 - protein, 302 aa, Homo sapiens; identical to SEQ ID NO: 10717

SEQ ID NO: 10721 - protein, 79 aa, Homo sapiens
MAAARLCLSLLLLSTCVALLLQPLLGAQGAPLEPVYPGDNATPEQMAQYAADLRRYINMLTRPRPRPMCPGQDGAYRQI

SEQ ID NO: 10722 - protein, 95 aa, Homo sapiens
MAAARLCLSLLLLSTCVALLLQPLLGAQGAPLEPVYPGDNATPEQMAQYAADLRRYINMLTRPRYGKRHKEDTLAFSEWGSPHAAVPRELSPLDL

SEQ ID NO: 10723 - protein, 95 aa, Homo sapiens; identical to SEQ ID NO: 10722

SEQ ID NO: 10724 - protein, 105 aa, Homo sapiens
MAAARLCLSLLLLSTCVALLLQPLLGAQGAPLEPVYPGDNATPEQMAQYAADLRRYINMLTRPSACPCCLFPPRYGKRHKEDTLAFSEWGSPHAAVPRELSPLDL

SEQ ID NO: 10725 - protein, 132 aa, Homo sapiens
  VARIANT 1: note = misc_feature - Xaa can be any naturally occurring amino acid
XQYAADLRRYINMLTRPRCVPQLGREIPAPGTLGPLHIPGHTLSPAPAPAPSRPALGKTGHLCSTGLDQCALGKMVPTGRYETGGLAPGHSACPCCLFPPRYGKRHKEDTLAFSEWGSPHAAVPRELSPLDL

SEQ ID NO: 10726 - protein, 90 aa, Homo sapiens
MDRRRMALRPGSRRPTAFFFHSRWLVPNLLAFFLGLSGAGPIHLPMPWPNGRRHRVLDPHTQLSTHEAPGRWKPVAPRTMKACPQVLLEW

SEQ ID NO: 10727 - protein, 140 aa, Homo sapiens
MEPQVRALRCGCWNRDSKRASGGSIQVNPKKSVCGGVHTTNYYGEEDKEDMDRRRMALRPGSRRPTAFFFHSRWLVPNLLAFFLGLSGAGPIHLPMPWPNGRRHRVLDPHTQLSTHEAPGRWKPVAPRTMKACPQVLLEW

SEQ ID NO: 10728 - protein, 188 aa, Homo sapiens
MVPGAAGWCCLVLWLPACVAAHGFRIHDYLYFQVLSPGDIRYIFTATPAKDFGGIFHTRYEQIHLVPAEPPEACGELSNGFFIQDQIALVERGGCSFLSKTRVVQEHGGRAVIISDNAVDNDSFYVEMIQDSTQRTADIPALFLLGRDGYMIRRSLEQHGLPWAIISIPVNVTSIPTFELLQPPWTFW

SEQ ID NO: 10729 - protein, 151 aa, Homo sapiens
MRRLLLVTSLVVVLLWEAGAVPAPKVPIKMQVKHWPSEQDPEKAWGARVVEPPEKDDQLVVLFPVQKPKLLTTEEKPRGQGRGPILPGTKAWMETEDTLGHVLSPEPDHDSLYHPPPEEDQGEERPRLWVMPNHQVLLGPEEDQDHIYHPQ

SEQ ID NO: 10730 - protein, 142 aa, Homo sapiens
MRRLLLVTSLVVVLLWEAGAVPAPKVPIKMQVKHWPSEQDPEKAWGARVVEPPEKDDQLVVLFPVQKPKLLTTEEKPRGTKAWMETEDTLGHVLSPEPDHDSLYHPPPEEDQGEERPRLWVMPNHQVLLGPEEDQDHIYHPQ

SEQ ID NO: 10731 - protein, 178 aa, Homo sapiens
MLLILLSVALLALSSAQNLNEDVSQEESPSLIAGNPQGPSPQGGNKPQGPPPPPGKPQGPPPQGGNKPQGPPPPGKPQGPPPQGDKSRSPRSPPGKPQGPPPQGGKPQGPPAQGGSKSQSARSPPGKPQGPPQQEGNNPQGPPPPAGGNPQQPQAPPAGQPQGPPRPPQGGRPSRPPQ

SEQ ID NO: 10732 - protein, 198 aa, Homo sapiens
MLLILLSVALLALSSAQNLNEDVSQEESPSLIAGNPQGPSPQGGNKPQGPPPPPGKPQGPPPQGGNKPQGPPPPGKPQGPPPQGDKSRSPRSPPGKPQGPPPQGGKPQGPPPQGGNKPQGPPPPGKPQGPPAQGGSKSQSARSPPGKPQGPPQQEGNNPQGPPPPAGGNPQQPQAPPAGQPQGPPRPPQGGRPSRPPQ

SEQ ID NO: 10733 - protein, 151 aa, Homo sapiens
MLLILLSVALLALSSAQNLNEDVSQEESPSLIAGNPQGPSPQGGNKPQGPPPPPGKPQGPPPQGGNKPQGPPPPGKPQGPPPQGDKSRSPRSPPGKPQGPPPQGGNQPQGPPPPPGKPQGPPPQGGNRPQGPPPPGKPQGPPPQGDKSRSP

SEQ ID NO: 10734 - protein, 330 aa, Homo sapiens
MLLILLSVALLALSSAQNLNEDVSQEESPSLIAGNPQGPSPQGGNKPQGPPPPPGKPQGPPPQGGNKPQGPPPPGKPQGPPPQGDKSRSPRSPPGKPQGPPPQGGNQPQGPPPPPGKPQGPPPQGGNRPQGPPPPGKPQGPPPQGDKSRSPSPPGKPQGPPPQGGNQPQGPPPPPGKPQGPPPQGGKKPQGPPPPGKPQGPPPQGDKSRSSQSPPGKPQGPPPQGGNQPQGPPPPPGKPQGPPPQGGNKPQGPPPPGKPQGPPAQGGSKSQSARSPPGKPQGPPQQEGNNPQGPPPPAGGNPQQPQAPPAGQPQGPPRPPQGGRPSRPPQ

SEQ ID NO: 10735 - protein, 21 aa, Homo sapiens
MLLILLSVALLALSSAQNLNE

SEQ ID NO: 10736 - protein, 416 aa, Homo sapiens
MLLILLSVALLALSSAQNLNEDVSQEESPSLIAGNPQGAPPQGGNKPQGPPSPPGKPQGPPPQGGNQPQGPPPPPGKPQGPPPQGGNKPQGPPPPGKPQGPPPQGDKSRSPRSPPGKPQGPPPQGGNQPQGPPPPPGKPQGPPPQGGNKPQGPPPPGKPQGPPPQGDNKSRSSRSPPGKPQGPPPQGGNQPQGPPPPPGKPQGPPPQGGNKPQGPPPPGKPQGPPPQGDNKSQSARSPPGKPQGPPPQGGNQPQGPPPPPGKPQGPPPQGGNKPQGPPPPGKPQGPPPQGGSKSRSSRSPPGKPQGPPPQGGNQPQGPPPPPGKPQGPPPQGGNKPQGPPPPGKPQGPPPQGGSKSRSARSPPGKPQGPPQQEGNNPQGPPPPAGGNPQQPQAPPAGQPQGPPRPPQGGRPSRPPQ

SEQ ID NO: 10737 - protein, 351 aa, Homo sapiens
MLLILLSVALLALSSAQSLNEDVSQEESPSVISGKPEGRRPQGGNQPQRTPPPPGKPEGRPPQGGNQSQGPPPRPGKPEGPPPQGGNQSQGPPPRPGKPEGQPPQGGNQSQGPPPRPGKPEGPPPQGGNQSQGPPPRPGKPEGPPPQGGNQSQGPPPRPGKPEGPPPQGGNQSQGPPPHPGKPEGPPPQGGNQSQGPPPRPGKPEGPPPQGGNQSQGPPPRPGKPEGPPPQGGNKPQGPPPRPGKPEGPPPQGGNQSQGPPPRPGKPEGPPSQGGNKPQGPPPHPGKPQGPPPQEGNKPQRPPPPGRPQGPPPPGGNPQQPLPPPAGKPQGPPPPPQGGRPHRPPQGQPPQ

SEQ ID NO: 10738 - protein, 309 aa, Homo sapiens
MLLILLSVALLALSSAQSLNEDVSQEESPSVISGKPEGRRPQGGNQPQRTPPPPGKPEGRPPQGGNQSQGPPPRPGKPEGPPPQGGNQSQGPPPRPGKPEGQPPQGGNQSQGPPPRPGKPEGPPPQGGNQSQGPPPRPGKPEGPPPQGGNQSQGPPPRPGKPEGPPPQGGNQSQGPPPHPGKPEGPPPQGGNQSQGPPPRPGKPEGPPPQGGNQSQGPPPRPGKPEGPPSQGGNKPQGPPPHPGKPQGPPPQEGNKPQRPPPPGRPQGPPPPGGNPQQPLPPPAGKPQGPPPPPQGGRPHRPPQGQPPQ

SEQ ID NO: 10739 - protein, 178 aa, Homo sapiens
MLLILLSVALLALSSAESSSEDVSQEESLFLISGKPEGRRPQGGNQPQRPPPPPGKPQGPPPQGGNQSQGPPPPPGKPEGRPPQGGNQSQGPPPHPGKPERPPPQGGNQSQGKPQGPPQQEGNKPQGPPPPGKPQGPPPAGGNPQQPQAPPAGKPQGPPPPPQGGRPPRPAQGQQPPQ

SEQ ID NO: 10740 - protein, 178 aa, Homo sapiens; identical to SEQ ID NO: 10739

SEQ ID NO: 10741 - protein, 247 aa, Homo sapiens
MLLILLSVALLALSSAESSSEDVSQEESLFLISGKPEGRRPQGGNQPQRPPPPPGKPQGPPPQGGNQSQGPPPPPGKPEGRPPQGGNQSQGPPPHPGKPERPPPQGGNQSQGTPPPPGKPERPPPQGGNQSHRPPPPPGKPERPPPQGGNQSQGPPPHPGKPEGPPPQEGNKSRSARSPPGKPQGPPQQEGNKPQGPPPPGKPQGPPPAGGNPQQPQAPPAGKPQGPPPPPQGGRPPRPAQGQQPPQ

SEQ ID NO: 10742 - protein, 247 aa, Homo sapiens; identical to SEQ ID NO: 10741

SEQ ID NO: 10743 - protein, 54 aa, Homo sapiens
MCTTLFLLSTLAMLWRRRFANRVQPEPSDVDGAARGSSLDADPQSSGREKEPLK

SEQ ID NO: 10744 - protein, 54 aa, Homo sapiens; identical to SEQ ID NO: 10743

SEQ ID NO: 10745 - protein, 164 aa, Homo sapiens [sequence omitted]

SEQ ID NO: 10746 - protein, 517 aa, Homo sapiens
MGRRALLLLLLSFLAPWATIALRPALRALGSLHLPTNPTSLPAVAKNYSVLYFQQKALAAGQLHICIIQLNHYKTPLVDHFGFNTVKTFNQRYLVADKYWKKNGGSILFYTGNEGDIIWFCNNTGFMWDVAEELKAMLVFAEHRYYGESLPFGDNSFKDSRHLNFLTSEQALADFAELIKHLKRTIPGAENQPVIAIGGSYGGMLAAWFRMKYPHMVVGALAASAPIWQFEDLVPCGVFMKIVTTDFRKSGPHCSESIHRSWDAINRLSNTGSGLQWLTGALHLCSPLTSQDIQHLKDWISETWVNLAMVDYPYASNFLQPLPAWPIKVVCQYLKNPNVSDSLLLQNIFQALNVYYNYSGQVKCLNISETATSSLGTLGWSYQACTEVVMPFCTNGVDDMFEPHSWNLKELSDDCFQQWGVRPRPSWITTMYGGKNISSHTNIVFSNGELDPWSGGGVTKDITDTLVAVTISEGAHHLDLRTKNALDPMSVLLARSLEVRHMKNWIRDFYDSAGKQH

SEQ ID NO: 10747 - protein, 496 aa, Homo sapiens
MGRRALLLLLLSFLAPWATIALRPALRALGSLHLPTNPTSLPAVAKNYSVLYFQQKVDHFGFNTVKTFNQRYLVADKYWKKNGGSILFYTGNEGDIIWFCNNTGFMWDVAEELKAMLVFAEHRYYGESLPFGDNSFKDSRHLNFLTSEQALADFAELIKHLKRTIPGAENQPVIAIGGSYGGMLAAWFRMKYPHMVVGALAASAPIWQFEDLVPCGVFMKIVTTDFRKSGPHCSESIHRSWDAINRLSNTGSGLQWLTGALHLCSPLTSQDIQHLKDWISETWVNLAMVDYPYASNFLQPLPAWPIKVVCQYLKNPNVSDSLLLQNIFQALNVYYNYSGQVKCLNISETATSSLGTLGWSYQACTEVVMPFCTNGVDDMFEPHSWNLKELSDDCFQQWGVRPRPSWITTMYGGKNISSHTNIVFSNGELDPWSGGGVTKDITDTLVAVTISEGAHHLDLRTKNALDPMSVLLARSLEVRHMKNWIRDFYDSAGKQH

SEQ ID NO: 10748 - protein, 116 aa, Homo sapiens
MKVDHFGFNTVKTFNQRYLVADKYWKKNGGSILFYTGNEGDIIWFCNNTGFMWDVAEELKAMLVFAEHRYYGESLPFGDNSFKDSRHLNFLTSEQALADFAELIKHLKRTIPGAEN

SEQ ID NO: 10749 - protein, 26 aa, Homo sapiens
MWDVAEELKAMLVFAEHRYYGESLPF

SEQ ID NO: 10750 - protein, 43 aa, Homo sapiens
MWDVAEELKAMLVFAEHRYYGESLPFGDNSFKDSRHLNFLTSE

SEQ ID NO: 10751 - protein, 100 aa, Homo sapiens
MWDVAEELKAMLVFAEHRYYGESLPFGDNSFKDSRHLNFLTSEQALADFAELIKHLKRTIPGAENQPVIAIGGSYGGMLAAWFRMKYPHMVVGALAASAP

SEQ ID NO: 10752 - protein, 145 aa, Homo sapiens
MWDVAEELKAMLVFAEHRYYGESLPFGDNSFKDSRHLNFLTSEQALADFAELIKHLKRTIPGAENQPVIAIGGSYGGMLAAWFRMKYPHMVVGALAASAPIWQFEDLVPCGVFMKIVTTDFRKSGPHCSESIHRSWDAINRLSNT

SEQ ID NO: 10753 - protein, 148 aa, Homo sapiens
MWDVAEELKAMLVFAEHRYYGESLPFGDNSFKDSRHLNFLTSEQALADFAELIKHLKRTIPGAENQPVIAIGGSYGGMLAAWFRMKYPHMVVGALAASAPIWQFEDLVPCGVFMKIVTTDFRKSGPHCSESIHRSWDAINRLSNTGSG

SEQ ID NO: 10754 - protein, 183 aa, Homo sapiens
MWDVAEELKAMLVFAEHRYYGESLPFGDNSFKDSRHLNFLTSEQALADFAELIKHLKRTIPGAENQPVIAIGGSYGGMLAAWFRMKYPHMVVGALAASAPIWQFEDLVPCGVFMKIVTTDFRKSGPHCSESIHRSWDAINRLSNTGSGLQWLTGALHLCSPLTSQDIQHLKDWISETWVNLAM

SEQ ID NO: 10755 - protein, 192 aa, Homo sapiens
MWDVAEELKAMLVFAEHRYYGESLPFGDNSFKDSRHLNFLTSEQALADFAELIKHLKRTIPGAENQPVIAIGGSYGGMLAAWFRMKYPHMVVGALAASAPIWQFEDLVPCGVFMKIVTTDFRKSGPHCSESIHRSWDAINRLSNTGSGLQWLTGALHLCSPLTSQDIQHLKDWISETWVNLAMVDYPYASNF

SEQ ID NO: 10756 - protein, 234 aa, Homo sapiens
MWDVAEELKAMLVFAEHRYYGESLPFGDNSFKDSRHLNFLTSEQALADFAELIKHLKRTIPGAENQPVIAIGGSYGGMLAAWFRMKYPHMVVGALAASAPIWQFEDLVPCGVFMKIVTTDFRKSGPHCSESIHRSWDAINRLSNTGSGLQWLTGALHLCSPLTSQDIQHLKDWISETWVNLAMVDYPYASNFLQPLPAWPIKVVCQYLKNPNVSDSLLLQNIFQALNVYYNYSG

SEQ ID NO: 10757 - protein, 367 aa, Homo sapiens
MMGSVLPAEALVLKTGLKAPGLALAEVITSDILHSFLYGRWRNVLGEQLFEDKSHHASPKTAFTAEVLAQSFSGEVQKLSSLVLPAEVIIAQSSIPGEGLGIFSKTWIKAGTEMGPFTGRVIAPEHVDICKNNNLMWEVFNEDGTVRYFIDASQEDHRSWMTYIKCARNEQEQNLEVVQIGTSIFYKAIEMIPPDQELLVWYGNSHNTFLGIPGVPGLEEDQKKNKHEDFHPADSAAGPAGRMRCVICHRGFNSRSNLRSHMRIHTLDKPFVCRFCNRRFSQSSTLRNHVRLHTGERPYKCQVCQSAYSQLAGLRAHQKSARHRPPSTALQAHSPALPAPHAHAPALAAAAAAAAAAAAHHLPAMVL

SEQ ID NO: 10758 - protein, 185 aa, Homo sapiens
MDHRSRLRGTGLNRIPGTQSRAPRVPLPFHVQQEAREGEDWEREPPRQRPPIYEPPESEELPDNVMVSKPAPYWEGTAVIDGEFKELKLTDYRGKYLVFFFYPLDFTFVCPTEIIAFGDRLEEFRSINTEVVACSVDSQFTHLAWINTPRRQGGLGPIRIPLLSDLTHQISKDYGVYLEDSGHTL

SEQ ID NO: 10759 - protein, 271 aa, Homo sapiens
MEALPLLAATTPDHGRHRRLLLLPLLLFLLPAGAVQGWETEERPRTREEECHFYAGGQVYPGEASRVSVADHSLHLSKAKISKPAPYWEGTAVIDGEFKELKLTDYRGKYLVFFFYPLDFTFVCPTEIIAFGDRLEEFRSINTEVVACSVDSQFTHLAWINTPRRQGGLGPIRIPLLSDLTHQISKDYGVYLEDSGHTLRGLFIIDDKGILRQITLNDLPVGRSVDETLRLVQAFQYTDKHGEVCPAGWKPGSETIIPDPAGKLKYFDKLN

SEQ ID NO: 10760 - protein, 186 aa, Homo sapiens
MEALPLLAATTPDHGRHRRLLLLPLLLFLLPAGAVQGWETEERPRTREEECHFYAGGQVYPGEASRVSVADHSLHLSKAKISKPAPYWEGTAVIDGEFKELKLTDYRGKYLVFFFYPLDFTFVCPTEIIAFGDRLEEFRSINTEVVACSVDSQFTHLAWSVSYTYIRRKKRMDLLLKHGQITLDMI

SEQ ID NO: 10761 - protein, 161 aa, Homo sapiens
  VARIANT 1: note = misc_feature - Xaa can be any naturally occurring amino acid
XCPTEIIAFGDRLEEFRSINTEVVACSVDSQFTHLAWINTPRRQGGLGPIRIPLLSDLTHQISKDYGVYLEDSGHTLRGLFIIDDKGILRQITLNDLPVGRSVDETLRLVQAFQYTDKHGEVCPAGWKPGSETIKPEDTMKAWWPRESYNPRSSWKAEVFR

SEQ ID NO: 10762 - protein, 382 aa, Homo sapiens
MRSPLCWLLPLLILASVAQGQPTRRPRPGTGPGRRPRPRPRPTPSFPQPDEPAEPTDLPPPLPPGPPSIFPDCPRECYCPPDFPSALYCDSRNLRKVPVIPPRIHYLYLQNNFITELPVESFQNATGLRWINLDNNRIRKIDQRVLEKLPGLVFLYMEKNQLEEVPSALPRNLEQLRLSQNHISRIPPGVFSKLENLLLLDLQHNRLSDGVFKPDTFHGLKNLMQLNLAHNILRKMPPRVPTAIHQLYLDSNKIETIPNGYFKSFPNLAFIRLNYNKLTDRGLPKNSFNISNLLVLHLSHNRISSVPAINNRLEHLYLNNNSIEKINGTQICPNDLVAFHDFSSDLENVPHLRYLRLDGNYLKPPIPLDLMMCFRLLQSVVI

SEQ ID NO: 10763 - protein, 555 aa, Homo sapiens
MAARLLLLGILLLLLPLPVPAPCHTAARSECKRSHKFVPGAWLAGEGVDVTSLRRSGSFPVDTQRFLRPDGTCTLCENALQEGTLQRLPLALTNWRAQGSGCQRHVTRAKVSSTEAVARDAARSIRNDWKVGLDVTPKPTSNVHVSVAGSHSQAANFAAQKTHQDQYSFSTDTVECRFYSFHVVHTPPLHPDFKRALGDLPHHFNASTQPAYLRLISNYGTHFIRAVELGGRISALTALRTCELALEGLTDNEVEDCLTVEAQVNIGIHGSISAEAKACEEKKKKHKMTASFHQTYRERHSEVVGGHHTSINDLLFGIQAGPEQYSAWVNSLPGSPGLVDYTLEPLHVLLDSQDPRREALRRALSQYLTDRARWRDCSRPCPPGRQKSPRDPCQCVCHGSAVTTQDCCPRQRGLAQLEVTFIQAWGLWGDWFTATDAYVKLFFGGQELRTSTVWDNNNPIWSVRLDFGDVLLATGGPLRLQVWDQDSGRDDDLLGTCDQAPKSGSHEVRCNLNHGHLKFRYHARCLPHLGGGTCLDYVPQMLLGEPPGNRSGAVW

SEQ ID NO: 10764 - protein, 555 aa, Homo sapiens; identical to SEQ ID NO: 10763

SEQ ID NO: 10765 - protein, 232 aa, Homo sapiens
MAARLLLLGILLLLLPLPVPAPCHTAARSECKRSHKFVPGAWLAGEGVDVTSLRRSGSFPVDTQRFLRPDGTCTLCENALQEGTLQRLPLALTNWRAQGSGCQRHVTRAKVSSTEAVARDAARSIRNDWKVGLDVTPKPTSNVHVSVAGSHSQAANFAAQKTHQDQYSFSTDTVECRFYSSSAIVSASGFYMWPNTILLPTWPREAKRLDTHQTDGKGRFRLFFREVAGFTR

SEQ ID NO: 10766 - protein, 211 aa, Homo sapiens
MKLPLLLALLFGAVSALHLRSETSTFETPLGAKTLPEDEETPEQEMEETPCRELEEEEEWGSGSEDASKKDGAVESISVPDMVDKNLTCPEEEDTVKVVGIPGCQTCRYLLFTCRRCYRGNLVSIHNFNINYRIQCSVSALNQGQVWIGGRITGSGRCRRFQWVDGSRWNFAYWAAHQPWSRGGHCVALCTRGGHWRRAHCLRRLPFICSY

SEQ ID NO: 10767 - protein, 222 aa, Homo sapiens
MKLPLLLALLFGAVSALHLRSETSTFETPLGAKTLPEDEETPEQEMEETPCRELEEEEEWGSGSEDASKKDGAVESISVPDMVDKNLTCPEEEDTVKVVGIPGCQTCRYLLVRSLQTFSQAWFTCRRCYRGNLVSIHNFNINYRIQCSVSALNQGQVWIGGRITGSGRCRRFQWVDGSRWNFAYWAAHQPWSRGGHCVALCTRGGHWRRAHCLRRLPFICSY

SEQ ID NO: 10768 - protein, 222 aa, Homo sapiens; identical to SEQ ID NO: 10767

SEQ ID NO: 10769 - protein, 225 aa, Homo sapiens
MQCLLLLPFLLLGTVSALHLENDAPHLESLETQADLGQDLDSSKEQERDLALTEEVIQAEGEEVKASACQDNFEDEEAMESDPAALDKDFQCPREEDIVEVQGSPRCKICRYLLVRTPKTFAEAQNVCSRCYGGNLVSIHDFNFNYRIQCCTSTVNQAQVWIGGNLRGWFLWKRFCWTDGSHWNFAYWSPGQPGNGQGSCVALCTKGGYWRRAQCDKQLPFVCSF

SEQ ID NO: 10770 - protein, 1404 aa, Homo sapiens
MAWKTLPIYLLLLLSVFVIQQVSSQDLSSCAGRCGEGYSRDATCNCDYNCQHYMECCPDFKRVCTAELSCKGRCFESFERGRECDCDAQCKKYDKCCPDYESFCAEVHNPTSPPSSKKAPPPSGASQTIKSTTKRSPKPPNKKKTKKVIESEEITEEHSVSENQESSSSSSSSSSSSTIRKIKSSKNSAANRELQKKLKVKDNKKNRTKKKPTPKPPVVDEAGSGLDNGDFKVTTPDTSTTQHNKVSTSPKITTAKPINPRPSLPPNSDTSKETSLTVNKETTVETKETTTTNKQTSTDGKEKTTSAKETQSIEKTSAKDLAPTSKVLAKPTPKAETTTKGPALTTPKEPTPTTPKEPASTTPKEPTPTTIKSAPTTPKEPAPTTTKSAPTTPKEPAPTTTKEPAPTTPKEPAPTTTKEPAPTTTKSAPTTPKEPAPTTPKKPAPTTPKEPAPTTPKEPTPTTPKEPAPTTKEPAPTTPKEPAPTAPKKPAPTTPKEPAPTTPKEPAPTTTKEPSPTTPKEPAPTTTKSAPTTTKEPAPTTTKSAPTTPKEPSPTTTKEPAPTTPKEPAPTTPKKPAPTTPKEPAPTTPKEPAPTTTKKPAPTTPKEPAPTTPKETAPTTPKKLTPTTPEKLAPTTPEKPAPTTPEELAPTTPEEPTPTTPEEPAPTTPKAAAPNTPKEPAPTTPKEPAPTTPKEPAPTTPKETAPTTPKGTAPTTLKEPAPTTPKKPAPKELAPTTTKEPTSTTSDKPAPTTPKGTAPTTPKEPAPTTPKEPAPTTPKGTAPTTLKEPAPTTPKKPAPKELAPTTTKGPTSTTSDKPAPTTPKETAPTTPKEPAPTTPKKPAPTTPETPPPTTSEVSTPTTTKEPTTIHKSPDESTPELSAEPTPKALENSPKEPGVPTTKTPAATKPEMTTTAKDKTTERDLRTTPETTTAAPKMTKETATTTEKTTESKITATTTQVTSTTTQDTTPFKITTLKTTTLAPKVTTTKKTITTTEIMNKPEETAKPKDRATNSKATTPKPQKPTKAPKKPTSTKKPKTMPRVRKPKTTPTPRKMTSTMPELNPTSRIAEAMLQTTTRPNQTPNSKLVEVNPKSEDAGGAEGETPHMLLRPHVFMPEVTPDMDYLPRVPNQGIIINPMLSDETNICNGKPVDGLTTLRNGTLVAFRGHYFWMLSPFSPPSPARRITEVWGIPSPIDTVFTRCNCEGKTFFFKDSQYWRFTNDIKDAGYPKPIFKGFGGLTGQIVAALSTAKYKNWPESVYFFKRGGSIQQYIYKQEPVQKCPGRRPALNYPVYGETTQVRRRRFERAIGPSQTHTIRIQYSPARLAYQDKGVLHNEVKVSILWRGLPNVVTSAISLPNIRKPDGYDYYAFSKDQYYNIDVPSRTARAITTRSGQTLSKVWYNCP

SEQ ID NO: 10771 - protein, 1361 aa, Homo sapiens
MAWKTLPIYLLLLLSVFVIQQVSSQDLSSCAGRCGEGYSRDATCNCDYNCQHYMECCPDFKRVCTAELSCKGRCFESFERGRECDCDAQCKKYDKCCPDYESFCAEVHNPTSPPSSKKAPPPSGASQTIKSTTKRSPKPPNKKKTKKVIESEEITEVKDNKKNRTKKKPTPKPPVVDEAGSGLDNGDFKVTTPDTSTTQHNKVSTSPKITTAKPINPRPSLPPNSDTSKETSLTVNKETTVETKETTTTNKQTSTDGKEKTTSAKETQSIEKTSAKDLAPTSKVLAKPTPKAETTTKGPALTTPKEPTPTTPKEPASTTPKEPTPTTIKSAPTTPKEPAPTTTKSAPTTPKEPAPTTTKEPAPTTPKEPAPTTTKEPAPTTTKSAPTTPKEPAPTTPKKPAPTTPKEPAPTTPKEPTPTTPKEPAPTTKEPAPTTPKEPAPTAPKKPAPTTPKEPAPTTPKEPAPTTTKEPSPTTPKEPAPTTTKSAPTTTKEPAPTTTKSAPTTPKEPSPTTTKEPAPTTPKEPAPTTPKKPAPTTPKEPAPTTPKEPAPTTTKKPAPTTPKEPAPTTPKETAPTTPKKLTPTTPEKLAPTTPEKPAPTTPEELAPTTPEEPTPTTPEEPAPTTPKAAAPNTPKEPAPTTPKEPAPTTPKEPAPTTPKETAPTTPKGTAPTTLKEPAPTTPKKPAPKELAPTTTKEPTSTTSDKPAPTTPKGTAPTTPKEPAPTTPKEPAPTTPKGTAPTTLKEPAPTTPKKPAPKELAPTTTKGPTSTTSDKPAPTTPKETAPTTPKEPAPTTPKKPAPTTPETPPPTTSEVSTPTTTKEPTTIHKSPDESTPELSAEPTPKALENSPKEPGVPTTKTPAATKPEMTTTAKDKTTERDLRTTPETTTAAPKMTKETATTTEKTTESKITATTTQVTSTTTQDTTPFKITTLKTTTLAPKVTTTKKTITTTEIMNKPEETAKPKDRATNSKATTPKPQKPTKAPKKPTSTKKPKTMPRVRKPKTTPTPRKMTSTMPELNPTSRIAEAMLQTTTRPNQTPNSKLVEVNPKSEDAGGAEGETPHMLLRPHVFMPEVTPDMDYLPRVPNQGIIINPMLSDETNICNGKPVDGLTTLRNGTLVAFRGHYFWMLSPFSPPSPARRITEVWGIPSPIDTVFTRCNCEGKTFFFKDSQYWRFTNDIKDAGYPKPIFKGFGGLTGQIVAALSTAKYKNWPESVYFFKRGGSIQQYIYKQEPVQKCPGRRPALNYPVYGETTQVRRRRFERAIGPSQTHTIRIQYSPARLAYQDKGVLHNEVKVSILWRGLPNVVTSAISLPNIRKPDGYDYYAFSKDQYYNIDVPSRTARAITTRSGQTLSKVWYNCP

SEQ ID NO: 10772 - protein, 1311 aa, Homo sapiens
MAWKTLPIYLLLLLSVFVIQQVSSQDLSSCAGRCGEGYSRDATCNCDYNCQHYMECCPDFKRVCTAELSCKGRCFESFERGRECDCDAQCKKYDKCCPDYESFCAEVKDNKKNRTKKKPTPKPPVVDEAGSGLDNGDFKVTTPDTSTTQHNKVSTSPKITTAKPINPRPSLPPNSDTSKETSLTVNKETTVETKETTTTNKQTSTDGKEKTTSAKETQSIEKTSAKDLAPTSKVLAKPTPKAETTTKGPALTTPKEPTPTTPKEPASTTPKEPTPTTIKSAPTTPKEPAPTTTKSAPTTPKEPAPTTTKEPAPTTPKEPAPTTTKEPAPTTTKSAPTTPKEPAPTTPKKPAPTTPKEPAPTTPKEPTPTTPKEPAPTTKEPAPTTPKEPAPTAPKKPAPTTPKEPAPTTPKEPAPTTTKEPSPTTPKEPAPTTTKSAPTTTKEPAPTTTKSAPTTPKEPSPTTTKEPAPTTPKEPAPTTPKKPAPTTPKEPAPTTPKEPAPTTTKKPAPTTPKEPAPTTPKETAPTTPKKLTPTTPEKLAPTTPEKPAPTTPEELAPTTPEEPTPTTPEEPAPTTPKAAAPNTPKEPAPTTPKEPAPTTPKEPAPTTPKETAPTTPKGTAPTTLKEPAPTTPKKPAPKELAPTTTKEPTSTTSDKPAPTTPKGTAPTTPKEPAPTTPKEPAPTTPKGTAPTTLKEPAPTTPKKPAPKELAPTTTKGPTSTTSDKPAPTTPKETAPTTPKEPAPTTPKKPAPTTPETPPPTTSEVSTPTTTKEPTTIHKSPDESTPELSAEPTPKALENSPKEPGVPTTKTPAATKPEMTTTAKDKTTERDLRTTPETTTAAPKMTKETATTTEKTTESKITATTTQVTSTTTQDTTPFKITTLKTTTLAPKVTTTKKTITTTEIMNKPEETAKPKDRATNSKATTPKPQKPTKAPKKPTSTKKPKTMPRVRKPKTTPTPRKMTSTMPELNPTSRIAEAMLQTTTRPNQTPNSKLVEVNPKSEDAGGAEGETPHMLLRPHVFMPEVTPDMDYLPRVPNQGIIINPMLSDETNICNGKPVDGLTTLRNGTLVAFRGHYFWMLSPFSPPSPARRITEVWGIPSPIDTVFTRCNCEGKTFFFKDSQYWRFTNDIKDAGYPKPIFKGFGGLTGQIVAALSTAKYKNWPESVYFFKRGGSIQQYIYKQEPVQKCPGRRPALNYPVYGETTQVRRRRFERAIGPSQTHTIRIQYSPARLAYQDKGVLHNEVKVSILWRGLPNVVTSAISLPNIRKPDGYDYYAFSKDQYYNIDVPSRTARAITTRSGQTLSKVWYNCP

SEQ ID NO: 10773 - protein, 162 aa, Homo sapiens
MAWKTLPIYLLLLLSVFVIQQVSSQELSCKGRCFESFERGRECDCDAQCKKYDKCCPDYESFCAEEHSVSENQESSSSSSSSSSSSTIRKIKSSKNSAANRELQKKLKVKDNKKNRTKKKPTPKPPVVDEAGSGLDNGDFKVTTPDTSTTQHNKVSTSPKIT

SEQ ID NO: 10774 - protein, 1363 aa, Homo sapiens
MAWKTLPIYLLLLLSVFVIQQVSSQELSCKGRCFESFERGRECDCDAQCKKYDKCCPDYESFCAEVHNPTSPPSSKKAPPPSGASQTIKSTTKRSPKPPNKKKTKKVIESEEITEEHSVSENQESSSSSSSSSSSSTIRKIKSSKNSAANRELQKKLKVKDNKKNRTKKKPTPKPPVVDEAGSGLDNGDFKVTTPDTSTTQHNKVSTSPKITTAKPINPRPSLPPNSDTSKETSLTVNKETTVETKETTTTNKQTSTDGKEKTTSAKETQSIEKTSAKDLAPTSKVLAKPTPKAETTTKGPALTTPKEPTPTTPKEPASTTPKEPTPTTIKSAPTTPKEPAPTTTKSAPTTPKEPAPTTTKEPAPTTPKEPAPTTTKEPAPTTTKSAPTTPKEPAPTTPKKPAPTTPKEPAPTTPKEPTPTTPKEPAPTTKEPAPTTPKEPAPTAPKKPAPTTPKEPAPTTPKEPAPTTTKEPSPTTPKEPAPTTTKSAPTTTKEPAPTTTKSAPTTPKEPSPTTTKEPAPTTPKEPAPTTPKKPAPTTPKEPAPTTPKEPAPTTTKKPAPTTPKEPAPTTPKETAPTTPKKLTPTTPEKLAPTTPEKPAPTTPEELAPTTPEEPTPTTPEEPAPTTPKAAAPNTPKEPAPTTPKEPAPTTPKEPAPTTPKETAPTTPKGTAPTTLKEPAPTTPKKPAPKELAPTTTKEPTSTTSDKPAPTTPKGTAPTTPKEPAPTTPKEPAPTTPKGTAPTTLKEPAPTTPKKPAPKELAPTTTKGPTSTTSDKPAPTTPKETAPTTPKEPAPTTPKKPAPTTPETPPPTTSEVSTPTTTKEPTTIHKSPDESTPELSAEPTPKALENSPKEPGVPTTKTPAATKPEMTTTAKDKTTERDLRTTPETTTAAPKMTKETATTTEKTTESKITATTTQVTSTTTQDTTPFKITTLKTTTLAPKVTTTKKTITTTEIMNKPEETAKPKDRATNSKATTPKPQKPTKAPKKPTSTKKPKTMPRVRKPKTTPTPRKMTSTMPELNPTSRIAEAMLQTTTRPNQTPNSKLVEVNPKSEDAGGAEGETPHMLLRPHVFMPEVTPDMDYLPRVPNQGIIINPMLSDETNICNGKPVDGLTTLRNGTLVAFRGHYFWMLSPFSPPSPARRITEVWGIPSPIDTVFTRCNCEGKTFFFKDSQYWRFTNDIKDAGYPKPIFKGFGGLTGQIVAALSTAKYKNWPESVYFFKRGGSIQQYIYKQEPVQKCPGRRPALNYPVYGETTQVRRRRFERAIGPSQTHTIRIQYSPARLAYQDKGVLHNEVKVSILWRGLPNVVTSAISLPNIRKPDGYDYYAFSKDQYYNIDVPSRTARAITTRSGQTLSKVWYNCP

SEQ ID NO: 10775 - protein, 854 aa, Homo sapiens [sequence omitted]

SEQ ID NO: 10776 - protein, 140 aa, Homo sapiens
GPPLGGQQSQPSAGDGNQDDGPQQGPPQQGGQQQQGPPPPQGKPQGPPQQGGQQQQGPPPPQGKPQGPPQQGGHPPPPQGRPQGPPQQGGHPRPPRGRPQGPPQQGGHQQGPPPPPPGKPQGPPPQGGRPQGPPQGQSPQ

SEQ ID NO: 10777 - protein, 175 aa, Homo sapiens
MLLILLSVALLAFSSAQDLNEDGGDSEQFLDEERQGPPLGGQQSQPSAGDGNQDDGPQQGPPQQGGQQQQGPPPPQGKPQGPPQQGGQQQQGPPPPQGKPQGPPQQGGHPPPPQGRPQGPPQQGGHPRPPRGRPQGPPQQGGHQQGPPPPPPGKPQGPPPQGGRPQGPPQGQSPQ

SEQ ID NO: 10778 - protein, 187 aa, Homo sapiens
MLLILLSVALLAFSSAQDLNEDVSQEDVPLVISDGGDSEQFLDEERQGPPLGGQQSQPSAGDGNQDDGPQQGPPQQGGQQQQGPPPPQGKPQGPPQQGGQQQQGPPPPQGKPQGPPQQGGHPPPPQGRPQGPPQQGGHPRPPRGRPQGPPQQGGHQQGPPPPPPGKPQGPPPQGGRPQGPPQGQSPQ

SEQ ID NO: 10779 - protein, 166 aa, Homo sapiens
MLLILLSVALLAFSSAQDLDEDVSQEDVPLVISDGGDSEQFIDEERQGPPLGGQQSQPSAGDGNQNDGPQQGPPQQGGQQQQGPPPPQGKPQGPPQQGGHPPPPQGRPQGPPQQGGHPRPPRGRPQGPPQQGGHQQGPPPPPPGKPQGPPPQGGRPQGPPQGQSPQ

SEQ ID NO: 10780 - protein, 166 aa, Homo sapiens; identical to SEQ ID NO: 10779

SEQ ID NO: 10781 - protein, 82 aa, Homo sapiens
METVISSDSSPAVENEHPQETPESNNSVYTSFMKSHRCYDLIPTSSKLVVFDTSLQSCPCGFAFMIITVLATGEESFFCFGD

SEQ ID NO: 10782 - protein, 331 aa, Homo sapiens
METVISSDSSPAVENEHPQETPESNNSVYTSFMKSHRCYDLIPTSSKLVVFDTSLQVKKAFFALVTNGVRAAPLWDSKKQSFVGMLTITDFINILHRYYKSALVQIYELEEHKIETWREVYLQDSFKPLVCISPNASLFDAVSSLIRNKIHRLPVIDPESGNTLYILTHKRILKFLKLFITEFPKPEFMSKSLEELQIGTYANIAMVRTTTPVYVALGIFVQHRVSALPVVDEKGRVVDIYSKFDVINLAAEKTYNNLDVSVTKALQHRSHYFEGVLKCYLHETLETIINRLVEAEVHRLVVVDENDVVKGIVSLSDILQALVLTGGEKKP

SEQ ID NO: 10783 - protein, 340 aa, Homo sapiens
METVISSDSSPAVENEHPQETPESNNSVYTSFMKSHRCYDLIPTSSKLVVFDTSLQVKKAFFALVTNGVRAAPLWDSKKQSFVVLRALSCPLGMLTITDFINILHRYYKSALVQIYELEEHKIETWREVYLQDSFKPLVCISPNASLFDAVSSLIRNKIHRLPVIDPESGNTLYILTHKRILKFLKLFITEFPKPEFMSKSLEELQIGTYANIAMVRTTTPVYVALGIFVQHRVSALPVVDEKGRVVDIYSKFDVINLAAEKTYNNLDVSVTKALQHRSHYFEGVLKCYLHETLETIINRLVEAEVHRLVVVDENDVVKGIVSLSDILQALVLTGGEKKP

SEQ ID NO: 10784 - protein, 43 aa, Homo sapiens
MFSLTGVMVISSDSSPAVENEHPQETPESNNSVYTSFMKSHRC

SEQ ID NO: 10785 - protein, 69 aa, Homo sapiens
MKSHRCYDLIPTSSKLVVFDTSLQVKKAFFALVTNGVRAAPLWDSKKQSFVGMLTITDFINILHRYYKS

SEQ ID NO: 10786 - protein, 82 aa, Homo sapiens
MKSHRCYDLIPTSSKLVVFDTSLQVKKAFFALVTNGVRAAPLWDSKKQSFVGMLTITDFINILHRYYKSALVQIYELEEHKI

SEQ ID NO: 10787 - protein, 125 aa, Homo sapiens
MKSHRCYDLIPTSSKLVVFDTSLQVKKAFFALVTNGVRAAPLWDSKKQSFVGMLTITDFINILHRYYKSALVQIYELEEHKIETWREVYLQDSFKPLVCISPNASLFDAVSSLIRNKIHRLPVID

SEQ ID NO: 10788 - protein, 161 aa, Homo sapiens
MKSHRCYDLIPTSSKLVVFDTSLQVKKAFFALVTNGVRAAPLWDSKKQSFVGMLTITDFINILHRYYKSALVQIYELEEHKIETWREVYLQDSFKPLVCISPNASLFDAVSSLIRNKIHRLPVIDPESGNTLYILTHKRILKFLKLFITEFPKPEFMSKSL

SEQ ID NO: 10789 - protein, 299 aa, Homo sapiens
MKSHRCYDLIPTSSKLVVFDTSLQVKKAFFALVTNGVRAAPLWDSKKQSFVGMLTITDFINILHRYYKSALVQIYELEEHKIETWREVYLQDSFKPLVCISPNASLFDAVSSLIRNKIHRLPVIDPESGNTLYILTHKRILKFLKLFITEFPKPEFMSKSLEELQIGTYANIAMVRTTTPVYVALGIFVQHRVSALPVVDEKGRVVDIYSKFDVINLAAEKTYNNLDVSVTKALQHRSHYFEGVLKCYLHETLETIINRLVEAEVHRLVVVDENDVVKGIVSLSDILQALVLTGGEKKP

SEQ ID NO: 10790 - protein, 28 aa, Homo sapiens
MLTITDFINILHRYYKSALVQIYELEEH

SEQ ID NO: 10791 - protein, 145 aa, Homo sapiens
MLTITDFINILHRYYKSALVQIYELEEHKIETWREVYLQDSFKPLVCISPNASLFDAVSSLIRNKIHRLPVIDPESGNTLYILTHKRILKFLKLFITEFPKPEFMSKSLEELQIGTYANIAMVRTTTPVYVALGIFVQHRVSALP

SEQ ID NO: 10792 - protein, 203 aa, Homo sapiens [sequence omitted]

SEQ ID NO: 10793 - protein, 280 aa, Homo sapiens
MSILKVKKAFFALVTNGVRAAPLWDSKKQSFVGMLTITDFINILHRYYKSALVQIYELEEHKIETWREVYLQDSFKPLVCISPNASLFDAVSSLIRNKIHRLPVIDPESGNTLYILTHKRILKFLKLFITEFPKPEFMSKSLEELQIGTYANIAMVRTTTPVYVALGIFVQHRVSALPVVDEKGRVVDIYSKFDVINLAAEKTYNNLDVSVTKALQHRSHYFEGVLKCYLHETLETIINRLVEAEVHRLVVVDENDVVKGIVSLSDILQALVLTGGEKKP

SEQ ID NO: 10794 - protein, 251 aa, Homo sapiens
NSVYTSFMKSHRCYDLIPTSSKLVVFDTSLQVKKAFFALVTNGVRAAPLWDSKKQSFVGMLTITDFINILHRYYKSALVQIYELEEHKIETWREVYLQDSFKPLVCISPNARSLSSPSQSSCPSLWKSYRLAPMPILLWFALPPPSMWLWGFLYSIESQPCQWWMRRNLAAEKTYNNLDVSVTKALQHRSHYFEGVLKCYLHETLETIINRLVEAEVHRLVVVDENDVVKGIVSLSDILQALVLTGGEKKP

SEQ ID NO: 10795 - protein, 93 aa, Homo sapiens
RVVDIYSKFDVINLAAEKTYNNLDVSVTKALQHRSHYFEGVLKCYLHETLETIINRLVEAEVHRLVVVDENDVVKGICPTHCLLEALWESDET

SEQ ID NO: 10796 - protein, 200 aa, Homo sapiens
AEEEEEEEDSEVQGEQPKPASPAEEDKMPPYDEQTQAFIDAAQEARNKFEEAERSLKDMEESIRNLEQEISFDFGPNGEFAYLYSQCYELTTNEYVYRLCPFKLVSQKPKLGGSPTSLGTWGSWIGPDHDKFSAMKYEQGTGCWQGPNRSTTVRLLCGKETMVTSTTEPSRCEYLMELMTPAACPEPPPEAPTEDDHDEL

SEQ ID NO: 10797 - protein, 62 aa, Homo sapiens
MLLPLLLLLPMCWAVEVKRPRGVSLTNHHFYDESKPFTCLDGSATIPFDQVNDDYCDCKDGS

SEQ ID NO: 10798 - protein, 140 aa, Homo sapiens
MLLPLLLLLPMCWAVEVKRPRGVSLTNHHFYDESKPFTCLDGSATIPFDQVNDDYCDCKDGSDEPGTAACPNGSFHCTNTGYKPLYIPSNRVNDGVCDCCDGTDEYNSGVICENTCKEKGRKERESLQQMAEVTREGFRL

SEQ ID NO: 10799 - protein, 144 aa, Homo sapiens
MLLPLLLLLPMCWAVEVKRPRGVSLTNHHFYDESKPFTCLDGSATIPFDQVNDDYCDCKDGSDEPGTAACPNGSFHCTNTGYKPLYIPSNRVNDGVCDCCDGTDEYNSGVICENTCKEKGRKERESLQQMAEVTREGFRLKKIL

SEQ ID NO: 10800 - protein, 168 aa, Homo sapiens
MLLPLLLLLPMCWAVEVKRPRGVSLTNHHFYDESKPFTCLDGSATIPFDQVNDDYCDCKDGSDEPGTAACPNGSFHCTNTGYKPLYIPSNRVNDGVCDCCDGTDEYNSGVICENTCKEKGRKERESLQQMAEVTREGFRLKKILIEDWKKAREEKQKKLIELQAGKKS

SEQ ID NO: 10801 - protein, 535 aa, Homo sapiens
MLLPLLLLLPMCWAVEVKRPRGVSLTNHHFYDESKPFTCLDGSATIPFDQVNDDYCDCKDGSDEPGTAACPNGSFHCTNTGYKPLYIPSNRVNDGVCDCCDGTDEYNSGVICENTCKEKGRKERESLQQMAEVTREGFRLKKILIEDWKKAREEKQKKLIELQAGKKSLEDQVEMLRTVKEEAEKPEREAKEQHQKLWEEQLAAAKAQQEQELAADAFKELDDDMDGTVSVTELQTHPELDTDGDGALSEAEAQALLSGDTQTDATSFYDRVWAAIRDKYRSEALPTDLPAPSAPDLTEPKEEQPPVPSSPTEEEEEEEEEEEEEAEEEEEEEDSEVQGEQPKEAPPPLSPPQPASPAEEDKMPPYDEQTQAFIDAAQEARNKFEEAERSLKDMEESIRNLEQEISFDFGPNGEFAYLYSQCYELTTNEYVYRLCPFKLVSQKPKLGGSPTSLGTWGSWIGPDHDKFSAMKYEQGTGCWQGPNRSTTVRLLCGKETMVTSTTEPSRCEYLMELMTPAACPEPPPEAPTEDDHDEL

SEQ ID NO: 10802 - protein, 528 aa, Homo sapiens
MLLPLLLLLPMCWAVEVKRPRGVSLTNHHFYDESKPFTCLDGSATIPFDQVNDDYCDCKDGSDEPGTAACPNGSFHCTNTGYKPLYIPSNRVNDGVCDCCDGTDEYNSGVICENTCKEKGRKERESLQQMAEVTREGFRLKKILIEDWKKAREEKQKKLIELQAGKKSLEDQVEMLRTVKEEAEKPEREAKEQHQKLWEEQLAAAKAQQEQELAADAFKELDDDMDGTVSVTELQTHPELDTDGDGALSEAEAQALLSGDTQTDATSFYDRVWAAIRDKYRSEALPTDLPAPSAPDLTEPKEEQPPVPSSPTEEEEEEEEEEEEEAEEEEEEEDSEEAPPPLSPPQPASPAEEDKMPPYDEQTQAFIDAAQEARNKFEEAERSLKDMEESIRNLEQEISFDFGPNGEFAYLYSQCYELTTNEYVYRLCPFKLVSQKPKLGGSPTSLGTWGSWIGPDHDKFSAMKYEQGTGCWQGPNRSTTVRLLCGKETMVTSTTEPSRCEYLMELMTPAACPEPPPEAPTEDDHDEL

SEQ ID NO: 10803 - protein, 525 aa, Homo sapiens
MLLPLLLLLPMCWAVEVKRPRGVSLTNHHFYDESKPFTCLDGSATIPFDQVNDDYCDCKDGSDEPGTAACPNGSFHCTNTGYKPLYIPSNRVNDGVCDCCDGTDEYNSGVICENTCKEKGRKERESLQQMAEVTREGFRLKKILIEDWKKAREEKQKKLIELQAGKKSLEDQVEMLRTVKEEAEKPEREAKEQHQKLWEEQLAAAKAQQEQELAADAFKELDDDMDGTVSVTELQTHPELDTDGDGALSEAEAQALLSGDTQTDATSFYDRVWAAIRDKYRSEALPTDLPAPSAPDLTEPKEEQPPVPSSPTEEEEEEEEEEEEEAEEEEEEEDSEVQGEQPKPASPAEEDKMPPYDEQTQAFIDAAQEARNKFEEAERSLKDMEESIRNLEQEISFDFGPNGEFAYLYSQCYELTTNEYVYRLCPFKLVSQKPKLGGSPTSLGTWGSWIGPDHDKFSAMKYEQGTGCWQGPNRSTTVRLLCGKETMVTSTTEPSRCEYLMELMTPAACPEPPPEAPTEDDHDEL

SEQ ID NO: 10804 - protein, 525 aa, Homo sapiens; identical to SEQ ID NO: 10803

SEQ ID NO: 10805 - protein, 132 aa, Homo sapiens
MLLPLLLLLPMCWAVEVKRPRGVSLTSESSCSPSRQAGGGRGQHWALGIGIYSLLTQFPGSAPLVGMGGQRWYLVEKALTCPGLSFLYPADHHFYDESKPFTCLDGSATIPFDQVNDDYCDCKDGSDEPGTA

SEQ ID NO: 10806 - protein, 80 aa, Homo sapiens
EVLRNKGYNRSLDMWSVGVIIYVSLSGTFPFNEDEDIHDQIQNAAFMYPPNPWKEISHEDVDLIQYNTYILGCLSSHCTA

SEQ ID NO: 10807 - protein, 117 aa, Homo sapiens
MILSPPQPCGTFPECGFYGMYDKILLFRHDPTSENILQLVKAASDIQEGDLIEVVLSASATFEDFQIRPHALFVHSYRAPAFCDHCGEMLWGLVRQGLKCEGCGLNYHKRCAFKIPN

SEQ ID NO: 10808 - protein, 912 aa, Homo sapiens
MSAPPVLRPPSPLLPVAAAAAAAAAALVPGSGPGPAPFLAPVAAPVGGISFHLQIGLSREPVLLLQDSSGDYSLAHVREMACSIVDQKFPECGFYGMYDKILLFRHDPTSENILQLVKAASDIQEGDLIEVVLSASATFEDFQIRPHALFVHSYRAPAFCDHCGEMLWGLVRQGLKCEGCGLNYHKRCAFKIPNNCSGVRRRRLSNVSLTGVSTIRTSSAELSTSAPDEPLLQKSPSESFIGREKRSNSQSYIGRPIHLDKILMSKVKVPHTFVIHSYTRPTVCQYCKKLLKGLFRQGLQCKDCRFNCHKRCAPKVPNNCLGEVTINGDLLSPGAESDVVMEEGSDDNDSERNSGLMDDMEEAMVQDAEMAMAECQNDSGEMQDPDPDHEDANRTISPSTSNNIPLMRVVQSVKHTKRKSSTVMKEGWMVHYTSKDTLRKRHYWRLDSKCITLFQNDTGSRYYKEIPLSEILSLEPVKTSALIPNGANPHCFEITTANVVYYVGENVVNPSSPSPNNSVLTSGVGADVARMWEIAIQHALMPVIPKGSSVGTGTNLHRDISVSISVSNCQIQENVDISTVYQIFPDEVLGSGQFGIVYGGKHRKTGRDVAIKIIDKLRFPTKQESQLRNEVAILQNLHHPGVVNLECMFETPERVFVVMEKLHGDMLEMILSSEKGRLPEHITKFLITQILVALRHLHFKNIVHCDLKPENVLLASADPFPQVKLCDFGFARIIGEKSFRRSVVGTPAYLAPEVLRNKGYNRSLDMWSVGVIIYVSLSGTFPFNEDEDIHDQIQNAAFMYPPNPWKEISHEAIDLINNLLQVKMRKRYSVDKTLSHPWLQDYQTWLDLRELECKIGERYITHESDDLRWEKYAGEQGLQYPTHLINPSASHSDTPETEETEMKALGERVSIL

SEQ ID NO: 10809 - protein, 912 aa, Homo sapiens; identical to SEQ ID NO: 10808

SEQ ID NO: 10810 - protein, 920 aa, Homo sapiens
MSAPPVLRPPSPLLPVAAAAAAAAAALVPGSGPGPAPFLAPVAAPVGGISFHLQIGLSREPVLLLQDSSGDYSLAHVREMACSIVDQKFPECGFYGMYDKILLFRHDPTSENILQLVKAASDIQEGDLIEVVLSASATFEDFQIRPHALFVHSYRAPAFCDHCGEMLWGLVRQGLKCEGCGLNYHKRCAFKIPNNCSGVRRRRLSNVSLTGVSTIRTSSAELSTSAPDEPLLSPVSPGFEQKSPSESFIGREKRSNSQSYIGRPIHLDKILMSKVKVPHTFVIHSYTRPTVCQYCKKLLKGLFRQGLQCKDCRFNCHKRCAPKVPNNCLGEVTINGDLLSPGAESDVVMEEGSDDNDSERNSGLMDDMEEAMVQDAEMAMAECQNDSGEMQDPDPDHEDANRTISPSTSNNIPLMRVVQSVKHTKRKSSTVMKEGWMVHYTSKDTLRKRHYWRLDSKCITLFQNDTGSRYYKEIPLSEILSLEPVKTSALIPNGANPHCFEITTANVVYYVGENVVNPSSPSPNNSVLTSGVGADVARMWEIAIQHALMPVIPKGSSVGTGTNLHRDISVSISVSNCQIQENVDISTVYQIFPDEVLGSGQFGIVYGGKHRKTGRDVAIKIIDKLRFPTKQESQLRNEVAILQNLHHPGVVNLECMFETPERVFVVMEKLHGDMLEMILSSEKGRLPEHITKFLITQILVALRHLHFKNIVHCDLKPENVLLASADPFPQVKLCDFGFARIIGEKSFRRSVVGTPAYLAPEVLRNKGYNRSLDMWSVGVIIYVSLSGTFPFNEDEDIHDQIQNAAFMYPPNPWKEISHEAIDLINNLLQVKMRKRYSVDKTLSHPWLQDYQTWLDLRELECKIGERYITHESDDLRWEKYAGEQGLQYPTHLINPSASHSDTPETEETEMKALGERVSIL

SEQ ID NO: 10811 - protein, 157 aa, Homo sapiens
SSTVMKEGWMVHYTSKDTLRKRHYWRLDSKCITLFQNDTGSRYYKEIPLSEILSLEPVKTSALIPNGANPHCFEITTANVVYYVGENVVNPSSPSPNNSVLTSGVGADVARMWEIAIQHALMPVIPKGSSVGTGTNLHSESASFLTSPKLIMCLPLA

SEQ ID NO: 10812 - protein, 228 aa, Homo sapiens
MNIKGSPWKAGSLLLLLVSNLLLCQSVAPLPICPGGAARCQVTLRDLFDRAVVLSHYIHNLSSEMFSEFDKRYTHGRGFITKAINSCHTSSLATPEDKEQAQQMNQKDFLSLIVSILRSWNEPLYHLVTEVRGMQEAPEAILSKAVEIEEQTKRLLEGMELIVSQVHPETKENEIYPVWSGLPSLQMADEESRLSAYYNLLHCLRRDSHKIDNYLKLLKCRIIHNNNC

SEQ ID NO: 10813 - protein, 227 aa, Homo sapiens
MNIKGSPWKGSLLLLLVSNLLLCQSVAPLPICPGGAARCQVTLRDLFDRAVVLSHYIHNLSSEMFSEFDKRYTHGRGFITKAINSCHTSSLATPEDKEQAQQMNQKDFLSLIVSILRSWNEPLYHLVTEVRGMQEAPEAILSKAVEIEEQTKRLLEGMELIVSQVHPETKENEIYPVWSGLPSLQMADEESRLSAYYNLLHCLRRDSHKIDNYLKLLKCRIIHNNNC

SEQ ID NO: 10814 - protein, 196 aa, Homo sapiens
MNIKGSPWKGSLLLLLVSNLLLSHYIHNLSSEMFSEFDKRYTHGRGFITKAINSCHTSSLATPEDKEQAQQMNQKDFLSLIVSILRSWNEPLYHLVTEVRGMQEAPEAILSKAVEIEEQTKRLLEGMELIVSQVHPETKENEIYPVWSGLPSLQMADEESRLSAYYNLLHCLRRDSHKIDNYLKLLKCRIIHNNNC

SEQ ID NO: 10815 - protein, 87 aa, Homo sapiens
MKVLRAWLLCLLMLGLALRGAASRTHRHSMEIRTPDINPAWYASRGIRPVGRFGRRRATLGDVPKPGLRPRLTCFPLEGGAMSSQDG

SEQ ID NO: 10816 - protein, 33 aa, Homo sapiens
MKENVASATVFTLLLFLNTCLLNDPFCWAANRV

SEQ ID NO: 10817 - protein, 34 aa, Homo sapiens
MKENVASATVFTLLLFLNTCLLNERHSCMNVQTT

SEQ ID NO: 10818 - protein, 34 aa, Homo sapiens; identical to SEQ ID NO: 10817

SEQ ID NO: 10819 - protein, 34 aa, Homo sapiens
MKENVASATVFTLLLFLNTCLLNGQLPPGKPEIF

SEQ ID NO: 10820 - protein, 62 aa, Homo sapiens
MKENVASATVFTLLLFLNTCLLNGQLPPGKPEIFKCRSPNKETFTCWWRPGTDGGLPTNYSL

SEQ ID NO: 10821 - protein, 103 aa, Homo sapiens
MKENVASATVFTLLLFLNTCLLNGQLPPGKPEIFKCRSPNKETFTCWWRPGTDGGLPTNYSLTYHREGETLMHECPDYITGGPNSCHFGKQYTSMWRTYIMMV

SEQ ID NO: 10822 - protein, 111 aa, Homo sapiens
MKENVASATVFTLLLFLNTCLLNGQLPPGKPEIFKCRSPNKETFTCWWRPGTDGGLPTNYSLTYHREGETLMHECPDYITGGPNSCHFGKQYTSMWRTYIMMVNATNQMGS

SEQ ID NO: 10823 - protein, 120 aa, Homo sapiens
MKENVASATVFTLLLFLNTCLLNGQLPPGKPEIFKCRSPNKETFTCWWRPGTDGGLPTNYSLTYHREGETLMHECPDYITGGPNSCHFGKQYTSMWRTYIMMVNATNQMGSSFSDELYVD

SEQ ID NO: 10824 - protein, 376 aa, Homo sapiens
MKENVASATVFTLLLFLNTCLLNGQLPPGKPEIFKCRSPNKETFTCWWRPGTDGGLPTNYSLTYHREGETLMHECPDYITGGPNSCHFGKQYTSMWRTYIMMVNATNQMGSSFSDELYVDVTYIVQPDPPLELAVEVKQPEDRKPYLWIKWSPPTLIDLKTGWFTLLYEIRLKPEKAAEWEIHFAGQQTEFKILSLHPGQKYLVQVRCKPDHGYWSAWSPATFIQIPSDFTMNDTTVWISVAVLSAVICLIIVWAVALKGYSMVTCIFPPVPGPKIKGFDAHLLEKGKSEELLSALGCQDFPPTSDYEDLLVEYLEVDDSEDQHLMSVHSKEHPSQGDPLMLGASHYKNLKSYRPRKISSQGRLAVFTKATLTTVQ

SEQ ID NO: 10825 - protein, 349 aa, Homo sapiens
MKENVASATVFTLLLFLNTCLLNGQLPPGKPEIFKCRSPNKETFTCWWRPGTDGGLPTNYSLTYHREGETLMHECPDYITGGPNSCHFGKQYTSMWRTYIMMVNATNQMGSSFSDELYVDVTYIVQPDPPLELAVEVKQPEDRKPYLWIKWSPPTLIDLKTGWFTLLYEIRLKPEKAAEWEIHFAGQQTEFKILSLHPGQKYLVQVRCKPDHGYWSAWSPATFIQIPSDFTMNDTTVWISVAVLSAVICLIIVWAVALKGYSMVTCIFPPVPGPKIKGFDAHLLEKGKSEELLSALGCQDFPPTSDYEDLLVEYLEVDDSEDQHLMSVHSKEHPSQEREQRQAQEARDS

SEQ ID NO: 10826 - protein, 288 aa, Homo sapiens
MKENVASATVFTLLLFLNTCLLNGQLPPGKPEIFKCRSPNKETFTCWWRPGTDGGLPTNYSLTYHREGETLMHECPDYITGGPNSCHFGKQYTSMWRTYIMMVNATNQMGSSFSDELYVDVTYIVQPDPPLELAVEVKQPEDRKPYLWIKWSPPTLIDLKTGWFTLLYEIRLKPEKAAEWEIHFAGQQTEFKILSLHPGQKYLVQVRCKPDHGYWSAWSPATFIQIPSDFTMNDTTVWISVAVLSAVICLIIVWAVALKGYSMVTCIFPPVPGPKIKGFDAHLLEVTP

SEQ ID NO: 10827 - protein, 622 aa, Homo sapiens
MKENVASATVFTLLLFLNTCLLNGQLPPGKPEIFKCRSPNKETFTCWWRPGTDGGLPTNYSLTYHREGETLMHECPDYITGGPNSCHFGKQYTSMWRTYIMMVNATNQMGSSFSDELYVDVTYIVQPDPPLELAVEVKQPEDRKPYLWIKWSPPTLIDLKTGWFTLLYEIRLKPEKAAEWEIHFAGQQTEFKILSLHPGQKYLVQVRCKPDHGYWSAWSPATFIQIPSDFTMNDTTVWISVAVLSAVICLIIVWAVALKGYSMVTCIFPPVPGPKIKGFDAHLLEKGKSEELLSALGCQDFPPTSDYEDLLVEYLEVDDSEDQHLMSVHSKEHPSQGMKPTYLDPDTDSGRGSCDSPSLLSEKCEEPQANPSTFYDPEVIEKPENPETTHTWDPQCISMEGKIPYFHAGGSKCSTWPLPQPSQHNPRSSYHNITDVCELAVGPAGAPATLLNEAGKDALKSSQTIKSREEGKATQQREVESFHSETDQDTPWLLPQEKTPFGSAKPLDYVEIHKVNKDGALSLLPKQRENSGKPKKPGTPENNKEYAKVSGVMDNNILVLVPDPHAKNVACFEESAKEAPPSLEQNQAEKALANFTATSSKCRLQLGGLDYLDPACFTHSFH

SEQ ID NO: 10828 - protein, 288 aa, Homo sapiens; identical to SEQ ID NO: 10826

SEQ ID NO: 10829 - protein, 376 aa, Homo sapiens; identical to SEQ ID NO: 10824

SEQ ID NO: 10830 - protein, 349 aa, Homo sapiens; identical to SEQ ID NO: 10825

SEQ ID NO: 10831 - protein, 268 aa, Homo sapiens
MKENVASATVFTLLLFLNTCLLNGQLPPGKPEIFKCRSPNKETFTCWWRPGTDGGLPTNYSLTYHREGETLMHECPDYITGGPNSCHFGKQYTSMWRTYIMMVNATNQMGSSFSDELYVDVTYIVQPDPPLELAVEVKQPEDRKPYLWIKWSPPTLIDLKTGWFTLLYEIRLKPEKAAEWEIHFAGQQTEFKILSLHPGQKYLVQVRCKPDHGYWSAWSPATFIQIPSGDPLMLGASHYKNLKSYRPRKISSQGRLAVFTKATLTTVQ

SEQ ID NO: 10832 - protein, 268 aa, Homo sapiens; identical to SEQ ID NO: 10831

SEQ ID NO: 10833 - protein, 521 aa, Homo sapiens
MKENVASATVFTLLLFLNTCLLNVQPDPPLELAVEVKQPEDRKPYLWIKWSPPTLIDLKTGWFTLLYEIRLKPEKAAEWEIHFAGQQTEFKILSLHPGQKYLVQVRCKPDHGYWSAWSPATFIQIPSDFTMNDTTVWISVAVLSAVICLIIVWAVALKGYSMVTCIFPPVPGPKIKGFDAHLLEKGKSEELLSALGCQDFPPTSDYEDLLVEYLEVDDSEDQHLMSVHSKEHPSQGMKPTYLDPDTDSGRGSCDSPSLLSEKCEEPQANPSTFYDPEVIEKPENPETTHTWDPQCISMEGKIPYFHAGGSKCSTWPLPQPSQHNPRSSYHNITDVCELAVGPAGAPATLLNEAGKDALKSSQTIKSREEGKATQQREVESFHSETDQDTPWLLPQEKTPFGSAKPLDYVEIHKVNKDGALSLLPKQRENSGKPKKPGTPENNKEYAKVSGVMDNNILVLVPDPHAKNVACFEESAKEAPPSLEQNQAEKALANFTATSSKCRLQLGGLDYLDPACFTHSFH

SEQ ID NO: 10834 - protein, 521 aa, Homo sapiens; identical to SEQ ID NO: 10833

SEQ ID NO: 10835 - protein, 217 aa, Homo sapiens
MANLGCWMLVLFVATWSDLGLCKKRPKPGGWNTGGSRYPGQGSPGGNRYPPQGGGGWGQPHGGGWGQPHGGGWGQPHGGGWGQPHGGGWGQGGGTHSQWNKPSKPKTNMKHMAGAAAAGAVVGGLGGYMLGSAMSRPIIHFGSDYEDRYYRENMHRYPNQVYYRPMDEYSNQNNFVHDCVNITIKQHTVTTTTKGENFTETDVKMMERVVEQMCITQ

SEQ ID NO: 10836 - protein, 249 aa, Homo sapiens
MANLGCWMLVLFVATWSDLGLCKKRPKPGGWNTGGSRYPGQGSPGGNRYPPQGGGGWGQPHGGGWGQPHGGGWGQPHGGGWGQPHGGGWGQGGGTHSQWNKPSKPKTNMKHMAGAAAAGAVVGGLGGYMLGSAMSRPIIHFGSDYEDRYYRENMHRYPNQVYYRPMDEYSNQNNFVHDCVNITIKQHTVTTTTKGENFTETDVKMMERVVEQMCITQYERESQAYYQRGSSMVLFSSPPVILLISFLIF

SEQ ID NO: 10837 - protein, 253 aa, Homo sapiens
MANLGCWMLVLFVATWSDLGLCKKRPKPGGWNTGGSRYPGQGSPGGNRYPPQGGGGWGQPHGGGWGQPHGGGWGQPHGGGWGQPHGGGWGQGGGTHSQWNKPSKPKTNMKHMAGAAAAGAVVGGLGGYMLGSAMSRPIIHFGSDYEDRYYRENMHRYPNQVYYRPMDEYSNQNNFVHDCVNITIKQHTVTTTTKGENFTETDVKMMERVVEQMCITQYERESQAYYQRGSSMVLFSSPPVILLISFLIFLIVG

SEQ ID NO: 10838 - protein, 253 aa, Homo sapiens; identical to SEQ ID NO: 10837

SEQ ID NO: 10839 - protein, 94 aa, Homo sapiens
MQHSLVFFFAVILHLSHLLHLDASIHPFRLPFSSKPFLLIPMSNTTLPHTAWPLSFLHQTVSTLKAVAVTHSLWHLQIPVDCQACNRKSKKIYC

SEQ ID NO: 10840 - protein, 116 aa, Homo sapiens
MWQLTSLLLFVATWGISGTPAPLDSVFSSSERAHQVLRIRKRANSFLEELRHSSLERECIEEICDFEEAKEIFQNVDDTLAFWSKHVDGDQCLVLPLEHPCASLCCGHGTCIDGIG

SEQ ID NO: 10841 - protein, 126 aa, Homo sapiens
MWQLTSLLLFVATWGISGTPAPLDSVFSSSERAHQVLRIRKRANSFLEELRHSSLERECIEEICDFEEAKEIFQNVDDTLAFWSKHVDGDQCLVLPLEHPCASLCCGHGTCIDGIGSFSCDCRSGW

SEQ ID NO: 10842 - protein, 175 aa, Homo sapiens
MWQLTSLLLFVATWGISGTPAPLDSVFSSSERAHQVLRIRKRANSFLEELRHSSLERECIEEICDFEEAKEIFQNVDDTLAFWSKHVDGDQCLVLPLEHPCASLCCGHGTCIDGIGSFSCDCRSGWEGRFCQREEVGWRRCSCAPGYKLGDDLLQCHPAVKFPCGRPWKRMEKKR

SEQ ID NO: 10843 - protein, 461 aa, Homo sapiens
MWQLTSLLLFVATWGISGTPAPLDSVFSSSERAHQVLRIRKRANSFLEELRHSSLERECIEEICDFEEAKEIFQNVDDTLAFWSKHVDGDQCLVLPLEHPCASLCCGHGTCIDGIGSFSCDCRSGWEGRFCQREVSFLNCSLDNGGCTHYCLEEVGWRRCSCAPGYKLGDDLLQCHPAVKFPCGRPWKRMEKKRSHLKRDTEDQEDQVDPRLIDGKMTRRGDSPWQVVLLDSKKKLACGAVLIHPSWVLTAAHCMDESKKLLVRLGEYDLRRWEKWELDLDIKEVFVHPNYSKSTTDNDIALLHLAQPATLSQTIVPICLPDSGLAERELNQAGQETLVTGWGYHSSREKEAKRNRTFVLNFIKIPVVPHNECSEVMSNMVSENMLCAGILGDRQDACEGDSGGPMVASFHGTWFLVGLVSWGEGCGLLHNYGVYTKVSRYLDWIHGHIRDKEAPQKSWAP

SEQ ID NO: 10844 - protein, 495 aa, Homo sapiens
MWQLTSLLLFVATWGISGTPAPLDSVFSSSERAHQVLRIRKRANSFLEELRHSSLERECIEEICDFEEAKEIFQNVDDTLAFWSKHVDGDQCLVLPLEHPCASLCCGHGTCIDGIGSFSCDCRSGWEGRFCQRGEGERWMLAGGGAGLGPGWGRGTSTSCPRPPLPAEVSFLNCSLDNGGCTHYCLEEVGWRRCSCAPGYKLGDDLLQCHPAVKFPCGRPWKRMEKKRSHLKRDTEDQEDQVDPRLIDGKMTRRGDSPWQVVLLDSKKKLACGAVLIHPSWVLTAAHCMDESKKLLVRLGEYDLRRWEKWELDLDIKEVFVHPNYSKSTTDNDIALLHLAQPATLSQTIVPICLPDSGLAERELNQAGQETLVTGWGYHSSREKEAKRNRTFVLNFIKIPVVPHNECSEVMSNMVSENMLCAGILGDRQDACEGDSGGPMVASFHGTWFLVGLVSWGEGCGLLHNYGVYTKVSRYLDWIHGHIRDKEAPQKSWAP

SEQ ID NO: 10845 - protein, 52 aa, Homo sapiens
MWQLTSLLLFVATWGISGTPAPLGAADPQTCQLLPGGAPSQQPGAGVHRGDL

SEQ ID NO: 10846 - protein, 52 aa, Homo sapiens; identical to SEQ ID NO: 10845

SEQ ID NO: 10847 - protein, 236 aa, Homo sapiens
  VARIANT 1: note = misc_feature - Xaa can be any naturally occurring amino acid
XCSLDNGGCTHYCLEEVGWRRCSCAPGYKLGDDLLQCHPAGEYDLRRWEKWELDLDIKEVFVHPNYSKSTTDNDIALLHLAQPATLSQTIVPICLPDSGLAERELNQAGQETLVTGWGYHSSREKEAKRNRTFVLNFIKIPVVPHNECSEVMSNMVSENMLCAGILGDRQDACEGDSGGPMVASFHGTWFLVGLVSWGEGCGLLHNYGVYTKVSRYLDWIHGHIRDKEAPQKSWAP

SEQ ID NO: 10848 - protein, 105 aa, Homo sapiens
MRGATRVSIMLLLVTVSDCAVITGACERDVQCGAGTCCAISLWLRGLRMCTPLGREGEECHPGSHKVPFFRKRKHHTCPCLPNLLCSRFPDGRYRCSMDLKNINF

SEQ ID NO: 10849 - protein, 129 aa, Homo sapiens
MRSLCCAPLLLLLLLPPLLLTPRAGDAAVITGACDKDSQCGGGMCCAVSIWVKSIRICTPMGKLGDSCHPLTRKNNFGNGRQERRKRKRSKRKKEVPFFGRRMHHTCPCLPGLACLRTSFNRFICLAQK

SEQ ID NO: 10850 - protein, 108 aa, Homo sapiens
MRSLCCAPLLLLLLLPPLLLTPRAGDAAVITGACDKDSQCGGGMCCAVSIWVKSIRICTPMGKLGDSCHPLTRKVPFFGRRMHHTCPCLPGLACLRTSFNRFICLAQK

SEQ ID NO: 10851 - protein, 14 aa, Homo sapiens
MALVLGSLLLLGLC

SEQ ID NO: 10852 - protein, 40 aa, Homo sapiens
MALVLGSLLLLGLCGNSFSGGQPSSTDAPKAWNYELPATN

SEQ ID NO: 10853 - protein, 58 aa, Homo sapiens
MALVLGSLLLLGLCGNSFSGGQPSSTDAPKAWNYELPATNYETQDSHKAGPIGILFEL

SEQ ID NO: 10854 - protein, 856 aa, Homo sapiens
MALVLGSLLLLGLCGNSFSGGQPSSTDAPKAWNYELPATNYETQDSHKAGPIGILFELVHIFLYVVQPRDFPEDTLRKFLQKAYESKIDYDKIVYYEAGIILCCVLGLLFIILMPLVGYFFCMCRCCNKCGGEMHQRQKENGPFLRKCFAISLLVICIIISIGIFYGFVANHQVRTRIKRSRKLADSNFKDLRTLLNETPEQIKYILAQYNTTKDKAFTDLNSINSVLGGGILDRLRPNIIPVLDEIKSMATAIKETKEALENMNSTLKSLHQQSTQLSSSLTSVKTSLRSSLNDPLCLVHPSSETCNSIRLSLSQLNSNPELRQLPPVDAELDNVNNVLRTDLDGLVQQGYQSLNDIPDRVQRQTTTVVAGIKRVLNSIGSDIDNVTQRLPIQDILSAFSVYVNNTESYIHRNLPTLEEYDSYWWLGGLVICSLLTLIVIFYYLGLLCGVCGYDRHATPTTRGCVSNTGGVFLMVGVGLSFLFCWILMIIVVLTFVFGANVEKLICEPYTSKELFRVLDTPYLLNEDWEYYLSGKLFNKSKMKLTFEQVYSDCKKNRGTYGTLHLQNSFNISEHLNINEHTGSISSELESLKVNLNIFLLGAAGRKNLQDFAACGIDRMNYDSYLAQTGKSPAGVNLLSFAYDLEAKANSLPPGNLRNSLKRDAQTIKTIHQQRVLPIEQSLSTLYQSVKILQRTGNGLLERVTRILASLDFAQNFITNNTSSVIIEETKKYGRTIIGYFEHYLQWIEFSISEKVASCKPVATALDTAVDVFLCSYIIDPLNLFWFGIGKATVFLLPALIFAVKLAKYYRRMDSEDVYDDVETIPMKNMENGNNGYHKDHVYGIHNPVMTSPSQH

SEQ ID NO: 10855 - protein, 856 aa, Homo sapiens; identical to SEQ ID NO: 10854

SEQ ID NO: 10856 - protein, 865 aa, Homo sapiens
MALVLGSLLLLGLCGNSFSGGQPSSTDAPKAWNYELPATNYETQDSHKAGPIGILFELVHIFLYVVQPRDFPEDTLRKFLQKAYESKIDYDKPETVILGLKIVYYEAGIILCCVLGLLFIILMPLVGYFFCMCRCCNKCGGEMHQRQKENGPFLRKCFAISLLVICIIISIGIFYGFVANHQVRTRIKRSRKLADSNFKDLRTLLNETPEQIKYILAQYNTTKDKAFTDLNSINSVLGGGILDRLRPNIIPVLDEIKSMATAIKETKEALENMNSTLKSLHQQSTQLSSSLTSVKTSLRSSLNDPLCLVHPSSETCNSIRLSLSQLNSNPELRQLPPVDAELDNVNNVLRTDLDGLVQQGYQSLNDIPDRVQRQTTTVVAGIKRVLNSIGSDIDNVTQRLPIQDILSAFSVYVNNTESYIHRNLPTLEEYDSYWWLGGLVICSLLTLIVIFYYLGLLCGVCGYDRHATPTTRGCVSNTGGVFLMVGVGLSFLFCWILMIIVVLTFVFGANVEKLICEPYTSKELFRVLDTPYLLNEDWEYYLSGKLFNKSKMKLTFEQVYSDCKKNRGTYGTLHLQNSFNISEHLNINEHTGSISSELESLKVNLNIFLLGAAGRKNLQDFAACGIDRMNYDSYLAQTGKSPAGVNLLSFAYDLEAKANSLPPGNLRNSLKRDAQTIKTIHQQRVLPIEQSLSTLYQSVKILQRTGNGLLERVTRILASLDFAQNFITNNTSSVIIEETKKYGRTIIGYFEHYLQWIEFSISEKVASCKPVATALDTAVDVFLCSYIIDPLNLFWFGIGKATVFLLPALIFAVKLAKYYRRMDSEDVYDDVETIPMKNMENGNNGYHKDHVYGIHNPVMTSPSQH

SEQ ID NO: 10857 - protein, 865 aa, Homo sapiens; identical to SEQ ID NO: 10856

SEQ ID NO: 10858 - protein, 834 aa, Homo sapiens
MALVLGSLLLLGLCGNSFSGGQPSSTDAPKAWNYELPATNYETQDSHKAGPIGILFELVHIFLYVVQPRDFPEDTLRKFLQKAYESKIDYDKPETVILGLKIVYYEAGIILCCVLGLLFIILMPLVGYFFCMCRCCNKCGGEMHQRQKENGPFLRKCFAISLLVICIIISIGIFYGFVANHQVRTRIKRSRKLADSNFKDLRTLLNETPEQIKYILAQYNTTKDKAFTDLNSINSVLGGGILDRLRPNIIPVLDEIKSMATAIKETKEALENMNSTLKSLHQQSTQLSSSLTSVKTSLRSSLNDPLCLVHPSSETCNSIRLSLSQLNSNPELRQLPPVDAELDNVNNVLRTDLDGLVQQGYQSLNDIPDRVQRQTTTVVAGIKRVLNSIGSDIDNVTQRLPIQDILSAFSVYVNNTESYIHRNLPTLEEYDSYWWLGGLVICSLLTLIVIFYYLGLLCGVCGYDRHATPTTRGCVSNTGGVFLMVGVGLSFLFCWILMIIVVLTFVFGANVEKLICEPYTSKELFRVLDTPYLLNEDWEYYLSGKLFNKSKMKLTFEQVYSDCKKNRGTYGTLHLQNSFNISEHLNINEHTGSISSELESLKVNLNIFLLGAAGRKNLQDFAACGIDRMNYDSYLAQTGKSPAGVNLLSFAYDLEAKANSLPPGNLRNSLKRDAQTIKTIHQQRVLPIEQSLSTLYQSVKILQRTGNGLLERVTRILASLDFAQNFITNNTSSVIIEETKKYGRTIIGYFEHYLQWIEFSISEKVASCKPVATALDTAVDVFLCSYIIDPLNLFWFGIGKATVFLLPALIFAVKLAKYYRRMDSEDVYDDPSQH

SEQ ID NO: 10859 - protein, 842 aa, Homo sapiens
MALVLGSLLLLGLCGNSFSGGQPSSTDAPKAWNYELPATNYETQDSHKAGPIGILFELVHIFLYVVQPRDFPEDTLRKFLQKAYESKIDYDKPETVILGLKIVYYEAGIILCCVLGLLFIILMPLVGYFFCMCRCCNKCGGEMHQRQKENGPFLRKCFAISLLVICIIISIGIFYGFVANHQVRTRIKRSRKLADSNFKDLRTLLNETPEQIKYILAQYNTTKDKAFTDLNSINSVLGGGILDRLRPNIIPVLDEIKSMATAIKETKEALENMNSTLKSLHQQSTQLSSSLTSVKTSLRSSLNDPLCLVHPSSETCNSIRLSLSQLNSNPELRQLPPVDAELDNVNNVLRTDLDGLVQQGYQSLNDIPDRVQRQTTTVVAGIKRVLNSIGSDIDNVTQRLPIQDILSAFSVYVNNTESYIHRNLPTLEEYDSYWWLGGLVICSLLTLIVIFYYLGLLCGVCGYDRHATPTTRGCVSNTGGVFLMVGVGLSFLFCWILMIIVVLTFVFGANVEKLICEPYTSKELFRVLDTPYLLNEDWEYYLSGKLFNKSKMKLTFEQVYSDCKKNRGTYGTLHLQNSFNISEHLNINEHTGSISSELESLKVNLNIFLLGAAGRKNLQDFAACGIDRMNYDSYLAQTGKSPAGVNLLSFAYDLEAKANSLPPGNLRNSLKRDAQTIKTIHQQRVLPIEQSLSTLYQSVKILQRTGNGLLERVTRILASLDFAQNFITNNTSSVIIEETKKYGRTIIGYFEHYLQWIEFSISEKVASCKPVATALDTAVDVFLCSYIIDPLNLFWFGIGKATVFLLPALIFAVKLAKYYRRMDSEDVYDDVETIPMKNPSQH

SEQ ID NO: 10860 - protein, 93 aa, Homo sapiens
  VARIANT 1: note = misc_feature - Xaa can be any naturally occurring amino acid
XEHYLQWIEFSISEKVASCKPVATALDTAVDVFLCSYIIDPLNLFWFGIGKATVFLLPALIFAVKLAKYYRRMDSEDVYDDVETIPMKNPSQH

SEQ ID NO: 10861 - protein, 54 aa, Homo sapiens
  VARIANT 1: note = misc_feature - Xaa can be any naturally occurring amino acid
XQDSHKAGPIGILFELVHIFLYVVQPRDFPEDENTKAQIGEACSFKTLQPNESW

SEQ ID NO: 10862 - protein, 65 aa, Homo sapiens
  VARIANT 1: note = misc_feature - Xaa can be any naturally occurring amino acid
XVDVFLCSYIIDPLNLFWFGIGKATVFLLPALIFAVKLAKYYRRMDSEDVYDDVETIPMKNPSQH

SEQ ID NO: 10863 - protein, 231 aa, Homo sapiens
MRVLGGRCGALLACLLLVLPVSEANFCLYFRNDFIYNRACISVLVGLSGCNFFYSICFLSKQQASQVLVRKRRANSLLEETKQGNLERECIEELCNKEEAREVFENDPETDYFYPKYLVCLRSFQTGLFTAARQSTNAYPDLRSCVNAIPDQCSPLPCNEDGYMSCKDGKASFTCTCKPGWQGEKCEFDINECKDPSNINGGCSQICDNTPGSYHCSCKNGFVMLSNKKDC

SEQ ID NO: 10864 - protein, 676 aa, Homo sapiens
MRVLGGRCGALLACLLLVLPVSEANFLSKQQASQVLVRKRRANSLLEETKQGNLERECIEELCNKEEAREVFENDPETDYFYPKYLVCLRSFQTGLFTAARQSTNAYPDLRSCVNAIPDQCSPLPCNEDGYMSCKDGKASFTCTCKPGWQGEKCEFDINECKDPSNINGGCSQICDNTPGSYHCSCKNGFVMLSNKKDCKDVDECSLKPSICGTAVCKNIPGDFECECPEGYRYNLKSKSCEDIDECSENMCAQLCVNYPGGYTCYCDGKKGFKLAQDQKSCEVVSVCLPLNLDTKYELLYLAEQFAGVVLYLKFRLPEISRFSAEFDFRTYDSEGVILYAESIDHSAWLLIALRGGKIEVQLKNEHTSKITTGGDVINNGLWNMVSVEELEHSISIKIAKEAVMDINKPGPLFKPENGLLETKVYFAGFPRKVESELIKPINPRLDGCIRSWNLMKQGASGIKEIIQEKQNKHCLVTVEKGSYYPGSGIAQFHIDYNNVSSAEGWHVNVTLNIRPSTGTGVMLALVSGNNTVPFAVSLVDSTSEKSQDILLSVENTVIYRIQALSLCSDQQSHLEFRVNRNNLELSTPLKIETISHEDLQRQLAVLDKAMKAKVATYLGGLPDVPFSATPVNAFYNGCMEVNINGVQLDLDEAISKHNDIRAHSCPSVWKKTKNS

SEQ ID NO: 10865 - protein, 56 aa, Homo sapiens
MSCKDGKASFTCTCKPGWQGEKCEFDINECKDPSNINGGCSQICDNTPGSYHCSCK

SEQ ID NO: 10866 - protein, 545 aa, Homo sapiens
MSCKDGKASFTCTCKPGWQGEKCEFDINECKDPSNINGGCSQICDNTPGSYHCSCKNGFVMLSNKKDCKDVDECSLKPSICGTAVCKNIPGDFECECPEGYRYNLKSKSCEDIDECSENMCAQLCVNYPGGYTCYCDGKKGFKLAQDQKSCEVVSVCLPLNLDTKYELLYLAEQFAGVVLYLKFRLPEISRFSAEFDFRTYDSEGVILYAESIDHSAWLLIALRGGKIEVQLKNEHTSKITTGGDVINNGLWNMVSVEELEHSISIKIAKEAVMDINKPGPLFKPENGLLETKVYFAGFPRKVESELIKPINPRLDGCIRSWNLMKQGASGIKEIIQEKQNKHCLVTVEKGSYYPGSGIAQFHIDYNNVSSAEGWHVNVTLNIRPSTGTGVMLALVSGNNTVPFAVSLVDSTSEKSQDILLSVENTVIYRIQALSLCSDQQSHLEFRVNRNNLELSTPLKIETISHEDLQRQLAVLDKAMKAKVATYLGGLPDVPFSATPVNAFYNGCMEVNINGVQLDLDEAISKHNDIRAHSCPSVWKKTKNS

SEQ ID NO: 10867 - protein, 422 aa, Homo sapiens
MAGCVPLLQGLVLVLALHRVEPSATSLKERHGLHSDSACTGVQESLFLPASKANDVLVRWKRAGSYLLEELFEGNLEKECYEEICVYEEAREVFENEVVTDEFWRRYKGGSPCISQPCLHNGSCQDSIWGYTCTCSPGYEGSNCELAKNECHPERTDGCQHFCLPGQESYTCSCAQGYRLGEDHKQCVPHDQCACGVLTSEKRAPDLQDLPWQVKLTNSEGKDFCGGVIIRENFVLTTAKCSLLHRNITVKTYFNRTSQDPLMIKITHVHVHMRYDADAGENDLSLLELEWPIQCPGAGLPVCTPEKDFAEHLLIPRTRGLLSGWARNGTDLGNSLTTRPVTLVEGEECGQVLNVTVTTRTYCERSSVAAMHWMDGSVVTREHRGSWFLTGVLGSQPVGGQAHMVLVTKVSRYSLWFKQIMN

SEQ ID NO: 10868 - protein, 400 aa, Homo sapiens
MAGCVPLLQGLVLVLALHRVEPSVFLPASKANDVLVRWKRAGSYLLEELFEGNLEKECYEEICVYEEAREVFENEVVTDEFWRRYKGGSPCISQPCLHNGSCQDSIWGYTCTCSPGYEGSNCELAKNECHPERTDGCQHFCLPGQESYTCSCAQGYRLGEDHKQCVPHDQCACGVLTSEKRAPDLQDLPWQVKLTNSEGKDFCGGVIIRENFVLTTAKCSLLHRNITVKTYFNRTSQDPLMIKITHVHVHMRYDADAGENDLSLLELEWPIQCPGAGLPVCTPEKDFAEHLLIPRTRGLLSGWARNGTDLGNSLTTRPVTLVEGEECGQVLNVTVTTRTYCERSSVAAMHWMDGSVVTREHRGSWFLTGVLGSQPVGGQAHMVLVTKVSRYSLWFKQIMN

SEQ ID NO: 10869 - protein, 26 aa, Homo sapiens
MKLLLWACIVCVAFARKNAGLGFLWL

SEQ ID NO: 10870 - protein, 219 aa, Homo sapiens
MKLLLWACIVCVAFARKRRFPFIGEDDNDDGHPLHPSLNIPYGIRNLPPPLYYRPVNTVPSYPGNTYTDTGLPSYPWILTSPGFPYVYHIRGFPLATQLNVPPLPPRGFPFVPPSRFFSAAAAPAAPPIAAEPAAAAPLTATPVAAEPAAGAPVAAEPAAEAPVGAEPAAEAPVAAEPAAEAPVGVEPAAEEPSPAEPATAKPAAPEPHPSPSLEQANQ

SEQ ID NO: 10871 - protein, 219 aa, Homo sapiens; identical to SEQ ID NO: 10870

SEQ ID NO: 10872 - protein, 61 aa, Homo sapiens
  VARIANT 1: note = misc_feature - Xaa can be any naturally occurring amino acid
XAEAPVGAEPAAEAPVAAEPAAEAPVGVEPAAEEPSPAEPATAKPAAPEPHPSPSLEQANQ

SEQ ID NO: 10873 - protein, 65 aa, Homo sapiens
MLLVLLSVVLLALSSAQSTDNDVNYEDFTFTIPACRKHHHSSRGTDQQDIPRSNHSGNLEFSGRK

SEQ ID NO: 10874 - protein, 78 aa, Homo sapiens
MLLVLLSVVLLALSSAQSTDNDVNYEDFTFTIPATTTPTRTPSTLSTPISFCQPAGSIIILPEGQTSKTSPGATTLVI

SEQ ID NO: 10875 - protein, 134 aa, Homo sapiens
MLLVLLSVVLLALSSAQSTDNDVNYEDFTFTIPDVEDSSQRPDQGPQRPPPEGLLPRPPGDSGNQDDGPQQRPPKPGGHHRHPPPPPFQNQQRPPRRGHRQLSLPRFPSVSLQEASSFFQRDRPARHPQEQPLW

SEQ ID NO: 10876 - protein, 98 aa, Homo sapiens
MRGHPSLLLLYMALTTCLDTSPSEETDQEVFLGPPEAQSFLSSHTRIPRANHWDLELLTPGNLERECLEERCSWEEAREYFEDNTLTERFWESYIYNG

SEQ ID NO: 10877 - protein, 202 aa, Homo sapiens
MRGHPSLLLLYMALTTCLDTSPSEETDQEVFLGPPEAQSFLSSHTRIPRANHWDLELLTPGNLERECLEERCSWEEAREYFEDNTLTERFWESYIYNGKGGRGRVDVASLAVGLTGGILLIVLAGLGAFWYLRWRQHRGQQPCPQEAGLISPLSPLNPLGPPTPLPPPPPPPPGLPTYEQALAASGVHDAPPPPYTSLRRPH

SEQ ID NO: 10878 - protein, 96 aa, Homo sapiens
MRGHPSLLLLYMALTTCLDTSPSEETDQVLPLPGVQDPAPSSFRPRNLDSQPLLLPPGPHCFPSPYDSSPRDPPFFCPSCLWVQKSSWVPQRPRAS

SEQ ID NO: 10879 - protein, 981 aa, Homo sapiens
MASSPWGCVCGLLLLLLPLLGTGPALGRGFPRPLENSEIPMIPGAHPKGSVGSEPQAFDVFPENPRADSHRNSDVRHAPAEEMPEKPVASPLGPALYGPKAAQGAQRERLPVTDDLQMAQGPSSHGWTGPLDSQELLQQEAVAPHPVGHPHLTFIPTTPRRQLRVATVPPSLQHEGQEGQWPPRDEGLKAKTKSRVPPTSPSDHQGPPHTLVSHSGTVKRPVLEGQGGFEEHLQEAAQGPHFTQQDPAAPDVGSVPPVEVVYSQEPGAQPDLALARSLPPAEELPVETPKRAGAEVSWEVSSPGPPPKQADLPDAKDSPGPQPTDPPASEAPDRPSKPERAAMNGADPISPQRVRGAVEAPGTPKSLIPGPSDPGPAVNRTESPMGALQPDEAEEWPGRPQSHPPAPPVQAPSTSRRGLIRVTTQRALGQPPPPEPTASSMASAPASSPPANATAPPLRWGPLRRVLSFSWELHVYGVGVLFLLPALLALAALAAAPAGPRLALVAAVLVLVASALRSAYMLTDPYGSQARLGVRGGLVLYNLPFPLLLTALAALTLLGLGAGLPPPLQNPLLLGAVALVHGVGLLATDLLSTWSVLNLLTQGLSCAWGAAVALGTLCLCRRRLLDGPRGWDASPGPRLLAVAGALGLLASGLQLAAALWLYPGPGRVGRFSWAWWGVHFWLRLLELTWALALALAAVAAARPRPPTEHACWAKLMRLACPAPSGKSEVPERPNNCYAGPSNVGAGSLDISKSLIRNPAESGQLATPSSGAWGSAASLGRGPQGGPGLSRNGVGPAPSLSELDLRPPSPINLSRSIDAALFREHLVRDSVFQRCGLRGLASPPPGGALRPRRGSHPKAELDDAGSSLLRGRCRSLSDVRVRGPVPQHVVEAPDGAAAAASGSSLDSFSRGSLKISWNPWRHGLSSVDSLPLDELPSTVQLLPAPTPAPDSTAARQGDGQGEVQPRGKPGESRSASSDTIEL

SEQ ID NO: 10880 - protein, 981 aa, Homo sapiens; identical to SEQ ID NO: 10879

SEQ ID NO: 10881 - protein, 421 aa, Homo sapiens
MASSPWGCVCGLLLLLLPLLGTGPALGRGFPRPLENSEIPMIPGAHPKGSVGSEPQAFDVFPENPRADSHRNSDVRHAPAEEMPEKPVASPLGPALYGPKAAQGAQRERLPVTDDLQMAQGPSSHGWTGPLDSQELLQQEAVAPHPVGHPHLTFIPTTPRRQLRVATVPPSLQHEGQEGQWPPRDEGLKAKTKSRVPPTSPSDHQGPPHTLVSHSGTVKRPVLEGQGGFEEHLQEAAQGPHFTQQDPAAPDVGSVPPVEVVYSQEPGAQPDLALARSLPPAEELPVETPKRAGAEVSWEVSSPGPPPKQADLPDAKDSPGPQPTDPPASEAPDRPSKPERAAMNGADPISPQRVRGAVEAPGTPKSLIPGPSDPGPAVNRTESPMGALQPGESMAGVWGEGVLCLVTENLCWGCMGAEGGE

SEQ ID NO: 10882 - protein, 205 aa, Homo sapiens
MARHGCLGLGLFCCVLFAATVGPQPTPSIPGAPATTLTPVPQSEASMLSLNLGLNFKFHLRGPAAVWGSPVTETQPLSLGPGQEPGEEVASGLRTDPLWELLVGSSGNSLTEWGSTEGGSKPRASSLLPESTSRRSGPSDGPTAPYQPRRSTVTWDTALMVTALPSSAPRPHQSELELKFDMALRAGAAPTLGHRTLPLLPSLRA

SEQ ID NO: 10883 - protein, 208 aa, Homo sapiens
MARHGCLGLGLFCCVLFAATVGPQPTPSIPGAPATTLTPVPQSEASMLSLNLGLNFKFHLRGPAAVWGSPVTETQPLSLGPGQEPGEEVASGLRTDPLWELLVGSSGNSLTEWGSTEGGSKPRASSLLPESTSRRSGPSDGPTAPYQPRRSTVTWDTALMVTALPSSAPRPHQSELELKFDMALRAGAAPTLGHRTLPLLPSLRASLA

SEQ ID NO: 10884 - protein, 899 aa, Homo sapiens
MARHGCLGLGLFCCVLFAATVGPQPTPSIPGAPATTLTPVPQSEASMLSLNLGLNFKFHLRGPAAVWGSPVTETQPLSLGPGQEPGEEVASGLRTDPLWELLVGSSGNSLTEWGSTEGGSKPRASSLLPESTSRRSGPSDGPTAPYQPRRSTVTWDTALMVTALPSSAPRPHQSELELKFDMALRAGAAPTLGHRTLPLLPSLRASLAEIAGRLGPFGFFGTTLSPLRNFSGLSPPGETTSTSSASGVSGSLGFLGTTLSLPPYSLERKLSSPSPLDPAASLSFASIATTSLDPTVPISGPDDLSPPASLGNPSGQPECGPGSCSVGELPEREGQPPEAPRPLFFLTLEADWAEARARWGLAWEAHVYGVGALFGLVALLALLALALLPWRCPPGAPCLALLDLLLLSAGTTRAFPLFYDAYGHRDRLPALAWLLLQDLPLPCLAAGLGLACLLLARPRPPRCPTGLAALLLLGLGLAAAAALGSAAHRPLRPLRLASRGLHAFLAAFLSGLLLALSCWGGRRRRAGAPLGGSGFKGATPLPQGRSPFAPRESWRRAARTAPVAGTFGLLSGALQGYEVLHALGYGGQSGLEGPWPWWAFQLGLRLGEVGVALPLALLGLYPALCSPRVPPRCWAKLFRLSPGHAAPLLPGGWVTGPPDKEPLGSAIARGDAELLQLCALAGPGPDLLLQGGGCRGFEGAAANPAPSPASSPCSDYTVDFRPPSPINLRRSIEEALCSEALLAPGLFQGPAFEDALPGLGLYRTASLGTGGRASERSGEASGPAAPPELPSPGAWPAGSSVSSGSFCGLSRDSSSMLLCSSPDRPPRCPLVCVLSPPRPSGSSPSLPASGSYQALSPPSRDSPEPASELQAEEALLQEQFLDACRQIDELSVGSDTIDL

SEQ ID NO: 10885 - protein, 899 aa, Homo sapiens; identical to SEQ ID NO: 10884

SEQ ID NO: 10886 - protein, 480 aa, Homo sapiens
MARHGCLGLGLFCCVLFAATVGPQPTPSIPGAPATTLTPVPQSEASMLSLNLGLNFKFHLRGPAAVWGSPVTETQPLSLGPGQEPGEEVASGLRTDPLWELLVGSSGNSLTEWGSTEGGSKPRASSLLPESTSRRSGPSDGPTAPYQPRRSTVTWDTALMVTALPSSAPRPHQSELELKFDMALRAGAAPTLGHRTLPLLPSLRASLAEIAGRLGPFGFFGTTLSPLRNFSGLSPPGETTSTSSASGVSGSLGFLGTTLSLPPYSLERKLSSPSPLDPAASLSFASIATTSLDPTVPISGPDDLSPPASLGNPSGQPECGPGSCSVGELPEREGQPPEAPRPLFFLTLEADWAEARARWGLAWEAHVYGVGALFGLVALLALLALALLPWRCPPGAPCLALLDLLLLSAGTTRAFPLFYDAYGHRDRLPALAWLLLQDLPLPCLAAGLGLACLLLARPRPPRCPTGLAALLLLGLGLAAA

SEQ ID NO: 10887 - protein, 429 aa, Homo sapiens
MARHGCLGLGLFCCVLFAATVGPQPTPSIPGAPATTLTPVPQSEASMLSLNLGLNFKFHLRGPAAVWGSPVTETQPLSLGPGQEPGEEVASGLRTDPLWELLVGSSGNSLTEWGSTEGGSKPRASSLLPESTSRRSGPSDGPTAPYQPRRSTVTWDTALMVTALPSSAPRPHQSELELKFDMALRAGAAPTLGHRTLPLLPSLRASLAEIAGRLGPFGFFGTTLSPLRNFSGLSPPGETTSTSSASGVSGSLGFLGTTLSLPPYSLERKLSSPSPLDPAASLSFASIATTSLDPTVPISGPDDLSPPASLGNPSGQPECGPGSCSVGELPEREGQPPEAPRPLFFLTLEADWAEARARWGLAWEAHVYGRLHRGLPPALPNQPATQHRGGPLQRGPACAWPLPGPCLRGRSAWARTLPHRLAGDRGQGQ

SEQ ID NO: 10888 - protein, 419 aa, Homo sapiens
  VARIANT 1: note = misc_feature - Xaa can be any naturally occurring amino acid
XSKPRASSLLPESTSRRSGPSDGPTAPYQPRRSTVTWDTALMVTALPSSAPRPHQSELELKFDMALRAGAAPTLGHRTLPLLPSLRASLAEIAGRLGPFGFFGTTLSPLRNFSGLSPPGETTSTSSASGVSGSLGFLGTTLSLPPYSLERKLSSPILACRRAAGPSSSACPRATRLRCCREAGSLGPQTRSPWGAPSLAGTRSCCSCARWQGQAQTSYSRAEVAGASKARRPTRPRPRLPLPAAITPWTSARPPQSTCDAASRRPSAARPCLRLASSRALPSRTLCLGSDSTAPPRWGPGAGPVRDQGRPLAPLRPRSSPPLGLGPQAAASHLARSADSRGTARPCCCVPAPTGPRAALWSASSVPRGPQEAAPASRPQDPTRPCPHPLATPQSLLLSCRPRRPCCRSSSWTPADRSTS

SEQ ID NO: 10889 - protein, 261 aa, Homo sapiens
MNPLLILTFVAAALAAPFDDDDKIVGGYNCEENSVPYQVSLNSGYHFCGGSLINEQWVVSAGHCYKSAIKSKFSGRGCEYHRIQVRLGEHNIEVLEGNEQFINAAKIIRHPQYDRKTLNNDIMLIKLSSRAVINARVSTISLPTAPPATGTKCLISGWGNTASSGADYPDELQCLDAPVLSQAKCEASYPGKITSNMFCVGFLEGGKDSCQGDSGGPVVCNGQLQGVVSWGDGCAQKNKPGVYTKVYNYVKWIKNTIAANS

SEQ ID NO: 10890 - protein, 247 aa, Homo sapiens
MNPLLILTFVAAALAAPFDDDDKIVGGYNCEENSVPYQVSLNSGYHFCGGSLINEQWVVSAGHCYKSRIQVRLGEHNIEVLEGNEQFINAAKIIRHPQYDRKTLNNDIMLIKLSSRAVINARVSTISLPTAPPATGTKCLISGWGNTASSGADYPDELQCLDAPVLSQAKCEASYPGKITSNMFCVGFLEGGKDSCQGDSGGPVVCNGQLQGVVSWGDGCAQKNKPGVYTKVYNYVKWIKNTIAANS

SEQ ID NO: 10891 - protein, 237 aa, Homo sapiens
MNPLLILTFVAAALAAPFDDDDKIVGGYNCEENSVPYQVSLNSGYHFCGGSLINEQWVVSAGHCYKSRIQVRLGEHNINAAKIIRHPQYDRKTLNNDIMLIKLSSRAVINARVSTISLPTAPPATGTKCLISGWGNTASSGADYPDELQCLDAPVLSQAKCEASYPGKITSNMFCVGFLEGGKDSCQGDSGGPVVCNGQLQGVVSWGDGCAQKNKPGVYTKVYNYVKWIKNTIAANS

SEQ ID NO: 10892 - protein, 142 aa, Homo sapiens
SLINEQWVVSAGHCYKSRIQVRLGEHNIEVLEGNEQFINAAKIIRHPQYDRKTLNNDIMLIKLSSRAVINARVSTISLPTAPPATGTKCLISGWGNTASSGADYPDELQCLDAPVLSQAKCEASYPGKITSNMFCVGFLEGG

SEQ ID NO: 10893 - protein, 875 aa, Homo sapiens
MTLARFVLALMLGALPEVVGFDSVLNDSLHHSHRHSPPAGPHYPYYLPTQQRPPRTRPPPPLPRFPRPPRALPAQRPHALQAGHTPRPHPWGCPAGEPWVSVTDFGAPCLRWAEVPPFLERSPPASWAQLRGQRHNFCRSPDGAGRPWCFYGDARGKVDWGYCDCRHGSVRLRGGKNEFEGTVEVYASGVWGTVCSSHWDDSDASVICHQLQLGGKGIAKQTPFSGLGLIPIYWSNVRCRGDEENILLCEKDIWQGGVCPQKMAAAVTCSFSHGPTFPIIRLAGGSSVHEGRVELYHAGQWGTVCDDQWDDADAEVICRQLGLSGIAKAWHQAYFGEGSGPVMLDEVRCTGNELSIEQCPKSSWGEHNCGHKEDAGVSCTPLTDGVIRLAGGKGSHEGRLEVYYRGQWGTVCDDGWTELNTYVVCRQLGFKYGKQASANHFEESTGPIWLDDVSCSGKETRFLQCSRRQWGRHDCSHREDVSIACYPGGEGHRLSLGFPVRLMDGENKKEGRVEVFINGQWGTICDDGWTDKDAAVICRQLGYKGPARARTMAYFGEGKGPIHVDNVKCTGNERSLADCIKQDIGRHNCRHSEDAGVICDYFGKKASGNSNKESLSSVCGLRLLHRRQKRIIGGKNSLRGGWPWQVSLRLKSSHGDGRLLCGATLLSSCWVLTAAHCFKRYGNSTRSYAVRVGDYHTLVPEEFEEEIGVQQIVIHREYRPDRSDYDIALVRLQGPEEQCARFSSHVLPACLPLWRERPQKTASNCYITGWGDTGRAYSRTLQQAAIPLLPKRFCEERYKGRFTGRMLCAGNLHEHKRVDSCQGDSGGPLMCERPGESWVVYGVTSWGYGCGVKDSPGVYTKVSAFVPWIKSVTKL

SEQ ID NO: 10894 - protein, 92 aa, Homo sapiens
MAVWLAQWLGPLLLVSLWGLLAPASLLRRLGEHIQQFQESSAQGLGLSLGPGAAALPKVGWLEQLLDPFNVSDRRSFLQAIPQPWPQPGAPW

SEQ ID NO: 10895 - protein, 257 aa, Homo sapiens
MAVWLAQWLGPLLLVSLWGLLAPASLLRRLGEHIQQFQESSAQGLGLSLGPGAAALPKVGWLEQLLDPFNVSDRRSFLQIVLHSLGQKCLSFSRAETVAQLRSTEPQLSGVGDRQWLYQTCTEFGFYVTCENPRCPFSQLPALPSQLDLCEQVFGLSALSVAQAVAQTNSYYGGQTPGANKVLFVNGDTDPWHVLSVTQALGSSESTLLIRTGSHCLDMAPERPSDSPSLRLGRQNIFQQLQTWLKLAKESQIKGEV

SEQ ID NO: 10896 - protein, 99 aa, Homo sapiens
MAVWLAQWLGPLLLVSLWGLLAPASLLRRLGEHIQQFQESSAQGLGLSLGPGAAALPKVGWLEQLLDPFNVSDRRSFLQMSPVRIPDVLSPSSQHCPPS

SEQ ID NO: 10897 - protein, 145 aa, Homo sapiens
MAVWLAQWLGPLLLVSLWGLLAPASLLRRLGEHIQQFQESSAQGLGLSLGPGAAALPKVGWLEQLLDPFNVSDRRSFLQRYWVNDQHWVGQDGPIFLHLGGEGSLGPGSVMRDCLAQPGPEVFKLFPSRDSGTAEEHRTSTVWCG

SEQ ID NO: 10898 - protein, 514 aa, Homo sapiens
MAVWLAQWLGPLLLVSLWGLLAPASLLRRLGEHIQQFQESSAQGLGLSLGPGAAALPKVGWLEQLLDPFNVSDRRSFLQRYWVNDQHWVGQDGPIFLHLGGEGSLGPGSVMRGHPAALAPAWGALVISLEHRFYGLSIPAGGLEMAQLRFLSSRLALADVVSARLALSRLFNISSSSPWICFGGSYAGSLAAWARLKFPHLIFASVASSAPVRAVLDFSEYNDVVSRSLMSTAIGGSLECRAAVSVAFAEVERRLRSGGAAQAALRTELSACGPLGRAENQAELLGALQALVGGVVQYDGQTGAPLSVRQLCGLLLGGGGNRSHSTPYCGLRRAVQIVLHSLGQKCLSFSRAETVAQLRSTEPQLSGVGDRQWLYQTCTEFGFYVTCENPRCPFSQLPALPSQLDLCEQVFGLSALSVAQAVAQTNSYYGGQTPGANKVLFVNGDTDPWHVLSVTQALGSSESTLLIRTGSHCLDMAPERPSDSPSLRLGRQNIFQQLQTWLKLAKESQIKGEV

SEQ ID NO: 10899 - protein, 166 aa, Homo sapiens
MAVWLAQWLGPLLLVSLWGLLAPASLLRRLGEHIQQFQESSAQGLGLSLGPGAAALPKVGWLEQLLDPFNVSDRRSFLQRYWVNDQHWVGQDGPIFLHLGGEGSLGPGSVMRGHPAALAPAWGALVISLEHRFYGLSIPAGGLEMAQLRFLSSRLALSCTAWARSV

SEQ ID NO: 10900 - protein, 165 aa, Homo sapiens
  VARIANT 1: note = misc_feature - Xaa can be any naturally occurring amino acid
XVMRGHPAALAPAWGALVISLEHRFYGLSIPAGGLEMAQLRFLSSRLALADVVSARLALSRLFNISSSSPWICFGGSYAGSLAAWARLKFPHLIFASVASSAPVRAVLDFSEYNDIVLHSLGQKCLSFSRAETVAQLRSTEPQLSGVGDRQWLYQTCTEFGFYVT

SEQ ID NO: 10901 - protein, 139 aa, Homo sapiens
  VARIANT 1: note = misc_feature - Xaa can be any naturally occurring amino acid
XVMRGHPAALAPAWGALVISLEHRFYGLSIPAGGLEMAQLRFLSSRLALADVVSARLALSRLFNISSSSPWICFGGSYAGSLAAWARLKIVLHSLGQKCLSFSRAETVAQLRSTEPQLSGVGDRQWLYQTCTEFGFYVT

SEQ ID NO: 10902 - protein, 246 aa, Homo sapiens
MNLLLILTFVAAAVAAPFDDDDKIVGGYICEENSVPYQVSLNSGYHFCGGSLISEQWVVSAGHCYKSAINSKLSGRGCEYHRIQVRLGEHNIEVLEGNEQFINAAKIIRHPKYNSRTLDNDILLIKLSSPAVINSRESLISGWGNTLSSGADYPDELQCLDAPVLSQAECEASYPGKITNNMFCVGFLEGGKDSCQGDSGGPVVSNGELQGIVSWGYGCAQKNRPGVYTKVYNYVDWIKDTIAANS

SEQ ID NO: 10903 - protein, 261 aa, Homo sapiens
MNLLLILTFVAAAVAAPFDDDDKIVGGYICEENSVPYQVSLNSGYHFCGGSLISEQWVVSAGHCYKSAINSKLSGRGCEYHRIQVRLGEHNIEVLEGNEQFINAAKIIRHPKYNSRTLDNDILLIKLSSPAVINSRVSAISLPTAPPAAGTESLISGWGNTLSSGADYPDELQCLDAPVLSQAECEASYPGKITNNMFCVGFLEGGKDSCQGDSGGPVVSNGELQGIVSWGYGCAQKNRPGVYTKVYNYVDWIKDTIAANS

SEQ ID NO: 10904 - protein, 247 aa, Homo sapiens
MNLLLILTFVAAAVAAPFDDDDKIVGGYICEENSVPYQVSLNSGYHFCGGSLISEQWVVSAGHCYKSRIQVRLGEHNIEVLEGNEQFINAAKIIRHPKYNSRTLDNDILLIKLSSPAVINSRVSAISLPTAPPAAGTESLISGWGNTLSSGADYPDELQCLDAPVLSQAECEASYPGKITNNMFCVGFLEGGKDSCQGDSGGPVVSNGELQGIVSWGYGCAQKNRPGVYTKVYNYVDWIKDTIAANS

SEQ ID NO: 10905 - protein, 247 aa, Homo sapiens
MNPLLILAFVGAAVAAPFDDDDKIVGGYICEENSVPYQVSLNSGYHFCGGSLISEQWVVSAGHCYKSRIQVRLGEHNIEVLEGNEQFINAAKIIRHPKYNSRTLDNDILLIKLSSPAVINSRVSAISLPTAPPAAGTESLISGWGNTLSSGADYPDELQCLDAPVLSQAECEASYPGKITNNMFCVGFLEGGKDSCQGDSGGPVVSNGELQGIVSWGYGCAQKNRPGVYTKVYNYVDWIKDTIAANS

SEQ ID NO: 10906 - protein, 81 aa, Homo sapiens
ARGAAAGAAAGSGWTQEAGVAGGGAVIRTMRPTGHHVAHRGWRGRRTRALAVAGEPAPVGFPRMRSEPAQPPLGTHGGALL

SEQ ID NO: 10907 - protein, 300 aa, Homo sapiens
MGARGALLLALLLARAGLRKPESQEAAPLSGPCGRRVITSRIVGGEDAELGRWPWQGSLRLWDSHVCGVSLLSHRWALTAAHCFETYSDLSDPSGWMVQFGQLTSMPSFWSLQAYYTRYFVSNIYLSPRYLGNSPYDIALVKLSAPVTYTKHIQPICLQASTFEFENRTDCWVTGWGYIKEDEALPSPHTLQEVQVAIINNSMCNHLFLKYSFRKDIFGDMGDSGGPLACNKNGLWYQIGVVSWGVGCGRPNRPGVYTNISHHFEWIQKLMAQSGMSQPDPSWPLLFFPLLWALPLLGPV

SEQ ID NO: 10908 - protein, 314 aa, Homo sapiens
MGARGALLLALLLARAGLRKPESQEAAPLSGPCGRRVITSRIVGGEDAELGRWPWQGSLRLWDSHVCGVSLLSHRWALTAAHCFETYSDLSDPSGWMVQFGQLTSMPSFWSLQAYYTRYFVSNIYLSPRYLGNSPYDIALVKLSAPVTYTKHIQPICLQASTFEFENRTDCWVTGWGYIKEDEALPSPHTLQEVQVAIINNSMCNHLFLKYSFRKDIFGDMVCAGNAQGGKDACFGDSGGPLACNKNGLWYQIGVVSWGVGCGRPNRPGVYTNISHHFEWIQKLMAQSGMSQPDPSWPLLFFPLLWALPLLGPV

SEQ ID NO: 10909 - protein, 218 aa, Homo sapiens
  VARIANT 1: note = misc_feature - Xaa can be any naturally occurring amino acid
XLALLLARAGLRKPESQEAAPLSGPCGRRVITSRIVGGEDAELGRWPWQGSLRLWDSHVCGVSLLSHRWALTAAHCFETDLSDPSGWMVQFGQLTSMPSFWSLQAYYTRYFVSNIYLSPRYLGNSPYDIALVKLSAPVTYTKHIQPICLQASTFEFENRTDCWVTGWGYIKEDEGSSGRHHKQLYVQPPLPQVQFPQGHLWRHGLCWQCPRREGCLLR

SEQ ID NO: 10910 - protein, 81 aa, Homo sapiens
  VARIANT 1: note = misc_feature - Xaa can be any naturally occurring amino acid
XRGAAAGAAAGSGWTQEAGVAGGGAVIRTMRPTGHHVAHRGWRGRRTRALAVAGEPAPVGFPRMRSEPAQPPLGTHGGALL

SEQ ID NO: 10911 - protein, 256 aa, Homo sapiens
  VARIANT 1: note = misc_feature - Xaa can be any naturally occurring amino acid
XSLRLWDSHVCGVSLLSHRWALTAAHCFETDLSDPSGWMVQFGQLTSMPSFWSLQAYYTRYFVSNIYLSPRYLGNSPYDIALVKLSAPVTYTKHIQPICLQASTFEFENRTDCWVTGWGYIKEDEALPSPHTLQEVQVAIINNSMCNHLFLKYSFRKDIFGDMVCAGNAQGGKDACFGDSGGPLACNKNGLWYQIGVVSWGVGCGRPNRPGVYTNISHHFEWIQKLMAQSGMSQPDPSWPLLFFPLLWALPLLGPV

SEQ ID NO: 10912 - protein, 317 aa, Homo sapiens
MVVSGAPPALGGGCLGTFTSLLLLASTAILNAARIPVPPACGKPQQLNRVVGGEDSTDSEWPWIVSIQKNGTHHCAGSLLTSRWVITAAHCFKDNLNKPYLFSVLLGAWQLGNPGSRSQKVGVAWVEPHPVYSWKEGACADIALVRLERSIQFSERVLPICLPDASIHLPPNTHCWISGWGSIQDGVPLPHPQTLQKLKVPIIDSEVCSHLYWRGAGQGPITEDMLCAGYLEGERDACLGDSGGPLMCQVDGAWLLAGIISWGEGCAERNRPGVYISLSAHRSWVEKIVQGVQLRGRAQGGGALRAPSQGSGAAARS

SEQ ID NO: 10913 - protein, 207 aa, Homo sapiens
MVVSGAPPALGGGCLGTFTSLLLLASTAILNAARIPVPPACGKPQQLNRVVGGEDSTDSEWPWIVSIQKNGTHHCAVPLPHPQTLQKLKVPIIDSEVCSHLYWRGAGQGPITEDMLCAGYLEGERDACLGDSGGPLMCQVDGAWLLAGIISWGEGCAERNRPGVYISLSAHRSWVEKIVQGVQLRGRAQGGGALRAPSQGSGAAARS

SEQ ID NO: 10914 - protein, 116 aa, Homo sapiens
  VARIANT 1: note = misc_feature - Xaa can be any naturally occurring amino acid
XLLSASALFISCSLTALCLGFFYGCEDETENAASTQRASVSSYRRRRHRLLPLASVFSHLLVLRCLPLGKHRFVLFLPQEVRGGHTSGSSVQSRGAQPSSMRPGYLFPQPVGSPSS

SEQ ID NO: 10915 - protein, 154 aa, Homo sapiens
MAGIPGLLFLLFFLLCAVGQVSPYSAPWKPTWPAYRLPVVLPQSTLNLAKPDFGAEAKLEVSSSCGPQCHKGTPLPTYEEAKQYLSYETLYANGSRTETQVGIYILSSSGDGAQHRDSGSSGKSRRKRQIYGYDSRFSIFGKDFLLNYPFSTSV

SEQ ID NO: 10916 - protein, 383 aa, Homo sapiens
MAGIPGLLFLLFFLLCAVGQVSPYSAPWKPTWPAYRLPVVLPQSTLNLAKPDFGAEAKLEVSSSCGPQCHKGTPLPTYEEAKQYLSYETLYANGSRTETQVGIYILSSSGDGAQHRDSGSSGKSRRKRQIYGYDSRFSIFGKDFLLNYPFSTSVKLSTGCTGTLVAEKHVLTAAHCIHDGKTYVKGTQKLRVGFLKPKFKDGGRGANDSTSAMPEQMKFQWIRVKRTHVPKGWIKGNANDIGMDYDYALLELKKPHKRKFMKIGVSPPAKQLPGGRIHFSGYDNDRPGNLVYRFCDVKDETYDLLYQQCDAQPGASGSGVYVRMWKRQQQKWERKIIGIFSGHQWVDMNGSPQDFNVAVRITPLKYAQICYWIKGNYLDCREG

SEQ ID NO: 10917 - protein, 82 aa, Homo sapiens
MSRMRPVCQPWPSPHAPTTVKREGSTVSNSIQPPPPEYQLGSRTWLEAETPGQKRQCSAFMEFTEESRRASHFSSILKIEPV

SEQ ID NO: 10918 - protein, 91 aa, Homo sapiens
MSRMRPVCQPWPSPHAPTTVKREGSTVSNSIQPPPPEYQLGSRTWLEAETPGQKRQCSAFMEFTEESRRIHQSVGTLLPRVKSFGRPNPHA

SEQ ID NO: 10919 - protein, 290 aa, Homo sapiens
MRRPAAVPLLLLLCFGSQRAKAATACGRPRMLNRMVGGQDTQEGEWPWQVSIQRNGSHFCGGSLIAEQWVLTAAHCFRNTSETSLYQVLLGARQLVQPGPHAMYARVRQVESNPLYQGTASSADVALVELEAPVPFTNYILPVCLPDPSVIFETGMNCWVTGWGSPSEEDLLPEPRILQKLAVPIIDTPKCNLLYSKDTEFGYQPKTIKNDMLCAGFEEGKKDACKGDSGGPLVCLVGQSWLQAGVISWGEGCARQNRPGVYIRVTAHHNWIHRIIPKLQFQPARLGGQK

SEQ ID NO: 10920 - protein, 40 aa, Homo sapiens
MRRPAAVPLLLLLCFGSQRAKAATAPLRRPCTRSCWGQGS

SEQ ID NO: 10921 - protein, 40 aa, Homo sapiens; identical to SEQ ID NO: 10920

SEQ ID NO: 10922 - protein, 304 aa, Homo sapiens
MCGPDDRCPARWPGPGRAVKCGKGLAAARPGRVERGGAQRGGAGLELHPLLGGRTWRAARDADGCEALGTVAVPFDDDDKIVGGYTCEENSLPYQVSLNSGSHFCGGSLISEQWVVSAAHCYKTRIQVRLGEHNIKVLEGNEQFINAAKIIRHPKYNRDTLDNDIMLIKLSSPAVINARVSTISLPTTPPAAGTECLISGWGNTLSFGADYPDELKCLDAPVLTQAECKASYPGKITNSMFCVGFLEGGKDSCQRDSGGPVVCNGQLQGVVSWGHGCAWKNRPGVYTKVYNYVDWIKDTIAANS

SEQ ID NO: 10923 - protein, 240 aa, Homo sapiens
MGPAGEVAVPFDDDDKIVGGYTCEENSLPYQVSLNSGSHFCGGSLISEQWVVSAAHCYKTRIQVRLGEHNIKVLEGNEQFINAAKIIRHPKYNRDTLDNDIMLIKLSSPAVINARVSTISLPTTPPAAGTECLISGWGNTLSFGADYPDELKCLDAPVLTQAECKASYPGKITNSMFCVGFLEGGKDSCQRDSGGPVVCNGQLQGVVSWGHGCAWKNRPGVYTKVYNYVDWIKDTIAANS

SEQ ID NO: 10924 - protein, 261 aa, Homo sapiens
MHMRETSGFTLKKGRSAPLVFHPPDALIAVPFDDDDKIVGGYTCEENSLPYQVSLNSGSHFCGGSLISEQWVVSAAHCYKTRIQVRLGEHNIKVLEGNEQFINAAKIIRHPKYNRDTLDNDIMLIKLSSPAVINARVSTISLPTTPPAAGTECLISGWGNTLSFGADYPDELKCLDAPVLTQAECKASYPGKITNSMFCVGFLEGGKDSCQRDSGGPVVCNGQLQGVVSWGHGCAWKNRPGVYTKVYNYVDWIKDTIAANS

SEQ ID NO: 10925 - protein, 247 aa, Homo sapiens
MNPFLILAFVGAAVAVPFDDDDKIVGGYTCEENSLPYQVSLNSGSHFCGGSLISEQWVVSAAHCYKTRIQVRLGEHNIKVLEGNEQFINAAKIIRHPKYNRDTLDNDIMLIKLSSPAVINARVSTISLPTTPPAAGTECLISGWGNTLSFGADYPDELKCLDAPVLTQAECKASYPGKITNSMFCVGFLEGGKDSCQRDSGGPVVCNGQLQGVVSWGHGCAWKNRPGVYTKVYNYVDWIKDTIAANS

SEQ ID NO: 10926 - protein, 178 aa, Homo sapiens
MRETSGFTLKKGRSAPLVFHPPDALIAVPFDDDDKIVGGYTCEENSLPYQVSLNSGSHFCGGSLISEQWVVSAAHCYKTRIQVRLGEHNIKVLEGNEQFINAAKIIRHPKYNRDTLDNDIMLIKLSSPAVINARVSTISLPTTPPAAGTECLISGWGNTLSFGADYPDELKCLDAPVL

SEQ ID NO: 10927 - protein, 236 aa, Homo sapiens
MRGVSCLQVLLLLVLACGQPRMSSRIVGGRDGRDGEWPWQASIQHRGAHVCGGSLIAPQWVLTAAHCFPRRALPAEYRVRLGALRLGSTSPRTLSVPVRRVLLPPDYSEDGARGDLALLQLRRPVPLSARVQPVCLPVPGARPPPGTPCRVTGWGSLRPGVPLPEWRPLQGVRVPLLDSRTCDGLYHVGADVPQAERIVLPGSLCAGYPQGHKDACQVCTQPPQPPESPPCAQHPP

SEQ ID NO: 10928 - protein, 280 aa, Homo sapiens
MRGVSCLQVLLLLVLGAAGTQGRKSAACGQPRMSSRIVGGRDGRDGEWPWQASIQHRGAHVCGGSLIAPQWVLTAAHCFPRRALPAEYRVRLGALRLGSTSPRTLSVPVRRVLLPPDYSEDGARGDLALLQLRRPVPLSARVQPVCLPVPGARPPPGTPCRVTGWGSLRPGVPLPEWRPLQGVRVPLLDSRTCDGLYHVGADVPQAERIVLPGSLCAGYPQGHKDACQGDSGGPLTCLQSGSWVLVGVVSWGKGCALPNRPGVYTSVATYSPWIQARVSF

SEQ ID NO: 10929 - protein, 280 aa, Homo sapiens; identical to SEQ ID NO: 10928

SEQ ID NO: 10930 - protein, 115 aa, Homo sapiens
MRGVSCLQVLLLLVLGAAGTQGRKSAACGQPRMSSRIVGGRDGRDGEWPWQASIQHRGAHVCGGSLIAPQWVLTAAHCFPSAPPRVATATRSKGAAAGLAHLRRPLPRGRGRAPG

SEQ ID NO: 10931 - protein, 413 aa, Homo sapiens
MENMLLWLIFFTPGWTLIDGSEMEWDFMWHLRKVPRIVSERTFHLTSPAFEADAKMMVNTVCGIECQKELPTPSLSELEDYLSYETVFENGTRTLTRVKVQDLVLEPTQNITTKGVSVRRKRQVYGTDSRFSILDKRFLTNFPFSTAVKLSTGCSGILISPQHVLTAAHCVHDGKDYVKGSKKLRVGLLKMRNKSGGKKRRGSKRSRREASGGDQREGTREHLRERAKGGRRRKKSGRGQRIAEGRPSFQWTRVKNTHIPKGWARGGMGDATLDYDYALLELKRAHKKKYMELGISPTIKKMPGGMIHFSGFDNDRADQLVYRFCSVSDESNDLLYQYCDAESGSTGSGVYLRLKDPDKKNWKRKIIAVYSGHQWVDVHGVQKDYNVAVRITPLKYAQICLWIHGNDANCAYG

SEQ ID NO: 10932 - protein, 855 aa, Homo sapiens
MARHLLLPLVMLVISPIPGAFQDSALSPTQEEPEDLDCGRPEPSARIVGGSNAQPGTWPWQVSLHHGGGHICGGSLIAPSWVLSAAHCFMTNGTLEPAAEWSVLLGVHSQDGPLDGAHTRAVAAIVVPANYSQVELGADLALLRLASPASLGPAVWPVCLPRASHRFVHGTACWATGWGDVQEADPLPLPWVLQEVELRLLGEATCQCLYSQPGPFNLTLQILPGMLCAGYPEGRRDTCQGDSGGPLVCEEGGRWFQAGITSFGFGCGRRNRPGVFTAVATYEAWIREQVMGSEPGPAFPTQPQKTQSDPQEPREENCTIALPECGKAPRPGAWPWEAQVMVPGSRPCHGALVSESWVLAPASCFLDPNSSDSPPRDLDAWRVLLPSRPRAERVARLVQHENASWDNASDLALLQLRTPVNLSAASRPVCLPHPEHYFLPGSRCRLARWGRGEPALGPGALLEAELLGGWWCHCLYGRQGAAVPLPGDPPHALCPAYQEKEEVGSCWNDSRWSLLCQEEGTWFLAGIRDFPSGCLRPRAFFPLQTHGPWISHVTRGAYLEDQLAWDWGPDGEETETQTCPPHTEHGACGLRLEAAPVGVLWPWLAEVHVAGDRVCTGILLAPGWVLAATHCVLRPGSTTVPYIEVYLGRAGASSLPQGHQVSRLVISIRLPQHLGLRPPLALLELSSRVEPSPSALPICLHPAGIPPGASCWVLGWKEPQDRVPVAAAVSILTQRICDCLYQGILPPGTLCVLYAEGQENRCEMTSAPPLLCQMTEGSWILVGMAVQGSRELFAAIGPEEAWISQTVGEANFLPPSGSPHWPTGGSNLCPPELAKASGSPHAVYFLLLLTLLIQS

SEQ ID NO: 10933 - protein, 752 aa, Homo sapiens
MARHLLLPLVMLVISPIPGAFQDSALSPTQEEPEDLDCGRPEPSARIVGGSNAQPGTWPWQVSLHHGGGHICGGSLIAPSWVLSAAHCFMTNGTLEPAAEWSVLLGVHSQDGPLDGAHTRAVAAIVVPANYSQVELGADLALLRLASPASLGPAVWPVCLPRASHRFVHGTACWATGWGDVQEADPLPLPWVLQEVELRLLGEATCQCLYSQPGPFNLTLQILPGMLCAGYPEGRRDTCQGDSGGPLVCEEGGRWFQAGITSFGFGCGRRNRPGVFTAVATYEAWIREQVMGSEPGPAFPTQPQKTQSDPQEPREENCTIALPECGKAPRPGAWPWEAQVMVPGSRPCHGALVSESWVLAPASCFLDPNSSDSPPRDLDAWRVLLPSRPRAERVARLVQHENASWDNASDLALLQLRTPVNLSAASRPVCLPHPEHYFLPGSRCRLARWGRGEPALGPGALLEAELLGGWWCHCLYGRQGAAVPLPGDPPHALCPAYQEKEEVGSCWNDSRWSLLCQEEGTWFLAGIRDFPSGCLRPRAFFPLQTHGPWISHVTRGAYLEDQLAWDWGPDGEETETQTCPPHTEHGACGLRLEAAPVGVLWPWLAEVHVAGDRVCTGILLAPGWVLAATHCVLRPGSTTVPYIEVYLGRAGASSLPQGHQMTSAPPLLCQMTEGSWILVGMAVQGSRELFAAIGPEEAWISQTVGEANFLPPSGSPHWPTGGSNLCPPELAKASGSPHAVYFLLLLTLLIQS

SEQ ID NO: 10934 - protein, 850 aa, Homo sapiens
MARHLLLPLVMLVISPIPGAFQDSALSPTQEEPEDLDCGRPEPSARIVGGSNAQPGTWPWQVSLHHGGGHICGGSLIAPSWVLSAAHCFMTNGTLEPAAEWSVLLGVHSQDGPLDGAHTRAVAAIVVPANYSQVELGADLALLRLASPASLGPAVWPVCLPRASHRFVHGTACWATGWGDVQEADPLPLPWVLQEVELRLLGEATCQCLYSQPGPFNLTLQILPGMLCAGYPEGRRDTCQGDSGGPLVCEEGGRWFQAGITSFGFGCGRRNRPGVFTAVATYEAWIREQVMGSEPGPAFPTQPQKTQSDPQEPREENCTIALPECGKAPRPGAWPWEAQVMVPGSRPCHGALVSESWVLAPASCFLDPNSSDSPPRDLDAWRVLLPSRPRAERVARLVQHENASWDNASDLALLQLRTPVNLSAASRPVCLPHPEHYFLPGSRCRLARWGRGEPALGPGALLEAELLGGWWCHCLYGRQGAAVPLPGDPPHALCPAYQEKEENDSRWSLLCQEEGTWFLAGIRDFPSGCLRPRAFFPLQTHGPWISHVTRGAYLEDQLAWDWGPDGEETETQTCPPHTEHGACGLRLEAAPVGVLWPWLAEVHVAGDRVCTGILLAPGWVLAATHCVLRPGSTTVPYIEVYLGRAGASSLPQGHQVSRLVISIRLPQHLGLRPPLALLELSSRVEPSPSALPICLHPAGIPPGASCWVLGWKEPQDRVPVAAAVSILTQRICDCLYQGILPPGTLCVLYAEGQENRCEMTSAPPLLCQMTEGSWILVGMAVQGSRELFAAIGPEEAWISQTVGEANFLPPSGSPHWPTGGSNLCPPELAKASGSPHAVYFLLLLTLLIQS

SEQ ID NO: 10935 - protein, 28 aa, Homo sapiens
  VARIANT 1: note = misc_feature - Xaa can be any naturally occurring amino acid
XIEVYLGRAGASSLPQGHQSLWLLLSPS

SEQ ID NO: 10936 - protein, 65 aa, Homo sapiens
MKYVFYLGVLAERRPCSLFGVPQVSLQPLCGRPHQTQLGAGPSSLLFTKSESDAGKFQEQSQRRY

SEQ ID NO: 10937 - protein, 68 aa, Homo sapiens
MKYVFYLGVLAGTFFFADSSVQKEDPAPYLVYLKSHFNPCVGVLIKPSWVLAPAHCYLPMNAFYHLKI

SEQ ID NO: 10938 - protein, 235 aa, Homo sapiens
MKYVFYLGVLAGTFFFADSSVQKEDPAPYLVYLKSHFNPCVGVLIKPSWVLAPAHCYLPNLKVMLGNFKSRVRDGTEQTINPIQIVRYWNYSHSAPQDDLMLIKLAKPAMLNPKVQPLTLATTNVRPGTVCLLSGLDWSQENSGRHPDLRQNLEAPVMSDRECQKTEQGKSHRNSLCVKFVKVFSRIFGEVAVATVICKDKLQGIEVGHFMGGDVGIYTNVYKYVSWIENTAKDK

SEQ ID NO: 10939 - protein, 235 aa, Homo sapiens; identical to SEQ ID NO: 10938

SEQ ID NO: 10940 - protein, 326 aa, Homo sapiens
MAAPASVMGPLGPSALGLLLLLLVVAPPRVAALVHRQPENQGISLTGSVACGRPSMEGKILGGVPAPERKWPWQVSVHYAGLHVCGGSILNEYWVLSAAHCFHRDKNIKIYDMYVGLVNLRVAGNHTQWYEVNRVILHPTYEMYHPIGGDVALVQLKTRIVFSESVLPVCLATPEVNLTSANCWATGWGLVSKQGETSDELQEMQLPLILEPWCHLLYGHMSYIMPDMLCAGDILNAKTVCEGDSGGPLVCEFNRSWLQIGIVSWGRGCSNPLYPGVYASVSYFSKWICDNIEITPTPAQPAPALSPALGPTLSVLMAMLAGWSVL

SEQ ID NO: 10941 - protein, 100 aa, Homo sapiens
MASFLAVVGAPGGVNSCVFDRFHYSVKMGDRSVYNENTSVVVSVQRAFVHPKFSTVTTIRNDLALLQLQHPVNFTSNIQPICIPQENFQVEGRFWGPLGL

SEQ ID NO: 10942 - protein, 293 aa, Homo sapiens
MSSGGGSRGLLAWLLLLQPWPGQNWAGMAAPRLPSPLLSEEGGENPEASPAPGPEAGPPLNLFTSFPGDSLLCGRTPLRIVGGVDAEEGRWPWQVSVRTKGRHICGGTLVTATWVLTAGHCISSRFHYSVKMGDRSVYNENTSVVVSVQRAFVHPKFSTVTTIRNDLALLQLQHPVNFTSNIQPICIPQENFQVEGRTRCWVTGWGKTPEREKLASEILQDVDQYIMCYEECNKIIQKALSSTKDVIIKGMVCGYKEQGKDSCQGDSGGRLACEYNDTWVQVGIVSWGIGCGR

SEQ ID NO: 10943 - protein, 185 aa, Homo sapiens
MGPAGCAFTLLLLLGISDRDYHSALQEAEVPIIDRQACEQLYNPIGIFLPALEPVIKEDKICAGDTQNMKDSCKGDSGGPLSCHIDGVWIQTGVVSWGLECGKSLPGVYTNVIYYQKWINATISRANNLDFSDFLFPIVLLSLALLRPSCAFGPNTIHRVGTVAEAVACIQGWEENAWRFSPRGR

SEQ ID NO: 10944 - protein, 328 aa, Homo sapiens
MGPAGCAFTLLLLLGISVCGQPVYSSRVVGGQDAAAGRWPWQVSLHFDHNFICGGSLVSERLILTAAHCIQPTWTTFSYTVWLGSITVGDSRKRVKYYVSKIVIHPKYQDTTADVALLKLSSQVTFTSAILPICLPSVTKQLAIPPFCWVTGWGKVKESSDRDYHSALQEAEVPIIDRQACEQLYNPIGIFLPALEPVIKEDKICAGDTQNMKDSCKGDSGGPLSCHIDGVWIQTGVVSWGLECGKSLPGVYTNVIYYQKWINATISRANNLDFSDFLFPIVLLSLALLRPSCAFGPNTIHRVGTVAEAVACIQGWEENAWRFSPRGR

SEQ ID NO: 10945 - protein, 385 aa, Homo sapiens
MGRWCQTVARGQRPRTSAPSRAGALLLLLLLLRSAGCWGAGEAPGALSTADPADQSVQCVPKATCPSSRPRLLWQTPTTQTLPSTTMETQFPVSEGKVDPYRSCGFSYEQDPTLRDPEAVARRWPWMVSVRANGTHICAGTIIASQWVLTVAHCLIWRDVIYSVRVGSPWIDQMTQTASDVPVLQVIMHSRYRAQRFWSWVGQANDIGLLKLKQELKYSNYVRPICLPGTDYVLKDHSRCTVTGWGLSKADGMWPQFRTIQEKEVIILNNKECDNFYHNFTKIPTLVQIIKSQMMCAEDTHREKFCYELTGEPLVCSMEGTWYLVGLVSWGAGCQKSEAPPIYLQVSSYQHWIWDCLNGQALALPAPSRTLLLALPLPLSLLAAL

SEQ ID NO: 10946 - protein, 553 aa, Homo sapiens
MKWCWGPVLLIAGATVLMEGLQAAQRACGQRGPGPPKPQEGNTVPGEWPWQASVRRQGAHICSGSLVADTWVLTAAHCFEKAAATELNSWSVVLGSLQREGLSPGAEEVGVAALQLPRAYNHYSQGSDLALLQLAHPTTHTPLCLPQPAHRFPFGASCWATGWDQDTSDAPGTLRNLRLRLISRPTCNCIYNQLHQRHLSNPARPGMLCGGPQPGVQGPCQGDSGGPVLCLEPDGHWVQAGIISFASSCAQEDAPVLLTNTAAHSSWLQARVQGAAFLAQSPETPEMSDEDSCVACGSLRTAGPQAGAPSPWPWEARLMHQGQLACGGALVSEEAVLTAAHCFIGRQAPEEWSVGLGTRPEEWGLKQLILHGAYTHPEGGYDMALLLLAQPVTLGASLRPLCLPYPDHHLPDGERGWVLGRARPGAGISSLQTVPVTLLGPRACSRLHAAPGGDGSPILPGMVCTSAVGELPSCEGLSGAPLVHEVRGTWFLAGLHSFGDACQGPARPAVFTALPAYEDWVSSLDWQVYFAEEPEPEAEPGSCLANISQPTSC

SEQ ID NO: 10947 - protein, 203 aa, Homo sapiens
MDPSKIAHTEYPVNTIIIHEDFDNNSMSNNIALLKTDTAMHFGNLVQSICFLGRMLHTPPVLQNCWVSGWNPTSATGNHMTMSVLRKIFVKDLDMCPLYKLQKTECGSHTKEETKTACLGDPGSPMMCQLQQFDLWVLRGVLNFGGETCPGLFLYTKVEDYSKWITSKAERAGPPLSSLHHWEKLISFSHHGPNATMTQKTYS

SEQ ID NO: 10948 - protein, 296 aa, Homo sapiens
MDPSKIAHTEYPVNTIIIHEDFDNNSMSNNIALLKTDTAMHFGNLVQSICFLGRMLHTPPVLQNCWVSGWNPTSATGNHMTMSVLRKIFVKDLDMCPLYKLQKTECGSHTKEETKTACLGDPGSPMMCQLQQFDLWVLRGVLNFGGETCPGLFLYTKVEDYSKWITSKAERAGPPLSSLHHWEKLISFSHHGPNATMTQKTYSDSELGHVGSYLQGQRRTITHSRLGNSSRDSLDVREKDVKESGRSPEASVQPLYYDYYGGEVGEGRIFAGQNRLYQPEEIILVSFVLVFFCSSI

SEQ ID NO: 10949 - protein, 186 aa, Homo sapiens
MVSAAGLSGDGKMRGVLLVLLGLLYSSTSCGVQKASVFYGPDPKEGLVSSMEFPWVVSLQDSQYTHLAFGCILSEFWVLSIASAIQNRKDIVVIVGISNMDPSKIAHTEYPVNTIIIHEDFDNNSMSNNIALLKTDTAMHFGNLVQSICFLGRMLHTPPVLQNCWVSGWNPTSATGNHMTMSVLRK

SEQ ID NO: 10950 - protein, 395 aa, Homo sapiens
MVSAAGLSGDGKMRGVLLVLLGLLYSSTSCGVQKASVFYGPDPKEGLVSSMEFPWVVSLQDSQYTHLAFGCILSEFWVLSIASAIQNRKDIVVIVGISNMDPSKIAHTEYPVNTIIIHEDFDNNSMSNNIALLKTDTAMHFGNLVQSICFLGRMLHTPPVLQNCWVSGWNPTSATGNHMTMSVLRKIFVKDLDMCPLYKLQKTECGSHTKEETKTACLGDPGSPMMCQLQQFDLWVLRGVLNFGGETCPGLFLYTKVEDYSKWITSKAERAGPPLSSLHHWEKLISFSHHGPNATMTQKTYSDSELGHVGSYLQGQRRTITHSRLGNSSRDSLDVREKDVKESGRSPEASVQPLYYDYYGGEVGEGRIFAGQNRLYQPEEIILVSFVLVFFCSSI

SEQ ID NO: 10951 - protein, 395 aa, Homo sapiens; identical to SEQ ID NO: 10950

SEQ ID NO: 10952 - protein, 352 aa, Homo sapiens
MLLFSVLLLLSLVTGTQLGPRTPLPEAGVAILGRARGAHRPQPPHPPSPVSECGDRSIFEGRTRYSRITGGMEAEVGEFPWQVSIQARSEPFCGGSILNKWWILTAAHCLYSEELFPEELSVVLGTNDLTSPSMEIKEVASIILHKDFKRANMDNDIALLLLASPIKLDDLKVPICLPTQPGPATWRECWVAGWGQTNAADKNSVKTDLMKAPMVIMDWEECSKMFPKLTKNMLCAGYKNESYDACKGDSGGPLVCTPEPGEKWYQVGIISWGKSCGEKNTPGIYTSLVNYNLWIEKVTQLEGRPFNAEKRRTSVKQKPMGSPVSGVPEPGSPRSWLLLCPLSHVLFRAILY

SEQ ID NO: 10953 - protein, 276 aa, Homo sapiens
MLLFSVLLLLSLVTGTQLGPRTPLPEAGVAILGRARGAHRPQPPHPPSPVSECGDRSIFEGRTRYSRITGGMEAEVGEFPWQVSIQARSEPFCGGSILNKWWILTAAHCLYSEELFPEELSVVLGTNDLTSPSMEIKEVASIILHKDFKRANMDNDIALLLLASPIKLDDLKVPICLPTQPGPATWRECWVAGWGQTNAADKNSVKTDLMKAPMVIMDWEECSKMFPKLTKNMLCAGYKNESYDACKQSYFPTLQRMNTGSSQTKPPGSHTFHLQN

SEQ ID NO: 10954 - protein, 182 aa, Homo sapiens
  VARIANT 1: note = misc_feature - Xaa can be any naturally occurring amino acid
XWKPAPPSPVPSSHWMLTKCFPFSFPLSFFPPECGDRSIFEGRTRYSRITGGMEAEVGEFPWQVSIQARSEPFCGGSILNKWWILTAAHCLYSEELFPEELSVVLGTNDLTSPSMEIKEVASIILHKDFKRANMDNDIALLLLASPIKLDDLKVPICLPTQPGPATWRECWVAGWGQTNAGM

SEQ ID NO: 10955 - protein, 604 aa, Homo sapiens
MLLAVLLLLPLPSSWFAHGHPLYTRLPPSALQVLSAQGTQALQAAQRSAQWAINRVAMEIQHRSHECRGSGRPRPQALLQDPPEPGPCGERRPSTANVTRAHGRIVGGSAAPPGAWPWLVRLQLGGQPLCGGVLVAASWVLTAAHCFVGAPNELLWTVTLAEGSRGEQAEEVPVNRILPHPKFDPRTFHNDLALVQLWTPVSPGGSARPVCLPQEPQEPPAGTACAIAGWGALFEDGPEAEAVREARVPLLSTDTCRRALGPGLRPSTMLCAGYLAGGVDSCQGDSGGPLTCSEPGPRPREVLFGVTSWGDGCGEPGKPGVYTRVAVFKDWLQEQMSAASSSREPSCRELLAWDPPQELQADAARLCAFYARLCPGSQGACARLAHQQCLQRRRRCELRSLAHTLLGLLRNAQELLGPRPGLRRLAPALALPAPALRESPLHPARELRLHSGSRAAGTRFPKRRPEPRGEANGCPGLEPLRQKLAALQGAHAWILQVPSEHLAMNFHEVLADLGSKTLTGLFRAWVRAGLGGRHVAFSGLVGLEPATLARSLPRLLVQALQAFRVAALAEGEPEGPWMDVGQGPGLERKGHHPLNPQVPPARQP

SEQ ID NO: 10956 - protein, 603 aa, Homo sapiens
MLLAVLLLLPLPSSWFAHGHPLYTRLPPSALQVLSAQGTQALQAAQRSAQWAINRVAMEIQHRSHECRGSGRPRPQALLQDPPEPGPCGERRPSTANVTRAHGRIVGGSAAPPGAWPWLVRLQLGGQPLCGGVLVAASWVLTAAHCFVGAPNELLWTVTLAEGSRGEQAEEVPVNRILPHPKFDPRTFHNDLALVQLWTPVSPGGSARPVCLPQEPQEPPAGTACAIAGWGALFEDGPEAEAVREARVPLLSTDTCRRALGPGLRPSTMLCAGYLAGGVDSCQGDSGGPLTCSEPGPRPREVLFGVTSWGDGCGEPGKPGVYTRVAVFKDWLQEQMSASSSREPSCRELLAWDPPQELQADAARLCAFYARLCPGSQGACARLAHQQCLQRRRRCELRSLAHTLLGLLRNAQELLGPRPGLRRLAPALALPAPALRESPLHPARELRLHSGSRAAGTRFPKRRPEPRGEANGCPGLEPLRQKLAALQGAHAWILQVPSEHLAMNFHEVLADLGSKTLTGLFRAWVRAGLGGRHVAFSGLVGLEPATLARSLPRLLVQALQAFRVAALAEGEPEGPWMDVGQGPGLERKGHHPLNPQVPPARQP

SEQ ID NO: 10957 - protein, 283 aa, Homo sapiens
MGLGLRGWGRPLLTVATALMLPVKPPAGSWGAQIIGGHEVTPHSRPYMASVRFGGQHHCGGFLLRARWVVSAAHCFSHRDLRTGLVVLGAHVLSTAEPTQQVFGIDALTTHPDYHPMTHANDICLLRLNGSAVLGPAVGLLRPPGRRARPPTAGTRCRVAGWGFVSDFEELPPGLMEAKVRVLDPDVCNSSWKGHLTLTMLCTRSGDSHRRGFCSADSGGPLVCRNRAHGLVSFSGLWCGDPKTPDVYTQVSAFVAWIWDVVRRSSPQPGPLPGTTRPPGEAA

SEQ ID NO: 10958 - protein, 282 aa, Homo sapiens
MGLGLRGWGRPLLTVATALMLPVKPPGSWGAQIIGGHEVTPHSRPYMASVRFGGQHHCGGFLLRARWVVSAAHCFSHRDLRTGLVVLGAHVLSTAEPTQQVFGIDALTTHPDYHPMTHANDICLLRLNGSAVLGPAVGLLRPPGRRARPPTAGTRCRVAGWGFVSDFEELPPGLMEAKVRVLDPDVCNSSWKGHLTLTMLCTRSGDSHRRGFCSADSGGPLVCRNRAHGLVSFSGLWCGDPKTPDVYTQVSAFVAWIWDVVRRSSPQPGPLPGTTRPPGEAA

SEQ ID NO: 10959 - protein, 241 aa, Homo sapiens
MKFILLWALLNLTVALAFNPDYTVSSTPPYLVYLKSDYLPCAGVLIHPLWVITAAHCNLPKLRVILGVTIPADSNEKHLQVIGYEKMIHHPHFSVTSIDHDIMLIKLKTEAELNDYVKLANLPYQTISENTMCSVSTWSYNVCDIYKEPDSLQTVNISVISKPQCRDAYKTYNITENMLCVGIVPGRRQPCKEVSAAPAICNGMLQGILSFADGCVLRADVGIYAKIFYYIPWIENVIQNN

SEQ ID NO: 10960 - protein, 241 aa, Homo sapiens; identical to SEQ ID NO: 10959

SEQ ID NO: 10961 - protein, 108 aa, Homo sapiens [sequence omitted]

SEQ ID NO: 10962 - protein, 343 aa, Homo sapiens
MAQKGVLGPGQLGAVAILLYLGLLRSGTGAEGAEAPCGVAPQARITGGSSAVAGQWPWQVSITYEGVHVCGGSLVSEQWVLSAAHCFPSEHHKEAYEVKLGAHQLDSYSEDAKVSTLKDIIPHPSYLQEGSQGDIALLQLSRPITFSRYIRPICLPAANASFPNGLHCTVTGWGHVAPSVSLLTPKPLQQLEVPLISRETCNCLYNIDAKPEEPHFVQEDMVCAGYVEGGKDACQGDSGGPLSCPVEGLWYLTGIVSWGDACGARNRPGVYTLASSYASWIQSKVTELQPRVVPQTQESQPDSNLCGSHLAFSSAPAQGLLRPILFLPLGLALGLLSPWLSEH

SEQ ID NO: 10963 - protein, 195 aa, Homo sapiens
MAQKGVLGPGQLGAVAILLYLGLLRSGTGAEGAEAPCGVAPQARITGGSSAVAGQWPWQVSITYEGVHVCGGSLVSEQWVLSAAHCFPSYLQEGSQGDIALLQLSRPITFSRYIRPICLPAANASFPNGLHCTVTGWGHVAPSVSLLTPKPLQQLEVPLISRETCNCLYNIDAKPEEPHFVQEDMVCAGYVEGGK

SEQ ID NO: 10964 - protein, 289 aa, Homo sapiens
MAQKGVLGPGQLGAVAILLYLGLLRSGTGAEGAEAPCGVAPQARITGGSSAVAGQWPWQVSTLKDIIPHPSYLQEGSQGDIALLQLSRPITFSRYIRPICLPAANASFPNGLHCTVTGWGHVAPSVSLLTPKPLQQLEVPLISRETCNCLYNIDAKPEEPHFVQEDMVCAGYVEGGKDACQGDSGGPLSCPVEGLWYLTGIVSWGDACGARNRPGVYTLASSYASWIQSKVTELQPRVVPQTQESQPDSNLCGSHLAFSSAPAQGLLRPILFLPLGLALGLLSPWLSEH

SEQ ID NO: 10965 - protein, 218 aa, Homo sapiens
EYQVVIGNDTTHYIIDDLEPASNYTFYIVAYMPMGASQMSDHVTQNTLEDVPLRPPEISLTSRSPTDILISWLPIPAKYRRGQVVLYRLSFRLSTENSIQVLELPGTTHEYLLEGLKPDSVYLVRITAATRVGLGESSVWTSHRTPKATSVKAPKSPELHLEPLNCTTISVRWQQDVEDTAAIQGYKLYYKEEGQQENGPIFLDTKDLLYTLSGLARI

SEQ ID NO: 10966 - protein, 137 aa, Homo sapiens
MAPPLRPLARLRPPGMLLRALLLLLLLSPLPGVWCFSELSFVKEPQDVTVTRKDPVVLDCQAHGEVPIKVTWLKNGAKMSENKRIEVLSNGSLYISEVEGRRGEQSDEGFYQCLAMNKYGAILSQKAHLALSRIGST

SEQ ID NO: 10967 - protein, 1150 aa, Homo sapiens
MAPPLRPLARLRPPGMLLRALLLLLLLSPLPGVWCFSELSFVKEPQDVTVTRKDPVVLDCQAHGEVPIKVTWLKNGAKMSENKRIEVLSNGSLYISEVEGRRGEQSDEGFYQCLAMNKYGAILSQKAHLALSTISAFEVQPISTEVHEGGVARFACKISSHPPAVITWEFNRTTLPMTMDRITALPTGVLQIYDVSQRDSGNYRCIAATVAHRRKSMEASLTVIPAKESKSFHTPTIIAGPQNITTSLHQTVVLECMATGNPKPIISWSRLDHKSIDVFNTRVLGNGNLMISDVRLQHAGVYVCRATTPGTRNFTVAMATLTVLAPPSFVEWPESLTRPRAGTARFVCQAEGIPSPKMSWLKNGRKIHSNGRIKMYNSKLVINQIIPEDDAIYQCMAENSQGSILSRARLTVVMSEDRPSAPYNVHAETMSSSAILLAWERPLYNSDKVIAYSVHYMKAEGLNNEEYQVVIGNDTTHYIIDDLEPASNYTFYIVAYMPMGASQMSDHVTQNTLEDVPLRPPEISLTSRSPTDILISWLPIPAKYRRGQVVLYRLSFRLSTENSIQVLELPGTTHEYLLEGLKPDSVYLVRITAATRVGLGESSVWTSHRTPKATSVKAPKSPELHLEPLNCTTISVRWQQDVEDTAAIQGYKLYYKEEGQQENGPIFLDTKDLLYTLSGLDPRRKYHVRLLAYNNIDDGYQADQTVSTPGCVSVRDRMVPPPPPPHHLYAKANTSSSIFLHWRRPAFTAAQIINYTIRCNPVGLQNASLVLYLQTSETHMLVQGLEPNTKYEFAVRLHVDQLSSPWSPVVYHSTLPEAPAGPPVGVKVTLIEDDTALVSWKPPDGPETVVTRYTILYASRKAWIAGEWQVLHREGAITMALLENLVAGNVYIVKISASNEVGEGPFSNSVELAVLPKETSESNQRPKRLDSADAKVYSGYYHLDQKSMTGIAVGVGIALTCILICVLILIYRSKARKSSASKTAQNGTQQLPRTSASLASGNEVGKNLEGAVGNEESLMPMIMPNSFIDAKGGTDLIINSYGPIIKNNSKKKWFFFQDSKKIQVEQPQRRFTPAVCFYQPGTTVLISDEDSPSSPGQTTSFSRPFGVAADTEHSANSEGSHETGDSGRFSHESNDEIHLSSVISTTPPNL

SEQ ID NO: 10968 - protein, 22 aa, Homo sapiens
MSENKRIEVLSNGSLYISEVEG

SEQ ID NO: 10969 - protein, 256 aa, Homo sapiens
MAHRPPSPALASVLLALLLSGAARAAEIVGGHEAQPHSRPYMASLQMRGNPGSHFCGGTLIHPSFVLTAAHCLRDIPQRLVNVVLGAHNVRTQEPTQQHFSVAQVFLNNYDAENKLNDVLLIQLSSPANLSASVATVQLPQQDQPVPHGTQCLAMGWGRVGAHDPPAQVLQELNVTVVTFFCRPHNICTFVPRRKAGICFGDSGGPLICDGIIQGIDSFVIWGCATRLFPDFFTRVALYVDWIRSTLRRVEAKGRP

SEQ ID NO: 10970 - protein, 215 aa, Homo sapiens
MASLQMRGNPGSHFCGGTLIHPSFVLTAAHCLRDIPQRLVNVVLGAHNVRTQEPTQQHFSVAQVFLNNYDAENKLNDVLLIQLSSPANLSASVATVQLPQQDQPVPHGTQCLAMGWGRVGAHDPPAQVLQELNVTVVTFFCRPHNICTFVPRRKAGICFGDSGGPLICDGIIQGIDSFVIWGCATRLFPDFFTRVALYVDWIRSTLRRVEAKGRP

SEQ ID NO: 10971 - protein, 527 aa, Homo sapiens [sequence omitted]

SEQ ID NO: 10972 - protein, 524 aa, Homo sapiens
MYALFLLASLLGAALAGPVLGLKECTRGSAVWCQNVKTASDCGAVKHCLQTVWNKPTVKSLPCDICKDVVTAAGDMLKDNATEEEILVYLEKTCDWLPKPNMSASCKEIVDSYLPVILDIIKGEMSRPGEVCSALNLCESLQKHLAELNHQKQLESNKIPELDMTEVVAPFMANIPLLLYPQDGPRSKPQPKDNGDVCQDCIQMVTDIQTAVRTNSTFVQALVEHVKEECDRLGPGMADICKNYISQYSEIAIQMMMHMQPKEICALVGFCDEVKEMPMQTLVPAKVASKNVIPALELVEPIKKHEVPAKSDVYCEVCEFLVKEVTKLIDNNKTEKEILDAFDKMCSKLPKSLSEECQEVVDTYGSSILSILLEEVSPELVCSMLHLCSGTRLPALTVHVTQPKDGGFCEVCKKLVGYLDRNLEKNSTKQEILAALEKGCSFLPDPYQKQCDQFVAEYEPVLIEILVEVMDPSFVCLKIGACPSAHKPLLGTEKCIWGPSYWCQNTETAAQCNAVEHCKRHVWN

SEQ ID NO: 10973 - protein, 240 aa, Homo sapiens
MYALFLLASLLGAALAGPVLGLKECTRGSAVWCQNVKTASDCGAVKHCLQTVWNKPTVKSLPCDICKDVVTAAGDMLKDNATEEEILVYLEVSPELVCSMLHLCSGTRLPALTVHVTQPKDGGFCEVCKKLVGYLDRNLEKNSTKQEILAALEKGCSFLPDPYQKQCDQFVAEYEPVLIEILVEVMDPSFVCLKIGACPSAHKPLLGTEKCIWGPSYWCQNTETAAQCNAVEHCKRHVWN

SEQ ID NO: 10974 - protein, 167 aa, Homo sapiens
  VARIANT 1: note = misc_feature - Xaa can be any naturally occurring amino acid
XCIQMVTDIQTAVRTNSTFVQALVEHVKEECDRLGPGMADICKNYISQYSEIAIQMMMHMQDQQPKEICALVGFCDEVKEMPMQTLVPAKVASKNVIPALELVEPIKKHEVPAKSDVYCEVCEFLVKEVTKLIDNNKTEKEILDAFDKMCSKLPKSLSEECQEVVDT

SEQ ID NO: 10975 - protein, 521 aa, Homo sapiens
MLCALLLLPSLLGATRASPTSGPQECAKGSTVWCQDLQTAARCGAVGYCQGAVWNKPTAKSLPCDVCQDIAAAAGNGLNPDATESDILALVMKTCEWLPSQESSAGCKWMVDAHSSAILSMLRGAPDSAPAQVCTALSLCEPLQRHLATLRPLSKEDTFEAVAPFMANGPLTFHPRQAPEGALCQDCVRQVSRLQEAVRSNLTLADLNIQEQCESLGPGLAVLCKNYLFQFFVPADQALRLLPPQELCRKGGFCEELGAPARLTQVVAMDGVPSLELGLPRKQSEMQMKAGVTCEVCMNVVQKLDHWLMSNSSELMITHALERVCSVMPASITKECIILVDTYSPSLVQLVAKITPEKVCKFIRLCGNRRRARAVHDAYAIVPSPEWDAENQGSFCNGCKRLLTVSSHNLESKSTKRDILVAFKGGCSILPLPYMIQCKHFVTQYEPVLIESLKDMMDPVAVCKKVGACHGPRTPLLGTDQCALGPSFWCRSQEAAKLCNAVQHCQKHVWKEMHLHAGEHA

SEQ ID NO: 10976 - protein, 426 aa, Homo sapiens
MGTLSAPPCTQRIKWKGLLLTASLLNFWNLPTTAQVTIEAEPTKVSEGKDVLLLVHNLPQNLTGYIWYKGQMRDLYHYITSYVVDGEIIIYGPAYSGRETAYSNASLLIQNVTREDAGSYTLHIIKGDDGTRGVTGRFTFTLHLETPKPSISSSNLNPRETMEAVSLTCDPETPDASYLWWMNGQSLPMTHSLKLSETNRTLFLLGVTKYTAGPYECEIRNPVSASRSDPVTLNLLPKLPKPYITINNLNPRENKDVLNFTCEPKSENYTYIWWLNGQSLPVSPRVKRPIENRILILPSVTRNETGPYQCEIRDRYGGIRSDPVTLNVLYGPDLPRIYPSFTYYRSGEVLYLSCSADSNPPAQYSWTINEKFQLPGQKLFIRHITTKHSGLYVCSVRNSATGKESSKSMTVEVSGKWIPASLAIGF

SEQ ID NO: 10977 - protein, 428 aa, Homo sapiens
MGTLSAPPCTQRIKWKGLLLTASLLNFWNLPTTAQVTIEAEPTKVSEGKDVLLLVHNLPQNLTGYIWYKGQMRDLYHYITSYVVDGEIIIYGPAYSGRETAYSNASLLIQNVTREDAGSYTLHIIKGDDGTRGVTGRFTFTLHLETPKPSISSSNLNPRETMEAVSLTCDPETPDASYLWWMNGQSLPMTHSLKLSETNRTLFLLGVTKYTAGPYECEIRNPVSASRSDPVTLNLLPKLPKPYITINNLNPRENKDVLNFTCEPKSENYTYIWWLNGQSLPVSPRVKRPIENRILILPSVTRNETGPYQCEIRDRYGGIRSDPVTLNVLYGPDLPRIYPSFTYYRSGEVLYLSCSADSNPPAQYSWTINEKFQLPGQKLFIRHITTKHSGLYVCSVRNSATGKESSKSMTVEVSAYSSSINYTSGNRN

SEQ ID NO: 10978 - protein, 419 aa, Homo sapiens
MGTLSAPPCTQRIKWKGLLLTASLLNFWNLPTTAQVTIEAEPTKVSEGKDVLLLVHNLPQNLTGYIWYKGQMRDLYHYITSYVVDGEIIIYGPAYSGRETAYSNASLLIQNVTREDAGSYTLHIIKGDDGTRGVTGRFTFTLHLETPKPSISSSNLNPRETMEAVSLTCDPETPDASYLWWMNGQSLPMTHSLKLSETNRTLFLLGVTKYTAGPYECEIRNPVSASRSDPVTLNLLPKLPKPYITINNLNPRENKDVLNFTCEPKSENYTYIWWLNGQSLPVSPRVKRPIENRILILPSVTRNETGPYQCEIRDRYGGIRSDPVTLNVLYGPDLPRIYPSFTYYRSGEVLYLSCSADSNPPAQYSWTINEKFQLPGQKLFIRHITTKHSGLYVCSVRNSATGKESSKSMTVEVSDWTVP

SEQ ID NO: 10979 - protein, 417 aa, Homo sapiens
MGTLSAPPCTQRIKWKGLLLTASLLNFWNLPTTAQVTIEAEPTKVSEGKDVLLLVHNLPQNLTGYIWYKGQMRDLYHYITSYVVDGEIIIYGPAYSGRETAYSNASLLIQNVTREDAGSYTLHIIKGDDGTRGVTGRFTFTLHLETPKPSISSSNLNPRETMEAVSLTCDPETPDASYLWWMNGQSLPMTHSLKLSETNRTLFLLGVTKYTAGPYECEIRNPVSASRSDPVTLNLLPKLPKPYITINNLNPRENKDVLNFTCEPKSENYTYIWWLNGQSLPVSPRVKRPIENRILILPSVTRNETGPYQCEIRDRYGGIRSDPVTLNVLYGPDLPRIYPSFTYYRSGEVLYLSCSADSNPPAQYSWTINEKFQLPGQKLFIRHITTKHSGLYVCSVRNSATGKESSKSMTVEVSEAL

SEQ ID NO: 10980 - protein, 326 aa, Homo sapiens
MGTLSAPPCTQRIKWKGLLLTASLLNFWNLPTTAQVTIEAEPTKVSEGKDVLLLVHNLPQNLTGYIWYKGQMRDLYHYITSYVVDGEIIIYGPAYSGRETAYSNASLLIQNVTREDAGSYTLHIIKGDDGTRGVTGRFTFTLHPKLPKPYITINNLNPRENKDVLNFTCEPKSENYTYIWWLNGQSLPVSPRVKRPIENRILILPSVTRNETGPYQCEIRDRYGGIRSDPVTLNVLYGPDLPRIYPSFTYYRSGEVLYLSCSADSNPPAQYSWTINEKFQLPGQKLFIRHITTKHSGLYVCSVRNSATGKESSKSMTVEVSDWTVP

SEQ ID NO: 10981 - protein, 324 aa, Homo sapiens
MGTLSAPPCTQRIKWKGLLLTASLLNFWNLPTTAQVTIEAEPTKVSEGKDVLLLVHNLPQNLTGYIWYKGQMRDLYHYITSYVVDGEIIIYGPAYSGRETAYSNASLLIQNVTREDAGSYTLHIIKGDDGTRGVTGRFTFTLHPKLPKPYITINNLNPRENKDVLNFTCEPKSENYTYIWWLNGQSLPVSPRVKRPIENRILILPSVTRNETGPYQCEIRDRYGGIRSDPVTLNVLYGPDLPRIYPSFTYYRSGEVLYLSCSADSNPPAQYSWTINEKFQLPGQKLFIRHITTKHSGLYVCSVRNSATGKESSKSMTVEVSEAL

SEQ ID NO: 10982 - protein, 154 aa, Homo sapiens
MRDLYHYITSYVVDGEIIIYGPAYSGRETAYSNASLLIQNVTREDAGSYTLHIIKGDDGTRGVTGRFTFTLHLETPKPSISSSNLNPRETMEAVSLTCDPETPDASYLWWMNGQSLPMTHSLKLSETNRTLFLLGVTKYTAGPYECEIRNPVSA

SEQ ID NO: 10983 - protein, 242 aa, Homo sapiens
  VARIANT 1: note = misc_feature - Xaa can be any naturally occurring amino acid
XSYVVDGEIIIYGPAYSGRETAYSNASLLIQNVTREDAGSYTLHIIKGDDGTRGVTGRFTFTLHLETPKPSISSSNLNPRETMEAVSLTCDPETPDASYLWWMNGQSLPMTHSLKLSETNRTLFLLGVTKYTAGPYECEIRNPVSASRSDPVTLNLLHGPDLPRIYPSFTYYRSGEVLYLSCSADSNPPAQYSWTINEKFQLPGQKLFIRHITTKHSGLYVCSVRNSATGKESSKSMTVEVS

SEQ ID NO: 10984 - protein, 335 aa, Homo sapiens
MGPLSAPPCTEHIKWKGLLLTALLLNFWNLPTTAQVMIEAQPPKVSEGKDVLLLVHNLPQNLTGYIWYKGQIRDLYHYITSYVVDGQIIIYGPAYSGRETVYSNASLLIQNVTREDAGSYTLHIIKRGDGTRGVTGYFTFTLYLETPKPSISSSNLNPREAMETVILTCNPETPDASYLWWMNGQSLPMTHRMQLSETNRTLFLFGVTKYTAGPYECEIWNSGSASRSDPVTLNLLHGPDLPRIFPSVTSYYSGENLDLSCFANSNPPAQYSWTINGKFQLSGQKLFIPQITPKHNGLYACSARNSATGEESSTSLTIRVIAPPGLGTFAFNNPT

SEQ ID NO: 10985 - protein, 320 aa, Homo sapiens
MGPLSAPPCTEHIKWKGLLLTALLLNFWNLPTTAQVMIEAQPPKVSEGKDVLLLVHNLPQNLTGYIWYKGQIRDLYHYITSYVVDGQIIIYGPAYSGRETVYSNASLLIQNVTREDAGSYTLHIIKRGDGTRGVTGYFTFTLYPKLPMPYITINNLNPRENKDVLTFTCEPKSENYAYIWWLNCQSLPVSPRVKRPIENRILILPSVTRNETGPYQCEIRDRYGGIRSDSVTLNVLYGPDLPRIFPSVTSYYSGENLDLSCFANSNPPAQYSWTINGKFQLSGQKLFIPQITPKHNGLYACSARNSATGEESSTSLTIRV

SEQ ID NO: 10986 - protein, 213 aa, Homo sapiens
MGPLSAPPCTEHIKWKGLLLTVETPKPSISSSNLNPREAMETVILTCNPETPDASYLWWMNGQSLPMTHRMQLSETNRTLFLFGVTKYTAGPYECEIWNSGSASRSDPVTLNLLHGPDLPRIFPSVTSYYSGENLDLSCFANSNPPAQYSWTINGKFQLSGQKLFIPQITPKHNGLYACSARNSATGEESSTSLTIRVIAPPGLGTFAFNNPT

SEQ ID NO: 10987 - protein, 213 aa, Homo sapiens; identical to SEQ ID NO: 10986

SEQ ID NO: 10988 - protein, 126 aa, Homo sapiens
MIEAQPPKVSEGKDVLLLVHNLPQNLTGYIWYKGQIRDLYHYITSYVVDGQIIIYGPAYSGRETVYSNASLLIQNVTREDAGSYTLHIIKRGDGTRGVTGYFTFTLYRHSLDSALSLEVTGSSQSL

SEQ ID NO: 10989 - protein, 335 aa, Homo sapiens
MGPLSAPPCTEHIKWKGLLVTASLLNFWNLPTTAQVTIEAQPPKVSEGKDVLLLVHNLPQNLTGYIWYKGQIRDLYHYITSYVVDGQIIIYGPAYSGRETAYSNASLLIQNVTREDAGSYTLHIIKRGDGTRGVTGYFTFTLYLETPKPSISSSNLNPREAMETVILTCDPETPDTSYQWWMNGQSLPMTHRFQLSETNRTLFLFGVTKYTAGPYECEIRNSGSASRSDPVTLNLLHGPDLPRIHPSYTNYRSGDNLYLSCFANSNPPAQYSWTINGKFQQSGQNLFIPQITTKHSGLYVCSVRNSATGEESSTSLTVKVSASTRIGLLPLLNPT

SEQ ID NO: 10990 - protein, 117 aa, Homo sapiens
  VARIANT 1: note = misc_feature - Xaa can be any naturally occurring amino acid
XRNSGSASRSDPVTLNLLHGPDLPRIHPSYTNYRSGDNLYLSCFANSNPPAQYSWTINGKFQQSGQNLFIPQITTKHSGLYVCSVRNSATGEESSTSLTVKVSASTRIGLLPLLNPT

SEQ ID NO: 10991 - protein, 428 aa, Homo sapiens
MGPLSAPPCTQRITWKGLLLTALLLNFWNLPTTAQVTIEAEPTKVSKGKDVLLLVHNLPQNLAGYIWYKGQMKDLYHYITSYVVDGQIIIYGPAYSGRETVYSNASLLIQNVTREDAGSYTLHIVKRGDGTRGETGHFTFTLYLETPKPSISSSNLYPREDMEAVSLTCDPETPDASYLWWMNGQSLPMTHSLQLSKNKRTLFLFGVTKYTAGPYECEIRNPVSASRSDPVTLNLLPKLPKPYITINNLNPRENKDVLAFTCEPKSENYTYIWWLNGQSLPVSPRVKRPIENRILILPSVTRNETGPYQCEIQDRYGGIRSYPVTLNVLYGPDLPRIYPSFTYYHSGENLYLSCFADSNPPAEYSWTINGKFQLSGQKLFIPQITTKHSGLYACSVRNSATGMESSKSMTVKVSAPSGTGHLPGLNPL

SEQ ID NO: 10992 - protein, 475 aa, Homo sapiens
MGPLSAPPCTQRITWKGLLLTALLLNFWNLPTTAQVTIEAEPTKVSKGKDVLLLVHNLPQNLAGYIWYKGQMKDLYHYITSYVVDGQIIIYGPAYSGRETVYSNASLLIQNVTREDAGSYTLHIVKRGDGTRGETGHFTFTLYLETPKPSISSSNLYPREDMEAVSLTCDPETPDASYLWWMNGQSLPMTHSLQLSKNKRTLFLFGVTKYTAGPYECEIRNPVSASRSDPVTLNLLPKLPKPYITINNLNPRENKDVLAFTCEPKSENYTYIWWLNGQSLPVSPRVKRPIENRILILPSVTRNETGPYQCEIQDRYGGIRSYPVTLNVLYGPDLPRIYPSFTYYHSGENLYLSCFADSNPPAEYSWTINGKFQLSGQKLFIPQITTKHSGLYACSVRNSATGMESSKSMTVKVSDSCFHSSSKYLPSATVQNCFLFKEIYEKTLTRTLEYKFLITSRSYHWTKNFQNFNEQADTS

SEQ ID NO: 10993 - protein, 428 aa, Homo sapiens; identical to SEQ ID NO: 10991

SEQ ID NO: 10994 - protein, 91 aa, Homo sapiens
MKDLYHYITSYVVDGQIIIYGPAYSGRETVYSNASLLIQNVTREDAGSYTLHIVKRGDGTRGETGHFTFTLYRHSLDSALSLEVTGSSQPL

SEQ ID NO: 10995 - protein, 326 aa, Homo sapiens
MGPLSAPPCTQRITWKGVLLTASLLNFWNPPTTAQVTIEAQPPKVSEGKDVLLLVHNLPQNLAGYIWYKGQMTYLYHYITSYVVDGQRIIYGPAYSGRERVYSNASLLIQNVTQEDAGSYTLHIIKRRDGTGGVTGHFTFTLHLETPKPSISSSNLNPREAMEAVILTCDPATPAASYQWWMNGQSLPMTHRLQLSKTNRTLFIFGVTKYIAGPYECEIRNPVSASRSDPVTLNLLHGPDLPSIYPSFTYYRSGENLYLSCFAESNPRAQYSWTINGKFQLSGQKLSIPQITTKHSGLYACSVRNSATGKESSKSITVKVSDWILP

SEQ ID NO: 10996 - protein, 419 aa, Homo sapiens
MGPLSAPPCTQRITWKGVLLTASLLNFWNPPTTAQVTIEAQPPKVSEGKDVLLLVHNLPQNLAGYIWYKGQMTYLYHYITSYVVDGQRIIYGPAYSGRERVYSNASLLIQNVTQEDAGSYTLHIIKRRDGTGGVTGHFTFTLHLETPKPSISSSNLNPREAMEAVILTCDPATPAASYQWWMNGQSLPMTHRLQLSKTNRTLFIFGVTKYIAGPYECEIRNPVSASRSDPVTLNLLPKLSKPYITINNLNPRENKDVLTFTCEPKSKNYTYIWWLNGQSLPVSPRVKRPIENRILILPNVTRNETGPYQCEIRDRYGGIRSDPVTLNVLYGPDLPSIYPSFTYYRSGENLYLSCFAESNPRAQYSWTINGKFQLSGQKLSIPQITTKHSGLYACSVRNSATGKESSKSITVKVSDWILP

SEQ ID NO: 10997 - protein, 326 aa, Homo sapiens
MGPLSAPPCTQRITWKGVLLTASLLNFWNPPTTAQVTIEAQPPKVSEGKDVLLLVHNLPQNLAGYIWYKGQMTYLYHYITSYVVDGQRIIYGPAYSGRERVYSNASLLIQNVTQEDAGSYTLHIIKRRDGTGGVTGHFTFTLHPKLSKPYITINNLNPRENKDVLTFTCEPKSKNYTYIWWLNGQSLPVSPRVKRPIENRILILPNVTRNETGPYQCEIRDRYGGIRSDPVTLNVLYGPDLPSIYPSFTYYRSGENLYLSCFAESNPRAQYSWTINGKFQLSGQKLSIPQITTKHSGLYACSVRNSATGKESSKSITVKVSDWILP

SEQ ID NO: 10998 - protein, 52 aa, Homo sapiens
MGPLSAPPCTQRITWKGVLLTGCSCPKPTGPSLYLVSQSILQDPMNVKYGTQ

SEQ ID NO: 10999 - protein, 40 aa, Homo sapiens
MGPLSAPPCTQRITWKGVLLTGHSLDSALSLEVTGSSQSP

SEQ ID NO: 11000 - protein, 180 aa, Homo sapiens
MGPLSAPPCTQRITWKGVLLTVETPKPSISSSNLNPREAMEAVILTCDPATPAASYQWWMNGQSLPMTHRLQLSKTNRTLFIFGVTKYIAGPYECEIRNPVSASRSDPVTLNLLHGPDLPSIYPSFTYYRSGENLYLSCFAESNPRAQYSWTINGKFQLSGQKLSIPQITTKHSGLYACS

SEQ ID NO: 11001 - protein, 292 aa, Homo sapiens
MGPLSAPPCTQRITWKGVLLTVETPKPSISSSNLNPREAMEAVILTCDPATPAASYQWWMNGQSLPMTHRLQLSKTNRTLFIFGVTKYIAGPYECEIRNPVSASRSDPVTLNLLPKLSKPYITINNLNPRENKDVLTFTCEPKSKNYTYIWWLNGQSLPVSPRVKRPIENRILILPNVTRNETGPYQCEIRDRYGGIRSDPVTLNVLYGPDLPSIYPSFTYYRSGENLYLSCFAESNPRAQYSWTINGKFQLSGQKLSIPQITTKHSGLYACSVRNSATGKESSKSITVKVS

SEQ ID NO: 11002 - protein, 252 aa, Homo sapiens
MKHCPQQETSTIGGKKKHPEGGDPENSHIYRSLPPVPASLLNFWNPPTTAQVTIEAQPPKVSEGKDVLLLVHNLPQNLAGYIWYKGQMTYLYHYITSYVVDGQRIIYGPAYSGRERVYSNASLLIQNVTQEDAGSYTLHIIKRRDGTGGVTGHFTFTLHLETPKPSISSSNLNPREAMEAVILTCDPATPAASYQWWMNGQSLPMTHRLQLSKTNRTLFIFGVTKYIAGPYECEIRNPVSASRSDPVTLNLL

SEQ ID NO: 11003 - protein, 78 aa, Homo sapiens
MTYLYHYITSYVVDGQRIIYGPAYSGRERVYSNASLLIQNVTQEDAGSYTLHIIKRRDGTGGVTGHFTFTLHLETPKP

SEQ ID NO: 11004 - protein, 96 aa, Homo sapiens
  VARIANT 1: note = misc_feature - Xaa can be any naturally occurring amino acid
XETPKPSISSSNLNPREAMEAVILTCDPATPAASYQWWMNGQSLPMTHRLQLSKTNRTLFIFGVTKYIAGPYECEIRNPVSASRSDPVTLNLLRSY

SEQ ID NO: 11005 - protein, 244 aa, Homo sapiens
  VARIANT 1: note = misc_feature - Xaa can be any naturally occurring amino acid
XSLLNFWNPPTTAQVTIEAQPPKVSEGKDVLLLVHNLPQNLAGYIWYKGQMTYLYHYITSYVVDGQRIIYGPAYSGRERVYSNASLLIQNVTQEDAGSYTLHIIKRRDGTGGVTGHFTFTLHPKLSKPYITINNLNPRENKDVLTFTCEPKSKNYTYIWWLNGQSLPVSPRVKRPIENRILILPNVTRNETGPYQCEIRDRYGGIRSDPVTLNVLYGPDLPSIYPSFTYYRSGENLYLSCFAES

SEQ ID NO: 11006 - protein, 258 aa, Homo sapiens
  VARIANT 1: note = misc_feature - Xaa can be any naturally occurring amino acid
XYIAGPYECEIRNPVSASRSDPVTLNLLPKLSKPYITINNLNPRENKDVLTFTCEPKSKNYTYIWWLNGQSLPVSPRVKRPIENRILILPNVTRNETGPYQCEIRDRYGGIRSDPVTLNVLYGPDLPSIYPSFTYYRSGENLYLSCFAESNPRAQYSWTINGKFQLSGQKLSIPQITTKHSGLYACSVRNSATGKESSKSITVKVSGHISNHWLYYQGFDWDVIFKNIDRMNQYELQAKSEVSLGLASYSQGFCKSLI

SEQ ID NO: 11007 - protein, 428 aa, Homo sapiens
MGPLSAPPCTQHITWKGLLLTASLLNFWNLPITAQVTIEALPPKVSEGKDVLLLVHNLPQNLAGYIWYKGQLMDLYHYITSYVVDGQINIYGPAYTGRETVYSNASLLIQNVTREDAGSYTLHIIKRGDRTRGVTGYFTFNLYLETPKPSISSSNLNPREAMEAVILTCDPAASDTSYLWWMNGQSLPMTHRLQLSKTNRTLFIFGVTKYIAGPYECEIRNPVSASHSDPVTLNLLLKLPKPYITINNSKPRENKDVLAFTCEPKSENYTYIWWLNGQSLPVSPRVKRPIENRILILPSVTRNETGPYECEIRDRDGGMRSDPVTLNVLYGPDLPSIYPSFTYYRSGENLYLSCFAESNPPAEYFWTINGKFQQSGQKLSIPQITTKHRGLYTCSVRNSATGKESSKSMTVEVSAPSGIGRLPLLNPI

SEQ ID NO: 11008 - protein, 335 aa, Homo sapiens
MGPLSAPPCTQHITWKGLLLTASLLNFWNLPITAQVTIEALPPKVSEGKDVLLLVHNLPQNLAGYIWYKGQLMDLYHYITSYVVDGQINIYGPAYTGRETVYSNASLLIQNVTREDAGSYTLHIIKRGDRTRGVTGYFTFNLYLKLPKPYITINNSKPRENKDVLAFTCEPKSENYTYIWWLNGQSLPVSPRVKRPIENRILILPSVTRNETGPYECEIRDRDGGMRSDPVTLNVLYGPDLPSIYPSFTYYRSGENLYLSCFAESNPPAEYFWTINGKFQQSGQKLSIPQITTKHRGLYTCSVRNSATGKESSKSMTVEVSAPSGIGRLPLLNPI

SEQ ID NO: 11009 - protein, 335 aa, Homo sapiens; identical to SEQ ID NO: 11008

SEQ ID NO: 11010 - protein, 333 aa, Homo sapiens
MGPLSAPPCTQHITWKGLLLTASLLNFWNLPITAQVTIEALPPKVSEGKDVLLLVHNLPQNLAGYIWYKGQLMDLYHYITSYVVDGQINIYGPAYTGRETVYSNASLLIQNVTREDAGSYTLHIIKRGDRTRGVTGYFTFNLYLKLPKPYITINNSKPRENKDVLAFTCEPKSENYTYIWWLNGQSLPVSPRVKRPIENRILILPSVTRNETGPYECEIRDRDGGMRSDPVTLNVLYGPDLPSIYPSFTYYRSGENLYLSCFAESNPPAEYFWTINGKFQQSGQKLSIPQITTKHRGLYTCSVRNSATGKESSKSMTVEVSGKWIPASLAIGF

SEQ ID NO: 11011 - protein, 335 aa, Homo sapiens; identical to SEQ ID NO: 11008

SEQ ID NO: 11012 - protein, 157 aa, Homo sapiens
MGPLSAPPCTQHITWKGLLLTASLLNFWNLPITAQVTIEALPPKVSEGKDVLLLVHNLPQNLAGYIWYKGQLMDLYHYITSYVVDGQINIYGPAYTGRETVYSNASLLIQNVTREDAGSYTLHIIKRGDRTRGVTGYFTFNLYPPSGIGRLPLLNPI

SEQ ID NO: 11013 - protein, 158 aa, Homo sapiens [sequence omitted]

SEQ ID NO: 11014 - protein, 331 aa, Homo sapiens
MGPLSAPPCTQHITWKGLLLTASLLNFWNLPTTAQVIIEAKPPKVSEGKDVLLLVHNLPQNLTGYIWYKGQMTDLYHYITSYVVHGQIIYGPAYSGRETVYSNASLLIQNVTQEDAGSYTLHIIKRGDGTGGVTGYFTVTLYSETPKPSISSSNLNPREVMEAVRLICDPETPDASYLWLLNGQNLPMTHRLQLSKTNRTLYLFGVTKYIAGPYECEIRNPVSASRSDPVTLNLLHGPDLPRIYPSFTYYRSGENLDLSCFADSNPPAEYSWTINGKFQLSGQKLFIPQITTNHSGLYACSVRNSATGKEISKSMIVKVSGPCHGNQTESH

SEQ ID NO: 11015 - protein, 424 aa, Homo sapiens
MGPLSAPPCTQHITWKGLLLTASLLNFWNLPTTAQVIIEAKPPKVSEGKDVLLLVHNLPQNLTGYIWYKGQMTDLYHYITSYVVHGQIIYGPAYSGRETVYSNASLLIQNVTQEDAGSYTLHIIKRGDGTGGVTGYFTVTLYSETPKPSISSSNLNPREVMEAVRLICDPETPDASYLWLLNGQNLPMTHRLQLSKTNRTLYLFGVTKYIAGPYECEIRNPVSASRSDPVTLNLLPKLPMPYITINNLNPREKKDVLAFTCEPKSRNYTYIWWLNGQSLPVSPRVKRPIENRILILPSVTRNETGPYQCEIRDRYGGIRSNPVTLNVLYGPDLPRIYPSFTYYRSGENLDLSCFADSNPPAEYSWTINGKFQLSGQKLFIPQITTNHSGLYACSVRNSATGKEISKSMIVKVSGPCHGNQTESH

SEQ ID NO: 11016 - protein, 435 aa, Homo sapiens
MGPLSAPPCTQHITWKGLLLTASLLNFWNLPTTAQVIIEAKPPKVSEGKDVLLLVHNLPQNLTGYIWYKGQMTDLYHYITSYVVHGQIIYGPAYSGRETVYSNASLLIQNVTQEDAGSYTLHIIKRGDGTGGVTGYFTVTLYSETPKPSISSSNLNPREVMEAVRLICDPETPDASYLWLLNGQNLPMTHRLQLSKTNRTLYLFGVTKYIAGPYECEIRNPVSASRSDPVTLNLLPKLPMPYITINNLNPREKKDVLAFTCEPKSRNYTYIWWLNGQSLPVSPRVKRPIENRILILPSVTRNETGPYQCEIRDRYGGIRSNPVTLNVLYGPDLPRIYPSFTYYRSGENLDLSCFADSNPPAEYSWTINGKFQLSGQKLFIPQITTNHSGLYACSVRNSATGKEISKSMIVKVSETASPQVTYAGPNTWFQEILLL

SEQ ID NO: 11017 - protein, 73 aa, Homo sapiens
MTDLYHYITSYVVHGQIIYGPAYSGRETVYSNASLLIQNVTQEDAGSYTLHIIKRGDGTGGVTGYFTVTLYCE

SEQ ID NO: 11018 - protein, 81 aa, Homo sapiens
  VARIANT 1: note = misc_feature - Xaa can be any naturally occurring amino acid
XEAVRLICDPETPDASYLWLLNGQNLPMTHRLQLSKTNRTLYLFGVTKYIAGPYECEIRNPVSASRSDPVTLNLLRGRCQL

SEQ ID NO: 11019 - protein, 419 aa, Homo sapiens
MGPLSAPPCTQHITWKGLLLTASLLNFWNPPTTAQVTIEAQPPKVSEGKDVLLLVHNLPQNLTGYIWYKGQIRDLYHYVTSYIVDGQIIKYGPAYSGRETVYSNASLLIQNVTQEDTGSYTLHIIKRGDGTGGVTGRFTFTLYLETPKPSISSSNFNPREATEAVILTCDPETPDASYLWWMNGQSLPMTHSLQLSETNRTLYLFGVTNYTAGPYECEIRNPVSASRSDPVTLNLLPKLPKPYITINNLNPRENKDVSTFTCEPKSENYTYIWWLNGQSLPVSPRVKRRIENRILILPSVTRNETGPYQCEIRDRYGGIRSDPVTLNVLYGPDLPRIYPSFTYYHSGQNLYLSCFADSNPPAQYSWTINGKFQLSGQKLSIPQITTKHSGLYACSVRNSATGKESSKSVTVRVSDWTLP

SEQ ID NO: 11020 - protein, 426 aa, Homo sapiens
MGPLSAPPCTQHITWKGLLLTASLLNFWNPPTTAQVTIEAQPPKVSEGKDVLLLVHNLPQNLTGYIWYKGQIRDLYHYVTSYIVDGQIIKYGPAYSGRETVYSNASLLIQNVTQEDTGSYTLHIIKRGDGTGGVTGRFTFTLYLETPKPSISSSNFNPREATEAVILTCDPETPDASYLWWMNGQSLPMTHSLQLSETNRTLYLFGVTNYTAGPYECEIRNPVSASRSDPVTLNLLPKLPKPYITINNLNPRENKDVSTFTCEPKSENYTYIWWLNGQSLPVSPRVKRRIENRILILPSVTRNETGPYQCEIRDRYGGIRSDPVTLNVLYGPDLPRIYPSFTYYHSGQNLYLSCFADSNPPAQYSWTINGKFQLSGQKLSIPQITTKHSGLYACSVRNSATGKESSKSVTVRVSGKWIPASLAIGF

SEQ ID NO: 11021 - protein, 297 aa, Homo sapiens
MGPLSAPPCTQHITWKGLLLTVETPKPSISSSNFNPREATEAVILTCDPETPDASYLWWMNGQSLPMTHSLQLSETNRTLYLFGVTNYTAGPYECEIRNPVSASRSDPVTLNLLPKLPKPYITINNLNPRENKDVSTFTCEPKSENYTYIWWLNGQSLPVSPRVKRRIENRILILPSVTRNETGPYQCEIRDRYGGIRSDPVTLNVLYGPDLPRIYPSFTYYHSGQNLYLSCFADSNPPAQYSWTINGKFQLSGQKLSIPQITTKHSGLYACSVRNSATGKESSKSVTVRVSDWTLP

SEQ ID NO: 11022 - protein, 426 aa, Homo sapiens
MGLLSAPPCTQRITWKGLLLTASLLNFWNPPTTAQVTIEAQPTKVSEGKDVLLLVHNLPQNLTGYIWYKGQIRDLYHYITSYVVDGQIIIYGPAYSGRETIYSNASLLIQNVTQEDAGSYTLHIIMGGDENRGVTGHFTFTLYLETPKPSISSSKLNPREAMEAVSLTCDPETPDASYLWWMNGQSLPMSHRLQLSETNRTLFLLGVTKYTAGPYECEIRNPVSASRSDPFTLNLLPKLPKPYITINNLKPRENKDVLNFTCEPKSENYTYIWWLNGQSLPVSPRVKRPIENRILILPSVTRNETGPYQCEIRDQYGGIRSYPVTLNVLYGPDLPRIYPSFTYYRSGEVLYLSCSADSNPPAQYSWTINGKFQLSGQKLFIPQITTKHSGLYACSVRNSATGKESSKSMTVKVSGKRIPVSLAIGI

SEQ ID NO: 11023 - protein, 419 aa, Homo sapiens
MGLLSAPPCTQRITWKGLLLTASLLNFWNPPTTAQVTIEAQPTKVSEGKDVLLLVHNLPQNLTGYIWYKGQIRDLYHYITSYVVDGQIIIYGPAYSGRETIYSNASLLIQNVTQEDAGSYTLHIIMGGDENRGVTGHFTFTLYLETPKPSISSSKLNPREAMEAVSLTCDPETPDASYLWWMNGQSLPMSHRLQLSETNRTLFLLGVTKYTAGPYECEIRNPVSASRSDPFTLNLLPKLPKPYITINNLKPRENKDVLNFTCEPKSENYTYIWWLNGQSLPVSPRVKRPIENRILILPSVTRNETGPYQCEIRDQYGGIRSYPVTLNVLYGPDLPRIYPSFTYYRSGEVLYLSCSADSNPPAQYSWTINGKFQLSGQKLFIPQITTKHSGLYACSVRNSATGKESSKSMTVKVSDWTLP

SEQ ID NO: 11024 - protein, 40 aa, Homo sapiens
MGLLSAPPCTQRITWKGLLLTGHSLDSALSLEVTGSSQPL

SEQ ID NO: 11025 - protein, 297 aa, Homo sapiens
MGLLSAPPCTQRITWKGLLLTVETPKPSISSSKLNPREAMEAVSLTCDPETPDASYLWWMNGQSLPMSHRLQLSETNRTLFLLGVTKYTAGPYECEIRNPVSASRSDPFTLNLLPKLPKPYITINNLKPRENKDVLNFTCEPKSENYTYIWWLNGQSLPVSPRVKRPIENRILILPSVTRNETGPYQCEIRDQYGGIRSYPVTLNVLYGPDLPRIYPSFTYYRSGEVLYLSCSADSNPPAQYSWTINGKFQLSGQKLFIPQITTKHSGLYACSVRNSATGKESSKSMTVKVSDWTLP

SEQ ID NO: 11026 - protein, 326 aa, Homo sapiens
MGPLSAPPCTQHIKWKGVLLTASLLNFWNPPTTAQVTIEAQPTKVSEGKDVLLLVHNLPQNLTGYIWYKGQIRDLYHYITSYVVDGQIIIYGPAYSGRETIYSNASLLIQNVTQEDAGSYTLHIIMGGDENRGVTGHFTFTLYPKLPKPYITINNLKPRENKDVLNFTCEPKSENYTYIWWLNGQSLPVSPRVKRPIENRILILPSVTRNETGPYQCEIRDQYGGIRSYPVTLNVLYGPDLPRIYPSFTYYRSGEVLYLSCSADSNPPAQYSWTINGKFQLSGQKLFIPQITTKHSGLYACSVRNSATGKESSKSMTVKVSDWTLP

SEQ ID NO: 11027 - protein, 402 aa, Homo sapiens
MGPLPAPSCTQRITWKGLLLTASLLNFWNPPTTAEVTIEAQPPKVSEGKDVLLLVHNLPQNLPGYFWYKGEMTDLYHYIISYIVDGKIIIYGPAYSGRETVYSNASLLIQNVTRKDAGTYTLHIIKRGDETREEIRHFTFTLYLETPKPYISSSNLNPREAMEAVRLICDPETLDASYLWWMNGQSLPVTHRLQLSKTNRTLYLFGVTKYIAGPYECEIRNPVSASRSDPVTLNLLHGPDLPRIYPSFTYYRSGENLDLSCFTESNPPAEYFWTINGKFQQSGQKLFIPQITRNHSGLYACSVHNSATGKEISKSMTVKVSGKWIPASLAVGFYVESIWLSEKSQENIFIPSLCPMGTSKSQILLLNPPNLSLQTLFSLFFCFLMADLVSGLKKVGRGLYQP

SEQ ID NO: 11028 - protein, 333 aa, Homo sapiens
MGPLPAPSCTQRITWKGLLLTASLLNFWNPPTTAEVTIEAQPPKVSEGKDVLLLVHNLPQNLPGYFWYKGEMTDLYHYIISYIVDGKIIIYGPAYSGRETVYSNASLLIQNVTRKDAGTYTLHIIKRGDETREEIRHFTFTLYLETPKPYISSSNLNPREAMEAVRLICDPETLDASYLWWMNGQSLPVTHRLQLSKTNRTLYLFGVTKYIAGPYECEIRNPVSASRSDPVTLNLLHGPDLPRIYPSFTYYRSGENLDLSCFTESNPPAEYFWTINGKFQQSGQKLFIPQITRNHSGLYACSVHNSATGKEISKSMTVKVSGPCHGDLTESQS

SEQ ID NO: 11029 - protein, 426 aa, Homo sapiens
MGPLPAPSCTQRITWKGLLLTASLLNFWNPPTTAEVTIEAQPPKVSEGKDVLLLVHNLPQNLPGYFWYKGEMTDLYHYIISYIVDGKIIIYGPAYSGRETVYSNASLLIQNVTRKDAGTYTLHIIKRGDETREEIRHFTFTLYLETPKPYISSSNLNPREAMEAVRLICDPETLDASYLWWMNGQSLPVTHRLQLSKTNRTLYLFGVTKYIAGPYECEIRNPVSASRSDPVTLNLLPKLPIPYITINNLNPRENKDVLAFTCEPKSENYTYIWWLNGQSLPVSPGVKRPIENRILILPSVTRNETGPYQCEIRDRYGGLRSNPVILNVLYGPDLPRIYPSFTYYRSGENLDLSCFTESNPPAEYFWTINGKFQQSGQKLFIPQITRNHSGLYACSVHNSATGKEISKSMTVKVSGPCHGDLTESQS

SEQ ID NO: 11030 - protein, 419 aa, Homo sapiens
MGPLPAPSCTQRITWKGLLLTASLLNFWNPPTTAEVTIEAQPPKVSEGKDVLLLVHNLPQNLPGYFWYKGEMTDLYHYIISYIVDGKIIIYGPAYSGRETVYSNASLLIQNVTRKDAGTYTLHIIKRGDETREEIRHFTFTLYLETPKPYISSSNLNPREAMEAVRLICDPETLDASYLWWMNGQSLPVTHRLQLSKTNRTLYLFGVTKYIAGPYECEIRNPVSASRSDPVTLNLLPKLPIPYITINNLNPRENKDVLAFTCEPKSENYTYIWWLNGQSLPVSPGVKRPIENRILILPSVTRNETGPYQCEIRDRYGGLRSNPVILNVLYGPDLPRIYPSFTYYRSGENLDLSCFTESNPPAEYFWTINGKFQQSGQKLFIPQITRNHSGLYACSVHNSATGKEISKSMTVKVSDWILP

SEQ ID NO: 11031 - protein, 326 aa, Homo sapiens
MGPLPAPSCTQRITWKGLLLTASLLNFWNPPTTAEVTIEAQPPKVSEGKDVLLLVHNLPQNLPGYFWYKGEMTDLYHYIISYIVDGKIIIYGPAYSGRETVYSNASLLIQNVTRKDAGTYTLHIIKRGDETREEIRHFTFTLYSKLPIPYITINNLNPRENKDVLAFTCEPKSENYTYIWWLNGQSLPVSPGVKRPIENRILILPSVTRNETGPYQCEIRDRYGGLRSNPVILNVLYGPDLPRIYPSFTYYRSGENLDLSCFTESNPPAEYFWTINGKFQQSGQKLFIPQITRNHSGLYACSVHNSATGKEISKSMTVKVSDWILP

SEQ ID NO: 11032 - protein, 333 aa, Homo sapiens
MGPLPAPSCTQRITWKGLLLTASLLNFWNPPTTAEVTIEAQPPKVSEGKDVLLLVHNLPQNLPGYFWYKGEMTDLYHYIISYIVDGKIIIYGPAYSGRETVYSNASLLIQNVTRKDAGTYTLHIIKRGDETREEIRHFTFTLYSKLPIPYITINNLNPRENKDVLAFTCEPKSENYTYIWWLNGQSLPVSPGVKRPIENRILILPSVTRNETGPYQCEIRDRYGGLRSNPVILNVLYGPDLPRIYPSFTYYRSGENLDLSCFTESNPPAEYFWTINGKFQQSGQKLFIPQITRNHSGLYACSVHNSATGKEISKSMTVKVSGPCHGDLTESQS

SEQ ID NO: 11033 - protein, 309 aa, Homo sapiens
MGPLPAPSCTQRITWKGLLLTASLLNFWNPPTTAEVTIEAQPPKVSEGKDVLLLVHNLPQNLPGYFWYKGEMTDLYHYIISYIVDGKIIIYGPAYSGRETVYSNASLLIQNVTRKDAGTYTLHIIKRGDETREEIRHFTFTLYYGPDLPRIYPSFTYYRSGENLDLSCFTESNPPAEYFWTINGKFQQSGQKLFIPQITRNHSGLYACSVHNSATGKEISKSMTVKVSGKWIPASLAVGFYVESIWLSEKSQENIFIPSLCPMGTSKSQILLLNPPNLSLQTLFSLFFCFLMADLVSGLKKVGRGLYQP

SEQ ID NO: 11034 - protein, 240 aa, Homo sapiens
MGPLPAPSCTQRITWKGLLLTASLLNFWNPPTTAEVTIEAQPPKVSEGKDVLLLVHNLPQNLPGYFWYKGEMTDLYHYIISYIVDGKIIIYGPAYSGRETVYSNASLLIQNVTRKDAGTYTLHIIKRGDETREEIRHFTFTLYYGPDLPRIYPSFTYYRSGENLDLSCFTESNPPAEYFWTINGKFQQSGQKLFIPQITRNHSGLYACSVHNSATGKEISKSMTVKVSGPCHGDLTESQS

SEQ ID NO: 11035 - protein, 953 aa, Homo sapiens [sequence omitted]

SEQ ID NO: 11036 - protein, 953 aa, Homo sapiens
MITSAAGIISLLDEDEPQLKEFALHKLNAVVNDFWAEISESVDKIEVLYEDEGFRSRQFAALVASKVFYHLGAFEESLNYALGAGDLFNVNDNSEYVETIIAKCIDHYTKQCVENADLPEGEKKPIDQRLEGIVNKMFQRCLDDHKYKQAIGIALETRRLDVFEKTILESNDVPGMLAYSLKLCMSLMQNKQFRNKVLRVLVKIYMNLEKPDFINVCQCLIFLDDPQAVSDILEKLVKEDNLLMAYQICFDLYESASQQFLSSVIQNLRTVGTPIASVPGSTNTGTVPGSEKDSDSMETEEKTSSAFVGKTPEASPEPKDQTLKMIKILSGEMAIELHLQFLIRNNNTDLMILKNTKDAVRNSVCHTATVIANSFMHCGTTSDQFLRDNLEWLARATNWAKFTATASLGVIHKGHEKEALQLMATYLPKDTSPGSAYQEGGGLYALGLIHANHGGDIIDYLLNQLKNASNDIVRHGGSLGLGLAAMGTARQDVYDLLKTNLYQDDAVTGEAAGLALGLVMLGSKNAQAIEDMVGYAQETQHEKILRGLAVGIALVMYGRMEEADALIESLCRDKDPILRRSGMYTVAMAYCGSGNNKAIRRLLHVAVSDVNDDVRRAAVESLGFILFRTPEQCPSVVSLLSESYNPHVRYGAAMALGICCAGTGNKEAINLLEPMTNDPVNYVRQGALIASALIMIQQTEITCPKVNQFRQLYSKVINDKHDDVMAKFGAILAQGILDAGGHNVTISLQSRTGHTHMPSVVGVLVFTQFWFWFPLSHFLSLAYTPTCVIGLNKDLKMPKVQYKSNCKPSTFAYPAPLEVPKEKEKEKVSTAVLSITAKAKKKEKEKEKKEEEKMEVDEAEKKEEKEKKKEPEPNFQLLDNPARVMPAQLKVLTMPETCRYQPFKPLSIGGIIILKDTSEDIEELVEPVAAHGPKIEEEEQEPEPPEPFEYIDD

SEQ ID NO: 11037 - protein, 922 aa, Homo sapiens
MITSAAGIISLLDEDEPQLKEFALHKLNAVVNDFWAEISESVDKIEVLYEDEGFRSRQFAALVASKVFYHLGAFEESLNYALGAGDLFNVNDNSEYVETIIAKCIDHYTKQCVENADLPEGEKKPIDQRLEGIVNKMFQRCLDDHKYKQAIGIALETRRLDVFEKTILESNDVPGMLAYSLKLCMSLMQNKQFRNKVLRVLVKIYMNLEKPDFINVCQCLIFLDDPQAVSDILEKLVKEDNLLMAYQICFDLYESASQQFLSSVIQNLRTVGTPIASVPGSTNTGTVPGSEKDSDSMETEEKTSSAFVGKTPEASPEPKDQTLKMIKILSGEMAIELHLQFLIRNNNTDLMILKNTKDAVRNSVCHTATVIANSFMHCGTTSDQFLRDNLEWLARATNWAKFTATASLGVIHKGHEKEALQLMATYLPKDTSPGSAYQEGGGLYALGLIHANHGGDIIDYLLNQLKNASNDIVRHGGSLGLGLAAMGTARQDVYDLLKTNLYQDDAVTGEAAGLALGLVMLGSKNAQAIEDMVGYAQETQHEKILRGLAVGIALVMYGRMEEADALIESLCRDKDPILRRSGMYTVAMAYCGSGNNKAIRRLLHVAVSDVNDDVRRAAVESLGFILFRTPEQCPSVVSLLSESYNPHVRYGAAMALGICCAGTGNKEAINLLEPMTNDPVNYVRQGALIASALIMIQQTEITCPKVNQFRQLYSKVINDKHDDVMAKFGAILAQGILDAGGHNVTISLQSRTGHTHMPSVVGVLVFTQFWFWFPLSHFLSLAYTPTCVIGLNKDLKVSTAVLSITAKAKKKEKEKEKKEEEKMEVDEAEKKEEKEKKKEPEPNFQLLDNPARVMPAQLKVLTMPETCRYQPFKPLSIGGIIILKDTSEDIEELVEPVAAHGPKIEEEEQEPEPPEPFEYIDD

SEQ ID NO: 11038 - protein, 922 aa, Homo sapiens; identical to SEQ ID NO: 11037

SEQ ID NO: 11039 - protein, 203 aa, Homo sapiens
MITSAAGIISLLDEDEPQLKEFALHKLNAVVNDFWAEISESVDKIEVLYEDEGFRSRQFAALVASKVFYHLGAFEESLNYALGAGDLFNVNDNSEYVETIIGNYRLSAKCIDHYTKQCVENADLPEGEKKPIDQRLEGIVNKMFQRCLDDHKYKQAIGIALETRRLDVFEKTILESNDVPGMLAYSLKLCMSLMQNKQFRNKV

SEQ ID NO: 11040 - protein, 48 aa, Homo sapiens
MITSAAGIISLLDEDEPQLKEFALHKLNAVVNDFWAEISESVDKIKMH

SEQ ID NO: 11041 - protein, 164 aa, Homo sapiens
  VARIANT 1: note = misc_feature - Xaa can be any naturally occurring amino acid
XAKCIDHYTKQCVENADLPEGEKKPIDQRLEGIVNKMFQRCLDDHKYKQAIGIALETRRLDVFEKTILESNDVPGMLAYSLKLCMSLMQNKQFRNKVLRVLVKIYMNLEKPDFINVCQNLRTVGTPIASVPGSTNTGTVPGSEKDSDSMETEEKTSSAFVGKTP

SEQ ID NO: 11042 - protein, 192 aa, Homo sapiens
  VARIANT 1: note = misc_feature - Xaa can be any naturally occurring amino acid
XGEAAGLALGLVMLGSKNAQAIEDMVGYAQETQHEKILRGLAVGIALVMYGRMEEADALIESLCRDKDPILRRSGMYTVAMAYCGSGNNKAIRRLLHVAVSDVNDDVRRAAVESLGFILFRTPEQCPSVVSLLSESYNPHVRYGAAMALGICCAGTGNKVKPTANGVSSFLAPDCFPSPQNLCNSCKNTSAM

SEQ ID NO: 11043 - protein, 136 aa, Homo sapiens
MILNWKLLGILVLCLHTRGISGSEGHPSHPPAEDREEAGSPTLPQGPPVPGDPWPGAPPLFEDPPPTRPSRPWRDLPETGVWLPEPPRTDPPQPPRPDDPWPAGPQPPENPWPPAPEVDNRPQEEPDLDPPREEYR

SEQ ID NO: 11044 - protein, 164 aa, Homo sapiens
MAVGKFLLGSLLLLSLQLGQGWGPDARGVPVADGEFSSEQVAKAGGTWLGKDFQGPSVTSQLSPALTLLTVSALPSHRHPPPPCPPAPSPVWSMPAVEPDPVRGRARPGLRLRGEGHLPLLRRQLPPWCPHPAWPGAGPAAGPGPSPRRALLPAHSLHRRGLPR

SEQ ID NO: 11045 - protein, 156 aa, Homo sapiens
MAVGKFLLGSLLLLSLQLGQGWGPDARGVPVADGEFSSEQVAKAGGTWLGTHRPLARLRRALSGPCQLWSLTLSVAELGLGYASEEKVIFRYCAGSCPRGARTQHGLALARLQGQGRAHGGPCCRPTRYTDVAFLDDRHRWQRLPQLSAAACGCGG

SEQ ID NO: 11046 - protein, 48 aa, Homo sapiens
MATHHTLWMGLALLGVLGDLQAAPEAQVSVQPNFQQDKFLGRWFSAGL

SEQ ID NO: 11047 - protein, 190 aa, Homo sapiens
MATHHTLWMGLALLGVLGDLQAAPEAQVSVQPNFQQDKFLGRWFSAGLASNSSWLREKKAALSMCKSVVAPATDGGLNLTSTFLRKNQCETRTMLLQPAGSLGSYSYRSPHWGSTYSVSVVETDYDQYALLYSQGSKGPGEDFRMATLYSRTQTPRAELKEKFTAFCKAQGFTEDTIVFLPQTDKCMTEQ

SEQ ID NO: 11048 - protein, 195 aa, Homo sapiens
MATHHTLWMGLALLGVLGDLQAAPEAQVSVQPNFQQDKFLGRWFSAGLASNSSWLREKKAALSMCKSVVAPATDGGLNLTSTFLRKNQCETRTMLLQPAGSLGSYSYRSPREWGLHRPPGPSLGATLAGTTLGQPPAAEIHGVGDWGSTYSVSVVETDYDQYALLYSQGSKGPGEDFRMATLYSRTQTPRAELKE

SEQ ID NO: 11049 - protein, 124 aa, Homo sapiens
VVAPATDGGLNLTSTFLRKNQCETRTMLLQPAGSLGSYSYRSPHWGSTYSVSVVETDYDQYALLYSQGSKGPGEDFRMATLYSRTQTPRAELKEKFTAFCKAQGFTEDTIVFLPQTAPGFFLGR

SEQ ID NO: 11050 - protein, 62 aa, Homo sapiens
  VARIANT 1: note = misc_feature - Xaa can be any naturally occurring amino acid
XGYHCLPAPNRAQGEVGGDGGSVQFGGSVKTSSALREEQEAQWENWPKSGVLTTAPGFFLGR

SEQ ID NO: 11051 - protein, 386 aa, Homo sapiens [sequence omitted]

SEQ ID NO: 11052 - protein, 296 aa, Homo sapiens
MADSCRNLTYVRGSVGPATSTLMFVAGVVGNGLALGILSARRPARPSAFAVLVTGLAATDLLGTSFLSPAVFVAYARNSSLLGLARGGPALCDAFAFAMTFFGLASMLILFAMAVERCLALSHPYLYAQLDGPRCARLALPAIYAFCVLFCALPLLGLGQHQQYCPGSWCFLRMRWAQPGGAAFSLAYAGLVALLVAAIFLCNGSVTLSLCRMYRQQKRHQGSLGPRPRTGEDEVDHLILLALMTVVMAVCSLPLTHVERPRQDRMRWLTPVIPALWEAEAGGSFEVRSSRPVWPT

SEQ ID NO: 11053 - protein, 115 aa, Homo sapiens
MGDLLAFRFYAFNPILDPWVFILFRKAVFQRLKLWVCCLCLGPAHGDSQTPLSQLASGRRDPRAPSAPVGKEGSCVPLSAWGEGQVEPLPPTQQSSGSAVGTSSKAEASVACSLC

SEQ ID NO: 11054 - protein, 143 aa, Homo sapiens
MTVVMAVCSLPLTIRCFTQAVAPDSSSEMGDLLAFRFYAFNPILDPWVFILFRKAVFQRLKLWVCCLCLGPAHGDSQTPLSQLASGRRDPRAPSAPVGKEGSCVPLSAWGEGQVEPLPPTQQSSGSAVGTSSKAEASVACSLC

SEQ ID NO: 11055 - protein, 174 aa, Homo sapiens
MYRQQKRHQGSLGPRPRTGEDEVDHLILLALMTVVMAVCSLPLTIRCFTQAVAPDSSSEMGDLLAFRFYAFNPILDPWVFILFRKAVFQRLKLWVCCLCLGPAHGDSQTPLSQLASGRRDPRAPSAPVGKEGSCVPLSAWGEGQVEPLPPTQQSSGSAVGTSSKAEASVACSLC

SEQ ID NO: 11056 - protein, 490 aa, Homo sapiens
MLMRLVLTVRSNLIPSPPTYNSAHDYISWESFSNVSYYTRILPSVPKDCPTPMGTKGKKQLPDAQLLARRFLLRRKFIPDPQGTNLMFAFFAQHFTHQFFKTSGKMGPGFTKALGHGVDLGHIYGDNLERQYQLRLFKDGKLKYQVLDGEMYPPSVEEAPVLMHYPRGIPPQSQMAVGQEVFGLLPGLMLYATLWLREHNRVCDLLKAEHPTWGDEQLFQTTRLILIGETIKIVIEEYVQQLSGYFLQLKFDPELLFGVQFQYRNRIAMEFNHLYHWHPLMPDSFKVGSQEYSYEQFLFNTSMLVDYGVEALVDAFSRQIAGRIGGGRNMDHHILHVAVDVIRESREMRLQPFNEYRKRFGMKPYTSFQELVGEKEMAAELEELYGDIDALEFYPGLLLEKCHPNSIFGESMIEIGAPFSLKGLLGNPICSPEYWKPSTFGGEVGFNIVKTATLKKLVCLNTKTCPYVSFRVPDASQDDGPAVERPSTEL

SEQ ID NO: 11057 - protein, 402 aa, Homo sapiens
MLMRLVLTVRSNLIPSPPTYNSAHDYISWESFSNVSYYTRILPSVPKDCPTPMGTKGKKQLPDAQLLARRFLLRRKFIPDPQGTNLMFAFFAQHFTHQFFKTSGKMGPGFTKALGHGVDLGHIYGDNLERQYQLRLFKDGKLKYQVLDGEMYPPSVEEAPVLMHYPRGIPPQSQMAVGQEVFGLLPGLMLYATLWLREHNRVCDLLKAEHPTWGDEQLFQTTRLILIGETIKIVIEEYVQQLSGYFLQLKFDPELLFGVQFQYRNRIAMEFNHLYHWHPLMPDSFKIGGGRNMDHHILHVAVDVIRESREMRLQPFNEYRKRFGMKPYTSFQELVGEKEMAAELEELYGDIDALEFYPGLLLEKCHPNSIFGESMIEIGAPFSLKGLLGNPICSPEYWKPST

SEQ ID NO: 11058 - protein, 537 aa, Homo sapiens
MRKPRLMNPCCYYPCQHQGICVRFGLDRYQCDCTRTGYSGPNCTIPGLWTWLRNSLRPSPSFTHFLLTHGRWFWEFVNATFIREMLMRLVLTVRSNLIPSPPTYNSAHDYISWESFSNVSYYTRILPSVPKDCPTPMGTKGKKQLPDAQLLARRFLLRRKFIPDPQGTNLMFAFFAQHFTHQFFKTSGKMGPGFTKALGHGVDLGHIYGDNLERQYQLRLFKDGKLKYQVLDGEMYPPSVEEAPVLMHYPRGIPPQSQMAVGQEVFGLLPGLMLYATLWLREHNRVCDLLKAEHPTWGDEQLFQTTRLILIGETIKIVIEEYVQQLSGYFLQLKFDPELLFGVQFQYRNRIAMEFNHLYHWHPLMPDSFKIGGGRNMDHHILHVAVDVIRESREMRLQPFNEYRKRFGMKPYTSFQELVGEKEMAAELEELYGDIDALEFYPGLLLEKCHPNSIFGESMIEIGAPFSLKGLLGNPICSPEYWKPSTFGGEVGFNIVKTATLKKLVCLNTKTCPYVSFRVPDASQDDGPAVERPSTEL

SEQ ID NO: 11059 - protein, 172 aa, Homo sapiens
MSRSLLLWFLLFLLLLPPLPVLLADPGAPTPAGLWTWLRNSLRPSPSFTHFLLTHGRWFWEFVNATFIREMLMRLVLTVRSNLIPSPPTYNSAHDYISWESFSNFFKTSGKMGPGFTKALGHGVDLGHIYGDNLERQYQLRLFKDGKLKYQVLDGEMYPPSVEEAPVLMHYP

SEQ ID NO: 11060 - protein, 41 aa, Homo sapiens
MSRSLLLWFLLFLLLLPPLPVLLADPGAPTPAPGHLCPLRP

SEQ ID NO: 11061 - protein, 551 aa, Homo sapiens
MSRSLLLWFLLFLLLLPPLPVLLADPGAPTPVNPCCYYPCQHQGICVRFGLDRYQCDCTRTGYSGPNCTIPGLWTWLRNSLRPSPSFTHFLLTHGRWFWEFVNATFIREMLMRLVLTGKKQLPDAQLLARRFLLRRKFIPDPQGTNLMFAFFAQHFTHQFFKTSGKMGPGFTKALGHGVDLGHIYGDNLERQYQLRLFKDGKLKYQVLDGEMYPPSVEEAPVLMHYPRGIPPQSQMAVGQEVFGLLPGLMLYATLWLREHNRVCDLLKAEHPTWGDEQLFQTTRLILIGETIKIVIEEYVQQLSGYFLQLKFDPELLFGVQFQYRNRIAMEFNHLYHWHPLMPDSFKVGSQEYSYEQFLFNTSMLVDYGVEALVDAFSRQIAGRIGGGRNMDHHILHVAVDVIRESREMRLQPFNEYRKRFGMKPYTSFQELVGEKEMAAELEELYGDIDALEFYPGLLLEKCHPNSIFGESMIEIGAPFSLKGLLGNPICSPEYWKPSTFGGEVGFNIVKTATLKKLVCLNTKTCPYVSFRVPDASQDDGPAVERPSTEL

SEQ ID NO: 11062 - protein, 562 aa, Homo sapiens
MSRSLLLWFLLFLLLLPPLPVLLADPGAPTPVNPCCYYPCQHQGICVRFGLDRYQCDCTRTGYSGPNCTIPGLWTWLRNSLRPSPSFTHFLLTHGRWFWEFVNATFIREMLMRLVLTVRSNLIPSPPTYNSAHDYISWESFSNVSYYTRILPSVPKDCPTPMGTKGKKQLPDAQLLARRFLLRRKFIPDPQGTNLMFAFFAQHFTHQFFKTSGKMGPGFTKALGHGVDLGHIYGDNLERQYQLRLFKDGKLKYQVLDGEMYPPSVEEAPVLMHYPRGIPPQSQMAVGQEVFGLLPGLMLYATLWLREHNRVCDLLKAEHPTWGDEQLFQTTRLILIGETIKIVIEEYVQQLSGYFLQLKFDPELLFGVQFQYRNRIAMEFNHLYHWHPLMPDSFKIGGGRNMDHHILHVAVDVIRESREMRLQPFNEYRKRFGMKPYTSFQELVGEKEMAAELEELYGDIDALEFYPGLLLEKCHPNSIFGESMIEIGAPFSLKGLLGNPICSPEYWKPSTFGGEVGFNIVKTATLKKLVCLNTKTCPYVSFRVPDASQDDGPAVERPSTEL

SEQ ID NO: 11063 - protein, 599 aa, Homo sapiens
MSRSLLLWFLLFLLLLPPLPVLLADPGAPTPVNPCCYYPCQHQGICVRFGLDRYQCDCTRTGYSGPNCTIPGLWTWLRNSLRPSPSFTHFLLTHGRWFWEFVNATFIREMLMRLVLTVRSNLIPSPPTYNSAHDYISWESFSNVSYYTRILPSVPKDCPTPMGTKGKKQLPDAQLLARRFLLRRKFIPDPQGTNLMFAFFAQHFTHQFFKTSGKMGPGFTKALGHGVDLGHIYGDNLERQYQLRLFKDGKLKYQVLDGEMYPPSVEEAPVLMHYPRGIPPQSQMAVGQEVFGLLPGLMLYATLWLREHNRVCDLLKAEHPTWGDEQLFQTTRLILIGETIKIVIEEYVQQLSGYFLQLKFDPELLFGVQFQYRNRIAMEFNHLYHWHPLMPDSFKVGSQEYSYEQFLFNTSMLVDYGVEALVDAFSRQIAGRIGGGRNMDHHILHVAVDVIRESREMRLQPFNEYRKRFGMKPYTSFQELVGEKEMAAELEELYGDIDALEFYPGLLLEKCHPNSIFGESMIEIGAPFSLKGLLGNPICSPEYWKPSTFGGEVGFNIVKTATLKKLVCLNTKTCPYVSFRVPDASQDDGPAVERPSTEL

SEQ ID NO: 11064 - protein, 599 aa, Homo sapiens; identical to SEQ ID NO: 11063

SEQ ID NO: 11065 - protein, 163 aa, Homo sapiens
MLARALLLCAVLALSHTANPCCSHPCQNRGVCMSVGFDQYKCDCTRTGFYGENCSTPEFLTRIKLFLKPTPNTVHYILTHFKGFWNVVNNIPFLRNAIMSYVLTSRSHLIDSPPTYNADYGYKSWEAFSNLSYYTRALPPVPDDCPTPLGVKALHASVFQDRS

SEQ ID NO: 11066 - protein, 604 aa, Homo sapiens
MLARALLLCAVLALSHTANPCCSHPCQNRGVCMSVGFDQYKCDCTRTGFYGENCSTPEFLTRIKLFLKPTPNTVHYILTHFKGFWNVVNNIPFLRNAIMSYVLTSRSHLIDSPPTYNADYGYKSWEAFSNLSYYTRALPPVPDDCPTPLGVKGKKQLPDSNEIVEKLLLRRKFIPDPQGSNMMFAFFAQHFTHQFFKTDHKRGPAFTNGLGHGVDLNHIYGETLARQRKLRLFKDGKMKYQIIDGEMYPPTVKDTQAEMIYPPQVPEHLRFAVGQEVFGLVPGLMMYATIWLREHNRVCDVLKQEHPEWGDEQLFQTSRLILIGETIKIVIEDYVQHLSGYHFKLKFDPELLFNKQFQYQNRIAAEFNTLYHWHPLLPDTFQIHDQKYNYQQFIYNNSILLEHGITQFVESFTRQIAGRVAGGRNVPPAVQKVSQASIDQSRQMKYQSFNEYRKRFMLKPYESFEELTGEKEMSAELEALYGDIDAVELYPALLVEKPRPDAIFGETMVEVGAPFSLKGLMGNVICSPAYWKPSTFGGEVGFQIINTASIQSLICNNVKGCPFTSFSVPDPELIKTVTINASSSRSGLDDINPTVLLKERSTEL

SEQ ID NO: 11067 - protein, 115 aa, Homo sapiens
MIPAKDMAKVMIVMLAICFLTKSDGKSVKKRSVSEIQLMHNLGKHLNSMERVEWLRKKLQDVHNFVALGAPLAPRDAGSQRPRKKEDNVLVESHEKSLGEADKADVNVLTKAKSQ

SEQ ID NO: 11068 - protein, 115 aa, Homo sapiens; identical to SEQ ID NO: 11067

SEQ ID NO: 11069 - protein, 100 aa, Homo sapiens
METRQVSRSPRVRLLLLLLLLLVVPWGVRTASGVALPPVGVLSLRPPGRAWADPATPRPRRSLALADDAAFRERARLLAALERRHWLNSYMHKLLVLDAP

SEQ ID NO: 11070 - protein, 172 aa, Homo sapiens
MQRRLVQQWSVAVFLLSYAVPSCGRSVEGLSRRLKRAVSEHQLLHDKGKSIQDLRRRFFLHHLIAEIHTAEIRATSEVSPNSKPSPNTKNHPVRFGSDDEGRYLTQETNKVETYKEQPLKTPGKKKKGKPGKRKEQEKKKRRTRSAWLDSGVTGSGLEGDHLSDTSTTSLEL

SEQ ID NO: 11071 - protein, 175 aa, Homo sapiens
MQRRLVQQWSVAVFLLSYAVPSCGRSVEGLSRRLKRAVSEHQLLHDKGKSIQDLRRRFFLHHLIAEIHTAEIRATSEVSPNSKPSPNTKNHPVRFGSDDEGRYLTQETNKVETYKEQPLKTPGKKKKGKPGKRKEQEKKKRRTRSAWLDSGVTGSGLEGDHLSDTSTTSLELDSR

SEQ ID NO: 11072 - protein, 175 aa, Homo sapiens; identical to SEQ ID NO: 11071

SEQ ID NO: 11073 - protein, 175 aa, Homo sapiens; identical to SEQ ID NO: 11071

SEQ ID NO: 11074 - protein, 177 aa, Homo sapiens
MQRRLVQQWSVAVFLLSYAVPSCGRSVEGLSRRLKRAVSEHQLLHDKGKSIQDLRRRFFLHHLIAEIHTAEIRATSEVSPNSKPSPNTKNHPVRFGSDDEGRYLTQETNKVETYKEQPLKTPGKKKKGKPGKRKEQEKKKRRTRSAWLDSGVTGSGLEGDHLSDTSTTSLELDSRRH

SEQ ID NO: 11075 - protein, 177 aa, Homo sapiens; identical to SEQ ID NO: 11074

SEQ ID NO: 11076 - protein, 177 aa, Homo sapiens; identical to SEQ ID NO: 11074

SEQ ID NO: 11077 - protein, 209 aa, Homo sapiens
MQRRLVQQWSVAVFLLSYAVPSCGRSVEGLSRRLKRAVSEHQLLHDKGKSIQDLRRRFFLHHLIAEIHTAEIRATSEVSPNSKPSPNTKNHPVRFGSDDEGRYLTQETNKVETYKEQPLKTPGKKKKGKPGKRKEQEKKKRRTRSAWLDSGVTGSGLEGDHLSDTSTTSLELDSRTALLWGLKKKKENNRRTHHMQLMISLFKSPLLLL

SEQ ID NO: 11078 - protein, 111 aa, Homo sapiens
MSRARAETMQRRLVQQWSVAVFLLSYAVPSCGRSVEGLSRRLKRAVSEHQLLHDKGKSIQDLRRRFFLHHLIAEIHTAEIRATSEVSPNSKPSPNTKNHPVRFGSDDEGRY

SEQ ID NO: 11079 - protein, 269 aa, Homo sapiens
FSAQPPPSLQWLFEDETPITNRSRPPHLRRATVFANGSLLLTQVRPRNAGIYRCIGQGQRGPPIILEATLHLAEIEDMPLFEPRVFTAGSEERVTCLPPKGLPEPSVWWEHAGVRLPTHGRVYQKGHELVLANIAESDAGVYTCHAANLAGQRRQDVNITVASEHLCPEGQGEVEGNTGLGVMDRGFPAVPSWLKKPQDSQLEEGKPGYLDCLTQATPKPTVVWYRNQMLISEDSRFEVFKNGTLRINSVEVYDGTWYRCMSSTPAGSI

SEQ ID NO: 11080 - protein, 139 aa, Homo sapiens
MGAARGSPARPRRLPLLSVLLLPLLGGTQTAIVFIKQPSSQDALQGRRALLRCEVEAPGPVHVYWLLDGAPVQDTERRFAQGSSLSFAAVDRLQDSGTFQCVARDDVTGEEARSANASFNIKCESQGGCAQSPCQTLND

SEQ ID NO: 11081 - protein, 157 aa, Homo sapiens
MGAARGSPARPRRLPLLSVLLLPLLGGTQTAIVFIKQPSSQDALQGRRALLRCEVEAPGPVHVYWLLDGAPVQDTERRFAQGSSLSFAAVDRLQDSGTFQCVARDDVTGEEARSANASFNIKWIEAGPVVLKHPASEAEIQPQTQVTLRCHIDGHPR

SEQ ID NO: 11082 - protein, 1070 aa, Homo sapiens
MGAARGSPARPRRLPLLSVLLLPLLGGTQTAIVFIKQPSSQDALQGRRALLRCEVEAPGPVHVYWLLDGAPVQDTERRFAQGSSLSFAAVDRLQDSGTFQCVARDDVTGEEARSANASFNIKWIEAGPVVLKHPASEAEIQPQTQVTLRCHIDGHPRPTYQWFRDGTPLSDGQSNHTVSSKERNLTLRPAGPEHSGLYSCCAHSAFGQACSSQNFTLSIADESFARVVLAPQDVVVARYEEAMFHCQFSAQPPPSLQWLFEDETPITNRSRPPHLRRATVFANGSLLLTQVRPRNAGIYRCIGQGQRGPPIILEATLHLAEIEDMPLFEPRVFTAGSEERVTCLPPKGLPEPSVWWEHAGVRLPTHGRVYQKGHELVLANIAESDAGVYTCHAANLAGQRRQDVNITVATVPSWLKKPQDSQLEEGKPGYLDCLTQATPKPTVVWYRNQMLISEDSRFEVFKNGTLRINSVEVYDGTWYRCMSSTPAGSIEAQARVQVLEKLKFTPPPQPQQCMEFDKEATVPCSATGREKPTIKWERADGSSLPEWVTDNAGTLHFARVTRDDAGNYTCIASNGPQGQIRAHVQLTVAVFITFKVEPERTTVYQGHTALLQCEAQGDPKPLIQWKGKDRILDPTKLGPRMHIFQNGSLVIHDVAPEDSGRYTCIAGNSCNIKHTEAPLYVVDKPVPEESEGPGSPPPYKMIQTIGLSVGAAVAYIIAVLGLMFYCKKRCKAKRLQKQPEGEEPEMECLNGGPLQNGQPSAEIQEEVALTSLGSGPAATNKRHSTSDKMHFPRSSLQPITTLGKSEFGEVFLAKAQGLEEGVAETLVLVKSLQSKDEQQQLDFRRELEMFGKLNHANVVRLLGLCREAEPHYMVLEYVDLGDLKQFLRISKSKDEKLKSQPLSTKQKVALCTQVALGMEHLSNNRFVHKDLAARNCLVSAQRQVKVSALGLSKDVYNSEYYHFRQAWVPLRWMSPEAILEGDFSTKSDVWAFGVLMWEVFTHGEMPHGGQADDEVLADLQAGKARLPQPEGCPSKLYRLMQRCWALSPKDRPSFSEIASALGDSTVDSKP

SEQ ID NO: 11083 - protein, 816 aa, Homo sapiens
MGAARGSPARPRRLPLLSVLLLPLLGGTQTAIVFIKQPSSQDALQGRRALLRCEVEAPGPVHVYWLLDGAPVQDTERRFAQGSSLSFAAVDRLQDSGTFQCVARDDVTGEEARSANASFNIKWIEAGPVVLKHPASEAEIQPQTQVTLRCHIDGHPRPTYQWFRDGTPLSDGQSNHTVSSKERNLTLRPAGPEHSGLYSCCAHSAFGQACSSQNFTLSIADESFARVVLAPQDVVVARYEEAMFHCQFSAQPPPSLQWLFEDETPITNRSRPPHLRRATVFANGSLLLTQVRPRNAGIYRCIGQGQRGPPIILEATLHLAEIEDMPLFEPRVFTAGSEERVTCLPPKGLPEPSVWWEHAGVRLPTHGRVYQKGHELVLANIAESDAGVYTCHAANLAGQRRQDVNITVATVPSWLKKPQDSQLEEGKPGYLDCLTQATPKPTVVWYRNQMLISEDSRFEVFKNGTLRINSVEVYDGTWYRCMSSTPAGSIEAQARVQVLEKLKFTPPPQPQQCMEFDKEATVPCSATGREKPTIKWERADGSSLPEWVTDNAGTLHFARVTRDDAGNYTCIASNGPQGQIRAHVQLTVAVFITFKVEPERTTVYQGHTALLQCEAQGDPKPLIQWKGKDRILDPTKLGPRMHIFQNGSLVIHDVAPEDSGRYTCIAGNSCNIKHTEAPLYVVDKPVPEESEGPGSPPPYKMIQTIGLSVGAAVAYIIAVLGLMFYCKKRCKAKRLQKQPEGEEPEMECLNGGPLQNGQPSAEIQEEVALTSLGSGPAATNKRHSTSDKMHFPRSSLQPITTLGRPQAVPEDFQEQG

SEQ ID NO: 11084 - protein, 940 aa, Homo sapiens
MGAARGSPARPRRLPLLSVLLLPLLGGTQTAIVFIKQPSSQDALQGRRALLRCEVEAPGPVHVYWLLDGAPVQDTERRFAQGSSLSFAAVDRLQDSGTFQCVARDDVTGEEARSANASFNIKWIEAGPVVLKHPASEAEIQPQTQVTLRCHIDGHPRPTYQWFRDGTPLSDGQSNHTVSSKERNLTLRPAGPEHSGLYSCCAHSAFGQACSSQNFTLSIADESFARVVLAPQDVVVARYEEAMFHCQFSAQPPPSLQWLFEDETPITNRSRPPHLRRATVFANGSLLLTQVRPRNAGIYRCIGQGQRGPPIILEATLHLAEIEDMPLFEPRVFTAGSEERVTCLPPKGLPEPSVWWEHAGVRLPTHGRVYQKGHELVLANIAESDAGVYTCHAANLAGQRRQDVNITVANGSSLPEWVTDNAGTLHFARVTRDDAGNYTCIASNGPQGQIRAHVQLTVAVFITFKVEPERTTVYQGHTALLQCEAQGDPKPLIQWKGKDRILDPTKLGPRMHIFQNGSLVIHDVAPEDSGRYTCIAGNSCNIKHTEAPLYVVDKPVPEESEGPGSPPPYKMIQTIGLSVGAAVAYIIAVLGLMFYCKKRCKAKRLQKQPEGEEPEMECLNGGPLQNGQPSAEIQEEVALTSLGSGPAATNKRHSTSDKMHFPRSSLQPITTLGKSEFGEVFLAKAQGLEEGVAETLVLVKSLQSKDEQQQLDFRRELEMFGKLNHANVVRLLGLCREAEPHYMVLEYVDLGDLKQFLRISKSKDEKLKSQPLSTKQKVALCTQVALGMEHLSNNRFVHKDLAARNCLVSAQRQVKVSALGLSKDVYNSEYYHFRQAWVPLRWMSPEAILEGDFSTKSDVWAFGVLMWEVFTHGEMPHGGQADDEVLADLQAGKARLPQPEGCPSKLYRLMQRCWALSPKDRPSFSEIASALGDSTVDSKP

SEQ ID NO: 11085 - protein, 1030 aa, Homo sapiens
MGAARGSPARPRRLPLLSVLLLPLLGGTQTAIVFIKQPSSQDALQGRRALLRCEVEAPGPVHVYWLLDGAPVQDTERRFAQGSSLSFAAVDRLQDSGTFQCVARDDVTGEEARSANASFNIKWIEAGPVVLKHPASEAEIQPQTQVTLRCHIDGHPRPTYQWFRDGTPLSDGQSNHTVSSKERNLTLRPAGPEHSGLYSCCAHSAFGQACSSQNFTLSIADESFARVVLAPQDVVVARYEEAMFHCQFSAQPPPSLQWLFEDETPITNRSRPPHLRRATVFANGSLLLTQVRPRNAGIYRCIGQGQRGPPIILEATLHLAEIEDMPLFEPRVFTAGSEERVTCLPPKGLPEPSVWWEHAGVRLPTHGRVYQKGHELVLANIAESDAGVYTCHAANLAGQRRQDVNITVATVPSWLKKPQDSQLEEGKPGYLDCLTQATPKPTVVWYRNQMLISEDSRFEVFKNGTLRINSVEVYDGTWYRCMSSTPAGSIEAQARVQVLDGSSLPEWVTDNAGTLHFARVTRDDAGNYTCIASNGPQGQIRAHVQLTVAVFITFKVEPERTTVYQGHTALLQCEAQGDPKPLIQWKGKDRILDPTKLGPRMHIFQNGSLVIHDVAPEDSGRYTCIAGNSCNIKHTEAPLYVVDKPVPEESEGPGSPPPYKMIQTIGLSVGAAVAYIIAVLGLMFYCKKRCKAKRLQKQPEGEEPEMECLNGGPLQNGQPSAEIQEEVALTSLGSGPAATNKRHSTSDKMHFPRSSLQPITTLGKSEFGEVFLAKAQGLEEGVAETLVLVKSLQSKDEQQQLDFRRELEMFGKLNHANVVRLLGLCREAEPHYMVLEYVDLGDLKQFLRISKSKDEKLKSQPLSTKQKVALCTQVALGMEHLSNNRFVHKDLAARNCLVSAQRQVKVSALGLSKDVYNSEYYHFRQAWVPLRWMSPEAILEGDFSTKSDVWAFGVLMWEVFTHGEMPHGGQADDEVLADLQAGKARLPQPEGCPSKLYRLMQRCWALSPKDRPSFSEIASALGDSTVDSKP

SEQ ID NO: 11086 - protein, 1014 aa, Homo sapiens
MGAARGSPARPRRLPLLSVLLLPLLGGTQTAIVFIKQPSSQDALQGRRALLRCEVEAPGPVHVYWLLDGAPVQDTERRFAQGSSLSFAAVDRLQDSGTFQCVARDDVTGEEARSANASFNIKWIEAGPVVLKHPASEAEIQPQTQVTLRCHIDGHPRPTYQWFRDGTPLSDGQSNHTVSSKERNLTLRPAGPEHSGLYSCCAHSAFGQACSSQNFTLSIADESFARVVLAPQDVVVARYEEAMFHCQFSAQPPPSLQWLFEDETPITNRSRPPHLRRATVFANGSLLLTQVRPRNAGIYRCIGQGQRGPPIILEATLHLAEIEDMPLFEPRVFTAGSEERVTCLPPKGLPEPSVWWEHAGVRLPTHGRVYQKGHELVLANIAESDAGVYTCHAANLAGQRRQDVNITVATVPSWLKKPQDSQLEEGKPGYLDCLTQATPKPTVVWYRNQMLISEDSRFEVFKNGTLRINSVEVYDGTWYRCMSSTPAGSIEAQARVQVLEKLKFTPPPQPQQCMEFDKEATVPCSATGREKPTIKWERADGSSLPEWVTDNAGTLHFARVTRDDAGNYTCIASNGPQGQIRAHVQLTVAVFITFKVEPERTTVYQGHTALLQCEAQGDPKPLIQWKDKPVPEESEGPGSPPPYKMIQTIGLSVGAAVAYIIAVLGLMFYCKKRCKAKRLQKQPEGEEPEMECLNGGPLQNGQPSAEIQEEVALTSLGSGPAATNKRHSTSDKMHFPRSSLQPITTLGKSEFGEVFLAKAQGLEEGVAETLVLVKSLQSKDEQQQLDFRRELEMFGKLNHANVVRLLGLCREAEPHYMVLEYVDLGDLKQFLRISKSKDEKLKSQPLSTKQKVALCTQVALGMEHLSNNRFVHKDLAARNCLVSAQRQVKVSALGLSKDVYNSEYYHFRQAWVPLRWMSPEAILEGDFSTKSDVWAFGVLMWEVFTHGEMPHGGQADDEVLADLQAGKARLPQPEGCPSKLYRLMQRCWALSPKDRPSFSEIASALGDSTVDSKP

SEQ ID NO: 11087 - protein, 459 aa, Homo sapiens
MGAARGSPARPRRLPLLSVLLLPLLGGTQTAIVFIKQPSSQDALQGRRALLRCEVEAPGPVHVYWLLDGAPVQDTERRFAQGSSLSFAAVDRLQDSGTFQCVARDDVTGEEARSANASFNIKWIEAGPVVLKHPASEAEIQPQTQVTLRCHIDGHPRPTYQWFRDGTPLSDGQSNHTVSSKERNLTLRPAGPEHSGLYSCCAHSAFGQACSSQNFTLSIADESFARVVLAPQDVVVARYEEAMFHCQFSAQPPPSLQWLFEDETPITNRSRPPHLRRATVFANGSLLLTQVRPRNAGIYRCIGQGQRGPPIILEATLHLAEIEDMPLFEPRVFTAGSEERVTCLPPKGLPEPSVWWEHAGVRLPTHGRVYQKGHELVLANIAESDAGVYTCHAANLAGQRRQDVNITVASEHLCPEGQGEVEGNTGLGVMDRGFPGTHLRSSQFWALQAWESVHYWESV

SEQ ID NO: 11088 - protein, 1078 aa, Homo sapiens
MGSFLSGEKRPSAPTVGSAMEKKEFPTPPGRVGPGTQTAIVFIKQPSSQDALQGRRALLRCEVEAPGPVHVYWLLDGAPVQDTERRFAQGSSLSFAAVDRLQDSGTFQCVARDDVTGEEARSANASFNIKWIEAGPVVLKHPASEAEIQPQTQVTLRCHIDGHPRPTYQWFRDGTPLSDGQSNHTVSSKERNLTLRPAGPEHSGLYSCCAHSAFGQACSSQNFTLSIADESFARVVLAPQDVVVARYEEAMFHCQFSAQPPPSLQWLFEDETPITNRSRPPHLRRATVFANGSLLLTQVRPRNAGIYRCIGQGQRGPPIILEATLHLAEIEDMPLFEPRVFTAGSEERVTCLPPKGLPEPSVWWEHAGVRLPTHGRVYQKGHELVLANIAESDAGVYTCHAANLAGQRRQDVNITVATVPSWLKKPQDSQLEEGKPGYLDCLTQATPKPTVVWYRNQMLISEDSRFEVFKNGTLRINSVEVYDGTWYRCMSSTPAGSIEAQARVQVLEKLKFTPPPQPQQCMEFDKEATVPCSATGREKPTIKWERADGSSLPEWVTDNAGTLHFARVTRDDAGNYTCIASNGPQGQIRAHVQLTVAVFITFKVEPERTTVYQGHTALLQCEAQGDPKPLIQWKGKDRILDPTKLGPRMHIFQNGSLVIHDVAPEDSGRYTCIAGNSCNIKHTEAPLYVVDKPVPEESEGPGSPPPYKMIQTIGLSVGAAVAYIIAVLGLMFYCKKRCKAKRLQKQPEGEEPEMECLNGGPLQNGQPSAEIQEEVALTSLGSGPAATNKRHSTSDKMHFPRSSLQPITTLGKSEFGEVFLAKAQGLEEGVAETLVLVKSLQSKDEQQQLDFRRELEMFGKLNHANVVRLLGLCREAEPHYMVLEYVDLGDLKQFLRISKSKDEKLKSQPLSTKQKVALCTQVALGMEHLSNNRFVHKDLAARNCLVSAQRQVKVSALGLSKDVYNSEYYHFRQAWVPLRWMSPEAILEGDFSTKSDVWAFGVLMWEVFTHGEMPHGGQADDEVLADLQAGKARLPQPEGCPSKLYRLMQRCWALSPKDRPSFSEIASALGDSTVDSKP

SEQ ID NO: 11089 - protein, 257 aa, Homo sapiens
MVARVSGLIVTLLSSSFPGGPLQNGQPSAEIQEEVALTSLGSGPAATNKRHSTSDKMHFPRSSLQPITTLGKSEFGEVFLAKAQGLEEGVAETLVLVKSLQSKDEQQQLDFRRELEMFGKLNHANVVRLLGLCREAEPHYMVLEYVDLGDLKQFLRISKSKDEKLKSQPLSTKQKVALCTQVALGMEHLSNNRFVHKDLAARNCLVSAQRQVKVSALGLSKDVYNSEYYHFRQAWVPLRWMSPEAILEGDFSTKSDV

SEQ ID NO: 11090 - protein, 84 aa, Homo sapiens
MVARVSGLIVTLLSSSFPGGPLQNGQPSAEIQEEVALTSLGSGPAATNKRHSTSDKMHFPRSSLQPITTLGRPQAVPEDFQEQG

SEQ ID NO: 11091 - protein, 25 aa, Homo sapiens
TEHGTEAIFVAAVGIRPSHHAAAQS

SEQ ID NO: 11092 - protein, 25 aa, Homo sapiens
TEHGTEAIFVAAVGIRPSHHAAAQS

SEQ ID NO: 11093 - protein, 365 aa, Homo sapiens
  VARIANT 1: note = misc_feature - Xaa can be any naturally occurring amino acid
XEHAGVRLPTHGRVYQKGHELVLANIAESDAGVYTCHAANLAGQRRQDVNITVATVPSWLKKPQDSQLEEGKPGYLDCLTQATPKPTVVWYRNQMLISEDSRFEVFLAKAQGLEEGVAETLVLVKSLQSKDEQQQLDFRRELEMFGKLNHANVVRLLGLCREAEPHYMVLEYVDLGDLKQFLRISKSKDEKLKSQPLSTKQKVALCTQVALGMEHLSNNRFVHKDLAARNCLVSAQRQVKVSALGLSKDVYNSEYYHFRQAWVPLRWMSPEAILEGDFSTKSDVWAFGVLMWEVFTHGEMPHGGQADDEVLADLQAGKARLPQPEGCPSKLYRLMQRCWALSPKDRPSFSEIASALGDSTVDSKP

SEQ ID NO: 11094 - protein, 25 aa, Homo sapiens
  VARIANT 1: note = misc_feature - Xaa can be any naturally occurring amino acid
XEHGTEAIFVAAVGIRPSHHAAAQS

SEQ ID NO: 11095 - protein, 168 aa, Homo sapiens
MQAQQYQQQRRKFAAAFLAFIFILAAVDTAEAGKKEKPEKKVKKSDCGEWQWSVCVPTSGDCGLGTREGTRTGAECKQTMKTQRCKIPCNWKKQFGAECKYQFQAWGECDLNTALKTRTGSLKRALHNAECQKTVTISKPCGKLTKPKPQAESKKKKKEGKKQEKMLD

SEQ ID NO: 11096 - protein, 166 aa, Homo sapiens
MQAQQYQQQRRKFAAAFLAFIFILAAVDTAEAGKKEKPEKKVKKSDCGEWQWSVCVPTSGDCGLGTREGTRTGAECKQTMKTQRCKIPCNWKKQFGAECKYQFQAWGECDLNTALKTRTGSLKRALHNAECQKTVTISKPCGKLTKPKPQEKGKWRHRSGESLRRW

SEQ ID NO: 11097 - protein, 138 aa, Homo sapiens
MDSWFILVLLGSGLICVSANNATTVAPSVGITRLINSSTAEPVKEEAKTSNPTSSLTSLSVAPTFSPNITLGPTYLTTVNSSDSDNGTTRTASTNSIGITISPNGTWLPDNQFTDARTEPWEGNSSTAATTPETFPPS

SEQ ID NO: 11098 - protein, 253 aa, Homo sapiens
MDSWFILVLLGSGLICVSANNATTVAPSVGITRLINSSTAEPVKEEAKTSNPTSSLTSLSVAPTFSPNITLGPTYLTTVNSSDSDNGTTRTASTNSIGITISPNGTWLPDNQFTDARTEPWEGNSSTAATTPETFPPSDETPIIAVMVALSSLLVIVFIIIVLYMLRFKKYKQAGSHSNSFRLSNGRTEDVEPQSVPLLARSPSTNRKYPPLPVDKLEEEINRRMADDNKLFREEFNALPACPIQATCEAASK

SEQ ID NO: 11099 - protein, 793 aa, Homo sapiens
MDSWFILVLLGSGLICVSANNATTVAPSVGITRLINSSTAEPVKEEAKTSNPTSSLTSLSVAPTFSPNITLGPTYLTTVNSSDSDNGTTRTASTNSIGITISPNGTWLPDNQFTDARTEPWEGNSSTAATTPETFPPSDETPIIAVMVALSSLLVIVFIIIVLYMLRFKKYKQAGSHSNSFRLSNGRTEDVEPQSVPLLARSPSTNRKYPPLPVDKLEEEINRRMADDNKLFREEFNALPACPIQATCEAASKEENKEKNRYVNILPYDHSRVHLTPVEGVPDSDYINASFINGYQEKNKFIAAQGPKEETVNDFWRMIWEQNTATIVMVTNLKERKECKCAQYWPDQGCWTYGNIRVSVEDVTVLVDYTVRKFCIQQVGDMTNRKPQRLITQFHFTSWPDFGVPFTPIGMLKFLKKVKACNPQYAGAIVVHCSAGVGRTGTFVVIDAMLDMMHTERKVDVYGFVSRIRAQRCQMVQTDMQYVFIYQALLEHYLYGDTELEVTSLETHLQKIYNKIPGTSNNGLEEEFKKLTSIKIQNDKMRTGNLPANMKKNRVLQIIPYEFNRVIIPVKRGEENTDYVNASFIDGYRQKDSYIASQGPLLHTIEDFWRMIWEWKSCSIVMLTELEERGQEKCAQYWPSDGLVSYGDITVELKKEEECESYTVRDLLVTNTRENKSRQIRQFHFHGWPEVGIPSDGKGMISIIAAVQKQQQQSGNHPITVHCSAGAGRTGTFCALSTVLERVKAEGILDVFQTVKSLRLQRPHMVQTLEQYEFCYKVVQEYIDAFSDYANFK

SEQ ID NO: 11100 - protein, 793 aa, Homo sapiens; identical to SEQ ID NO: 11099

SEQ ID NO: 11101 - protein, 793 aa, Homo sapiens; identical to SEQ ID NO: 11099

SEQ ID NO: 11102 - protein, 175 aa, Homo sapiens
MDSWFILVLLGSGLICVSANNATTVAPSVGITRLINSSTAEPVKEEAKTSNPTSSLTSLSVAPTFSPNITLGPTYLTTVNSSDSDNGTTRTASTNSIGITISPNGTWLPDNQFTDARTEPWEGNSSTAATTPETFPPSGNSDSKDRRDETPIIAVMVALSSLLVIVFIIIVLYML

SEQ ID NO: 11103 - protein, 802 aa, Homo sapiens
MDSWFILVLLGSGLICVSANNATTVAPSVGITRLINSSTAEPVKEEAKTSNPTSSLTSLSVAPTFSPNITLGPTYLTTVNSSDSDNGTTRTASTNSIGITISPNGTWLPDNQFTDARTEPWEGNSSTAATTPETFPPSGNSDSKDRRDETPIIAVMVALSSLLVIVFIIIVLYMLRFKKYKQAGSHSNSFRLSNGRTEDVEPQSVPLLARSPSTNRKYPPLPVDKLEEEINRRMADDNKLFREEFNALPACPIQATCEAASKEENKEKNRYVNILPYDHSRVHLTPVEGVPDSDYINASFINGYQEKNKFIAAQGPKEETVNDFWRMIWEQNTATIVMVTNLKERKECKCAQYWPDQGCWTYGNIRVSVEDVTVLVDYTVRKFCIQQVGDMTNRKPQRLITQFHFTSWPDFGVPFTPIGMLKFLKKVKACNPQYAGAIVVHCSAGVGRTGTFVVIDAMLDMMHTERKVDVYGFVSRIRAQRCQMVQTDMQYVFIYQALLEHYLYGDTELEVTSLETHLQKIYNKIPGTSNNGLEEEFKKLTSIKIQNDKMRTGNLPANMKKNRVLQIIPYEFNRVIIPVKRGEENTDYVNASFIDGYRQKDSYIASQGPLLHTIEDFWRMIWEWKSCSIVMLTELEERGQEKCAQYWPSDGLVSYGDITVELKKEEECESYTVRDLLVTNTRENKSRQIRQFHFHGWPEVGIPSDGKGMISIIAAVQKQQQQSGNHPITVHCSAGAGRTGTFCALSTVLERVKAEGILDVFQTVKSLRLQRPHMVQTLEQYEFCYKVVQEYIDAFSDYANFK

SEQ ID NO: 11104 - protein, 802 aa, Homo sapiens; identical to SEQ ID NO: 11103

SEQ ID NO: 11105 - protein, 1407 aa, Homo sapiens
MEAEFYMVILTCLIFRNSEGFQIVHVQKQQCLFKNEKVVVGSCNRTIQNQQWMWTEDEKLLHVKSALCLAFIRNAAENYSQNSSERQHPNLHMTGITDTSWVLSTTQPFSSTTEETGLAEPERCNFTLAESKASSHSVSIQWRILGSPCNFSLIYSSDTLGAALCPTFRIDNTTYGCNLQDLQAGTIYNFRIISLDEERTVVLQTDPLPPARFGVSKEKTTSTSLHVWWTPSSGKVTSYEVQLFDENNQKIQGVQIQESTSWNEYTFFNLTAGSKYNIAITAVSGGKRSFSVYTNGSTVPSPVKDIGISTKANSLLISWSHGSGNVERYRLMLMDKGILVHGGVVDKHATSYAFHGLTPGYLYNLTVMTEAAGLQNYRWKLVRTAPMEVSNLKVTNDGSLTSLKVKWQRPPGNVDSYNITLSHKGTIKESRVLAPWITETHFKELVPGRLYQVTVSCVSGELSAQKMAVGRTFPDKVANLEANNNGRMRSLVVSWSPPAGDWEQYRILLFNDSVVLLNITVGKEETQYVMDDTGLVPGRQYEVEVIVESGNLKNSERCQGRTVPLAVLQLRVKHANETSLSIMWQTPVAEWEKYIISLADRDLLLIHKSLSKDAKEFTFTDLVPGRKYMATVTSISGDLKNSSSVKGRTVPAQVTDLHVANQGMTSSLFTNWTQAQGDVEFYQVLLIHENVVIKNESISSETSRYSFHSLKSGSLYSVVVTTVSGGISSRQVVVEGRTVPSSVSGVTVNNSGRNDYLSVSWLLAPGDVDNYEVTLSHDGKVVQSLVIAKSVRECSFSSLTPGRLYTVTITTRSGKYENHSFSQERTVPDKVQGVSVSNSARSDYLRVSWVHATGDFDHYEVTIKNKNNFIQTKSIPKSENECVFVQLVPGRLYSVTVTTKSGQYEANEQGNGRTIPEPVKDLTLRNRSTEDLHVTWSGANGDVDQYEIQLLFNDMKVFPPFHLVNTATEYRFTSLTPGRQYKILVLTISGDVQQSAFIEGFTVPSAVKNIHISPNGATDSLTVNWTPGGGDVDSYTVSAFRHSQKVDSQTIPKHVFEHTFHRLEAGEQYQIMIASVSGSLKNQINVVGRTVPASVQGVIADNAYSSYSLIVSWQKAAGVAERYDILLLTENGILLRNTSEPATTKQHKFEDLTPGKKYKIQILTVSGGLFSKEAQTEGRTVPAAVTDLRITENSTRHLSFRWTASEGELSWYNIFLYNPDGNLQERAQVDPLVQSFSFQNLLQGRMYKMVIVTHSGELSNESFIFGRTVPASVSHLRGSNRNTTDSLWFNWSPASGDFDFYELILYNPNGTKKENWKDKDLTEWRFQGLVPGRKYVLWVVTHSGDLSNKVTAESRTAPSPPSLMSFADIANTSLAITWKGPPDWTDYNDFELQWLPRDALTVFNPYN

SEQ ID NO: 11106 - protein, 2215 aa, Homo sapiens
MEAEFYMVILTCLIFRNSEGFQIVHVQKQQCLFKNEKVVVGSCNRTIQNQQWMWTEDEKLLHVKSALCLAISNSSRGPSRSAILDRCSQAPRWTCYDQEGFLEVENASLFLQKQGSRVVVKKARKYLHSWMKIDVNKEGKLVNESLCLQKAGLGAEVSVRSTRNTAPPQILTTFNAVPDGLVFLIRNTTEAFIRNAAENYSQNSSERQHPNLHMTGITDTSWVLSTTQPFSSTTEETGLAEPERCNFTLAESKASSHSVSIQWRILGSPCNFSLIYSSDTLGAALCPTFRIDNTTYGCNLQDLQAGTIYNFRIISLDEERTVVLQTDPLPPARFGVSKEKTTSTSLHVWWTPSSGKVTSYEVQLFDENNQKIQGVQIQESTSWNEYTFFNLTAGSKYNIAITAVSGGKRSFSVYTNGSTVPSPVKDIGISTKANSLLISWSHGSGNVERYRLMLMDKGILVHGGVVDKHATSYAFHGLTPGYLYNLTVMTEAAGLQNYRWKLVRTAPMEVSNLKVTNDGSLTSLKVKWQRPPGNVDSYNITLSHKGTIKESRVLAPWITETHFKELVPGRLYQVTVSCVSGELSAQKMAVGRTFPDKVANLEANNNGRMRSLVVSWSPPAGDWEQYRILLFNDSVVLLNITVGKEETQYVMDDTGLVPGRQYEVEVIVESGNLKNSERCQGRTVPLAVLQLRVKHANETSLSIMWQTPVAEWEKYIISLADRDLLLIHKSLSKDAKEFTFTDLVPGRKYMATVTSISGDLKNSSSVKGRTVPAQVTDLHVANQGMTSSLFTNWTQAQGDVEFYQVLLIHENVVIKNESISSETSRYSFHSLKSGSLYSVVVTTVSGGISSRQVVVEGRTVPSSVSGVTVNNSGRNDYLSVSWLLAPGDVDNYEVTLSHDGKVVQSLVIAKSVRECSFSSLTPGRLYTVTITTRSGKYENHSFSQERTVPDKVQGVSVSNSARSDYLRVSWVHATGDFDHYEVTIKNKNNFIQTKSIPKSENECVFVQLVPGRLYSVTVTTKSGQYEANEQGNGRTIPEPVKDLTLRNRSTEDLHVTWSGANGDVDQYEIQLLFNDMKVFPPFHLVNTATEYRFTSLTPGRQYKILVLTISGDVQQSAFIEGFTVPSAVKNIHISPNGATDSLTVNWTPGGGDVDSYTVSAFRHSQKVDSQTIPKHVFEHTFHRLEAGEQYQIMIASVSGSLKNQINVVGRTVPASVQGVIADNAYSSYSLIVSWQKAAGVAERYDILLLTENGILLRNTSEPATTKQHKFEDLTPGKKYKIQILTVSGGLFSKEAQTEGRTVPAAVTDLRITENSTRHLSFRWTASEGELSWYNIFLYNPDGNLQERAQVDPLVQSFSFQNLLQGRMYKMVIVTHSGELSNESFIFGRTVPASVSHLRGSNRNTTDSLWFNWSPASGDFDFYELILYNPNGTKKENWKDKDLTEWRFQGLVPGRKYVLWVVTHSGDLSNKVTAESRTAPSPPSLMSFADIANTSLAITWKGPPDWTDYNDFELQWLPRDALTVFNPYNNRKSEGRIVYGLRPGRSYQFNVKTVSGDSWKTYSKPIFGSVRTKPDKIQNLHCRPQNSTAIACSWIPPDSDFDGYSIECRKMDTQEVEFSRKLEKEKSLLNIMMLVPHKRYLVSIKVQSAGMTSEVVEDSTITMIDRPPPPPPHIRVNEKDVLISKSSINFTVNCSWFSDTNGAVKYFTVVVREADGSDELKPEQQHPLPSYLEYRHNASIRVYQTNYFASKCAENPNSNSKSFNIKLGAEMESLGGKCDPTQQKFCDGPLKPHTAYRISIRAFTQLFDEDLKEFTKPLYSDTFFSLPITTESEPLFGAIEGVSAGLFLIGMLVAVVALLICRQKVSHGRERPSARLSIRRDRPLSVHLNLGQKGNRKTSCPIKINQFEGHFMKLQADSNYLLSKEYEELKDVGRNQSCDIALLPENRGKNRYNNILPYDATRVKLSNVDDDPCSDYINASYIPGNNFRREYIVTQGPLPGTKDDFWKMVWEQNVHNIVMVTQCVEKGRVKCDHYWPADQDSLYYGDLILQMLSESVLPEWTIREFKICGEEQLDAHRLIRHFHYTVWPDHGVPETTQSLIQFVRTVRDYINRSPGAGPTVVHCSAGVGRTGTFIALDRILQQLDSKDSVDIYGAVHDLRLHRVHMVQTECQYVYLHQCVRDVLRARKLRSEQENPLFPIYENVNPEYHRDPVYSRH

SEQ ID NO: 11107 - protein, 2127 aa, Homo sapiens
MEAEFYMVILTCLIFRNSEGFQIVHVQKQQCLFKNEKVVVGSCNRTIQNQQWMWTEDEKLLHVKSALCLAISNSSRGPSRSAILDRCSQAPRWTCYDQEGFLEVENASLFLQKQGSRVVVKKARKYLHSWMKIDVNKEGKLVNESLCLQKAGLGAEVSVRSTRNTAPPQILTTFNAVPDGLVFLIRNTTEAFIRNAAENYSQNSSERQHPNLHMTGITDTSWVLSTTQPFSSTTEETGLAEPERCNFTLAESKASSHSVSIQWRILGSPCNFSLIYSSDTLGAALCPTFRIDNTTYGCNLQDLQAGTIYNFRIISLDEERTVVLQTDPLPPARFGVSKEKTTSTSLHVWWTPSSGKVTSYEVQLFDENNQKIQGVQIQESTSWNEYTFFNLTAGSKYNIAITAVSGGKRSFSVYTNGSTVPSPVKDIGISTKANSLLISWSHGSGNVERYRLMLMDKGILVHGGVVDKHATSYAFHGLTPGYLYNLTVMTEAAGLQNYRWKLVRTAPMEVSNLKVTNDGSLTSLKVKWQRPPGNVDSYNITLSHKGTIKESRVLAPWITETHFKELVPGRLYQVTVSCVSGELSAQKMAVGRTFPDKVANLEANNNGRMRSLVVSWSPPAGDWEQYRILLFNDSVVLLNITVGKEETQYVMDDTGLVPGRQYEVEVIVESGNLKNSERCQGRTVPLAVLQLRVKHANETSLSIMWQTPVAEWEKYIISLADRDLLLIHKSLSKDAKEFTFTDLVPGRKYMATVTSISGDLKNSSSVKGRTVPAQVTDLHVANQGMTSSLFTNWTQAQGDVEFYQVLLIHENVVIKNESISSETSRYSFHSLKSGSLYSVVVTTVSGGISSRQVVVEGRTVPDKVQGVSVSNSARSDYLRVSWVHATGDFDHYEVTIKNKNNFIQTKSIPKSENECVFVQLVPGRLYSVTVTTKSGQYEANEQGNGRTIPEPVKDLTLRNRSTEDLHVTWSGANGDVDQYEIQLLFNDMKVFPPFHLVNTATEYRFTSLTPGRQYKILVLTISGDVQQSAFIEGFTVPSAVKNIHISPNGATDSLTVNWTPGGGDVDSYTVSAFRHSQKVDSQTIPKHVFEHTFHRLEAGEQYQIMIASVSGSLKNQINVVGRTVPASVQGVIADNAYSSYSLIVSWQKAAGVAERYDILLLTENGILLRNTSEPATTKQHKFEDLTPGKKYKIQILTVSGGLFSKEAQTEGRTVPAAVTDLRITENSTRHLSFRWTASEGELSWYNIFLYNPDGNLQERAQVDPLVQSFSFQNLLQGRMYKMVIVTHSGELSNESFIFGRTVPASVSHLRGSNRNTTDSLWFNWSPASGDFDFYELILYNPNGTKKENWKDKDLTEWRFQGLVPGRKYVLWVVTHSGDLSNKVTAESRTAPSPPSLMSFADIANTSLAITWKGPPDWTDYNDFELQWLPRDALTVFNPYNNRKSEGRIVYGLRPGRSYQFNVKTVSGDSWKTYSKPIFGSVRTKPDKIQNLHCRPQNSTAIACSWIPPDSDFDGYSIECRKMDTQEVEFSRKLEKEKSLLNIMMLVPHKRYLVSIKVQSAGMTSEVVEDSTITMIDRPPPPPPHIRVNEKDVLISKSSINFTVNCSWFSDTNGAVKYFTVVVREADGSDELKPEQQHPLPSYLEYRHNASIRVYQTNYFASKCAENPNSNSKSFNIKLGAEMESLGGKCDPTQQKFCDGPLKPHTAYRISIRAFTQLFDEDLKEFTKPLYSDTFFSLPITTESEPLFGAIEGVSAGLFLIGMLVAVVALLICRQKVSHGRERPSARLSIRRDRPLSVHLNLGQKGNRKTSCPIKINQFEGHFMKLQADSNYLLSKEYEELKDVGRNQSCDIALLPENRGKNRYNNILPYDATRVKLSNVDDDPCSDYINASYIPGNNFRREYIVTQGPLPGTKDDFWKMVWEQNVHNIVMVTQCVEKGRVKCDHYWPADQDSLYYGDLILQMLSESVLPEWTIREFKICGEEQLDAHRLIRHFHYTVWPDHGVPETTQSLIQFVRTVRDYINRSPGAGPTVVHCSAGVGRTGTFIALDRILQQLDSKDSVDIYGAVHDLRLHRVHMVQTECQYVYLHQCVRDVLRARKLRSEQENPLFPIYENVNPEYHRDPVYSRH

SEQ ID NO: 11108 - protein, 1583 aa, Homo sapiens
MEAEFYMVILTCLIFRNSGFQIVHVQKQQCLFKNEKVVVGSCNRTIQNQQWMWTEDEKLLHVKSALCLAISNSSRGPSRSAILDRCSQAPRWTCYDQEGFLEVENASLFLQKQGSRVVVKKARKYLHSWMKIDVNKEGKLVNESLCLQKAGLGAEVSVRSTRNTAPPQILTTFNAVPDGLVFLIRNTTEAFIRNAAENYSQNSSERQHPNLHMTGITDTSWVLSTTQPFSSTTEETGLAEPERCNFTLAESKASSHSVSIQWRILGSPCNFSLIYSSDTLGAALCPTFRIDNTTYGCNLQDLQAGTIYNFRIISLDEERTVVLQTDPLPPARFGVSKEKTTSTSLHVWWTPSSGKVTSYEVQLFDENNQKIQGVQIQESTSWNEYTFFNLTAGSKYNIAITAVSGGKRSFSVYTNGSTVPSPVKDIGISTKANSLLISWSHGSGNVERYRLMLMDKGILVHGGVVDKHATSYAFHGLTPGYLYNLTVMTEAAGLQNYRWKLVRTAPMEVSNLKVTNDGSLTSLKVKWQRPPGNVDSYNITLSHKGTIKESRVLAPWITETHFKELVPGRLYQVTVSCVSGELSAQKMAVGRTFPDKVANLEANNNGRMRSLVVSWSPPAGDWEQYRILLFNDSVVLLNITVGKEETQYVMDDTGLVPGRQYEVEVIVESGNLKNSERCQGRTVPLAVLQLRVKHANETSLSIMWQTPVAEWEKYIISLADRDLLLIHKSLSKDAKEFTFTDLVPGRKYMATVTSISGDLKNSSSVKGRTVPAQVTDLHVANQGMTSSLFTNWTQAQGDVEFYQVLLIHENVVIKNESISSETSRYSFHSLKSGSLYSVVVTTVSGGISSRQVVVEGRTVPSSVSGVTVNNSGRNDYLSVSWLLAPGDVDNYEVTLSHDGKVVQSLVIAKSVRECSFSSLTPGRLYTVTITTRSGKYENHSFSQERTVPDKVQGVSVSNSARSDYLRVSWVHATGDFDHYEVTIKNKNNFIQTKSIPKSENECVFVQLVPGRLYSVTVTTKSGQYEANEQGNGRTIPEPVKDLTLRNRSTEDLHVTWSGANGDVDQYEIQLLFNDMKVFPPFHLVNTATEYRFTSLTPGRQYKILVLTISGDVQQSAFIEGFTVPSAVKNIHISPNGATDSLTVNWTPGGGDVDSYTVSAFRHSQKVDSQTIPKHVFEHTFHRLEAGEQYQIMIASVSGSLKNQINVVGRTVPASVQGVIADNAYSSYSLIVSWQKAAGVAERYDILLLTENGILLRNTSEPATTKQHKFEDLTPGKKYKIQILTVSGGLFSKEAQTEGRTVPAAVTDLRITENSTRHLSFRWTASEGELSWYNIFLYNPDGNLQERAQVDPLVQSFSFQNLLQGRMYKMVIVTHSGELSNESFIFGRTVPASVSHLRGSNRNTTDSLWFNWSPASGDFDFYELILYNPNGTKKENWKDKDLTEWRFQGLVPGRKYVLWVVTHSGDLSNKVTAESRTAPSPPSLMSFADIANTSLAITWKGPPDWTDYNDFELQWLPRDALTVFNPYNNRKSEGRIVYGLRPGRSYQFNVKTVSGDSWKTYSKPIFGSVRTSMTCFATLISQME

SEQ ID NO: 11109 - protein, 1997 aa, Homo sapiens
MLSHGAGLALWITLSLLQTGLAEPERCNFTLAESKASSHSVSIQWRILGSPCNFSLIYSSDTLGAALCPTFRIDNTTYGCNLQDLQAGTIYNFRIISLDEERTVVLQTDPLPPARFGVSKEKTTSTSLHVWWTPSSGKVTSYEVQLFDENNQKIQGVQIQESTSWNEYTFFNLTAGSKYNIAITAVSGGKRSFSVYTNGSTVPSPVKDIGISTKANSLLISWSHGSGNVERYRLMLMDKGILVHGGVVDKHATSYAFHGLTPGYLYNLTVMTEAAGLQNYRWKLVRTAPMEVSNLKVTNDGSLTSLKVKWQRPPGNVDSYNITLSHKGTIKESRVLAPWITETHFKELVPGRLYQVTVSCVSGELSAQKMAVGRTFPDKVANLEANNNGRMRSLVVSWSPPAGDWEQYRILLFNDSVVLLNITVGKEETQYVMDDTGLVPGRQYEVEVIVESGNLKNSERCQGRTVPLAVLQLRVKHANETSLSIMWQTPVAEWEKYIISLADRDLLLIHKSLSKDAKEFTFTDLVPGRKYMATVTSISGDLKNSSSVKGRTVPAQVTDLHVANQGMTSSLFTNWTQAQGDVEFYQVLLIHENVVIKNESISSETSRYSFHSLKSGSLYSVVVTTVSGGISSRQVVVEGRTVPSSVSGVTVNNSGRNDYLSVSWLLAPGDVDNYEVTLSHDGKVVQSLVIAKSVRECSFSSLTPGRLYTVTITTRSGKYENHSFSQERTVPDKVQGVSVSNSARSDYLRVSWVHATGDFDHYEVTIKNKNNFIQTKSIPKSENECVFVQLVPGRLYSVTVTTKSGQYEANEQGNGRTIPEPVKDLTLRNRSTEDLHVTWSGANGDVDQYEIQLLFNDMKVFPPFHLVNTATEYRFTSLTPGRQYKILVLTISGDVQQSAFIEGFTVPSAVKNIHISPNGATDSLTVNWTPGGGDVDSYTVSAFRHSQKVDSQTIPKHVFEHTFHRLEAGEQYQIMIASVSGSLKNQINVVGRTVPASVQGVIADNAYSSYSLIVSWQKAAGVAERYDILLLTENGILLRNTSEPATTKQHKFEDLTPGKKYKIQILTVSGGLFSKEAQTEGRTVPAAVTDLRITENSTRHLSFRWTASEGELSWYNIFLYNPDGNLQERAQVDPLVQSFSFQNLLQGRMYKMVIVTHSGELSNESFIFGRTVPASVSHLRGSNRNTTDSLWFNWSPASGDFDFYELILYNPNGTKKENWKDKDLTEWRFQGLVPGRKYVLWVVTHSGDLSNKVTAESRTAPSPPSLMSFADIANTSLAITWKGPPDWTDYNDFELQWLPRDALTVFNPYNNRKSEGRIVYGLRPGRSYQFNVKTVSGDSWKTYSKPIFGSVRTKPDKIQNLHCRPQNSTAIACSWIPPDSDFDGYSIECRKMDTQEVEFSRKLEKEKSLLNIMMLVPHKRYLVSIKVQSAGMTSEVVEDSTITMIDRPPPPPPHIRVNEKDVLISKSSINFTVNCSWFSDTNGAVKYFTVVVREADGSDELKPEQQHPLPSYLEYRHNASIRVYQTNYFASKCAENPNSNSKSFNIKLGAEMESLGGKCDPTQQKFCDGPLKPHTAYRISIRAFTQLFDEDLKEFTKPLYSDTFFSLPITTESEPLFGAIEGVSAGLFLIGMLVAVVALLICRQKVSHGRERPSARLSIRRDRPLSVHLNLGQKGNRKTSCPIKINQFEGHFMKLQADSNYLLSKEYEELKDVGRNQSCDIALLPENRGKNRYNNILPYDATRVKLSNVDDDPCSDYINASYIPGNNFRREYIVTQGPLPGTKDDFWKMVWEQNVHNIVMVTQCVEKGRVKCDHYWPADQDSLYYGDLILQMLSESVLPEWTIREFKICGEEQLDAHRLIRHFHYTVWPDHGVPETTQSLIQFVRTVRDYINRSPGAGPTVVHCSAGVGRTGTFIALDRILQQLDSKDSVDIYGAVHDLRLHRVHMVQTECQYVYLHQCVRDVLRARKLRSEQENPLFPIYENVNPEYHRDPVYSRH

SEQ ID NO: 11110 - protein, 1907 aa, Homo sapiens
MLSHGAGLALWITLSLLQTGLAEPERCNFTLAESKASSHSVSIQWRILGSPCNFSLIYSSDTLGAALCPTFRIDNTTYGCNLQDLQAGTIYNFRIISLDEERTVVLQTDPLPPARFGVSKEKTTSTSLHVWWTPSSGKVTSYEVQLFDENNQKIQGVQIQESTSWNEYTFFNLTAGSKYNIAITAVSGGKRSFSVYTNGSTVPSPVKDIGISTKANSLLISWSHGSGNVERYRLMLMDKGILVHGGVVDKHATSYAFHGLTPGYLYNLTVMTEAAGLQNYRWKLVRTAPMEVSNLKVTNDGSLTSLKVKWQRPPGNVDSYNITLSHKGTIKESRVLAPWITETHFKELVPGRLYQVTVSCVSGELSAQKMAVGRTFPDKVANLEANNNGRMRSLVVSWSPPAGDWEQYRILLFNDSVVLLNITVGKEETQYVMDDTGLVPGRQYEVEVIVESGNLKNSERCQGRTVPLAVLQLRVKHANETSLSIMWQTPVAEWEKYIISLADRDLLLIHKSLSKDAKEFTFTDLVPGRKYMATVTSISGDLKNSSSVKGRTVPAQVTDLHVANQGMTSSLFTNWTQAQGDVEFYQVLLIHENVVIKNESISSETSRYSFHSLKSGSLYSVVVTTVSGGISSRQVVVEGRTVPSSVSGVTVNNSGRNDYLSVSWLLAPGDVDNYEVTLSHDGKVVQSLVIAKSVRECSFSSLTPGRLYTVTITTRSGKYENHSFSQERTVPDKVQGVSVSNSARSDYLRVSWVHATGDFDHYEVTIKNKNNFIQTKSIPKSENECVFVQLVPGRLYSVTVTTKSGQYEANEQGNGRTIPEPVKDLTLRNRSTEDLHVTWSGANGDVDQYEIQLLFNDMKVFPPFHLVNTATEYRFTSLTPGRQYKILVLTISGDVQQSAFIEGFTVPSAVKNIHISPNGATDSLTVNWTPGGGDVDSYTVSAFRHSQKVDSQTIPKHVFEHTFHRLEAGEQYQIMIASVSGSLKNQINVVGRTVPAAVTDLRITENSTRHLSFRWTASEGELSWYNIFLYNPDGNLQERAQVDPLVQSFSFQNLLQGRMYKMVIVTHSGELSNESFIFGRTVPASVSHLRGSNRNTTDSLWFNWSPASGDFDFYELILYNPNGTKKENWKDKDLTEWRFQGLVPGRKYVLWVVTHSGDLSNKVTAESRTAPSPPSLMSFADIANTSLAITWKGPPDWTDYNDFELQWLPRDALTVFNPYNNRKSEGRIVYGLRPGRSYQFNVKTVSGDSWKTYSKPIFGSVRTKPDKIQNLHCRPQNSTAIACSWIPPDSDFDGYSIECRKMDTQEVEFSRKLEKEKSLLNIMMLVPHKRYLVSIKVQSAGMTSEVVEDSTITMIDRPPPPPPHIRVNEKDVLISKSSINFTVNCSWFSDTNGAVKYFTVVVREADGSDELKPEQQHPLPSYLEYRHNASIRVYQTNYFASKCAENPNSNSKSFNIKLGAEMESLGGKCDPTQQKFCDGPLKPHTAYRISIRAFTQLFDEDLKEFTKPLYSDTFFSLPITTESEPLFGAIEGVSAGLFLIGMLVAVVALLICRQKVSHGRERPSARLSIRRDRPLSVHLNLGQKGNRKTSCPIKINQFEGHFMKLQADSNYLLSKEYEELKDVGRNQSCDIALLPENRGKNRYNNILPYDATRVKLSNVDDDPCSDYINASYIPGNNFRREYIVTQGPLPGTKDDFWKMVWEQNVHNIVMVTQCVEKGRVKCDHYWPADQDSLYYGDLILQMLSESVLPEWTIREFKICGEEQLDAHRLIRHFHYTVWPDHGVPETTQSLIQFVRTVRDYINRSPGAGPTVVHCSAGVGRTGTFIALDRILQQLDSKDSVDIYGAVHDLRLHRVHMVQTECQYVYLHQCVRDVLRARKLRSEQENPLFPIYENVNPEYHRDPVYSRH

SEQ ID NO: 11111 - protein, 1907 aa, Homo sapiens
MLSHGAGLALWITLSLLQTGLAEPERCNFTLAESKASSHSVSIQWRILGSPCNFSLIYSSDTLGAALCPTFRIDNTTYGCNLQDLQAGTIYNFRIISLDEERTVVLQTDPLPPARFGVSKEKTTSTSLHVWWTPSSGKVTSYEVQLFDENNQKIQGVQIQESTSWNEYTFFNLTAGSKYNIAITAVSGGKRSFSVYTNGSTVPSPVKDIGISTKANSLLISWSHGSGNVERYRLMLMDKGILVHGGVVDKHATSYAFHGLTPGYLYNLTVMTEAAGLQNYRWKLVRTAPMEVSNLKVTNDGSLTSLKVKWQRPPGNVDSYNITLSHKGTIKESRVLAPWITETHFKELVPGRLYQVTVSCVSGELSAQKMAVGRTFPLAVLQLRVKHANETSLSIMWQTPVAEWEKYIISLADRDLLLIHKSLSKDAKEFTFTDLVPGRKYMATVTSISGDLKNSSSVKGRTVPAQVTDLHVANQGMTSSLFTNWTQAQGDVEFYQVLLIHENVVIKNESISSETSRYSFHSLKSGSLYSVVVTTVSGGISSRQVVVEGRTVPSSVSGVTVNNSGRNDYLSVSWLLAPGDVDNYEVTLSHDGKVVQSLVIAKSVRECSFSSLTPGRLYTVTITTRSGKYENHSFSQERTVPDKVQGVSVSNSARSDYLRVSWVHATGDFDHYEVTIKNKNNFIQTKSIPKSENECVFVQLVPGRLYSVTVTTKSGQYEANEQGNGRTIPEPVKDLTLRNRSTEDLHVTWSGANGDVDQYEIQLLFNDMKVFPPFHLVNTATEYRFTSLTPGRQYKILVLTISGDVQQSAFIEGFTVPSAVKNIHISPNGATDSLTVNWTPGGGDVDSYTVSAFRHSQKVDSQTIPKHVFEHTFHRLEAGEQYQIMIASVSGSLKNQINVVGRTVPASVQGVIADNAYSSYSLIVSWQKAAGVAERYDILLLTENGILLRNTSEPATTKQHKFEDLTPGKKYKIQILTVSGGLFSKEAQTEGRTVPAAVTDLRITENSTRHLSFRWTASEGELSWYNIFLYNPDGNLQERAQVDPLVQSFSFQNLLQGRMYKMVIVTHSGELSNESFIFGRTVPASVSHLRGSNRNTTDSLWFNWSPASGDFDFYELILYNPNGTKKENWKDKDLTEWRFQGLVPGRKYVLWVVTHSGDLSNKVTAESRTAPSPPSLMSFADIANTSLAITWKGPPDWTDYNDFELQWLPRDALTVFNPYNNRKSEGRIVYGLRPGRSYQFNVKTVSGDSWKTYSKPIFGSVRTKPDKIQNLHCRPQNSTAIACSWIPPDSDFDGYSIECRKMDTQEVEFSRKLEKEKSLLNIMMLVPHKRYLVSIKVQSAGMTSEVVEDSTITMIDRPPPPPPHIRVNEKDVLISKSSINFTVNCSWFSDTNGAVKYFTVVVREADGSDELKPEQQHPLPSYLEYRHNASIRVYQTNYFASKCAENPNSNSKSFNIKLGAEMESLGGKCDPTQQKFCDGPLKPHTAYRISIRAFTQLFDEDLKEFTKPLYSDTFFSLPITTESEPLFGAIEGVSAGLFLIGMLVAVVALLICRQKVSHGRERPSARLSIRRDRPLSVHLNLGQKGNRKTSCPIKINQFEGHFMKLQADSNYLLSKEYEELKDVGRNQSCDIALLPENRGKNRYNNILPYDATRVKLSNVDDDPCSDYINASYIPGNNFRREYIVTQGPLPGTKDDFWKMVWEQNVHNIVMVTQCVEKGRVKCDHYWPADQDSLYYGDLILQMLSESVLPEWTIREFKICGEEQLDAHRLIRHFHYTVWPDHGVPETTQSLIQFVRTVRDYINRSPGAGPTVVHCSAGVGRTGTFIALDRILQQLDSKDSVDIYGAVHDLRLHRVHMVQTECQYVYLHQCVRDVLRARKLRSEQENPLFPIYENVNPEYHRDPVYSRH

SEQ ID NO: 11112 - protein, 103 aa, Homo sapiens
  VARIANT 1: note = misc_feature - Xaa can be any naturally occurring amino acid
XLWITLSLLQTGLAEPERCNFTLAESKASSHSVSIQWRILGSPCNFSLIYSSDTLGAALCPTFRIDNTTYGCNLQDLQAGTIYNFRIISLDEERTVVLQTGKG

SEQ ID NO: 11113 - protein, 148 aa, Homo sapiens
MTMYLWLKLLAFGFAFLDTEVFVTGQSPTPSPTDAYLNASETTTLSPSGSAVISTTTIATTPSKPTCDEKYANITVDYLYNKETKLFTAKLNVNENVECGNNTCTNNEVHNLTECKNASVSISHNSCTAPDKTLILDVPPGVEKFQLH

SEQ ID NO: 11114 - protein, 1145 aa, Homo sapiens
MTMYLWLKLLAFGFAFLDTEVFVTGQSPTPSPTDAYLNASETTTLSPSGSAVISTTTIATTPSKPTCDEKYANITVDYLYNKETKLFTAKLNVNENVECGNNTCTNNEVHNLTECKNASVSISHNSCTAPDKTLILDVPPGVEKFQLHDCTQVEKADTTICLKWKNIETFTCDTQNITYRFQCGNMIFDNKEIKLENLEPEHEYKCDSEILYNNHKFTNASKIIKTDFGSPGEPQIIFCRSEAAHQGVITWNPPQRSFHNFTLCYIKETEKDCLNLDKNLIKYDLQNLKPYTKYVLSLHAYIIAKVQRNGSAAMCHFTTKSAPPSQVWNMTVSMTSDNSMHVKCRPPRDRNGPHERYHLEVEAGNTLVRNESHKNCDFRVKDLQYSTDYTFKAYFHNGDYPGEPFILHHSTSYNSKALIAFLAFLIIVTSIALLVVLYKIYDLHKKRSCNLDEQQELVERDDEKQLMNVEPIHADILLETYKRKIADEGRLFLAEFQSIPRVFSKFPIKEARKPFNQNKNRYVDILPYDYNRVELSEINGDAGSNYINASYIDGFKEPRKYIAAQGPRDETVDDFWRMIWEQKATVIVMVTRCEEGNRNKCAEYWPSMEEGTRAFGDVVVKINQHKRCPDYIIQKLNIVNKKEKATGREVTHIQFTSWPDHGVPEDPHLLLKLRRRVNAFSNFFSGPIVVHCSAGVGRTGTYIGIDAMLEGLEAENKVDVYGYVVKLRRQRCLMVQVEAQYILIHQALVEYNQFGETEVNLSELHPYLHNMKKRDPPSEPSPLEAEFQRLPSYRSWRTQHIGNQEENKSKNRNSNVIPYDYNRVPLKHELEMSKESEHDSDESSDDDSDSEEPSKYINASFIMSYWKPEVMIAAQGPLKETIGDFWQMIFQRKVKVIVMLTELKHGDQEICAQYWGEGKQTYGDIEVDLKDTDKSSTYTLRVFELRHSKRKDSRTVYQYQYTNWSVEQLPAEPKELISMIQVVKQKLPQKNSSEGNKHHKSTPLLIHCRDGSQQTGIFCALLNLLESAETEEVVDIFQVVKALRKARPGMVSTFEQYQFLYDVIASTYPAQNGQVKKNNHQEDKIEFDNEVDKVKQDANCVNPLGAPEKLPEAKEQAEGSEPTSGTEGPEHSVNGPASPALNQGS

SEQ ID NO: 11115 - protein, 87 aa, Homo sapiens
MTMYLWLKLLAFGFAFLDTEVFVTGQSPTPSPTGHLQAEEQGSQSKSPNLKSREADSSAFSWWPKAREPLTNHWSKSKSPKAEELGV

SEQ ID NO: 11116 - protein, 151 aa, Homo sapiens
MTMYLWLKLLAFGFAFLDTEVFVTGQSPTPSPTGHLQAEEQGSQSKSPNLKSREADSSAFSWWPKAREPLTNHWSVSSVQTPHLPTHADSQTPSAGTDTQTFSGSAANAKLNPTPGSNAISDAYLNASETTTLSPSGSAVISTTTIATTPS

SEQ ID NO: 11117 - protein, 36 aa, Homo sapiens
MTMYLWLKLLAFGFAFLDTEVFVTGQSPTPSPTGKN

SEQ ID NO: 11118 - protein, 118 aa, Homo sapiens
MTMYLWLKLLAFGFAFLDTEVFVTGQSPTPSPTGLTTAKMPSVPLSSDPLPTHTTAFSPASTFERENDFSETTTSLSPDNTSTQVSPDSLDNASAFNTTGVSSVQTPHLPTHADSQTP

SEQ ID NO: 11119 - protein, 753 aa, Homo sapiens
MTMYLWLKLLAFGFAFLDTEVFVTGQSPTPSPTGLTTAKMPSVPLSSDPLPTHTTAFSPASTFERENDFSETTTSLSPDNTSTQVSPDSLDNASAFNTTGVSSVQTPHLPTHADSQTPSAGTDTQTFSGSAANAKLNPTPGSNAISDAYLNASETTTLSPSGSAVISTTTIATTPSKPTCDEKYANITVDYLYNKETKLFTAKLNVNENVECGNNTCTNNEVHNLTECKNASVSISHNSCTAPDKTLILDVPPGVEKFQLHDCTQVEKADTTICLKWKNIETFTCDTQNITYRFQCGNMIFDNKEIKLENLEPEHEYKCDSEILYNNHKFTNASKIIKTDFGSPGEPQIIFCRSEAAHQGVITWNPPQRSFHNFTLCYIKETEKDCLNLDKNLIKYDLQNLKPYTKYVLSLHAYIIAKVQRNGSAAMCHFTTKSAPPSQVWNMTVSMTSDNSMHVKCRPPRDRNGPHERYHLEVEAGNTLVRNESHKNCDFRVKDLQYSTDYTFKAYFHNGDYPGEPFILHHSTSYNSKALIAFLAFLIIVTSIALLVVLYKIYDLHKKRSCNLDEQQELVERDDEKQLMNVEPIHADILLETYKRKIADEGRLFLAEFQSIPRVFSKFPIKEARKPFNQNKNRYVDILPYDYNRVELSEINGDAGSNYINASYIDGFKEPRKYIAAQGPRDETVDDFWRMIWEQKATVIVMVTRCEEGNRNKCAEYWPSMEEGTRAFGDVVVKINQHKRCPDYIIQKLNIVN

SEQ ID NO: 11120 - protein, 1306 aa, Homo sapiens
MTMYLWLKLLAFGFAFLDTEVFVTGQSPTPSPTGLTTAKMPSVPLSSDPLPTHTTAFSPASTFERENDFSETTTSLSPDNTSTQVSPDSLDNASAFNTTGVSSVQTPHLPTHADSQTPSAGTDTQTFSGSAANAKLNPTPGSNAISDVPGERSTASTFPTDPVSPLTTTLSLAHHSSAALPARTSNTTITANTSDAYLNASETTTLSPSGSAVISTTTIATTPSKPTCDEKYANITVDYLYNKETKLFTAKLNVNENVECGNNTCTNNEVHNLTECKNASVSISHNSCTAPDKTLILDVPPGVEKFQLHDCTQVEKADTTICLKWKNIETFTCDTQNITYRFQCGNMIFDNKEIKLENLEPEHEYKCDSEILYNNHKFTNASKIIKTDFGSPGEPQIIFCRSEAAHQGVITWNPPQRSFHNFTLCYIKETEKDCLNLDKNLIKYDLQNLKPYTKYVLSLHAYIIAKVQRNGSAAMCHFTTKSAPPSQVWNMTVSMTSDNSMHVKCRPPRDRNGPHERYHLEVEAGNTLVRNESHKNCDFRVKDLQYSTDYTFKAYFHNGDYPGEPFILHHSTSYNSKALIAFLAFLIIVTSIALLVVLYKIYDLHKKRSCNLDEQQELVERDDEKQLMNVEPIHADILLETYKRKIADEGRLFLAEFQSIPRVFSKFPIKEARKPFNQNKNRYVDILPYDYNRVELSEINGDAGSNYINASYIDGFKEPRKYIAAQGPRDETVDDFWRMIWEQKATVIVMVTRCEEGNRNKCAEYWPSMEEGTRAFGDVVVKINQHKRCPDYIIQKLNIVNKKEKATGREVTHIQFTSWPDHGVPEDPHLLLKLRRRVNAFSNFFSGPIVVHCSAGVGRTGTYIGIDAMLEGLEAENKVDVYGYVVKLRRQRCLMVQVEAQYILIHQALVEYNQFGETEVNLSELHPYLHNMKKRDPPSEPSPLEAEFQRLPSYRSWRTQHIGNQEENKSKNRNSNVIPYDYNRVPLKHELEMSKESEHDSDESSDDDSDSEEPSKYINASFIMSYWKPEVMIAAQGPLKETIGDFWQMIFQRKVKVIVMLTELKHGDQEICAQYWGEGKQTYGDIEVDLKDTDKSSTYTLRVFELRHSKRKDSRTVYQYQYTNWSVEQLPAEPKELISMIQVVKQKLPQKNSSEGNKHHKSTPLLIHCRDGSQQTGIFCALLNLLESAETEEVVDIFQVVKALRKARPGMVSTFEQYQFLYDVIASTYPAQNGQVKKNNHQEDKIEFDNEVDKVKQDANCVNPLGAPEKLPEAKEQAEGSEPTSGTEGPEHSVNGPASPALNQGS

SEQ ID NO: 11121 - protein, 161 aa, Homo sapiens
MTMYLWLKLLAFGFAFLDTEVFVTGQSPTPSPTGVSSVQTPHLPTHADSQTPSAGTDTQTFSGSAANAKLNPTPGSNAISDAYLNASETTTLSPSGSAVISTTTIATTPSKPTCDEKYANITVDYLYNKETKLFTAKLNVNENVECGNNTCTNNEVHNLTE

SEQ ID NO: 11122 - protein, 600 aa, Homo sapiens
MTMYLWLKLLAFGFAFLDTEVFVTGQSPTPSPTGVSSVQTPHLPTHADSQTPSAGTDTQTFSGSAANAKLNPTPGSNAISDAYLNASETTTLSPSGSAVISTTTIATTPSKPTCDEKYANITVDYLYNKETKLFTAKLNVNENVECGNNTCTNNEVHNLTECKNASVSISHNSCTAPDKTLILDVPPGVEKFQLHDCTQVEKADTTICLKWKNIETFTCDTQNITYRFQCGNMIFDNKEIKLENLEPEHEYKCDSEILYNNHKFTNASKIIKTDFGSPGEPQIIFCRSEAAHQGVITWNPPQRSFHNFTLCYIKETEKDCLNLDKNLIKYDLQNLKPYTKYVLSLHAYIIAKVQRNGSAAMCHFTTKSAPPSQVWNMTVSMTSDNSMHVKCRPPRDRNGPHERYHLEVEAGNTLVRNESHKNCDFRVKDLQYSTDYTFKAYFHNGDYPGEPFILHHSTSYNSKALIAFLAFLIIVTSIALLVVLYKIYDLHKKRSCNLDEQQELVERDDEKQLMNVEPIHADILLETYKRKIADEGRLFLAEFQSIPRVFSKFPIKEARKPFNQNKNRYVDILPYDYNRVELSEINGDAGSNYINASYID

SEQ ID NO: 11123 - protein, 735 aa, Homo sapiens
MTMYLWLKLLAFGFAFLDTEVFVTGQSPTPSPTGVSSVQTPHLPTHADSQTPSAGTDTQTFSGSAANAKLNPTPGSNAISDVPGERSTASTFPTDPVSPLTTTLSLAHHSSAALPARTSNTTITANTSDAYLNASETTTLSPSGSAVISTTTIATTPSKPTCDEKYANITVDYLYNKETKLFTAKLNVNENVECGNNTCTNNEVHNLTECKNASVSISHNSCTAPDKTLILDVPPGVEKFQLHDCTQVEKADTTICLKWKNIETFTCDTQNITYRFQCGNMIFDNKEIKLENLEPEHEYKCDSEILYNNHKFTNASKIIKTDFGSPGEPQIIFCRSEAAHQGVITWNPPQRSFHNFTLCYIKETEKDCLNLDKNLIKYDLQNLKPYTKYVLSLHAYIIAKVQRNGSAAMCHFTTKSAPPSQVWNMTVSMTSDNSMHVKCRPPRDRNGPHERYHLEVEAGNTLVRNESHKNCDFRVKDLQYSTDYTFKAYFHNGDYPGEPFILHHSTSYNSKALIAFLAFLIIVTSIALLVVLYKIYDLHKKRSCNLDEQQELVERDDEKQLMNVEPIHADILLETYKRKIADEGRLFLAEFQSIPRVFSKFPIKEARKPFNQNKNRYVDILPYDYNRVELSEINGDAGSNYINASYIDGFKEPRKYIAAQGPRDETVDDFWRMIWEQKATVIVMVTRCEEGNRNKCAEYWPSMEEGTRAFGDVVVKINQHKRCPDYIIQKLNIVN

SEQ ID NO: 11124 - protein, 206 aa, Homo sapiens
MALPCTLGLGMLLALPGALGSGGSAEDSVGSSSVTVVLLLLLLLLLATGLALAWRRLSRDSGGYYHPARLGAALWGRTRRLLWASPPGRWLQARAELGSTDNDLERQEDEQDTDYDHVADGGLQADPGEGEQQCGEASSPEQVPVRAEEARDSDTEGDLVLGSPGPASAGGSAEALLSDLHAFAGSAAWDDSARAAGGQGLHVTAL

SEQ ID NO: 11125 - protein, 93 aa, Homo sapiens
MVHVARLLLLLLTFFLRTDAETPPRFTRTPVDQTGVSGGVASFICQATGDPRPKIVWNKKGKKVSNQRFEVIEFDDGSGSVLRIQPLRTPRDE

SEQ ID NO: 11126 - protein, 1496 aa, Homo sapiens
MVHVARLLLLLLTFFLRTDAETPPRFTRTPVDQTGVSGGVASFICQATGDPRPKIVWNKKGKKVSNQRFEVIEFDDGSGSVLRIQPLRTPRDEAIYECVASNNVGEISVSTRLTVLREDQIPRGFPTIDMGPQLKVVERTRTATMLCAASGNPDPEITWFKDFLPVDTSNNNGRIKQLRSESIGALQIEQSEESDQGKYECVATNSAGTRYSAPANLYVRELREVRRVPPRFSIPPTNHEIMPGGSVNITCVAVGSPMPYVKWMLGAEDLTPEDDMPIGRNVLELNDVRQSANYTCVAMSTLGVIEAIAQITVKALPKPPGTPVVTESTATSITLTWDSGNPEPVSYYIIQHKPKNSEELYKEIDGVATTRYSVAGLSPYSDYEFRVVAVNNIGRGPPSEPVLTQTSEQAPSSAPRDVQARMLSSTTILVQWKEPEEPNGQIQGYRVYYTMDPTQHVNNWMKHNVADSQITTIGNLVPQKTYSVKVLAFTSIGDGPLSSDIQVITQTGVPGQPLNFKAEPESETSILLSWTPPRSDTIANYELVYKDGEHGEEQRITIEPGTSYRLQGLKPNSLYYFRLAARSPQGLGASTAEISARTMQSTVFAKNFHVKAVMKTSVLLSWEIPENYNSAMPFKILYDDGKMVEEVDGRATQKLIVNLKPEKSYSFVLTNRGNSAGGLQHRVTAKTAPDVLRTKPAFIGKTNLDGMITVQLPEVPANENIKGYYIIIVPLKKSRGKFIKPWESPDEMELDELLKEISRKRRSIRYGREVELKPYIAAHFDVLPTEFTLGDDKHYGGFTNKQLQSGQEYVFFVLAVMEHAESKMYATSPYSDPVVSMDLDPQPITDEEEGLIWVVGPVLAVVFIICIVIAILLYKRKRAESDSRKSSIPNNKEIPSHHPTDPVELRRLNFQTPGMASHPPIPILELADHIERLKANDNLKFSQEYESIDPGQQFTWEHSNLEVNKPKNRYANVIAYDHSRVLLSAIEGIPGSDYVNANYIDGYRKQNAYIATQGSLPETFGDFWRMIWEQRSATVVMMTKLEERSRVKCDQYWPSRGTETHGLVQVTLLDTVELATYCVRTFALYKNGSSEKREVRQFQFTAWPDHGVPEHPTPFLAFLRRVKTCNPPDAGPMVVHCSAGVGRTGCFIVIDAMLERIKHEKTVDIYGHVTLMRAQRNYMVQTEDQYIFIHDALLEAVTCGNTEVPARNLYAYIQKLTQIETGENVTGMELEFKRLASSKAHTSRFISANLPCNKFKNRLVNIMPYESTRVCLQPIRGVEGSDYINASFIDGYRQQKAYIATQGPLAETTEDFWRMLWEHNSTIVVMLTKLREMGREKCHQYWPAERSARYQYFVVDPMAEYNMPQYILREFKVTDARDGQSRTVRQFQFTDWPEQGVPKSGEGFIDFIGQVHKTKEQFGQDGPISVHCSAGVGRTGVFITLSIVLERMRYEGVVDIFQTVKMLRTQRPAMVQTEDQYQFSYRAALEYLGSFDHYAT

SEQ ID NO: 11127 - protein, 1505 aa, Homo sapiens
MVHVARLLLLLLTFFLRTDAETPPRFTRTPVDQTGVSGGVASFICQATGDPRPKIVWNKKGKKVSNQRFEVIEFDDGSGSVLRIQPLRTPRDEAIYECVASNNVGEISVSTRLTVLREDQIPRGFPTIDMGPQLKVVERTRTATMLCAASGNPDPEITWFKDFLPVDTSNNNGRIKQLRSESIGALQIEQSEESDQGKYECVATNSAGTRYSAPANLYVRVRRVPPRFSIPPTNHEIMPGGSVNITCVAVGSPMPYVKWMLGAEDLTPEDDMPIGRNVLELNDVRQSANYTCVAMSTLGVIEAIAQITVKALPKPPGTPVVTESTATSITLTWDSGNPEPVSYYIIQHKPKNSEELYKEIDGVATTRYSVAGLSPYSDYEFRVVAVNNIGRGPPSEPVLTQTSEQAPSSAPRDVQARMLSSTTILVQWKEPEEPNGQIQGYRVYYTMDPTQHVNNWMKHNVADSQITTIGNLVPQKTYSVKVLAFTSIGDGPLSSDIQVITQTGVPGQPLNFKAEPESETSILLSWTPPRSDTIANYELVYKDGEHGEEQRITIEPGTSYRLQGLKPNSLYYFRLAARSPQGLGASTAEISARTMQSMFAKNFHVKAVMKTSVLLSWEIPENYNSAMPFKILYDDGKMVEEVDGRATQKLIVNLKPEKSYSFVLTNRGNSAGGLQHRVTAKTAPDVLRTKPAFIGKTNLDGMITVQLPEVPANENIKGYYIIIVPLKKSRGKFIKPWESPDEMELDELLKEISRKRRSIRYGREVELKPYIAAHFDVLPTEFTLGDDKHYGGFTNKQLQSGQEYVFFVLAVMEHAESKMYATSPYSDPVVSMDLDPQPITDEEEGLIWVVGPVLAVVFIICIVIAILLYKRKRAESDSRKSSIPNNKEIPSHHPTDPVELRRLNFQTPGSDDSGYPGNLHSSSMASHPPIPILELADHIERLKANDNLKFSQEYESIDPGQQFTWEHSNLEVNKPKNRYANVIAYDHSRVLLSAIEGIPGSDYVNANYIDGYRKQNAYIATQGSLPETFGDFWRMIWEQRSATVVMMTKLEERSRVKCDQYWPSRGTETHGLVQVTLLDTVELATYCVRTFALYKNGSSEKREVRQFQFTAWPDHGVPEHPTPFLAFLRRVKTCNPPDAGPMVVHCSAGVGRTGCFIVIDAMLERIKHEKTVDIYGHVTLMRAQRNYMVQTEDQYIFIHDALLEAVTCGNTEVPARNLYAYIQKLTQIETGENVTGMELEFKRLASSKAHTSRFISANLPCNKFKNRLVNIMPYESTRVCLQPIRGVEGSDYINASFIDGYRQQKAYIATQGPLAETTEDFWRMLWEHNSTIVVMLTKLREMGREKCHQYWPAERSARYQYFVVDPMAEYNMPQYILREFKVTDARDGQSRTVRQFQFTDWPEQGVPKSGEGFIDFIGQVHKTKEQFGQDGPISVHCSAGVGRTGVFITLSIVLERMRYEGVVDIFQTVKMLRTQRPAMVQTEDQYQFSYRAALEYLGSFDHYAT

SEQ ID NO: 11128 - protein, 1506 aa, Homo sapiens
MVHVARLLLLLLTFFLRTDAETPPRFTRTPVDQTGVSGGVASFICQATGDPRPKIVWNKKGKKVSNQRFEVIEFDDGSGSVLRIQPLRTPRDEAIYECVASNNVGEISVSTRLTVLREDQIPRGFPTIDMGPQLKVVERTRTATMLCAASGNPDPEITWFKDFLPVDTSNNNGRIKQLRSESIGGTPIRGALQIEQSEESDQGKYECVATNSAGTRYSAPANLYVRELREVRRVPPRFSIPPTNHEIMPGGSVNITCVAVGSPMPYVKWMLGAEDLTPEDDMPIGRNVLELNDVRQSANYTCVAMSTLGVIEAIAQITVKALPKPPGTPVVTESTATSITLTWDSGNPEPVSYYIIQHKPKNSEELYKEIDGVATTRYSVAGLSPYSDYEFRVVAVNNIGRGPPSEPVLTQTSEQAPSSAPRDVQARMLSSTTILVQWKEPEEPNGQIQGYRVYYTMDPTQHVNNWMKHNVADSQITTIGNLVPQKTYSVKVLAFTSIGDGPLSSDIQVITQTGVPGQPLNFKAEPESETSILLSWTPPRSDTIANYELVYKDGEHGEEQRITIEPGTSYRLQGLKPNSLYYFRLAARSPQGLGASTAEISARTMQSMFAKNFHVKAVMKTSVLLSWEIPENYNSAMPFKILYDDGKMVEEVDGRATQKLIVNLKPEKSYSFVLTNRGNSAGGLQHRVTAKTAPDVLRTKPAFIGKTNLDGMITVQLPEVPANENIKGYYIIIVPLKKSRGKFIKPWESPDEMELDELLKEISRKRRSIRYGREVELKPYIAAHFDVLPTEFTLGDDKHYGGFTNKQLQSGQEYVFFVLAVMEHAESKMYATSPYSDPVVSMDLDPQPITDEEEGLIWVVGPVLAVVFIICIVIAILLYKSSKPDRKRAESDSRKSSIPNNKEIPSHHPTDPVELRRLNFQTPGMASHPPIPILELADHIERLKANDNLKFSQEYESIDPGQQFTWEHSNLEVNKPKNRYANVIAYDHSRVLLSAIEGIPGSDYVNANYIDGYRKQNAYIATQGSLPETFGDFWRMIWEQRSATVVMMTKLEERSRVKCDQYWPSRGTETHGLVQVTLLDTVELATYCVRTFALYKNGSSEKREVRQFQFTAWPDHGVPEHPTPFLAFLRRVKTCNPPDAGPMVVHCSAGVGRTGCFIVIDAMLERIKHEKTVDIYGHVTLMRAQRNYMVQTEDQYIFIHDALLEAVTCGNTEVPARNLYAYIQKLTQIETGENVTGMELEFKRLASSKAHTSRFISANLPCNKFKNRLVNIMPYESTRVCLQPIRGVEGSDYINASFIDGYRQQKAYIATQGPLAETTEDFWRMLWEHNSTIVVMLTKLREMGREKCHQYWPAERSARYQYFVVDPMAEYNMPQYILREFKVTDARDGQSRTVRQFQFTDWPEQGVPKSGEGFIDFIGQVHKTKEQFGQDGPISVHCSAGVGRTGVFITLSIVLERMRYEGVVDIFQTVKMLRTQRPAMVQTEDQYQFSYRAALEYLGSFDHYAT

SEQ ID NO: 11129 - protein, 1912 aa, Homo sapiens
MVHVARLLLLLLTFFLRTDAETPPRFTRTPVDQTGVSGGVASFICQATGDPRPKIVWNKKGKKVSNQRFEVIEFDDGSGSVLRIQPLRTPRDEAIYECVASNNVGEISVSTRLTVLREDQIPRGFPTIDMGPQLKVVERTRTATMLCAASGNPDPEITWFKDFLPVDTSNNNGRIKQLRSESIGGTPIRGALQIEQSEESDQGKYECVATNSAGTRYSAPANLYVRELREVRRVPPRFSIPPTNHEIMPGGSVNITCVAVGSPMPYVKWMLGAEDLTPEDDMPIGRNVLELNDVRQSANYTCVAMSTLGVIEAIAQITVKALPKPPGTPVVTESTATSITLTWDSGNPEPVSYYIIQHKPKNSEELYKEIDGVATTRYSVAGLSPYSDYEFRVVAVNNIGRGPPSEPVLTQTSEQAPSSAPRDVQARMLSSTTILVQWKEPEEPNGQIQGYRVYYTMDPTQHVNNWMKHNVADSQITTIGNLVPQKTYSVKVLAFTSIGDGPLSSDIQVITQTGVPGQPLNFKAEPESETSILLSWTPPRSDTIANYELVYKDGEHGEEQRITIEPGTSYRLQGLKPNSLYYFRLAARSPQGLGASTAEISARTMQSKPSAPPQDISCTSPSSTSILVSWQPPPVEKQNGIITEYSIKYTAVDGEDDKPHEILGIPSDTTKYLLEQLEKWTEYRITVTAHTDVGPGPESLSVLIRTNEDVPSGPPRKVEVEAVNSTSVKVSWRSPVPNKQHGQIRGYQVHYVRMENGEPKGQPMLKDVMLADAQWEFDDTTEHDMIISGLQPETSYSLTVTAYTTKGDGARSKPKLVSTTGAVPGKPRLVINHTQMNTALIQWHPPVDTFGPLQGYRLKFGRKDMEPLTTLEFSEKEDHFTATDIHKGASYVFRLSARNKVGFGEEMVKEISIPEEVPTGFPQNLHSEGTTSTSVQLSWQPPVLAERNGIITKYTLLYRDINIPLLPMEQLIVPADTTMTLTGLKPDTTYDVKVRAHTSKGPGPYSPSVQFRTLPVDQVFAKNFHVKAVMKTSVLLSWEIPENYNSAMPFKILYDDGKMVEEVDGRATQKLIVNLKPEKSYSFVLTNRGNSAGGLQHRVTAKTAPDVLRTKPAFIGKTNLDGMITVQLPEVPANENIKGYYIIIVPLKKSRGKFIKPWESPDEMELDELLKEISRKRRSIRYGREVELKPYIAAHFDVLPTEFTLGDDKHYGGFTNKQLQSGQEYVFFVLAVMEHAESKMYATSPYSDPVVSMDLDPQPITDEEEGLIWVVGPVLAVVFIICIVIAILLYKRKRAESDSRKSSIPNNKEIPSHHPTDPVELRRLNFQTPGMASHPPIPILELADHIERLKANDNLKFSQEYESIDPGQQFTWEHSNLEVNKPKNRYANVIAYDHSRVLLSAIEGIPGSDYVNANYIDGYRKQNAYIATQGSLPETFGDFWRMIWEQRSATVVMMTKLEERSRVKCDQYWPSRGTETHGLVQVTLLDTVELATYCVRTFALYKNGSSEKREVRQFQFTAWPDHGVPEHPTPFLAFLRRVKTCNPPDAGPMVVHCSAGVGRTGCFIVIDAMLERIKHEKTVDIYGHVTLMRAQRNYMVQTEDQYIFIHDALLEAVTCGNTEVPARNLYAYIQKLTQIETGENVTGMELEFKRLASSKAHTSRFISANLPCNKFKNRLVNIMPYESTRVCLQPIRGVEGSDYINASFIDGYRQQKAYIATQGPLAETTEDFWRMLWEHNSTIVVMLTKLREMGREKCHQYWPAERSARYQYFVVDPMAEYNMPQYILREFKVTDARDGQSRTVRQFQFTDWPEQGVPKSGEGFIDFIGQVHKTKEQFGQDGPISVHCSAGVGRTGVFITLSIVLERMRYEGVVDIFQTVKMLRTQRPAMVQTEDQYQFSYRAALEYLGSFDHYAT

SEQ ID NO: 11130 - protein, 1912 aa, Homo sapiens; identical to SEQ ID NO: 11129

SEQ ID NO: 11131 - protein, 1912 aa, Homo sapiens; identical to SEQ ID NO: 11129

SEQ ID NO: 11132 - protein, 1505 aa, Homo sapiens
MVHVARLLLLLLTFFLRTDAETPPRFTRTPVDQTGVSGGVASFICQATGDPRPKIVWNKKGKKVSNQRFEVIEFDDGSGSVLRIQPLRTPRDEAIYECVASNNVGEISVSTRLTVLREDQIPRGFPTIDMGPQLKVVERTRTATMLCAASGNPDPEITWFKDFLPVDTSNNNGRIKQLRSESIGGTPIRGALQIEQSEESDQGKYECVATNSAGTRYSAPANLYVRELREVRRVPPRFSIPPTNHEIMPGGSVNITCVAVGSPMPYVKWMLGAEDLTPEDDMPIGRNVLELNDVRQSANYTCVAMSTLGVIEAIAQITVKALPKPPGTPVVTESTATSITLTWDSGNPEPVSYYIIQHKPKNSEELYKEIDGVATTRYSVAGLSPYSDYEFRVVAVNNIGRGPPSEPVLTQTSEQAPSSAPRDVQARMLSSTTILVQWKEPEEPNGQIQGYRVYYTMDPTQHVNNWMKHNVADSQITTIGNLVPQKTYSVKVLAFTSIGDGPLSSDIQVITQTGVPGQPLNFKAEPESETSILLSWTPPRSDTIANYELVYKDGEHGEEQRITIEPGTSYRLQGLKPNSLYYFRLAARSPQGLGASTAEISARTMQSMFAKNFHVKAVMKTSVLLSWEIPENYNSAMPFKILYDDGKMVEEVDGRATQKLIVNLKPEKSYSFVLTNRGNSAGGLQHRVTAKTAPDVLRTKPAFIGKTNLDGMITVQLPEVPANENIKGYYIIIVPLKKSRGKFIKPWESPDEMELDELLKEISRKRRSIRYGREVELKPYIAAHFDVLPTEFTLGDDKHYGGFTNKQLQSGQEYVFFVLAVMEHAESKMYATSPYSDPVVSMDLDPQPITDEEEGLIWVVGPVLAVVFIICIVIAILLYKSKPDRKRAESDSRKSSIPNNKEIPSHHPTDPVELRRLNFQTPGMASHPPIPILELADHIERLKANDNLKFSQEYESIDPGQQFTWEHSNLEVNKPKNRYANVIAYDHSRVLLSAIEGIPGSDYVNANYIDGYRKQNAYIATQGSLPETFGDFWRMIWEQRSATVVMMTKLEERSRVKCDQYWPSRGTETHGLVQVTLLDTVELATYCVRTFALYKNGSSEKREVRQFQFTAWPDHGVPEHPTPFLAFLRRVKTCNPPDAGPMVVHCSAGVGRTGCFIVIDAMLERIKHEKTVDIYGHVTLMRAQRNYMVQTEDQYIFIHDALLEAVTCGNTEVPARNLYAYIQKLTQIETGENVTGMELEFKRLASSKAHTSRFISANLPCNKFKNRLVNIMPYESTRVCLQPIRGVEGSDYINASFIDGYRQQKAYIATQGPLAETTEDFWRMLWEHNSTIVVMLTKLREMGREKCHQYWPAERSARYQYFVVDPMAEYNMPQYILREFKVTDARDGQSRTVRQFQFTDWPEQGVPKSGEGFIDFIGQVHKTKEQFGQDGPISVHCSAGVGRTGVFITLSIVLERMRYEGVVDIFQTVKMLRTQRPAMVQTEDQYQFSYRAALEYLGSFDHYAT

SEQ ID NO: 11133 - protein, 1502 aa, Homo sapiens
MVHVARLLLLLLTFFLRTDAETPPRFTRTPVDQTGVSGGVASFICQATGDPRPKIVWNKKGKKVSNQRFEVIEFDDGSGSVLRIQPLRTPRDEAIYECVASNNVGEISVSTRLTVLREDQIPRGFPTIDMGPQLKVVERTRTATMLCAASGNPDPEITWFKDFLPVDTSNNNGRIKQLRSGGTPIRGALQIEQSEESDQGKYECVATNSAGTRYSAPANLYVRELREVRRVPPRFSIPPTNHEIMPGGSVNITCVAVGSPMPYVKWMLGAEDLTPEDDMPIGRNVLELNDVRQSANYTCVAMSTLGVIEAIAQITVKALPKPPGTPVVTESTATSITLTWDSGNPEPVSYYIIQHKPKNSEELYKEIDGVATTRYSVAGLSPYSDYEFRVVAVNNIGRGPPSEPVLTQTSEQAPSSAPRDVQARMLSSTTILVQWKEPEEPNGQIQGYRVYYTMDPTQHVNNWMKHNVADSQITTIGNLVPQKTYSVKVLAFTSIGDGPLSSDIQVITQTGVPGQPLNFKAEPESETSILLSWTPPRSDTIANYELVYKDGEHGEEQRITIEPGTSYRLQGLKPNSLYYFRLAARSPQGLGASTAEISARTMQSMFAKNFHVKAVMKTSVLLSWEIPENYNSAMPFKILYDDGKMVEEVDGRATQKLIVNLKPEKSYSFVLTNRGNSAGGLQHRVTAKTAPDVLRTKPAFIGKTNLDGMITVQLPEVPANENIKGYYIIIVPLKKSRGKFIKPWESPDEMELDELLKEISRKRRSIRYGREVELKPYIAAHFDVLPTEFTLGDDKHYGGFTNKQLQSGQEYVFFVLAVMEHAESKMYATSPYSDPVVSMDLDPQPITDEEEGLIWVVGPVLAVVFIICIVIAILLYKSKPDRKRAESDSRKSSIPNNKEIPSHHPTDPVELRRLNFQTPGMASHPPIPILELADHIERLKANDNLKFSQEYESIDPGQQFTWEHSNLEVNKPKNRYANVIAYDHSRVLLSAIEGIPGSDYVNANYIDGYRKQNAYIATQGSLPETFGDFWRMIWEQRSATVVMMTKLEERSRVKCDQYWPSRGTETHGLVQVTLLDTVELATYCVRTFALYKNGSSEKREVRQFQFTAWPDHGVPEHPTPFLAFLRRVKTCNPPDAGPMVVHCSAGVGRTGCFIVIDAMLERIKHEKTVDIYGHVTLMRAQRNYMVQTEDQYIFIHDALLEAVTCGNTEVPARNLYAYIQKLTQIETGENVTGMELEFKRLASSKAHTSRFISANLPCNKFKNRLVNIMPYESTRVCLQPIRGVEGSDYINASFIDGYRQQKAYIATQGPLAETTEDFWRMLWEHNSTIVVMLTKLREMGREKCHQYWPAERSARYQYFVVDPMAEYNMPQYILREFKVTDARDGQSRTVRQFQFTDWPEQGVPKSGEGFIDFIGQVHKTKEQFGQDGPISVHCSAGVGRTGVFITLSIVLERMRYEGVVDIFQTVKMLRTQRPAMVQTEDQYQFSYRAALEYLGSFDHYAT

SEQ ID NO: 11134 - protein, 202 aa, Homo sapiens
MVHVARLLLLLLTFFLRTDAETPPRFTRTPVDQTGVSGGVASFICQATGDPRPKIVWNKKGKKVSNQRFEVIEFDDGSGSVLRIQPLRTPRDEAIYECVASNNVGEISVSTRLTVLREDQIPRGFPTIDMGPQLKVVERTRTATMLCAASGNPDPEITWFKDFLPVDTSNNNGRIKQLRSGTDFSPSSLSLLLNGWSMFVMS

SEQ ID NO: 11135 - protein, 1505 aa, Homo sapiens [sequence omitted]

SEQ ID NO: 11136 - protein, 297 aa, Homo sapiens
  VARIANT 1: note = misc_feature - Xaa can be any naturally occurring amino acid
XAGGLQHRVTAKTAPDVLRTKPAFIGKTNLDGMITVQLPEVPANENIKGYYIIIVPLKKSRGKFIKPWESPDEMELDELLKEISRKRRSIRYGREVELKPYIAAHFDVLPTEFTLGDDKHYGGFTNKQLQSGQEYVFFVLAVMEHAESKMYATSPYSDPVVSMDLDPQPITDEEEGLIWVVGPVLAVVFIICIVIAILLYKSKPDRKRAESDSRKSSIPNNKEIPSHHPTDPVELRRLNFQTPALSSNSVPYASLIGSVSSLSSQTTTQSIYDNNSLPRSARKGMASHPPIPILELA

SEQ ID NO: 11137 - protein, 262 aa, Homo sapiens
MAPEPAPGRTMVPLVPALVMLGLVAGAHGDSKPVFIKVPEDQTGLSGGVASFVCQATGEPKPRITWMKKGKKVSSQRFEVIEFDDGAGSVLRIQPLRVQRDEAIYECTATNSLGEINTSAKLSVLEEEQLPPGFPSIDMGPQLKVVEKARTATMLCAAGGNPDPEISWFKDFLPVDPATSNGRIKQLRSGALQIESSEESDQGKYECVATNSAGTRYSAPANLYVRGLAAWARSPMGIWSHPIRLLGVCACVCAHTGTLICV

SEQ ID NO: 11138 - protein, 262 aa, Homo sapiens; identical to SEQ ID NO: 11137

SEQ ID NO: 11139 - protein, 1907 aa, Homo sapiens
MAPEPAPGRTMVPLVPALVMLGLVAGAHGDSKPVFIKVPEDQTGLSGGVASFVCQATGEPKPRITWMKKGKKVSSQRFEVIEFDDGAGSVLRIQPLRVQRDEAIYECTATNSLGEINTSAKLSVLEEEQLPPGFPSIDMGPQLKVVEKARTATMLCAAGGNPDPEISWFKDFLPVDPATSNGRIKQLRSGALQIESSEESDQGKYECVATNSAGTRYSAPANLYVRVRRVAPRFSIPPSSQEVMPGGSVNLTCVAVGAPMPYVKWMMGAEELTKEDEMPVGRNVLELSNVVRSANYTCVAISSLGMIEATAQVTVKALPKPPIDLVVTETTATSVTLTWDSGNSEPVTYYGIQYRAAGTEGPFQEVDGVATTRYSIGGLSPFSEYAFRVLAVNSIGRGPPSEAVRARTGEQAPSSPPRRVQARMLSASTMLVQWEPPEEPNGLVRGYRVYYTPDSRRPPNAWHKHNTDAGLLTTVGSLLPGITYSLRVLAFTAVGDGPPSPTIQVKTQQGVPAQPADFQAEVESDTRIQLSWLLPPQERIIMYELVYWAAEDEDQQHKVTFDPTSSYTLEDLKPDTLYRFQLAARSDMGVGVFTPTIEARTAQSTPSAPPQKVMCVSMGSTTVRVSWVPPPADSRNGVITQYSVAYEAVDGEDRGRHVVDGISREHSSWDLVGLEKWTEYRVWVRAHTDVGPGPESSPVLVRTDEDVPSGPPRKVEVEPLNSTAVHVYWKLPVPSKQHGQIRGYQVTYVRLENGEPRGLPIIQDVMLAEAQWRPEESEDYETTISGLTPETTYSVTVAAYTTKGDGARSKPKIVTTTGAVPGRPTMMISTTAMNTALLQWHPPKELPGELLGYRLQYCRADEARPNTIDFGKDDQHFTVTGLHKGTTYIFRLAAKNRAGLGEEFEKEIRTPEDLPSGFPQNLHVTGLTTSTTELAWDPPVLAERNGRIISYTVVFRDINSQQELQNITTDTRFTLTGLKPDTTYDIKVRAWTSKGSGPLSPSIQSRTMPVEQVFAKNFRVAAAMKTSVLLSWEVPDSYKSAVPFKILYNGQSVEVDGHSMRKLIADLQPNTEYSFVLMNRGSSAGGLQHLVSIRTAPDLLPHKPLPASAYIEDGRFDLSMPHVQDPSLVRWFYIVVVPIDRVGGSMLTPRWSTPEELELDELLEAIEQGGEEQRRRRRQAERLKPYVAAQLDVLPETFTLGDKKNYRGFYNRPLSPDLSYQCFVLASLKEPMDQKRYASSPYSDEIVVQVTPAQQQEEPEMLWVTGPVLAVILIILIVIAILLFKRKRTHSPSSKDEQSIGLKDSLLAHSSDPVEMRRLNYQTPGMRDHPPIPITDLADNIERLKANDGLKFSQEYESIDPGQQFTWENSNLEVNKPKNRYANVIAYDHSRVILTSIDGVPGSDYINANYIDGYRKQNAYIATQGPLPETMGDFWRMVWEQRTATVVMMTRLEEKSRVKCDQYWPARGTETCGLIQVTLLDTVELATYTVRTFALHKSGSSEKRELRQFQFMAWPDHGVPEYPTPILAFLRRVKACNPLDAGPMVVHCSAGVGRTGCFIVIDAMLERMKHEKTVDIYGHVTCMRSQRNYMVQTEDQYVFIHEALLEAATCGHTEVPARNLYAHIQKLGQVPPGESVTAMELEFKLLASSKAHTSRFISANLPCNKFKNRLVNIMPYELTRVCLQPIRGVEGSDYINASFLDGYRQQKAYIATQGPLAESTEDFWRMLWEHNSTIIVMLTKLREMGREKCHQYWPAERSARYQYFVVDPMAEYNMPQYILREFKVTDARDGQSRTIRQFQFTDWPEQGVPKTGEGFIDFIGQVHKTKEQFGQDGPITVHCSAGVGRTGVFITLSIVLERMRYEGVVDMFQTVKTLRTQRPAMVQTEDQYQLCYRAALEYLGSFDHYAT

SEQ ID NO: 11140 - protein, 1898 aa, Homo sapiens
MAPEPAPGRTMVPLVPALVMLGLVAGAHGDSKPVFIKVPEDQTGLSGGVASFVCQATGEPKPRITWMKKGKKVSSQRFEVIEFDDGAGSVLRIQPLRVQRDEAIYECTATNSLGEINTSAKLSVLEEEQLPPGFPSIDMGPQLKVVEKARTATMLCAAGGNPDPEISWFKDFLPVDPATSNGRIKQLRSGALQIESSEESDQGKYECVATNSAGTRYSAPANLYVRVRRVAPRFSIPPSSQEVMPGGSVNLTCVAVGAPMPYVKWMMGAEELTKEDEMPVGRNVLELSNVVRSANYTCVAISSLGMIEATAQVTVKALPKPPIDLVVTETTATSVTLTWDSGNSEPVTYYGIQYRAAGTEGPFQEVDGVATTRYSIGGLSPFSEYAFRVLAVNSIGRGPPSEAVRARTGEQAPSSPPRRVQARMLSASTMLVQWEPPEEPNGLVRGYRVYYTPDSRRPPNAWHKHNTDAGLLTTVGSLLPGITYSLRVLAFTAVGDGPPSPTIQVKTQQGVPAQPADFQAEVESDTRIQLSWLLPPQERIIMYELVYWAAEDEDQQHKVTFDPTSSYTLEDLKPDTLYRFQLAARSDMGVGVFTPTIEARTAQSTPSAPPQKVMCVSMGSTTVRVSWVPPPADSRNGVITQYSVAYEAVDGEDRGRHVVDGISREHSSWDLVGLEKWTEYRVWVRAHTDVGPGPESSPVLVRTDEDVPSGPPRKVEVEPLNSTAVHVYWKLPVPSKQHGQIRGYQVTYVRLENGEPRGLPIIQDVMLAEAQETTISGLTPETTYSVTVAAYTTKGDGARSKPKIVTTTGAVPGRPTMMISTTAMNTALLQWHPPKELPGELLGYRLQYCRADEARPNTIDFGKDDQHFTVTGLHKGTTYIFRLAAKNRAGLGEEFEKEIRTPEDLPSGFPQNLHVTGLTTSTTELAWDPPVLAERNGRIISYTVVFRDINSQQELQNITTDTRFTLTGLKPDTTYDIKVRAWTSKGSGPLSPSIQSRTMPVEQVFAKNFRVAAAMKTSVLLSWEVPDSYKSAVPFKILYNGQSVEVDGHSMRKLIADLQPNTEYSFVLMNRGSSAGGLQHLVSIRTAPDLLPHKPLPASAYIEDGRFDLSMPHVQDPSLVRWFYIVVVPIDRVGGSMLTPRWSTPEELELDELLEAIEQGGEEQRRRRRQAERLKPYVAAQLDVLPETFTLGDKKNYRGFYNRPLSPDLSYQCFVLASLKEPMDQKRYASSPYSDEIVVQVTPAQQQEEPEMLWVTGPVLAVILIILIVIAILLFKRKRTHSPSSKDEQSIGLKDSLLAHSSDPVEMRRLNYQTPGMRDHPPIPITDLADNIERLKANDGLKFSQEYESIDPGQQFTWENSNLEVNKPKNRYANVIAYDHSRVILTSIDGVPGSDYINANYIDGYRKQNAYIATQGPLPETMGDFWRMVWEQRTATVVMMTRLEEKSRVKCDQYWPARGTETCGLIQVTLLDTVELATYTVRTFALHKSGSSEKRELRQFQFMAWPDHGVPEYPTPILAFLRRVKACNPLDAGPMVVHCSAGVGRTGCFIVIDAMLERMKHEKTVDIYGHVTCMRSQRNYMVQTEDQYVFIHEALLEAATCGHTEVPARNLYAHIQKLGQVPPGESVTAMELEFKLLASSKAHTSRFISANLPCNKFKNRLVNIMPYELTRVCLQPIRGVEGSDYINASFLDGYRQQKAYIATQGPLAESTEDFWRMLWEHNSTIIVMLTKLREMGREKCHQYWPAERSARYQYFVVDPMAEYNMPQYILREFKVTDARDGQSRTIRQFQFTDWPEQGVPKTGEGFIDFIGQVHKTKEQFGQDGPITVHCSAGVGRTGVFITLSIVLERMRYEGVVDMFQTVKTLRTQRPAMVQTEDQYQLCYRAALEYLGSFDHYAT

SEQ ID NO: 11141 - protein, 979 aa, Homo sapiens
TYVRLENGEPRGLPIIQDVMLAEAQWRPEESEDYETTISGLTPETTYSVTVAAYTTKGDGARSKPKIVTTTGAVFAKNFRVAAAMKTSVLLSWEVPDSYKSAVPFKILYNGQSVEVDGHSMRKLIADLQPNTEYSFVLMNRGSSAGGLQHLVSIRTAPDLLPHKPLPASAYIEDGRFDLSMPHVQDPSLVRWFYIVVVPIDRVGGSMLTPRWSTPEELELDELLEAIEQGGEEQRRRRRQAERLKPYVAAQLDVLPETFTLGDKKNYRGFYNRPLSPDLSYQCFVLASLKEPMDQKRYASSPYSDEIVVQVTPAQQQEEPEMLWVTGPVLAVILIILIVIAILLFKRKRTHSPSSKDEQSIGLKDSLLAHSSDPVEMRRLNYQTPGSSVPSCPNTSSMRDHPPIPITDLADNIERLKANDGLKFSQEYESIDPGQQFTWENSNLEVNKPKNRYANVIAYDHSRVILTSIDGVPGSDYINANYIDGYRKQNAYIATQGPLPETMGDFWRMVWEQRTATVVMMTRLEEKSRVKCDQYWPARGTETCGLIQVTLLDTVELATYTVRTFALHKSGSSEKRELRQFQFMAWPDHGVPEYPTPILAFLRRVKACNPLDAGPMVVHCSAGVGRTGCFIVIDAMLERMKHEKTVDIYGHVTCMRSQRNYMVQTEDQYVFIHEALLEAATCGHTEVPARNLYAHIQKLGQVPPGESVTAMELEFKLLASSKAHTSRFISANLPCNKFKNRLVNIMPYELTRVCLQPIRGVEGSDYINASFLDGYRQQKAYIATQGPLAESTEDFWRMLWEHNSTIIVMLTKLREMGREKCHQYWPAERSARYQYFVVDPMAEYNMPQYILREFKVTDARDGQSRTIRQFQFTDWPEQGVPKTGEGFIDFIGQVHKTKEQFGQDGPITVHCSAGVGRTGVFITLSIVLERMRYEGVVDMFQTVKTLRTQRPAMVQTEDQYQLCYRAALEYLGSFDHYAT

SEQ ID NO: 11142 - protein, 1553 aa, Homo sapiens
  VARIANT 1: note = misc_feature - Xaa can be any naturally occurring amino acid
XEPVTYYGIQYRAAGTEGPFQEVDGVATTRYSIGGLSPFSEYAFRVLAVNSIGRGPPSEAVRARTGEQAPSSPPRRVQARMLSASTMLVQWEPPEEPNGLVRGYRVYYTPDSRRPPNAWHKHNTDAGLLTTVGSLLPGITYSLRVLAFTAVGDGPPSPTIQVKTQQGVPAQPADFQAEVESDTRIQLSWLLPPQERIIMYELVYWAAEDEDQQHKVTFDPTSSYTLEDLKPDTLYRFQLAARSDMGVGVFTPTIEARTAQSTPSAPPQKVMCVSMGSTTVRVSWVPPPADSRNGVITQYSVAYEAVDGEDRGRHVVDGISREHSSWDLVGLEKWTEYRVWVRAHTDVGPGPESSPVLVRTDEDVPSGPPRKVEVEPLNSTAVHVYWKLPVPSKQHGQIRGYQVTYVRLENGEPRGLPIIQDVMLAEAQETTISGLTPETTYSVTVAAYTTKGDGARSKPKIVTTTVPGRPTMMISTTAMNTALLQWHPPKELPGELLGYRLQYCRADEARPNTIDFGKDDQHFTVTGLHKGTTYIFRLAAKNRAGLGEEFEKEIRTPEDLPSGFPQNLHVTGLTTSTTELAWDPPVLAERNGRIISYTVVFRDINSQQELQNITTDTRFTLTGLKPDTTYDIKVRAWTSKGSGPLSPSIQSRTMPVEQVFAKNFRVAAAMKTSVLLSWEVPDSYKSAVPFKILYNGQSVEVDGHSMRKLIADLQPNTEYSFVLMNRGSSAGGLQHLVSIRTAPDLLPHKPLPASAYIEDGRFDLSMPHVQDPSLVRWFYIVVVPIDRVGGSMLTPRWSTPEELELDELLEAIEQGGEEQRRRRRQAERLKPYVAAQLDVLPETFTLGDKKNYRGFYNRPLSPDLSYQCFVLASLKEPMDQKRYASSPYSDEIVVQVTPAQQQEEPEMLWVTGPVLAVILIILIVIAILLFKRKRTHSPSSKDEQSIGLKDSLLAHSSDPVEMRRLNYQTPGMRDHPPIPITDLADNIERLKANDGLKFSQEYESIDPGQQFTWENSNLEVNKPKNRYANVIAYDHSRVILTSIDGVPGSDYINANYIDGYRKQNAYIATQGPLPETMGDFWRMVWEQRTATVVMMTRLEEKSRVKCDQYWPARGTETCGLIQVTLLDTVELATYTVRTFALHKSGSSEKRELRQFQFMAWPDHGVPEYPTPILAFLRRVKACNPLDAGPMVVHCSAGVGRTGCFIVIDAMLERMKHEKTVDIYGHVTCMRSQRNYMVQTEDQYVFIHEALLEAATCGHTEVPARNLYAHIQKLGQVPPGESVTAMELEFKLLASSKAHTSRFISANLPCNKFKNRLVNIMPYELTRVCLQPIRGVEGSDYINASFLDGYRQQKAYIATQGPLAESTEDFWRMLWEHNSTIIVMLTKLREMGREKCHQYWPAERSARYQYFVVDPMAEYNMPQYILREFKVTDARDGQSRTIRQFQFTDWPEQGVPKTGEGFIDFIGQVHKTKEQFGQDGPITVHCSAGVGRTGVFITLSIVLERMRYEGVVDMFQTVKTLRTQRPAMVQTEDQYQLCYRAALEYLGSFDHYAT

SEQ ID NO: 11143 - protein, 1332 aa, Homo sapiens
  VARIANT 1: note = misc_feature - Xaa can be any naturally occurring amino acid
XSLLPGITYSLRVLAFTAVGDGPPSPTIQVKTQQGVPAQPADFQAEVESDTRIQLSWLLPPQERIIMYELVYWAAEDEDQQHKVTFDPTSSYTLEDLKPDTLYRFQLAARSDMGVGVFTPTIEARTAQSMPSGPPRKVEVEPLNSTAVHVYWKLPVPSKQHGQIRGYQVTYVRLENGEPRGLPIIQDVMLAEAQETTISGLTPETTYSVTVAAYTTKGDGARSKPKIVTTTGAVPGRPTMMISTTAMNTALLQWHPPKELPGELLGYRLQYCRADEARPNTIDFGKDDQHFTVTGLHKGTTYIFRLAAKNRAGLGEEFEKEIRTPEDLPSGFPQNLHVTGLTTSTTELAWDPPVLAERNGRIISYTVVFRDINSQQELQNITTDTRFTLTGLKPDTTYDIKVRAWTSKGSGPLSPSIQSRTMPVEQVFAKNFRVAAAMKTSVLLSWEVPDSYKSAVPFKILYNGQSVEVDGHSMRKLIADLQPNTEYSFVLMNRGSSAGGLQHLVSIRTAPDLLPHKPLPASAYIEDGRFDLSMPHVQDPSLVRWFYIVVVPIDRVGGSMLTPRWSTPEELELDELLEAIEQGGEEQRRRRRQAERLKPYVAAQLDVLPETFTLGDKKNYRGFYNRPLSPDLSYQCFVLASLKEPMDQKRYASSPYSDEIVVQVTPAQQQEEPEMLWVTGPVLAVILIILIVIAILLFKRKRTHSPSSKDEQSIGLKDSLLAHSSDPVEMRRLNYQTPGSSVPSCPNTSSMRDHPPIPITDLADNIERLKANDGLKFSQEYESIDPGQQFTWENSNLEVNKPKNRYANVIAYDHSRVILTSIDGVPGSDYINANYIDGYRKQNAYIATQGPLPETMGDFWRMVWEQRTATVVMMTRLEEKSRVKCDQYWPARGTETCGLIQVTLLDTVELATYTVRTFALHKSGSSEKRELRQFQFMAWPDHGVPEYPTPILAFLRRVKACNPLDAGPMVVHCSAGVGRTGCFIVIDAMLERMKHEKTVDIYGHVTCMRSQRNYMVQTEDQYVFIHEALLEAATCGHTEVPARNLYAHIQKLGQVPPGESVTAMELEFKLLASSKAHTSRFISANLPCNKFKNRLVNIMPYELTRVCLQPIRGVEGSDYINASFLDGYRQQKAYIATQGPLAESTEDFWRMLWEHNSTIIVMLTKLREMGREKCHQYWPAERSARYQYFVVDPMAEYNMPQYILREFKVTDARDGQSRTIRQFQFTDWPEQGVPKTGEGFIDFIGQVHKTKEQFGQDGPITVHCSAGVGRTGVFITLSIVLERMRYEGVVDMFQTVKTLRTQRPAMVQTEDQYQLCYRAALEYLGSFDHYAT

SEQ ID NO: 11144 - protein, 1291 aa, Homo sapiens
  VARIANT 1: note = misc_feature - Xaa can be any naturally occurring amino acid
XSVTLTWDSGNSEPVTYYGIQYRAAGTEGPFQEVDGVATTRYSIGGLSPFSEYAFRVLAVNSIGRGPPSEAVRARTGEQAPSSPPRRVQARMLSASTMLVQWEPPEEPNGLVRGYRVYYTPDSRRPPNAWHKHNTDAGLLTTVGSLLPGITYSLRVLAFTAVGDGPPSPTIQVKTQQGVPAQPADFQAEVESDTRIQLSWLLPPQERIIMYELVYWAAEDEDQQHKVTFDPTSSYTLEDLKPDTLYRFQLAARSDMGVGVFTPTIEARTAQSMPSGPPRKVEVEPLNSTAVHVYWKLPVPSKQHGQIRGYQVTYVRLENGEPRGLPIIQDVMLAEAQWRPEESEDYETTISGLTPETTYSVTVAAYTTKGDGARSKPKIVTTTGAVFAKNFRVAAAMKTSVLLSWEVPDSYKSAVPFKILYNGQSVEVDGHSMRKLIADLQPNTEYSFVLMNRGSSAGGLQHLVSIRTAPDLLPHKPLPASAYIEDGRFDLSMPHVQDPSLVRWFYIVVVPIDRVGGSMLTPRWSTPEELELDELLEAIEQGGEEQRRRRRQAERLKPYVAAQLDVLPETFTLGDKKNYRGFYNRPLSPDLSYQCFVLASLKEPMDQKRYASSPYSDEIVVQVTPAQQQEEPEMLWVTGPVLAVILIILIVIAILLFKRKRTHSPSSKDEQSIGLKDSLLAHSSDPVEMRRLNYQTPGSSVPSCPNTSSMRDHPPIPITDLADNIERLKANDGLKFSQEYESIDPGQQFTWENSNLEVNKPKNRYANVIAYDHSRVILTSIDGVPGSDYINANYIDGYRKQNAYIATQGPLPETMGDFWRMVWEQRTATVVMMTRLEEKSRVKCDQYWPARGTETCGLIQVTLLDTVELATYTVRTFALHKSGSSEKRELRQFQFMAWPDHGVPEYPTPILAFLRRVKACNPLDAGPMVVHCSAGVGRTGCFIVIDAMLERMKHEKTVDIYGHVTCMRSQRNYMVQTEDQYVFIHEALLEAATCGHTEVPARNLYAHIQKLGQVPPGESVTAMELEFKLLASSKAHTSRFISANLPCNKFKNRLVNIMPYELTRVCLQPIRGVEGSDYINASFLDGYRQQKAYIATQGPLAESTEDFWRMLWEHNSTIIVMLTKLREMGREKCHQYWPAERSARYQYFVVDPMAEYNMPQYILREFKVTDARDGQSRTIRQFQFTDWPEQGVPKTGEGFIDFIGQVHKTKEQFGQDGPITVHCSAGVGRTGVFITLSIVLERMRYEGVVDMFQTVKTLRTQRPAMVQTEDQYQLCYRAALEYLGSFDHYAT

SEQ ID NO: 11145 - protein, 120 aa, Homo sapiens
MKPAAREARLPPRSPGLRWALPLLLLLLRLGQILCAGGRPSPVFDIKAVSISPTNVILTWKSNDTAASEYKYVVKHKMENEKTITVVHQPWCNITGLRPATSYVFSITPGIGNETWGDPR

SEQ ID NO: 11146 - protein, 147 aa, Homo sapiens [sequence omitted]

SEQ ID NO: 11147 - protein, 539 aa, Homo sapiens
MKPAAREARLPPRSPGLRWALPLLLLLLRLGQILCAGGTPSPIPDPSVATVATGENGITQISSTAESFHKQNGTGTPQVETNTSEDGESSGANDSLRTPEQGSNGTDGASQKTPSSTGPSPVFDIKAVSISPTNVILTWKSNDTAASEYKYVVKHKMENEKTITVVHQPWCNITGLRPATSYVFSITPGIGNETWGDPRVIKVITEPIPVSDLRVALTGVRKAALSWSNGNGTASCRVLLESIGSHEELTQDSRLQVNISGLKPGVQYNINPYLLQSNKTKGDPLGTEGGLDASNTERSRAGSPTAPVHDESLVGPVDPSSGQQSRDTEVLLVGLEPGTRYNATVYSQAANGTEGQPQAIEFRTNAIQVFDVTAVNISATSLTLIWKVSDNESSSNYTYKIHVAGETDSSNLNVSEPRAVIPGLRSSTFYNITVCPVLGDIEGTPGFLQVHTPPVPVSDFRVTVVSTTEIGLAWSSHDAESFQMHITQEGAGNSRVEITTNQSIIIGGLFPGTKYCFEIVPKGPNGTEGASRTVCNRTG

SEQ ID NO: 11148 - protein, 1337 aa, Homo sapiens
MKPAAREARLPPRSPGLRWALPLLLLLLRLGQILCAGGTPSPIPDPSVATVATGENGITQISSTAESFHKQNGTGTPQVETNTSEDGESSGANDSLRTPEQGSNGTDGASQKTPSSTGPSPVFDIKAVSISPTNVILTWKSNDTAASEYKYVVKHKMENEKTITVVHQPWCNITGLRPATSYVFSITPGIGNETWGDPRVIKVITEPIPVSDLRVALTGVRKAALSWSNGNGTASCRVLLESIGSHEELTQDSRLQVNISGLKPGVQYNINPYLLQSNKTKGDPLGTEGGLDASNTERSRAGSPTAPVHDESLVGPVDPSSGQQSRDTEVLLVGLEPGTRYNATVYSQAANGTEGQPQAIEFRTNAIQVFDVTAVNISATSLTLIWKVSDNESSSNYTYKIHVAGETDSSNLNVSEPRAVIPGLRSSTFYNITVCPVLGDIEGTPGFLQVHTPPVPVSDFRVTVVSTTEIGLAWSSHDAESFQMHITQEGAGNSRVEITTNQSIIIGGLFPGTKYCFEIVPKGPNGTEGASRTVCNRTVPSAVFDIHVVYVTTTEMWLDWKSPDGASEYVYHLVIESKHGSNHTSTYDKAITLQGLIPGTLYNITISPEVDHVWGDPNSTAQYTRPSNVSNIDVSTNTTAATLSWQNFDDASPTYSYCLLIEKAGNSSNATQVVTDIGITDATVTELIPGSSYTVEIFAQVGDGIKSLEPGRKSFCTDPASMASFDCEVVPKEPALVLKWTCPPGANAGFELEVSSGAWNNATHLESCSSENGTEYRTEVTYLNFSTSYNISITTVSCGKMAAPTRNTCTTGITDPPPPDGSPNITSVSHNSVKVKFSGFEASHGPIKAYAVILTTGEAGHPSADVLKYTYEDFKKGASDTYVTYLIRTEEKGRSQSLSEVLKYEIDVGNESTTLGYYNGKLEPLGSYRACVAGFTNITFHPQNKGLIDGAESYVSFSRYSDAVSLPQDPGVICGAVFGCIFGALVIVTVGGFIFWRKKRKDAKNNEVSFSQIKPKKSKLIRVENFEAYFKKQQADSNCGFAEEYEDLKLVGISQPKYAAELAENRGKNRYNNVLPYDISRVKLSVQTHSTDDYINANYMPGYHSKKDFIATQGPLPNTLKDFWRMVWEKNVYAIIMLTKCVEQGRTKCEEYWPSKQAQDYGDITVAMTSEIVLPEWTIRDFTVKNIQTSESHPLRQFHFTSWPDHGVPDTTDLLINFRYLVRDYMKQSPPESPILVHCSAGVGRTGTFIAIDRLIYQIENENTVDVYGIVYDLRMHRPLMVQTEDQYVFLNQCVLDIVRSQKDSKVDLIYQNTTAMTIYENLAPVTTFGKTNGYIA

SEQ ID NO: 11149 - protein, 1342 aa, Homo sapiens
MKPAAREARLPPRSPGLRWALPLLLLLLRLGQILCAGGTPSPIPDPSVATVATGENGITQISSTAESFHKQNGTGTPQVETNTSEDGESSGANDSLRTPEQGSNGTDGASQKTPSSTGPSPVFDIKAVSISPTNVILTWKSNDTAASEYKYVVKHKMENEKTITVVHQPWCNITGLRPATSYVFSITPGIGNETWGDPRVIKVITEPIPVSDLRVALTGVRKAALSWSNGNGTASCRVLLESIGSHEELTQDSRLQVNISGLKPGVQYNINPYLLQSNKTKGDPLGTEGGLDASNTERSRAGSPTAPVHDESLVGPVDPSSGQQSRDTEVLLVGLEPGTRYNATVYSQAANGTEGQPQAIEFRTNAIQVFDVTAVNISATSLTLIWKVSDNESSSNYTYKIHVAGETDSSNLNVSEPRAVIPGLRSSTFYNITVCPVLGDIEGTPGFLQVHTPPVPVSDFRVTVVSTTEIGLAWSSHDAESFQMHITQEGAGNSRVEITTNQSIIIGGLFPGTKYCFEIVPKGPNGTEGASRTVCNRTVPSAVFDIHVVYVTTTEMWLDWKSPDGASEYVYHLVIESKHGSNHTSTYDKAITLQGLIPGTLYNITISPEVDHVWGDPNSTAQYTRPSNVSNIDVSTNTTAATLSWQNFDDASPTYSYCLLIEKAGNSSNATQVVTDIGITDATVTELIPGSSYTVEIFAQVGDGIKSLEPGRKSFCTDPASMASFDCEVVPKEPALVLKWTCPPGANAGFELEVSSGAWNNATHLESCSSENGTEYRTEVTYLNFSTSYNISITTVSCGKMAAPTRNTCTTGITDPPPPDGSPNITSVSHNSVKVKFSGFEASHGPIKAYAVILTTGEAGHPSADVLKYTYEDFKKGASDTYVTYLIRTEEKGRSQSLSEVLKYEIDVGNESTTLGYYNGKLEPLGSYRCLLRACVAGFTNITFHPQNKGLIDGAESYVSFSRYSDAVSLPQDPGVICGAVFGCIFGALVIVTVGGFIFWRKKRKDAKNNEVSFSQIKSLKRSKLIRVENFEAYFKKQQADSNCGFAEEYEDLKLVGISQPKYAAELAENRGKNRYNNVLPYDISRVKLSVQTHSTDDYINANYMPGYHSKKDFIATQGPLPNTLKDFWRMVWEKNVYAIIMLTKCVEQGRTKCEEYWPSKQAQDYGDITVAMTSEIVLPEWTIRDFTVKNIQTSESHPLRQFHFTSWPDHGVPDTTDLLINFRYLVRDYMKQSPPESPILVHCSAGVGRTGTFIAIDRLIYQIENENTVDVYGIVYDLRMHRPLMVQTEDQYVFLNQCVLDIVRSQKDSKVDLIYQNTTAMTIYENLAPVTTFGKTNGYIA

SEQ ID NO: 11150 - protein, 1338 aa, Homo sapiens [sequence omitted]

SEQ ID NO: 11151 - protein, 1216 aa, Homo sapiens
MGHLPTGIHGARRLLPLLWLFVLFKNATAFHVTVQDDNNIVVSLEASDVISPASVYVVKITGESKNYFFEFEEFNSTLPPPVIFKASYHGLYYIITLVVVNGNVVTKPSRSITVLTKPLPVTSVSIYDYKPSPETGVLFEIHYPEKYNVFTRVNISYWEGKDFRTMLYKDFFKGKTVFNHWLPGMCYSNITFQLVSEATFNKSTLVEYSGVSHEPKQHRTAPYPPQNISVRIVNLNKNNWEEQSGNFPEESFMRSQDTIGKEKLFHFTEETPEIPSGNISSGWPDFNSSDYETTSQPYWWDSASAAPESEDEFVSVLPMEYENNSTLSETEKSTSGSFSFFPVQMILTWLPPKPPTAFDGFHIHIEREENFTEYLMVDEEAHEFVAELKEPGKYKLSVTTFSSSGSCETRKSQSAKSLSFYISPSGEWIEELTEKPQHVSVHVLSSTTALMSWTSSQENYNSTIVSVVSLTCQKQKESQRLEKQYCTQVNSSKPIIENLVPGAQYQVVIYLRKGPLIGPPSDPVTFAIVPTGIKDLMLYPLGPTAVVLSWTRPYLGVFRKYVVEMFYFNPATMTSEWTTYYEIAATVSLTASVRIANLLPAWYYNFRVTMVTWGDPELSCCDSSTISFITAPVAPEITSVEYFNSLLYISWTYGDDTTDLSHSRMLHWMVVAEGKKKIKKSVTRNVMTAILSLPPGDIYNLSVTACTERGSNTSMLRLVKLEPAPPKSLFAVNKTQTSVTLLWVEEGVADFFEVFCQQVGSSQKTKLQEPVAVSSHVVTISSLLPATAYNCSVTSFSHDSPSVPTFIAVSTMVTEMNPNVVVISVLAILSTLLIGLLLVTLIILRKKHLQMARECGAGTFVNFASLERDGKLPYNWRRSIFAFLTLLPSCLWTDYLLAFYINPWSKNGLKKRKLTNPVQLDDFDAYIKDMAKDSDYKFSLQFEELKLIGLDIPHFAADLPLNRCKNRYTNILPYDFSRVRLVSMNEEEGADYINANYIPGYNSPQEYIATQGPLPETRNDFWKMVLQQKSQIIVMLTQCNEKRRVKCDHYWPFTEEPIAYGDITVEMISEEEQDDWACRHFRINYADEMQDVMHFNYTAWPDHGVPTANAAESILQFVHMVRQQATKSKGPMIIHCSAGVGRTGTFIALDRLLQHIRDHEFVDILGLVSEMRSYRMSMVQTEEQYIFIHQCVQLMWMKKKQQFCISDVIYENVSKS

SEQ ID NO: 11152 - protein, 1188 aa, Homo sapiens
MGHLPTGIHGARRLLPLLWLFVLFKNATAFHVTVQDDNNIVVSLEASDVISPASVYVVKITGESKNYFFEFEEFNSTLPPPVIFKASYHGLYYIITLVVVNGNVVTKPSRSITVLTKPLPVTSVSIYDYKPSPETGVLFEIHYPEKYNVFTRVNISYWEGKDFRTMLYKDFFKGKTVFNHWLPGMCYSNITFQLVSEATFNKSTLVEYSGVSHEPKQHRTAPYPPQNISVRIVNLNKNNWEEQSGNFPEESFMRSQDTIGKEKLFHFTEETPEIPSGNISSGWPDFNSSDYETTSQPYWWDSASAAPESEDEFVSVLPMEYENNSTLSETEKSTSGSFSFFPVQMILTWLPPKPPTAFDGFHIHIEREENFTEYLMVDEEAHEFVAELKEPGKYKLSVTTFSSSGSCETRKSQSAKSLSFYISPSGEWIEELTEKPQHVSVHVLSSTTALMSWTSSQENYNSTIVSVVSLTCQKQKESQRLEKQYCTQVNSSKPIIENLVPGAQYQVVIYLRKGPLIGPPSDPVTFAIVPTGIKDLMLYPLGPTAVVLSWTRPYLGVFRKYVVEMFYFNPATMTSEWTTYYEIAATVSLTASVRIANLLPAWYYNFRVTMVTWGDPELSCCDSSTISFITAPVAPEITSVEYFNSLLYISWTYGDDTTDLSHSRMLHWMVVAEGKKKIKKSVTRNVMTAILSLPPGDIYNLSVTACTERGSNTSMLRLVKLEPAPPKSLFAVNKTQTSVTLLWVEEGVADFFEVFCQQVGSSQKTKLQEPVAVSSHVVTISSLLPATAYNCSVTSFSHDSPSVPTFIAVSTMVTEMNPNVVVISVLAILSTLLIGLLLVTLIILRKKHLQMARECGAGTFVNFASLERDGKLPYNWSKNGLKKRKLTNPVQLDDFDAYIKDMAKDSDYKFSLQFEELKLIGLDIPHFAADLPLNRCKNRYTNILPYDFSRVRLVSMNEEEGADYINANYIPGYNSPQEYIATQGPLPETRNDFWKMVLQQKSQIIVMLTQCNEKRRVKCDHYWPFTEEPIAYGDITVEMISEEEQDDWACRHFRINYADEMQDVMHFNYTAWPDHGVPTANAAESILQFVHMVRQQATKSKGPMIIHCSAGVGRTGTFIALDRLLQHIRDHEFVDILGLVSEMRSYRMSMVQTEEQYIFIHQCVQLMWMKKKQQFCISDVIYENVSKS

SEQ ID NO: 11153 - protein, 597 aa, Homo sapiens
MGHLPTGIHGARRLLPLLWLFVLFKNATAFHVTVQDDNNIVVSLEASDVISPASVYVVKITGESKNYFFEFEEFNSTLPPPVIFKASYHGLYYIITLVVVNGNVVTKPSRSITVLTKPLPVTSVSIYDYKPSPETGVLFEIHYPEKYNVFTRVNISYWEGKDFRTMLYKDFFKGKTVFNHWLPGMCYSNITFQLVSEATFNKSTLVEYSGVSHEPKQHRTAPYPPQNISVRIVNLNKNNWEEQSGNFPEESFMRSQDTIGKEKLFHFTEETPEIPSGNISSGWPDFNSSDYETTSQPYWWDSASAAPESEDEFVSVLPMEYENNSTLSETEKSTSGSFSFFPVQMILTWLPPKPPTAFDGFHIHIEREENFTEYLMVDEEAHEFVAELKEPGKYKLSVTTFSSSGSCETRKSQSAKSLSFYISPSGEWIEELTEKPQHVSVHVLSSTTALMSWTSSQENYNSTIVSVVSLTCQKQKESQRLEKQYCTQVNSSKPIIENLVPGAQYQVVIYLRKGPLIGPPSDPVTFAIVPTGIKDLMLYPLGPTAVVLSWTRPYLGVFRKYVVEMFYFNPATMTSEWTTYYEIAATVSLTASVVIFP

SEQ ID NO: 11154 - protein, 405 aa, Homo sapiens
MVTEMNPNVVVISVLAILSTLLIGLLLVTLIILRKKHLQMARECGAGTFVNFASLERDGKLPYNWRRSIFAFLTLLPSCLWTDYLLAFYINPWSKNGLKKRKLTNPVQLDDFDAYIKDMAKDSDYKFSLQFEELKLIGLDIPHFAADLPLNRCKNRYTNILPYDFSRVRLVSMNEEEGADYINANYIPGYNSPQEYIATQGPLPETRNDFWKMVLQQKSQIIVMLTQCNEKRRVKCDHYWPFTEEPIAYGDITVEMISEEEQDDWACRHFRINYADEMQDVMHFNYTAWPDHGVPTANAAESILQFVHMVRQQATKSKGPMIIHCSAGVGRTGTFIALDRLLQHIRDHEFVDILGLVSEMRSYRMSMVQTEEQYIFIHQCVQLMWMKKKQQFCISDVIYENVSKS

SEQ ID NO: 11155 - protein, 405 aa, Homo sapiens; identical to SEQ ID NO: 11154

SEQ ID NO: 11156 - protein, 377 aa, Homo sapiens
MVTEMNPNVVVISVLAILSTLLIGLLLVTLIILRKKHLQMARECGAGTFVNFASLERDGKLPYNWSKNGLKKRKLTNPVQLDDFDAYIKDMAKDSDYKFSLQFEELKLIGLDIPHFAADLPLNRCKNRYTNILPYDFSRVRLVSMNEEEGADYINANYIPGYNSPQEYIATQGPLPETRNDFWKMVLQQKSQIIVMLTQCNEKRRVKCDHYWPFTEEPIAYGDITVEMISEEEQDDWACRHFRINYADEMQDVMHFNYTAWPDHGVPTANAAESILQFVHMVRQQATKSKGPMIIHCSAGVGRTGTFIALDRLLQHIRDHEFVDILGLVSEMRSYRMSMVQTEEQYIFIHQCVQLMWMKKKQQFCISDVIYENVSKS

SEQ ID NO: 11157 - protein, 377 aa, Homo sapiens; identical to SEQ ID NO: 11156

SEQ ID NO: 11158 - protein, 116 aa, Homo sapiens
WKMVLQQKSQIIVMLTQCNEKRRVKCDHYWPFTEEPIAYGDITVEMISEEEQDDWACRHFRINYADEMQDVMHFNYTAWPDHGVPTANAAESILQFVHMVRQQATKSKGPMIIHCR

SEQ ID NO: 11159 - protein, 88 aa, Homo sapiens
  VARIANT 1: note = misc_feature - Xaa can be any naturally occurring amino acid
XVTLLWVEEGVADFFEVFCQQVGSSQKTKLQEPVAVSSHVVTISSLLPATAYNCSVTSFSHDSPSVPTFIAVSTMGSVELVHLSILHP

SEQ ID NO: 11160 - protein, 79 aa, Homo sapiens
MAPTWGPGMVSVVGPMGLLVVLLVGGCAAEEPPRFIKEPKDQIGVSGGVASFVCQATGDPKPRVTWNKKGKKVNSQRFE

SEQ ID NO: 11161 - protein, 91 aa, Homo sapiens
MAPTWGPGMVSVVGPMGLLVVLLVGGCAAEEPPRFIKEPKDQIGVSGGVASFVCQATGDPKPRVTWNKKGKKVNSQRFETIEFDESAGAVL

SEQ ID NO: 11162 - protein, 1948 aa, Homo sapiens
MAPTWGPGMVSVVGPMGLLVVLLVGGCAAEEPPRFIKEPKDQIGVSGGVASFVCQATGDPKPRVTWNKKGKKVNSQRFETIEFDESAGAVLRIQPLRTPRDENVYECVAQNSVGEITVHAKLTVLREDQLPSGFPNIDMGPQLKVVERTRTATMLCAASGNPDPEITWFKDFLPVDPSASNGRIKQLRSETFESTPIRGALQIESSEETDQGKYECVATNSAGVRYSSPANLYVRELREVRRVAPRFSILPMSHEIMPGGNVNITCVAVGSPMPYVKWMQGAEDLTPEDDMPVGRNVLELTDVKDSANYTCVAMSSLGVIEAVAQITVKSLPKAPGTPMVTENTATSITITWDSGNPDPVSYYVIEYKSKSQDGPYQIKEDITTTRYSIGGLSPNSEYEIWVSAVNSIGQGPPSESVVTRTGEQAPASAPRNVQARMLSATTMIVQWEEPVEPNGLIRGYRVYYTMEPEHPVGNWQKHNVDDSLLTTVGSLLEDETYTVRVLAFTSVGDGPLSDPIQVKTQQGVPGQPMNLRAEARSETSITLSWSPPRQESIIKYELLFREGDHGREVGRTFDPTTSYVVEDLKPNTEYAFRLAARSPQGLGAFTPVVRQRTLQSKPSAPPQDVKCVSVRSTAILVSWRPPPPETHNGALVGYSVRYRPLGSEDPEPKEVNGIPPTTTQILLEALEKWTQYRITTVAHTEVGPGPESSPVVVRTDEDVPSAPPRKVEAEALNATAIRVLWRSPAPGRQHGQIRGYQVHYVRMEGAEARGPPRIKDVMLADAQWETDDTAEYEMVITNLQPETAYSITVAAYTMKGDGARSKPKVVVTKGAVLGRPTLSVQQTPEGSLLARWEPPAGTAEDQVLGYRLQFGREDSTPLATLEFPPSEDRYTASGVHKGATYVFRLAARSRGGLGEEAAEVLSIPEDTPRGHPQILEAAGNASAGTVLLRWLPPVPAERNGAIVKYTVAVREAGALGPARETELPAAAEPGAENALTLQGLKPDTAYDLQVRAHTRRGPGPFSPPVRYRTFLRDQVSPKNFKVKMIMKTSVLLSWEFPDNYNSPTPYKIQYNGLTLDVDGRTTKKLITHLKPHTFYNFVLTNRGSSLGGLQQTVTAWTAFNLLNGKPSVAPKPDADGFIMVYLPDGQSPVPVQSYFIVMVPLRKSRGGQFLTPLGSPEDMDLEELIQDISRLQRRSLRHSRQLEVPRPYIAARFSVLPPTFHPGDQKQYGGFDNRGLEPGHRYVLFVLAVLQKSEPTFAASPFSDPFQLDNPDPQPIVDGEEGLIWVIGPVLAVVFIICIVIAILLYKNKPDSKRKDSEPRTKCLLNNADLAPHHPKDPVEMRRINFQTPDSGLRSPLREPGFHFESMLSHPPIPIADMAEHTERLKANDSLKLSQEYESIDPGQQFTWEHSNLEVNKPKNRYANVIAYDHSRVILQPIEGIMGSDYINANYVDGYRCQNAYIATQGPLPETFGDFWRMVWEQRSATIVMMTRLEEKSRIKCDQYWPNRGTETYGFIQVTLLDTIELATFCVRTFSLHKNGSSEKREVRQFQFTAWPDHGVPEYPTPFLAFLRRVKTCNPPDAGPIVVHCSAGVGRTGCFIVIDAMLERIKPEKTVDVYGHVTLMRSQRNYMVQTEDQYSFIHEALLEAVGCGNTEVPARSLYAYIQKLAQVEPGEHVTGMELEFKRLANSKAHTSRFISANLPCNKFKNRLVNIMPYESTRVCLQPIRGVEGSDYINASFIDGYRQQKAYIATQGPLAETTEDFWRMLWENNSTIVVMLTKLREMGREKCHQYWPAERSARYQYFVVDPMAEYNMPQYILREFKVTDARDGQSRTVRQFQFTDWPEQGVPKSGEGFIDFIGQVHKTKEQFGQDGPISVHCSAGVGRTGVFITLSIVLERMRYEGVVDIFQTVKMLRTQRPAMVQTEDEYQFCYQAALEYLGSFDHYAT

SEQ ID NO: 11163 - protein, 1505 aa, Homo sapiens
MAPTWGPGMVSVVGPMGLLVVLLVGGCAAEEPPRFIKEPKDQIGVSGGVASFVCQATGDPKPRVTWNKKGKKVNSQRFETIEFDESAGAVLRIQPLRTPRDENVYECVAQNSVGEITVHAKLTVLREDQLPSGFPNIDMGPQLKVVERTRTATMLCAASGNPDPEITWFKDFLPVDPSASNGRIKQLRSGALQIESSEETDQGKYECVATNSAGVRYSSPANLYVRELREVRRVAPRFSILPMSHEIMPGGNVNITCVAVGSPMPYVKWMQGAEDLTPEDDMPVGRNVLELTDVKDSANYTCVAMSSLGVIEAVAQITVKSLPKAPGTPMVTENTATSITITWDSGNPDPVSYYVIEYKSKSQDGPYQIKEDITTTRYSIGGLSPNSEYEIWVSAVNSIGQGPPSESVVTRTGEQAPASAPRNVQARMLSATTMIVQWEEPVEPNGLIRGYRVYYTMEPEHPVGNWQKHNVDDSLLTTVGSLLEDETYTVRVLAFTSVGDGPLSDPIQVKTQQGVPGQPMNLRAEARSETSITLSWSPPRQESIIKYELLFREGDHGREVGRTFDPTTSYVVEDLKPNTEYAFRLAARSPQGLGAFTPVVRQRTLQSISPKNFKVKMIMKTSVLLSWEFPDNYNSPTPYKIQYNGLTLDVDGRTTKKLITHLKPHTFYNFVLTNRGSSLGGLQQTVTAWTAFNLLNGKPSVAPKPDADGFIMVYLPDGQSPVPVQSYFIVMVPLRKSRGGQFLTPLGSPEDMDLEELIQDISRLQRRSLRHSRQLEVPRPYIAARFSVLPPTFHPGDQKQYGGFDNRGLEPGHRYVLFVLAVLQKSEPTFAASPFSDPFQLDNPDPQPIVDGEEGLIWVIGPVLAVVFIICIVIAILLYKNKPDSKRKDSEPRTKCLLNNADLAPHHPKDPVEMRRINFQTPGMLSHPPIPIADMAEHTERLKANDSLKLSQEYESIDPGQQFTWEHSNLEVNKPKNRYANVIAYDHSRVILQPIEGIMGSDYINANYVDGYRCQNAYIATQGPLPETFGDFWRMVWEQRSATIVMMTRLEEKSRIKCDQYWPNRGTETYGFIQVTLLDTIELATFCVRTFSLHKNGSSEKREVRQFQFTAWPDHGVPEYPTPFLAFLRRVKTCNPPDAGPIVVHCSAGVGRTGCFIVIDAMLERIKPEKTVDVYGHVTLMRSQRNYMVQTEDQYSFIHEALLEAVGCGNTEVPARSLYAYIQKLAQVEPGEHVTGMELEFKRLANSKAHTSRFISANLPCNKFKNRLVNIMPYESTRVCLQPIRGVEGSDYINASFIDGYRQQKAYIATQGPLAETTEDFWRMLWENNSTIVVMLTKLREMGREKCHQYWPAERSARYQYFVVDPMAEYNMPQYILREFKVTDARDGQSRTVRQFQFTDWPEQGVPKSGEGFIDFIGQVHKTKEQFGQDGPISVHCSAGVGRTGVFITLSIVLERMRYEGVVDIFQTVKMLRTQRPAMVQTEDEYQFCYQAALEYLGSFDHYAT

SEQ ID NO: 11164 - protein, 1501 aa, Homo sapiens
MAPTWGPGMVSVVGPMGLLVVLLVGGCAAEEPPRFIKEPKDQIGVSGGVASFVCQATGDPKPRVTWNKKGKKVNSQRFETIEFDESAGAVLRIQPLRTPRDENVYECVAQNSVGEITVHAKLTVLREDQLPSGFPNIDMGPQLKVVERTRTATMLCAASGNPDPEITWFKDFLPVDPSASNGRIKQLRSGALQIESSEETDQGKYECVATNSAGVRYSSPANLYVRVRRVAPRFSILPMSHEIMPGGNVNITCVAVGSPMPYVKWMQGAEDLTPEDDMPVGRNVLELTDVKDSANYTCVAMSSLGVIEAVAQITVKSLPKAPGTPMVTENTATSITITWDSGNPDPVSYYVIEYKSKSQDGPYQIKEDITTTRYSIGGLSPNSEYEIWVSAVNSIGQGPPSESVVTRTGEQAPASAPRNVQARMLSATTMIVQWEEPVEPNGLIRGYRVYYTMEPEHPVGNWQKHNVDDSLLTTVGSLLEDETYTVRVLAFTSVGDGPLSDPIQVKTQQGVPGQPMNLRAEARSETSITLSWSPPRQESIIKYELLFREGDHGREVGRTFDPTTSYVVEDLKPNTEYAFRLAARSPQGLGAFTPVVRQRTLQSISPKNFKVKMIMKTSVLLSWEFPDNYNSPTPYKIQYNGLTLDVDGRTTKKLITHLKPHTFYNFVLTNRGSSLGGLQQTVTAWTAFNLLNGKPSVAPKPDADGFIMVYLPDGQSPVPVQSYFIVMVPLRKSRGGQFLTPLGSPEDMDLEELIQDISRLQRRSLRHSRQLEVPRPYIAARFSVLPPTFHPGDQKQYGGFDNRGLEPGHRYVLFVLAVLQKSEPTFAASPFSDPFQLDNPDPQPIVDGEEGLIWVIGPVLAVVFIICIVIAILLYKKKPHSKRKDSEPRTKCLLNNADLAPHHPKDPVEMRRINFQTPGMLSHPPIPIADMAEHTERLKANDSLKLSQEYESIDPGQQFTWEHSNLEVNKPKNRYANVIAYDHSRVILQPIEGIMGSDYINANYVDGYRCQNAYIATQGPLPETFGDFWRMVWEQRSATIVMMTRLEEKSRIKCDQYWPNRGTETYGFIQVTLLDTIELATFCVRTFSLHKNGSSEKREVRQFQFTAWPDHGVPEYPTPFLAFLRRVKTCNPPDAGPIVVHCSAGVGRTGCFIVIDAMLERIKPEKTVDVYGHVTLMRSQRNYMVQTEDQYSFIHEALLEAVGCGNTEVPARSLYAYIQKLAQVEPGEHVTGMELEFKRLANSKAHTSRFISANLPCNKFKNRLVNIMPYESTRVCLQPIRGVEGSDYINASFIDGYRQQKAYIATQGPLAETTEDFWRMLWENNSTIVVMLTKLREMGREKCHQYWPAERSARYQYFVVDPMAEYNMPQYILREFKVTDARDGQSRTVRQFQFTDWPEQGVPKSGEGFIDFIGQVHKTKEQFGQDGPISVHCSAGVGRTGVFITLSIVLERMRYEGVVDIFQTVKMLRTQRPAMVQTEDEYQFCYQAALEYLGSFDHYAT

SEQ ID NO: 11165 - protein, 1501 aa, Homo sapiens
MAPTWGPGMVSVVGPMGLLVVLLVGGCAAEEPPRFIKEPKDQIGVSGGVASFVCQATGDPKPRVTWNKKGKKVNSQRFETIEFDESAGAVLRIQPLRTPRDENVYECVAQNSVGEITVHAKLTVLREDQLPSGFPNIDMGPQLKVVERTRTATMLCAASGNPDPEITWFKDFLPVDPSASNGRIKQLRSGALQIESSEETDQGKYECVATNSAGVRYSSPANLYVRVRRVAPRFSILPMSHEIMPGGNVNITCVAVGSPMPYVKWMQGAEDLTPEDDMPVGRNVLELTDVKDSANYTCVAMSSLGVIEAVAQITVKSLPKAPGTPMVTENTATSITITWDSGNPDPVSYYVIEYKSKSQDGPYQIKEDITTTRYSIGGLSPNSEYEIWVSAVNSIGQGPPSESVVTRTGEQAPASAPRNVQARMLSATTMIVQWEEPVEPNGLIRGYRVYYTMEPEHPVGNWQKHNVDDSLLTTVGSLLEDETYTVRVLAFTSVGDGPLSDPIQVKTQQGVPGQPMNLRAEARSETSITLSWSPPRQESIIKYELLFREGDHGREVGRTFDPTTSYVVEDLKPNTEYAFRLAARSPQGLGAFTPVVRQRTLQSISPKNFKVKMIMKTSVLLSWEFPDNYNSPTPYKIQYNGLTLDVDGRTTKKLITHLKPHTFYNFVLTNRGSSLGGLQQTVTAWTAFNLLNGKPSVAPKPDADGFIMVYLPDGQSPVPVQSYFIVMVPLRKSRGGQFLTPLGSPEDMDLEELIQDISRLQRRSLRHSRQLEVPRPYIAARFSVLPPTFHPGDQKQYGGFDNRGLEPGHRYVLFVLAVLQKSEPTFAASPFSDPFQLDNPDPQPIVDGEEGLIWVIGPVLAVVFIICIVIAILLYKNKPDSKRKDSEPRTKCLLNNADLAPHHPKDPVEMRRINFQTPGMLSHPPIPIADMAEHTERLKANDSLKLSQEYESIDPGQQFTWEHSNLEVNKPKNRYANVIAYDHSRVILQPIEGIMGSDYINANYVDGYRCQNAYIATQGPLPETFGDFWRMVWEQRSATIVMMTRLEEKSRIKCDQYWPNRGTETYGFIQVTLLDTIELATFCVRTFSLHKNGSSEKREVRQFQFTAWPDHGVPEYPTPFLAFLRRVKTCNPPDAGPIVVHCSAGVGRTGCFIVIDAMLERIKPEKTVDVYGHVTLMRSQRNYMVQTEDQYSFIHEALLEAVGCGNTEVPARSLYAYIQKLAQVEPGEHVTGMELEFKRLANSKAHTSRFISANLPCNKFKNRLVNIMPYESTRVCLQPIRGVEGSDYINASFIDGYRQQKAYIATQGPLAETTEDFWRMLWENNSTIVVMLTKLREMGREKCHQYWPAERSARYQYFVVDPMAEYNMPQYILREFKVTDARDGQSRTVRQFQFTDWPEQGVPKSGEGFIDFIGQVHKTKEQFGQDGPISVHCSAGVGRTGVFITLSIVLERMRYEGVVDIFQTVKMLRTQRPAMVQTEDEYQFCYQAALEYLGSFDHYAT

SEQ ID NO: 11166 - protein, 1910 aa, Homo sapiens
MAPTWGPGMVSVVGPMGLLVVLLVGGCAAEEPPRFIKEPKDQIGVSGGVASFVCQATGDPKPRVTWNKKGKKVNSQRFETIEFDESAGAVLRIQPLRTPRDENVYECVAQNSVGEITVHAKLTVLREDQLPSGFPNIDMGPQLKVVERTRTATMLCAASGNPDPEITWFKDFLPVDPSASNGRIKQLRSGALQIESSEETDQGKYECVATNSAGVRYSSPANLYVRVRRVAPRFSILPMSHEIMPGGNVNITCVAVGSPMPYVKWMQGAEDLTPEDDMPVGRNVLELTDVKDSANYTCVAMSSLGVIEAVAQITVKSLPKAPGTPMVTENTATSITITWDSGNPDPVSYYVIEYKSKSQDGPYQIKEDITTTRYSIGGLSPNSEYEIWVSAVNSIGQGPPSESVVTRTGEQAPASAPRNVQARMLSATTMIVQWEEPVEPNGLIRGYRVYYTMEPEHPVGNWQKHNVDDSLLTTVGSLLEDETYTVRVLAFTSVGDGPLSDPIQVKTQQGVPGQPMNLRAEARSETSITLSWSPPRQESIIKYELLFREGDHGREVGRTFDPTTSYVVEDLKPNTEYAFRLAARSPQGLGAFTPVVRQRTLQSKPSAPPQDVKCVSVRSTAILVSWRPPPPETHNGALVGYSVRYRPLGSEDPEPKEVNGIPPTTTQILLEALEKWTQYRITTVAHTEVGPGPESSPVVVRTDEDVPSAPPRKVEAEALNATAIRVLWRSPAPGRQHGQIRGYQVHYVRMEGAEARGPPRIKDVMLADAQEMVITNLQPETAYSITVAAYTMKGDGARSKPKVVVTKGAVLGRPTLSVQQTPEGSLLARWEPPAGTAEDQVLGYRLQFGREDSTPLATLEFPPSEDRYTASGVHKGATYVFRLAARSRGGLGEEAAEVLSIPEDTPRGHPQILEAAGNASAGTVLLRWLPPVPAERNGAIVKYTVAVREAGALGPARETELPAAAEPGAENALTLQGLKPDTAYDLQVRAHTRRGPGPFSPPVRYRTFLRDQVSPKNFKVKMIMKTSVLLSWEFPDNYNSPTPYKIQYNGLTLDVDGRTTKKLITHLKPHTFYNFVLTNRGSSLGGLQQTVTAWTAFNLLNGKPSVAPKPDADGFIMVYLPDGQSPVPVQSYFIVMVPLRKSRGGQFLTPLGSPEDMDLEELIQDISRLQRRSLRHSRQLEVPRPYIAARFSVLPPTFHPGDQKQYGGFDNRGLEPGHRYVLFVLAVLQKSEPTFAASPFSDPFQLDNPDPQPIVDGEEGLIWVIGPVLAVVFIICIVIAILLYKNKPDSKRKDSEPRTKCLLNNADLAPHHPKDPVEMRRINFQTPGMLSHPPIPIADMAEHTERLKANDSLKLSQEYESIDPGQQFTWEHSNLEVNKPKNRYANVIAYDHSRVILQPIEGIMGSDYINANYVDGYRCQNAYIATQGPLPETFGDFWRMVWEQRSATIVMMTRLEEKSRIKCDQYWPNRGTETYGFIQVTLLDTIELATFCVRTFSLHKNGSSEKREVRQFQFTAWPDHGVPEYPTPFLAFLRRVKTCNPPDAGPIVVHCSAGVGRTGCFIVIDAMLERIKPEKTVDVYGHVTLMRSQRNYMVQTEDQYSFIHEALLEAVGCGNTEVPARSLYAYIQKLAQVEPGEHVTGMELEFKRLANSKAHTSRFISANLPCNKFKNRLVNIMPYESTRVCLQPIRGVEGSDYINASFIDGYRQQKAYIATQGPLAETTEDFWRMLWENNSTIVVMLTKLREMGREKCHQYWPAERSARYQYFVVDPMAEYNMPQYILREFKVTDARDGQSRTVRQFQFTDWPEQGVPKSGEGFIDFIGQVHKTKEQFGQDGPISVHCSAGVGRTGVFITLSIVLERMRYEGVVDIFQTVKMLRTQRPAMVQTEDEYQFCYQAALEYLGSFDHYAT

SEQ ID NO: 11167 - protein, 128 aa, Homo sapiens
MAPTWGPGMVSVVGPMGLLVVLLVGGCAAEEPPRFIKEPKDQIGVSGGVASFVCQATGDPKPRVTWNKKGKKVNSQRFETIEFDESAGAVLRIQPLRTPRDENVYECVAQNSVGEITVHAKLTVLRGP

SEQ ID NO: 11168 - protein, 142 aa, Homo sapiens
MAPGVARGPTPYWRLRLGGAALLLLLIPVAAAQEPPGAACSQNTNKTCEECLKNVSACLKKKTRMLDLKTTKALQHISPDASCEVHAPQPSPAGRPRGHCGLLTLASEPASLPGQAAGELPLKDSPLVLQTGDLLFPVHLCF

SEQ ID NO: 11169 - protein, 107 aa, Homo sapiens
MAPGVARGPTPYWRLRLGGAALLLLLIPVAAAQEPPGAACSQNTNKTCEECLKNVSCLWCNTNKACLDYPVTSVLPPASLCKLSSARWGVCWGLFKEENPYARFENN

SEQ ID NO: 11170 - protein, 180 aa, Homo sapiens
MAPGVARGPTPYWRLRLGGAALLLLLIPVAAAQEPPGAACSQNTNKTCEECLKNVSCLWCNTNKACLDYPVTSVLPPASLCKLSSARWGVCWVNFEALIITMSVVGGTLLLGIAICCCCCCRRKRSRKPDRSEEKAMREREERRIRQEERRAEMKTRHDEIRKKYGLFKEENPYARFENN

SEQ ID NO: 11171 - protein, 159 aa, Homo sapiens
MGQAVSCVLGRLQPVKCTGARRVGRRGLRKQTSQECLWCNTNKACLDYPVTSVLPPASLCKLSSARWGVCWVNFEALIITMSVVGGTLLLGIAICCCCCCRRKRSRKPDRSEEKAMREREERRIRQEERRAEMKTRHDEIRKKYGLFKEENPYARFENN

SEQ ID NO: 11172 - protein, 381 aa, Homo sapiens
MHLLAILFCALWSAVLAENSDDYDLMYVNLDNEIDNGLHPTEDPTPCACGQEHSEWDKLFIMLENSQMRERMLLQATDDVLRGELQRLREELGRLAESLARPCAPGAPAEARLTSALDELLQATRDAGRRLARMEGAEAQRPEEAGRALAAVLEELRQTRADLHAVQGWAARSWLPAGCETAILFPMRSKKIFGSVHPVRPMRLESFSACIWVKATDVLNKTILFSYGTKRNPYEIQLYLSYQSIVFVVGGEENKLVAEAMVSLGRWTHLCGTWNSEEGLTSLWVNGELAATTVEMATGHIVPEGGILQIGQEKNGCCVGGGFDETLAFSGRLTGFNIWDSVLSNEEIRETGGAESCHIRGNIVGWGVTEIQPHGGAQYVS

SEQ ID NO: 11173 - protein, 192 aa, Homo sapiens
MGCSWRKTLSFFLVFVPIYLHGASSQEAAPVGPRKPFFERLRRLEEQFRRFQEVTWTHLQNIASNYNVSYNVDVRFRSLAEESQAVAQAVNRSQASVQGELAQLKAWVRKLQRRGRKFAAWAPPSFSQTPPPGTWSSSALVSSLPCEPCPSAAGSARPPAAWAPSCPTPPRTMTTSWCCTAETPCCPDPSTS

SEQ ID NO: 11174 - protein, 478 aa, Homo sapiens
MGCSWRKTLSFFLVFVPIYLHGASSQEAAPVGPRKPFFERLRRLEEQFRRFQEVTWTHLQNIASNYNVSYNVDVRFRSLAEESQAVAQAVNRSQASVQGELAQLKAWVRKLQRRGRKVDTRLRALDLTLGERSQQRARERKAHKAQRDALQDSLARLEGLVHSQGARLAALEGRLPVAHPGTAALGPALVPTPTQPEELGPTSLKLQRDRQELRAASEHRGPPQDSSAPLQGRREPPASGSHRVLSGTAPKDPRQQAWSPQVPGEICGVGPTLVFPNASTRNVVFLSPGFVTALRALSFCSWVRTASGRLGTLLSYATEDNDNKLVLHGRDSLLPGSIHFVIGDPAFRELPLQLLLDGQWHHICVIWTSTQGRYWLHVDRRLVATGSRFREGYEIPPGGSLVLGQEQDSVGGGFDSSEAFVGSMSGLAIWDRALVPGEVANLAIGKEFPTGAILTLANAALAGGFVQGANCTCLERCP

SEQ ID NO: 11175 - protein, 473 aa, Homo sapiens
MGSGNWEVTGPPCGSRCERPPGLPRGVHGQFRSAVGLSGLRWFRRFQEVTWTHLQNIASNYNVSYNVDVRFRSLAEESQAVAQAVNRSQASVQGELAQLKAWVRKLQRRGRKVDTRLRALDLTLGERSQQRARERKAHKAQRDALQDSLARLEGLVHSQGARLAALEGRLPVAHPGTAALGPALVPTPTQPEELGPTSLKLQRDRQELRAASEHRGPPQDSSAPLQGRREPPASGSHRVLSGTAPKDPRQQAWSPQVPGEICGVGPTLVFPNASTRNVVFLSPGFVTALRALSFCSWVRTASGRLGTLLSYATEDNDNKLVLHGRDSLLPGSIHFVIGDPAFRELPLQLLLDGQWHHICVIWTSTQGRYWLHVDRRLVATGSRFREGYEIPPGGSLVLGQEQDSVGGGFDSSEAFVGSMSGLAIWDRALVPGEVANLAIGKEFPTGAILTLANAALAGGFVQGANCTCLERCP

SEQ ID NO: 11176 - protein, 44 aa, Homo sapiens
MARAMAAAWPLLLVALLVLSWPPPGTGAQHGGDACVTADLGAAW

SEQ ID NO: 11177 - protein, 364 aa, Homo sapiens
MARAMAAAWPLLLVALLVLSWPPPGTGDVVVQAPTQVPGFLGDSVTLPCYLQVPNMEVTHVSQLTWARHGESGSMAVFHQTQGPSYSESKRLEFVAARLGAELRNASLRMFGLRVEDEGNYTCLFVTFPQGSRSVDIWLRVLAKPQNTAEVQKVQLTGEPVPMARCVSTGGRPPAQITWHSDLGGMPNTSQVPGFLSGTVTVTSLWILVPSSQVDGKNVTCKVEHESFEKPQLLTVNLTVYYPPEVSISGYDNNWYLGQNEATLTCDARSNPEPTGYNWSTTMGPLPPFAVAQGAQLLIRPVDKPINTTLICNVTNALGARQAELTVQVKGTEHASASANGHVSYSAVSRENSSSQDPQTEGTR

SEQ ID NO: 11178 - protein, 372 aa, Homo sapiens
MARAMAAAWPLLLVALLVLSWPPPGTGDVVVQAPTQVPGFLGDSVTLPCYLQVPNMEVTHVSQLTWARHGESGSMAVFHQTQGPSYSESKRLEFVAARLGAELRNASLRMFGLRVEDEGNYTCLFVTFPQGSRSVDIWLRVLAKPQNTAEVQKVQLTGEPVPMARCVSTGGRPPAQITWHSDLGGMPNTSQVPGFLSGTVTVTSLWILVPSSQVDGKNVTCKVEHESFEKPQLLTVNLTVYYPPEVSISGYDNNWYLGQNEATLTCDARSNPEPTGYNWSTTMGPLPPFAVAQGAQLLIRPVDKPINTTLICNVTNALGARQAELTVQVKEGPPSEHSGTEHASASANGHVSYSAVSRENSSSQDPQTEGTR

SEQ ID NO: 11179 - protein, 392 aa, Homo sapiens
MARAMAAAWPLLLVALLVLSWPPPGTGDVVVQAPTQVPGFLGDSVTLPCYLQVPNMEVTHVSQLTWARHGESGSMAVFHQTQGPSYSESKRLEFVAARLGAELRNASLRMFGLRVEDEGNYTCLFVTFPQGSRSVDIWLRVLAKPQNTAEVQKVQLTGEPVPMARCVSTGGRPPAQITWHSDLGGMPNTSQVPGFLSGTVTVTSLWILVPSSQVDGKNVTCKVEHESFEKPQLLTVNLTVYYPPEVSISGYDNNWYLGQNEATLTCDARSNPEPTGYNWSTTMGPLPPFAVAQGAQLLIRPVDKPINTTLICNVTNALGARQAELTVQVKEGPPSEHSGMSRNAIIFLVLGILVFLILLGIGIYFYWSKCSREVLWHCHLCPSSEHHQSCRN

SEQ ID NO: 11180 - protein, 417 aa, Homo sapiens
MARAMAAAWPLLLVALLVLSWPPPGTGDVVVQAPTQVPGFLGDSVTLPCYLQVPNMEVTHVSQLTWARHGESGSMAVFHQTQGPSYSESKRLEFVAARLGAELRNASLRMFGLRVEDEGNYTCLFVTFPQGSRSVDIWLRVLAKPQNTAEVQKVQLTGEPVPMARCVSTGGRPPAQITWHSDLGGMPNTSQVPGFLSGTVTVTSLWILVPSSQVDGKNVTCKVEHESFEKPQLLTVNLTVYYPPEVSISGYDNNWYLGQNEATLTCDARSNPEPTGYNWSTTMGPLPPFAVAQGAQLLIRPVDKPINTTLICNVTNALGARQAELTVQVKEGPPSEHSGMSRNAIIFLVLGILVFLILLGIGIYFYWSKCSREVLWHCHLCPSSTEHASASANGHVSYSAVSRENSSSQDPQTEGTR

SEQ ID NO: 11181 - protein, 70 aa, Homo sapiens
  VARIANT 1: note = misc_feature - Xaa can be any naturally occurring amino acid
XCKVEHESFEKPQLLTVNLTVYYPPEVSISGYDNNWYLGQNEATLTCDARSNPEPTGYNWSTYRACQRLS

SEQ ID NO: 11182 - protein, 224 aa, Homo sapiens
MAKRSRGPGRRCLLALVLFCAWGTLAVVAQKPGAGCPSRCLCFRTTVRCMHLLLEAVPAVAPQTSILDLRFNRIREIQPGAFRRLRNLNTLLLNNNQIKRIPSGAFEDLENLKYLYLHFNQIETLDPDSFQHLPKLERLFLHNNRITHLVPGTFNHLESMKRLRLDSNTLHCDCEILWLADLLKTYAESGNAQAAAICEYPRRIQGRSVATITPEELNCERPRI

SEQ ID NO: 11183 - protein, 1479 aa, Homo sapiens
MAKRSRGPGRRCLLALVLFCAWGTLAVVAQKPGAGCPSRCLCFRTTVRCMHLLLEAVPAVAPQTSILDLRFNRIREIQPGAFRRLRNLNTLLLNNNQIKRIPSGAFEDLENLKYLYLYKNEIQSIDRQAFKGLASLEQLYLHFNQIETLDPDSFQHLPKLERLFLHNNRITHLVPGTFNHLESMKRLRLDSNTLHCDCEILWLADLLKTYAESGNAQAAAICEYPRRIQGRSVATITPEELNCERPRITSEPQDADVTSGNTVYFTCRAEGNPKPEIIWLRNNNELSMKTDSRLNLLDDGTLMIQNTQETDQGIYQCMAKNVAGEVKTQEVTLRYFGSPARPTFVIQPQNTEVLVGESVTLECSATGHPPPRISWTRGDRTPLPVDPRVNITPSGGLYIQNVVQGDSGEYACSATNNIDSVHATAFIIVQALPQFTVTPQDRVVIEGQTVDFQCEAKGNPPPVIAWTKGGSQLSVDRRHLVLSSGTLRISGVALHDQGQYECQAVNIIGSQKVVAHLTVQPRVTPVFASIPSDTTVEVGANVQLPCSSQGEPEPAITWNKDGVQVTESGKFHISPEGFLTINDVGPADAGRYECVARNTIGSASVSMVLSVNVPDVSRNGDPFVATSIVEAIATVDRAINSTRTHLFDSRPRSPNDLLALFRYPRDPYTVEQARAGEIFERTLQLIQEHVQHGLMVDLNGTSYHYNDLVSPQYLNLIANLSGCTAHRRVNNCSDMCFHQKYRTHDGTCNNLQHPMWGASLTAFERLLKSVYENGFNTPRGINPHRLYNGHALPMPRLVSTTLIGTETVTPDEQFTHMLMQWGQFLDHDLDSTVVALSQARFSDGQHCSNVCSNDPPCFSVMIPPNDSRARSGARCMFFVRSSPVCGSGMTSLLMNSVYPREQINQLTSYIDASNVYGSTEHEARSIRDLASHRGLLRQGIVQRSGKPLLPFATGPPTECMRDENESPIPCFLAGDHRANEQLGLTSMHTLWFREHNRIATELLKLNPHWDGDTIYYETRKIVGAEIQHITYQHWLPKILGEVGMRTLGEYHGYDPGINAGIFNAFATAAFRFGHTLVNPLLYRLDENFQPIAQDHLPLHKAFFSPFRIVNEGGIDPLLRGLFGVAGKMRVPSQLLNTELTERLFSMAHTVALDLAAINIQRGRDHGIPPYHDYRVYCNLSAAHTFEDLKNEIKNPEIREKLKRLYGSTLNIDLFPALVVEDLVPGSRLGPTLMCLLSTQFKRLRDGDRLWYENPGVFSPAQLTQIKQTSLARILCDNADNITRVQSDVFRVAEFPHGYGSCDEIPRVDLRVWQDCCEDCRTRGQFNAFSYHFRGRRSLEFSYQEDKPTKKTRPRKIPSVGRQGEHLSNSTSAFSTRSDASGTNDFREFVLEMQKTITDLRTQIKKLESRLSTTECVDAGGESHANNTKWKKDACTICECKDGQVTCFVEACPPATCAVPVNIPGACCPVCLQKRAEEKP

SEQ ID NO: 11184 - protein, 197 aa, Homo sapiens
  VARIANT 1: note = misc_feature - Xaa can be any naturally occurring amino acid
XGSWFPSAPGLSTTVLLNNNQIKRIPSGAFEDLENLKYLYLYKNEIQSIDRQAFKGLASLEQLYLHFNQIETLDPDSFQHLPKLERLFLHNNRITHLVPGTFNHLESMKRLRLDSNTLHCDCEILWLADLLKTYAESGNAQAAAICEYPRRIQGRSVATITPEELNCERPRITSEPQDADVTSGNTVYFTCRAEGNP

SEQ ID NO: 11185 - protein, 723 aa, Homo sapiens
  VARIANT 1: note = misc_feature - Xaa can be any naturally occurring amino acid
XRGPGRRCLLALVLFCAWGTLAVVAQKPGAGCPSRCLCFRTTVRCMHLLLEAVPAVAPQTSILDLRFNRIREIQPGAFRRLRNLNTLLLNNNQIKRIPSGAFEDLENLKYLYLYKNEIQSIDRQAFKGLASLEQLYLHFNQIETLDPDSFQHLPKLERLFLHNNRITHLVPGTFNHLESMKRLRLDSNTLHCDCEILWLADLLKTYAESGNAQAAAICEYPRRIQGRSVATITPEELNCERPRITSEPQDADVTSGNTVYFTCRAEGNPKPEIIWLRNNNELSMKTDSRLNLLDDGTLMIQNTQETDQGIYQCMAKNVAGEVKTQEVTLRYFGSPARPTFVIQPQNTEVLVGESVTLECSATGHPPPRISWTRGDRTPLPVDPRVNITPSGGLYIQNVVQGDSGEYACSATNNIDSVHATAFIIVQALPQFTVTPQDRVVIEGQTVDFQCEAKGNPPPVIAWTKGGSQLSVDRRHLVLSSGTLRISGVALHDQGQYECQAVNIIGSQKVVAHLTVQPRVTPVFASIPSDTTVEVGANVQLPCSSQGEPEPAITWNKDGVQVTESGKFHISPEGFLTINDVGPADAGRYECVARNTIGSASVSMVLSVNVPDVSRNGDPFVATSIVEAIATVDRAINSTRTHLFDSRPRSPNDLLALFRYPRDPYTVEQARAGEIFERTLQLIQEHVQHGLMVDLNGTSQCQSLFFLLHGLSNGVEHASVKSHS

SEQ ID NO: 11186 - protein, 76 aa, Homo sapiens
  VARIANT 1: note = misc_feature - Xaa can be any naturally occurring amino acid
XVQSDVFRVAEFPHGYGSCDEIPRVDLRVWQDCCEDCRTRGQFNAFSYHFRGRRSLEFSYQEDKPTKKTRPRKIPR

SEQ ID NO: 11187 - protein, 1463 aa, Homo sapiens
MEPRLFCWTTLFLLAGWCLPGLPCPSRCLCFKSTVRCMHLMLDHIPQVPQQTTVLDLRFNRIREIPGSAFKKLKNLNTLLLNNNHIRKISRNAFEGLENLLYLYLYKNEIHALDKQTFKGLISLEHLYIHFNQLEMLQPETFGDLLRLERLFLHNNKLSKIPAGSFSNLDSLKRLRLDSNALVCDCDLMWLGELLQGFAQHGHTQAAATCEYPRRLHGRAVASVTVEEFNCQSPRITFEPQDVEVPSGNTVYFTCRAEGNPKPEIIWIHNNHSLDLEDDTRLNVFDDGTLMIRNTRESDQGVYQCMARNSAGEAKTQSAMLRYSSLPAKPSFVIQPQDTEVLIGTSTTLECMATGHPHPLITWTRDNGLELDGSRHVATSSGLYLQNITQRDHGRFTCHANNSHGTVQAAANIIVQAPPQFTVTPKDQVVLEEHAVEWLCEADGNPPPVIVWTKTGGQLPVEGQHTVLSSGTLRIDRAAQHDQGQYECQAVSSLGVKKVSVQLTVKPKALAVFTQLPQDTSVEVGKNINISCHAQGEPQPIITWNKEGVQITESGKFHVDDEGTLTIYDAGFPDQGRYECVARNSFGLAVTNMFLTVTAIQGRQAGDDFVESSILDAVQRVDSAINSTRRHLFSQKPHTSSDLLAQFHYPRDPLIVEMARAGEIFEHTLQLIRERVKQGLTVDLEGKEFRYNDLVSPRSLSLIANLSGCTARRPLPNCSNRCFHAKYRAHDGTCNNLQQPTWGAALTAFARLLQPAYRDGIRAPRGLGLPVGSRQPLPPPRLVATVWARAAAVTPDHSYTRMLMHWGWFLEHDLDHTVPALSTARFSDGRPCSSVCTNDPPCFPMNTRHADPRGTHAPCMLFARSSPACASGRPSATVDSVYAREQINQQTAYIDGSNVYGSSERESQALRDPSVPRGLLKTGFPWPPSGKPLLPFSTGPPTECARQEQESPCFLAGDHRANEHLALAAMHTLWFREHNRMATELSALNPHWEGNTVYQEARKIVGAELQHITYSHWLPKVLGDPGTRMLRGYRGYNPNVNAGIINSFATAAFRFGHTLINPILYRLNATLGEISEGHLPFHKALFSPSRIIKEGGIDPVLRGLFGVAAKWRAPSYLLSPELTQRLFSAAYSAAVDSAATIIQRGRDHGIPPYVDFRVFCNLTSVKNFEDLQNEIKDSEIRQKLRKLYGSPGDIDLWPALMVEDLIPGTRVGPTLMCLFVTQFQRLRDGDRFWYENPGVFTPAQLTQLKQASLSRVLCDNGDSIQQVQADVFVKAEYPQDYLNCSEIPKVDLRVWQDCCADCRSRGQFRAVTQESQKKRSAQYSYPVDKDMELSHLRSRQQDKIYVGEDARNVTVLAKTKFSQDFSTFAAEIQETITALREQINKLEARLRQAGCTDVRGVPRKAEERWMKEDCTHCICESGQVTCVVEICPPAPCPSPELVKGTCCPVCRDRGMPSDSPEKR

SEQ ID NO: 11188 - protein, 582 aa, Homo sapiens
NNLQQPTWGAALTAFARLLQPAYRDGIRAPRGLGLPVGSRQPLPPPRLVATVWARAAAVTPDHSYTRMLMHWGWFLEHDLDHTVPALSTARFSDGRPCSSVCTNDPPCFPMNTRHADPRGTHAPCMLFARSSPACASGRPSATVDSVYAREQINQQTAYIDGSNVYGSSERESQALRDPSVPRGLLKTGFPWPPSGKPLLPFSTGPPTECARQEQESPCFLAGDHRANEHLALAAMHTLWFREHNRMATELSALNPHWEGNTVYQEARKIVGAELQHITYSHWLPKVLGDPGTRMLRGYRGYNPNVNAGIINSFATAAFRFGHTLINPILYRLNATLGEISEGHLPFHKALFSPSRIIKEGGIDPVLRGLFGVAAKWRAPSYLLSPELTQRLFSAAYSAAVDSAATIIQRGRDHGIPPYVDFRVFCNLTSVKNFEDLQNEIKDSEIRQKLRKLYGSPGDIDLWPALMVEDLIPGTRVGPTLMCLFVTQFQRLRDGDRFWYENPGVFTPAQLTQLKQASLSRVLCDNGDSIQQVQADVFVKAEYPQDYLNCSEIPKVDLRVWQDCCADKQAGGTPEAGRVYRC

SEQ ID NO: 11189 - protein, 537 aa, Homo sapiens
  VARIANT 1: note = misc_feature - Xaa can be any naturally occurring amino acid
XAREQINQQTAYIDGSNVYGSSERESQALRDPSVPRGLLKTGFPWPPSGKPLLPFSTGPPTECARQEQESPCFLAGDHRANEHLALAAMHTLWFREHNRMATELSALNPHWEGNTVYQEARKIVGAELQHITYSHWLPKVLGDPGTRMLRGYRGYNPNVNAGIINSFATAAFRFGHTLINPILYRLNATLGEISEGHLPFHKALFSPSRIIKEGGIDPVLRGLFGVAAKWRAPSYLLSPELTQRLFSAAYSAAVDSAATIIQRGRDHGIPPYVDFRVFCNLTSVKNFEDLQNEIKDSEIRQKLRKFWYENPGVFTPAQLTQLKQASLSRVLCDNGDSIQQVQADVFVKAEYPQDYLNCSEIPKVDLRVWQDCCADCRSRGQFRAVTQESQKKRSAQYSYPVDKDMELSHLRSRQQDKIYVGEDARNVTVLAKTKFSQDFSTFAAEIQETITALREQINKLEARLRQAGCTDVRGVPRKAEERWMKEDCTHCICESGQVTCVVEICPPAPCPSPELVKGTCCPVCRDRGMPSDSPEKR

SEQ ID NO: 11190 - protein, 463 aa, Homo sapiens
MDVLTALLLVHLIPVSTPKNGMSSKSRKRIMPDPVTEPPVTDPVYEALLYCNIPSVAERSMEGHAPHHFKLVSVHVFIRHGDRYPLYVIPKTKRPEIDCTLVANRKPYHPKLEAFISHMSKGSGASFESPLNSLPLYPNHPLCEMGELTQTGVVQHLQNGQLLRDIYLKKHKLLPNDWSADQLYLETTGKSRTLQSGLALLYGFLPDFDWKKIYFRHQPSALFCSGSCYCPVRNQYLEKEQRRQYLLRLKNSQLEKTYGEMAKIVDVPTKQLRAANPIDSMLCHFCHNVSFPCTRNGCVDMEHFKVIKTHQIEDERERREKKLYFGYSLLGAHPILNQTIGRMQRATEGRKEELFALYSAHDVTLSPVLSALGLSEARFPRFAARLIFELWQDREKPSEHSVRILYNGVDVTFHTSFCQDHHKRSPKPMCPLENLVRFVKRDMFVALGGSGTNYYDACHREGF

SEQ ID NO: 11191 - protein, 26 aa, Homo sapiens
MLFRNRFLLLLALAALLAFVSLSLQF

SEQ ID NO: 11192 - protein, 26 aa, Homo sapiens
MLFRNRFLLLLALAALLAFVSLSLQF

SEQ ID NO: 11193 - protein, 95 aa, Homo sapiens
MLFRNRFLLLLALAALLAFVSLSLQFFHLIPVSTPKNGMSSKSRKRIMPDPVTEPPVTDPVYEALLYCNIPSVAERSMEGHAPHHFKLVSVHVFI

SEQ ID NO: 11194 - protein, 145 aa, Homo sapiens
MLFRNRFLLLLALAALLAFVSLSLQFFHLIPVSTPKNGMSSKSRKRIMPDPVTEPPVTDPVYEALLYCNIPSVAERSMEGHAPHHFKLVSVHVFIRHGDRYPLYVIPKTKRPEIDCTLVANRKPYHPKLEAFISHMSKGSGASFE

SEQ ID NO: 11195 - protein, 480 aa, Homo sapiens
MLFRNRFLLLLALAALLAFVSLSLQFFHLIPVSTPKNGMSSKSRKRIMPDPVTEPPVTDPVYEALLYCNIPSVAERSMEGHAPHHFKLVSVHVFIRHGDRYPLYVIPKTKRPEIDCTLVANRKPYHPKLEAFISHMSKGSGASFESPLNSLPLYPNHPLCEMGELTQTGVVQHLQNGQLLRDIYLKKHKLLPNDWSADQLYLETTGKSRTLQSGLALLYGFLPDFDWKKIYFRHQPSALFCSGSCYCPVRNQYLEKEQRRQYLLRLKNSQLEKTYGEMAKIVDVPTKQLRAANPIDSMLCHFCHNVSFPCTRNGCVDMEHFKVIKTHQIEDERERREKKLYFGYSLLGAHPILNQTIGRMQRATEGRKEELFALYSAHDVTLSPVLSALGLSEARFPRFAARLIFELWQDREKPSEHSVRILYNGVDVTFHTSFCQDHHKRSPKPMCPLENLVRFVKRDMFVALGGSGTNYYDACHREGF

SEQ ID NO: 11196 - protein, 480 aa, Homo sapiens; identical to SEQ ID NO: 11195

SEQ ID NO: 11197 - protein, 179 aa, Homo sapiens
MLFRNRFLLLLALAALLAFVSLSLQFFHLIPVSTPKNGMSSKSRKRIMPDPVTEPPVTDPVYEALLYCNIPSVAERSMEGHAPHHFKLVSVHVFIRHGDRYPLYVIPKTKRPEIDCTLVANRKPYHPKLEAFISHMSKGSGASFESPLNSLPLYPNHPLCEMGELTQTVGLAVHLRGSC

SEQ ID NO: 11198 - protein, 182 aa, Homo sapiens
MLFRNRFLLLLALAALLAFVSLSLQFFHLIPVSTPKNGMSSKSRKRIMPDPVTEPPVTDPVYEALLYCNIPSVAERSMEGHAPHHFKLVSVHVFIRHGDRYPLYVIPKTKRPEIDCTLVANRKPYHPKLEAFISHMSKGSGASFESPLNSLPLYPNHPLCEMGELTQTVRRWLSASQEERPH

SEQ ID NO: 11199 - protein, 182 aa, Homo sapiens; identical to SEQ ID NO: 11198

SEQ ID NO: 11200 - protein, 471 aa, Homo sapiens
MRYFIKSMEHSVCPSSAVHLIPVSTPKNGMSSKSRKRIMPDPVTEPPVTDPVYEALLYCNIPSVAERSMEGHAPHHFKLVSVHVFIRHGDRYPLYVIPKTKRPEIDCTLVANRKPYHPKLEAFISHMSKGSGASFESPLNSLPLYPNHPLCEMGELTQTGVVQHLQNGQLLRDIYLKKHKLLPNDWSADQLYLETTGKSRTLQSGLALLYGFLPDFDWKKIYFRHQPSALFCSGSCYCPVRNQYLEKEQRRQYLLRLKNSQLEKTYGEMAKIVDVPTKQLRAANPIDSMLCHFCHNVSFPCTRNGCVDMEHFKVIKTHQIEDERERREKKLYFGYSLLGAHPILNQTIGRMQRATEGRKEELFALYSAHDVTLSPVLSALGLSEARFPRFAARLIFELWQDREKPSEHSVRILYNGVDVTFHTSFCQDHHKRSPKPMCPLENLVRFVKRDMFVALGGSGTNYYDACHREGF

SEQ ID NO: 11201 - protein, 131 aa, Homo sapiens
MSSKSRKRIMPDPVTEPPVTDPVYEALLYCNIPSVAERSMEGHAPHHFKLVSVHVFIRHGDRYPLYVIPKTKRPEIDCTLVANRKPYHPKLEAFISHMSKGSGASFESPLNSLPLYPNHPLCEMGELTQTG

SEQ ID NO: 11202 - protein, 442 aa, Homo sapiens
MSSKSRKRIMPDPVTEPPVTDPVYEALLYCNIPSVAERSMEGHAPHHFKLVSVHVFIRHGDRYPLYVIPKTKRPEIDCTLVANRKPYHPKLEAFISHMSKGSGASFESPLNSLPLYPNHPLCEMGELTQTGVVQHLQNGQLLRDIYLKKHKLLPNDWSADQLYLETTGKSRTLQSGLALLYGFLPDFDWKKIYFRHQPSALFCSGSCYCPVRNQYLEKEQRRQYLLRLKNSQLEKTYGEMAKIVDVPTKQLRAANPIDSMLCHFCHNVSFPCTRNGCVDMEHFKVIKTHQIEDERERREKKLYFGYSLLGAHPILNQTIGRMQRATEGRKEELFALYSAHDVTLSPVLSALGLSEARFPRFAARLIFELWQDREKPSEHSVRILYNGVDVTFHTSFCQDHHKRSPKPMCPLENLVRFVKRDMFVALGGSGTNYYDACHREGF

SEQ ID NO: 11203 - protein, 90 aa, Homo sapiens
MVFVRRPWPALTTVLLALLVCLGALVDAYPIKPEAPREDASPEELNRYYASLRHYLNLVTRQRYGKRDGPDTLLSKTFFPDGEDRPVRSR

SEQ ID NO: 11204 - protein, 97 aa, Homo sapiens
MVFVRRPWPALTTVLLALLVCLGALVDAYPIKPEAPREDASPEELNRYYASLRHYLNLVTRQRYGKRDGPDTLLSKTFFPDGEDRPVRSRSEGPDLW

SEQ ID NO: 11205 - protein, 144 aa, Homo sapiens
MRKDRLLHLCLVLLLILLSASDSNSTEPQYMVLVPSLLHTEAPKKGCVLLSHLNETVTVSASLESGRENRSLFTDLVAEKDLFHCVSFTLPRISASSEVAFLSIQIKGPTQDFRKRNTVLVLNTQSLVFVQTDKPMYKPGQTGK

SEQ ID NO: 11206 - protein, 1482 aa, Homo sapiens
MRKDRLLHLCLVLLLILLSASDSNSTEPQYMVLVPSLLHTEAPKKGCVLLSHLNETVTVSASLESGRENRSLFTDLVAEKDLFHCVSFTLPRISASSEVAFLSIQIKGPTQDFRKRNTVLVLNTQSLVFVQTDKPMYKPGQTVRFRVVSVDENFRPRNELIPLIYLENPRRNRIAQWQSLKLEAGINQLSFPLSSEPIQGSYRVVVQTESGGRIQHPFTVEEFVLPKFEVKVQVPKIISIMDEKVNITVCGEYTYGKPVPGLATVSLCRKLSRVLNCDKQEVCEEFSQQLNSNGCITQQVHTKMLQITNTGFEMKLRVEARIREEGTDLEVTANRISEITNIVSKLKFVKVDSHFRQGIPFFAQVLLVDGKGVPIPNKLFFISVNDANYYSNATTNEQGLAQFSINTTSISVNKLFVRVFTVHPNLCFHYSWVAEDHQGAQHTANRVFSLSGSYIHLEPVAGTLPCGHTETITAHYTLNRQAMGELSELSFHYLIMAKGVIVRSGTHTLPVESGDMKGSFALSFPVESDVAPIARMFIFAILPDGEVVGDSEKFEIENCLANKVDLSFSPAQSPPASHAHLQVAAAPQSLCALRAVDQSVLLMKPEAELSVSSVYNLLTVKDLTNFPDNVDQQEEEQGHCPRPFFIHNGAIYVPLSSNEADIYSFLKGMGLKVFTNSKIRKPKSCSVIPSVSAGAVGQGYYGAGLGVVERPYVPQLGTYNVIPLNNEQSSGPVPETVRSYFPETWIWELVAVNSSGVAEVGVTVPDTITEWKAGAFCLSEDAGLGISSTASLRAFQPFFVELTMPYSVIRGEVFTLKATVLNYLPKCIRVSVQLKASPAFLASQNTKGEESYCICGNERQTLSWTVTPKTLGNVNFSVSAEAMQSLELCGNEVVEVPEIKRKDTVIKTLLVEAEGIEQEKTFSSMTCASGANVSEQLSLKLPSNVVKESARASFSVLGDILGSAMQNIQNLLQMPYGCGEQNMVLFAPNIYVLNYLNETQQLTQEIKAKAVGYLITGYQRQLNYKHQDGSYSTFGERYGRNQGNTWLTAFVLKTFAQARSYIFIDEAHITQSLTWLSQMQKDNGCFRSSGSLLNNAIKGGVEDEATLSAYVTIALLEIPLPVTNPIVRNALFCLESAWNVAKEGTHGSHVYTKALLAYAFSLLGKQNQNREILNSLDKEAVKEDNLVHWERPQRPKAPVGHLYQTQAPSAEVEMTSYVLLAYLTAQPAPTSGDLTSATNIVKWIMKQQNAQGGFSSTQDTVVALHALSRYGAATFTRTEKTAQVTVQDSQTFSTNFQVDNNNLLLLQQISLPELPGEYVITVTGERCVYLQTSMKYNILPEKEDSPFALKVQTVPQTCDGHKAHTSFQISLTISYTGNRPASNMVIVDVKMVSGFIPLKPTVKMLERSSSVSRTEVSNNHVLIYVEQVTNQTLSFSFMVLQDIPVGDLKPAIVKVYDYYETDESVVAEYIAPCSTDTEHGNV

SEQ ID NO: 11207 - protein, 284 aa, Homo sapiens
MAGGRHRRVVGTLHLLLLVAALPWASRGVSPSASAWPEEKHIMQRIQRLQADWVLEIDTFLSQTPYGYRSFSNIISTLNPTAKRHLVLACHYDSKYFSHWNNRVFVGATDSAVPCAMMLELARALDKKLLSLKTVSDSKPDLSLQLIFFDGEEAFLHWSPQDSLYGSRHLAAKMASTPHPPGARGTSQLHGMDLLVLLDLIGAPNPTFPNFFPNSARWFERLQAIEHELHELGLLKDHSLEGRYFQNYSYGGVIQDDHIPFLRRGVPVLHLIPSPFPEVWHTMD

SEQ ID NO: 11208 - protein, 361 aa, Homo sapiens
MAGGRHRRVVGTLHLLLLVAALPWASRGVSPSASAWPEEKNYHQPAILNSSALRQIAEGTSISEMWQNDLQPLLIERYPGSPGSYAARQHIMQRIQRLQADWVLEIDTFLSQTPYGYRSFSNIISTLNPTAKRHLVLACHYDSKYFSHWNNRVFVGATDSAVPCAMMLELARALDKKLLSLKTVSDSKPDLSLQLIFFDGEEAFLHWSPQDSLYGSRHLAAKMASTPHPPGARGTSQLHGMDLLVLLDLIGAPNPTFPNFFPNSARWFERLQAIEHELHELGLLKDHSLEGRYFQNYSYGGVIQDDHIPFLRRGVPVLHLIPSPFPEVWHTMDDNEENLDESTIDNLNKILQVFVLEYLHL

SEQ ID NO: 11209 - protein, 118 aa, Homo sapiens [sequence omitted]

SEQ ID NO: 11210 - protein, 149 aa, Homo sapiens
MDAEGLALLLPPVTLAALVDSWLREDCPGLNYAALAVRAARQAADFTLKVEVECSSLQEAVQAAEAGADLVLLDNFKPEELHPTATVLKAQFPSVAVEASGGITLDNLPQFCGPHIDVISMGMLTQAAPALDFSLKLFAKEVAPVPKIH

SEQ ID NO: 11211 - protein, 297 aa, Homo sapiens
MDAEGLALLLPPVTLAALVDSWLREDCPGLNYAALVSGAGPSQAALWAKSPGVLAGQPFFDAIFTQLNCQVSWFLPEGSKLVPVARVAEVRGPAHCLLLGERVALNTLARCSGIASAAAAAVEAARGAGWTGHVAGTRKTTPGFRLVEKYGLLVGGAASHRYDLGGLVMVKDNHVVAAGGVEKAVRAARQAADFTLKVEVECSSLQEAVQAAEAGADLVLLDNFKPEELHPTATVLKAQFPSVAVEASGGITLDNLPQFCGPHIDVISMGMLTQAAPALDFSLKLFAKEVAPVPKIH

SEQ ID NO: 11212 - protein, 136 aa, Homo sapiens
MVRPYPLIYFLFLPLGACFPLLDRREPTDAMGGLGAGERWADLAMGPRPHSVWGSSRWLRASQPQALLVIARGLQTSGREHAGCRFRFGRQDEGSEATGFLPAAGEKTSGPLGNLAEELNGYSRKKGGFSFRFGRR

SEQ ID NO: 11213 - protein, 136 aa, Homo sapiens; identical to SEQ ID NO: 11212

SEQ ID NO: 11214 - protein, 155 aa, Homo sapiens
MRRCNSGSGPPPSLLLLLLWLLAVPGANAAPRSALYSPSDPLTLLQADTVRGAVLGSRSAWAVEFFASWCGHCIAFAPTWKALAEDVKAWRPALYLAALDCAEETNSAVCRDFNIPGFPTVRFFKAFTKNGSGAVFPGWRRLMDSLREITKSTWL

SEQ ID NO: 11215 - protein, 747 aa, Homo sapiens
MRRCNSGSGPPPSLLLLLLWLLAVPGANAAPRSALYSPSDPLTLLQADTVRGAVLGSRSAWAVEFFASWCGHCIAFAPTWKALAEDVKAWRPALYLAALDCAEETNSAVCRDFNIPGFPTVRFFKAFTKNGSGAVFPVAGADVQTLRERLIDALESHHDTWPPACPPLEPAKLEEIDGFFARNNEEYLALIFEKGGSYLGREVALDLSQHKGVAVRRVLNTEANVVRKFGVTDFPSCYLLFRNGSVSRVPVLMESRSFYTAYLQRLSGLTREAAQTTVAPTTANKIAPTVWKLADRSKIYMADLESALHYILRIEVGRFPVLEGQRLVALKKFVAVLAKYFPGRPLVQNFLHSVNEWLKRQKRNKIPYSFFKTALDDRKEGAVLAKKVNWIGCQGSEPHFRGFPCSLWVLFHFLTVQAARQNVDHSQEAAKAKEVLPAIRGYVHYFFGCRDCASHFEQMAAASMHRVGSPNAAVLWLWSSHNRVNARLAGAPSEDPQFPKVQWPPRELCSACHNERLDVPVWDVEATLNFLKAHFSPSNIILDFPAAGSAARRDVQNVAAAPELAMGALELESRNSTLDPGKPEMMKSPTNTTPHVPAEGPEASRPPKLHPGLRAAPGQEPPEHMAELQRNEQEQPLGQWHLSKRDTGAALLAESRAEKNRLWGPLEVRRVGRSSKQLVDIPEGQLEARAGRGRGQWLQVLGGGFSYLDISLCVGLYSLSFMGLLAMYTYFQAKIRALKGHAGHPAA

SEQ ID NO: 11216 - protein, 604 aa, Homo sapiens
MRRCNSGSGPPPSLLLLLLWLLAVPGANAAPRSALYSPSDPLTLLQADTVRGAVLGSRSAWAVEFFASWCGHCIAFAPTWKALAEDVKAWRPALYLAALDCAEETNSAVCRDFNIPGFPTVRFFKAFTKNGSGAVFPVAGADVQTLRERLIDALESHHDTWPPACPPLEPAKLEEIDGFFARNNEEYLALIFEKGGSYLGREVALDLSQHKGVAVRRVLNTEANVVRKFGVTDFPSCYLLFRNGSVSRVPVLMESRSFYTAYLQRLSGLTREAAQTTVAPTTANKIAPTVWKLADRSKIYMADLESALHYILRIEVGRFPVLEGQRLVALKKFVAVLAKYFPGRPLVQNFLHSVNEWLKRQKRNKIPYSFFKTALDDRKEGAVLAKKVNWIGCQGSEPHFRGFPCSLWVLFHFLTVQAARQNVDHSQEAAKAKEVLPAIRGYVHYFFGCRDCASHFEQMAAASMHRVGSPNAAVLWLWSSHNRVNARLAGAPSEDPQFPKVQWPPRELCSACHNERLDVPVWDVEATLNFLKAHFSPSNIILDFPAAGSAARRDVQNVAAAPELAMGALELESRNSTLDPGKPEMMKSPTNTTPHVPAEGPELI

SEQ ID NO: 11217 - protein, 72 aa, Homo sapiens
  VARIANT 1: note = misc_feature - Xaa can be any naturally occurring amino acid
XNEQEQPLGQWHLSKRDTGAALLAESRAEKNRLWGPLEVRRVGRSSKQLVDIPEGQLEARAGRGRGQWLQLI

SEQ ID NO: 11218 - protein, 253 aa, Homo sapiens
MPLLPSTVGLAGLLFWAGQAVNALIMPNATPAPAQPESTAMRLLSGLEVPRYRRKRHISVRDMNALLDYHNHIRASVYPPAANMEYMVWDKRLARAAEAWATQCIWAHGPSQLMRYVGQNLSIHSGQYRSVVDLMKSWSEEKWHYLFPAPRDCNPHCPWRCDGPTCSHYTQMVWASSNRLGCAIHTCSSISVWGNTWHRAAYLVCNYAIKGNWIGESPYKMGKPCSSCPPSYQGSCNSNMCFKGLKSNKFTWF

SEQ ID NO: 11219 - protein, 190 aa, Homo sapiens
MLVGDSGVGKTCLLVRFKDGAFLAGTFISTVGIDFRNKVLDVDGVKVKLQMWDTAGQERFRSVTHAYYRDAHALLLLYDVTNKASFDNIQAWLTEIHEYAQHDVALMLLGNKVDSAHERVVKREDGEKLAKEYGLPFMETSAKTGLNVDLAFTAIAKELKQRSMKAPSEPRFRLHDYVKREGRGASCCRP

SEQ ID NO: 11220 - protein, 64 aa, Homo sapiens
MLVGDSGVGKTCLLVRFKDGAFLAGTFISTVGIDFRQGLTLSPWLECSGDHGGLQPPTSGFKPS

SEQ ID NO: 11221 - protein, 256 aa, Homo sapiens
MSRKKTPKSKGASTPAASTLPTANGARPARSGTALSGPDAPPNGPLQPGRPSLGGGVDFYDVAFKVMLVGDSGVGKTCLLVRFKDGAFLAGTFISTVGIDFRNKVLDVDGVKVKLQMWDTAGQERFRSVTHAYYRDAHALLLLYDVTNKASFDNIQAWLTEIHEYAQHDVALMLLGNKVDSAHERVVKREDGEKLAKEYGLPFMETSAKTGLNVDLAFTAIAKELKQRSMKAPSEPRFRLHDYVKREGRGASCCRP

SEQ ID NO: 11222 - protein, 136 aa, Homo sapiens
  VARIANT 1: note = misc_feature - Xaa can be any naturally occurring amino acid
XKEYGLPFMETSAKTGLNVDLAFTAIANNSPNKQASESPWPHTGRHGKAVFCTGRGAASGQTLPRCSAAPSWARPGEGGLGLAPRTVPNPRKAMSSAAHAQAAKGGRLPTPGTEGFTANHIVHLCVLGAACSRPTL

SEQ ID NO: 11223 - protein, 311 aa, Homo sapiens
MVIAGASWMLGRAAASPTQTPPTTSTIRVARRSRVALVAMVIAAAGSGGPGRAEPQLSQPSLDCGRMRSSLTPLGPPVSRDRVIASFPKWYTPEACLQLREHFHGQVSAACQRRNTGTVGFCKNVFDRDYKATIGVDFEIERFEIAGIPYSLQIWDTAGQEKFKCIASAYYRGAQVIITAFDLTDVQTLEHTRQWLEDALRENEAGSCFIFLVGTKKDLLSGAACEQAEADAVHLAREMQAEYWSVSAKTGENVKAFFSRVAALAFEQSVLQDLERQSSARLQVGNGDLIQMEGSPPETQESKRPSSLGCC

SEQ ID NO: 11224 - protein, 333 aa, Homo sapiens
MVIAGASWMLGRAAASPTQTPPTTSTIRVARRSRVALVAMVIAAAGSGGPGRAEPQLSQPSLDCGRMRSSLTPLGPPVSRDRVIASFPKWYTPEACLQLREHFHGQVSAACQRRNTGTVGLKLSKVVVVGDLYVGKTSLIHRFCKNVFDRDYKATIGVDFEIERFEIAGIPYSLQIWDTAGQEKFKCIASAYYRGAQVIITAFDLTDVQTLEHTRQWLEDALRENEAGSCFIFLVGTKKDLLSGAACEQAEADAVHLAREMQAEYWSVSAKTGENVKAFFSRVAALAFEQSVLQDLERQSSARLQVGNGDLIQMEGSPPETQESKRPSSLGCC

SEQ ID NO: 11225 - protein, 132 aa, Homo sapiens
  VARIANT 1: note = misc_feature - Xaa can be any naturally occurring amino acid
XVSAACQRRNTGTVGLKLSKVVVVGDLYVGKTSLIHRFCKNVFDRDYKATIGVDFEIERFEIAGIPYSLQIWDTAGQEKFKCIASAYYRGAQGEQHATSGLNCMQQRGPCRAPQWESRVLCTGTSFLSSKTH

SEQ ID NO: 11226 - protein, 201 aa, Homo sapiens
MSGKSLLLKVILLGDGGVGKSSLMNRYVTNKFDSQAFHTIGVEFLNRDLEVDGRFVTLQIWDTAGQERFKSLRTPFYRGADCCLLTFSVDDRQSFENLGNWQKEFIYYADVKDPEHFPFVVLGNKVDKEDRQVTTEEAQTWCMENGDYPYLETSAKDDTNVTVAFEEAVRQVLAVEEQLEHCMLGHTIDLNSGSKAGSSCC

SEQ ID NO: 11227 - protein, 80 aa, Homo sapiens
MRRISLTSSPVRLLLFLLLLLIALEIMVGGHSLCFNFTIKSLSRPGQPWCEAQVFLNKNLFLQYNSDNNMVKPLGLLGKK

SEQ ID NO: 11228 - protein, 117 aa, Homo sapiens
MRRISLTSSPVRLLLFLLLLLIALEIMVGGHSLCFNFTIKSLSRPGQPWCEAQVFLNKNLFLQYNSDNNMVKPLGLLGKKILPLCKSRCFVNVKQNGALVHPGSSPPMERNPSSLTQ

SEQ ID NO: 11229 - protein, 209 aa, Homo sapiens
MRRISLTSSPVRLLLFLLLLLIALEIMVGGHSLCFNFTIKSLSRPGQPWCEAQVFLNKNLFLQYNSDNNMVKPLGLLGKKVYATSTWGELTQTLGEVGRDLRMLLCDIKPQIKTSDPSTLQVEMFCQREAERCTGASWQFATNGEKSLLFDAMNMTWTVINHEASKIKETWKKDRGLEKYFRKLSKGDCDHWLREFLGHWEAMPEPTGN

SEQ ID NO: 11230 - protein, 212 aa, Homo sapiens
MRRISLTSSPVRLLLFLLLLLIALEIMVGGHSLCFNFTIKSLSRPGQPWCEAQVFLNKNLFLQYNSDNNMVKPLGLLGKKVYATSTWGELTQTLGEVGRDLRMLLCDIKPQIKTSDPSTLQVEMFCQREAERCTGASWQFATNGEKSLLFDAMNMTWTVINHEASKIKETWKKDRGLEKYFRKLSKGDCDHWLREFLGHWEAMPEPTGRRST

SEQ ID NO: 11231 - protein, 263 aa, Homo sapiens
MRRISLTSSPVRLLLFLLLLLIALEIMVGGHSLCFNFTIKSLSRPGQPWCEAQVFLNKNLFLQYNSDNNMVKPLGLLGKKVYATSTWGELTQTLGEVGRDLRMLLCDIKPQIKTSDPSTLQVEMFCQREAERCTGASWQFATNGEKSLLFDAMNMTWTVINHEASKIKETWKKDRGLEKYFRKLSKGDCDHWLREFLGHWEAMPEPTVSPVNASDIHWSSSSLPDRWIILGAFILLVLMGIVLICVWWQNGEWQAGLWPLRTS

SEQ ID NO: 11232 - protein, 227 aa, Homo sapiens
MRRISLTSSPVRLLLFLLLLLIALEIMYNSDNNMVKPLGLLGKKVYATSTWGELTQTLGEVGRDLRMLLCDIKPQIKTSDPSTLQVEMFCQREAERCTGASWQFATNGEKSLLFDAMNMTWTVINHEASKIKETWKKDRGLEKYFRKLSKGDCDHWLREFLGHWEAMPEPTVSPVNASDIHWSSSSLPDRWIILGAFILLVLMGIVLICVWWQNGEWQAGLWPLRTS

SEQ ID NO: 11233 - protein, 334 aa, Homo sapiens
MAAAASPAFLLRLPLLLLLSSWCRTGLADPHSLCYDITVIPKFRPGPRWCAVQGQVDEKTFLHYDCGSKTVTPVSPLGKKLNVTTAWKAQNPVLREVVDILTEQLLDIQLENYIPKEPLTLQARMSCEQKAEGHGSGSWQLSFDGQIFLLFDSENRMWTTVHPGARKMKEKWENDKDMTMSFHYISMGDCTGWLEDFLMGMDSTLEPSAGAPPTMSSGTAQPRATATTLILCCLLIMCLLICSRHSLTQSHGHHPQSLQPPPHPPLLHPTWLLRRVLWSDSYQIAKRPLSGGHVTRVTLPIIGDDSHSLPCPLALYTINNGAARYSEPLQVSIS

SEQ ID NO: 11234 - protein, 221 aa, Homo sapiens
MAAAASPAFLLRLPLLLLLSSWCRTGLADPHSLCYDITVIPKFRPGPRWCAVQGQVDEKTFLHYDCGSKTVTPVSPLGKKLNVTTAWKAQNPVLREVVDILTEQLLDIQLENYIPKEPLTLQARMSCEQKAEGHGSGSWQLSFDGQIFLLFDSENRMWTTVHPGARKMKEKWENDKDMTMSFHYISMGDCTGWLEDFLMGMDSTLEPSAGGNRRKRNGDLQ

SEQ ID NO: 11235 - protein, 213 aa, Homo sapiens
MAAAASPAFLLRLPLLLLLSSWCRTGLADPHSLCYDITVIPKFRPGPRWCAVQGQVDEKTFLHYDCGSKTVTPVSPLGKKLNVTTAWKAQNPVLREVVDILTEQLLDIQLENYIPKEPLTLQARMSCEQKAEGHGSGSWQLSFDGQIFLLFDSENRMWTTVHPGARKMKEKWENDKDMTMSFHYISMGDCTGWLEDFLMGMDSTLEPSAGGTV

SEQ ID NO: 11236 - protein, 180 aa, Homo sapiens
MASLRVERAGGPRLPRTRVGRPAALRLLLLLGAVLNPHEALAQPLPTTGTPGSEASVPTGGTVKNYETAVQFCWNHYKDQMDPIEKDWCDWAMISRPYSTLRDCLEHFAELFDLGFPNPLAERIIFETHQIHFANCSLVQPTFSDPPEDVLLAMIIAPICLIPFLITLVVWRSKDSEAQA

SEQ ID NO: 11237 - protein, 175 aa, Homo sapiens
MASLRVERAGGPRLPRTRVGRPAALRLLLLLGAVLNPHEALAQPLPTTGTPGSEGGTVKNYETAVQFCWNHYKDQMDPIEKDWCDWAMISRPYSTLRDCLEHFAELFDLGFPNPLAERIIFETHQIHFANCSLVQPTFSDPPEDVLLAMIIAPICLIPFLITLVVWRSKDSEAQA

SEQ ID NO: 11238 - protein, 112 aa, Homo sapiens
MASLRVERAGGPRLPRTRVGRPAALRLLLLLGAVLNPHEALAQPLPTTGTPGSEGLIAPCEIAWSTLQSCLTWASPIPWQRGSSLRLTRSTLPTAPWCSPPSLTPQRMYSWP

SEQ ID NO: 11239 - protein, 49 aa, Homo sapiens
MDPIEKDWCDWAMISRPYSTLRDCLEHFAELFDLGFPNPLAERIIFETH

SEQ ID NO: 11240 - protein, 100 aa, Homo sapiens
MDPIEKDWCDWAMISRPYSTLRDCLEHFAELFDLGFPNPLAERIIFETHQIHFANCSLVQPTFSDPPEDVLLAMIIAPICLIPFLITLVVWRSKDSEAQA

SEQ ID NO: 11241 - protein, 730 aa, Homo sapiens
MAIGVWQLLLDMGIMLSVDQHLYFQDTYVFYQFSSDECSYLYCEFEREEEWQNGVKLLLQLVPLIPARGGICELSHQKIEDSEESSDEILVRLTSAVQRELAAVIALKARKSAIEQDEENNDKHVAVTEAESVPDSQAGVMCKLQERDEIGRIELVQKLAKENYQFLQTDKKEQEKSEHQDDEVTTVQVKEQDQSVLVLKKVQCCGPAPTAGSAESHWRYVVVSGTPEKILEHLLNDLHLEEVQDKETETLLDDFLLTYTVFMTTDDLCQALLRHYSAKKYQGKEENSDVPRRKRKVLHLVSQWIALYKDWLPEDEHSKMFLKTIYRNVLDDVYEYPILEKELKEFQKILGMHRRHTVDEYSPQKKNKALFHQFSLKENWLQHRGTVTETEEIFCHVYITEHSYVSVKAKVSSIAQEILKVVAEKIQYAEEDLALVAITFSGEKHELQPNDLVISKSLEASGRIYVYRKDLADTLNPFAENEESQQRSMRILGMNTWDLALELMNFDWSLFNSIHEQELIYFTFSRQGSGEHTANLSLLLQRCNEVQLWVATEILLCSQLGKRVQLVKKFIKIAAHCKAQRNLNSFFAIVMGLNTASVSRLSQTWEKIPGKFKKLFSELESLTDPSLNHKAYRDAFKKMKPPKIPFMPLLLKDVTFIHEGNKTFLDNLVNFEKLHMIADTVRTLRHCRTNQFGDLSPKEHQELKSYVNHLYVIDSQQALFELSHRIEPRV

SEQ ID NO: 11242 - protein, 580 aa, Homo sapiens
MGSSRLRVFDPHLERKDSAAALSDRELPLPTFDVPYFKYIDEEDEDDEWSSRSQSSTEDDSVDSLLSDRYVVVSGTPEKILEHLLNDLHLEEVQDKETETLLDDFLLTYTVFMTTDDLCQALLRHYSAKKYQGKEENSDVPRRKRKVLHLVSQWIALYKDWLPEDEHSKMFLKTIYRNVLDDVYEYPILEKELKEFQKILGMHRRHTVDEYSPQKKNKALFHQFSLKENWLQHRGTVTETEEIFCHVYITEHSYVSVKAKVSSIAQEILKVVAEKIQYAEEDLALVAITFSGEKHELQPNDLVISKSLEASGRIYVYRKDLADTLNPFAENEESQQRSMRILGMNTWDLALELMNFDWSLFNSIHEQELIYFTFSRQGSGEHTANLSLLLQRCNEVQLWVATEILLCSQLGKRVQLVKKFIKIAAHCKAQRNLNSFFAIVMGLNTASVSRLSQTWEKIPGKFKKLFSELESLTDPSLNHKAYRDAFKKMKPPKIPFMPLLLKDVTFIHEGNKTFLDNLVNFEKLHMIADTVRTLRHCRTNQFGDLSPKEHQELKSYVNHLYVIDSQQALFELSHRIEPRV

SEQ ID NO: 11243 - protein, 444 aa, Homo sapiens
MGSSRLRVFDPHLERKDSAAALSDRELPLPTFDVPYFKYIDEEDEDDEWSSRSQSSTEDDSVDSLLSDRYVVVSGTPEKILEHLLNDLHLEEVQDKETETLLDDFLLTYTVFMTTDDLCQALLRHYSAKKYQGKEENSDVPRRKRKVLHLVSQWIALYKDWLPEDEHSKMFLKTIYRNVLDDVYEYPILEKELKEFQKILGMHRRHTVDEYSPQKKNKALFHQFSLKENWLQHRGTVTETEEIFCHVYITEHSYVSVKAKVSSIAQEILLCSQLGKRVQLVKKFIKIAAHCKAQRNLNSFFAIVMGLNTASVSRLSQTWEKIPGKFKKLFSELESLTDPSLNHKAYRDAFKKMKPPKIPFMPLLLKDVTFIHEGNKTFLDNLVNFEKLHMIADTVRTLRHCRTNQFGDLSPKEHQELKSYVNHLYVIDSQQALFELSHRIEPRV

SEQ ID NO: 11244 - protein, 124 aa, Homo sapiens
MGSSRLRVFDPHLERKDSAAALSDRELPLPTFDVPYFKYIDEEDEDDEWSSRSQSSTEDDSVDSLLSDRYVVVSGTPEKILEHLLNDLHLEEVQDKETVIPTPGITCVTSAMCSQSQADQDFMA

SEQ ID NO: 11245 - protein, 400 aa, Homo sapiens
MRMAVGSVKMQPPCESPALAAAAAVVAADGPLRRSPSAREPEREQPPASLRPRLRDLPALLRSGLTLRRKRSAAGGRTLSRRISNPYLEHTPSQIYGENSSCAGRALRNIIIVQAADLIKDRVNLKGFYRRSCVGSELVDWLLEHCPFVQCRSMAIGVWQLLLDMGIMLSVDQHLYFQDTYVFYQFSSDECSYLYCEFEREEEWQNGVKLLLQLVPLIPARGGICELSHQKIEDSEESSDEILVRLTSAVQRELAAVIALKARKSAIEQDEENNDKHVAVTEAESVPDSQAGVMCKLQERDEIGRIELVQKLAKENYQFLQTDKKEQEKSEHQDDEVTTVQVKEQDQSVLVLKKVQCCGPAPTAGSAESHWSVLADCRALSSQMDSVPSERTGMARSFSI

SEQ ID NO: 11246 - protein, 155 aa, Homo sapiens
MSWDCGFKYIFAFSPTLKAGVMCKLQERDEIGRIELVQKLAKENYQFLQTDKKEQEKSEHQDDEVTTVQVKEQDQSVLVLKKVQCCGPAPTAGSAESHWRYVVVSGTPEKILEHLLNDLHLEEVQDKETETLLDDFLLTYTVFMTTDDLCQALLR

SEQ ID NO: 11247 - protein, 142 aa, Homo sapiens
MTTDDLCQALLRHYSAKKYQGKEENSDVPRRKRKVLHLVSQWIALYKDWLPEDEHSKMFLKTIYRNVLDDVYEYPILEKELKEFQKILGMHRRHTVDEYSPQKKNKALFHQFSLKENWLQHRGTVTETEEIFCHVYITEHSY

SEQ ID NO: 11248 - protein, 294 aa, Homo sapiens
MQPRRQRLPAPWSGPRGPRPTAPLLALLLLLAPVAAPAGSGDPDDPGQPQDAGVPRRLLQQAARAALHFFNFRSGSPSALRVLAEVQEGRAWINPKEGCKVHVVFSTERYNPESLLQEGEGRLGKCSARVFFKNQKPRPTINVTCTRLIEKKKRQQEDYLLYKQMKQLKNPLEIVSIPDNHGHIDPSLRLIWDLAFLGSSYVMWEMTTQVSHYYLAQLTSVRQWKTNDDTIDFDYTVLLHELSTQEIIPCRIHLVWYPGKPLKVKYHCQELQTPEEASGTEEGSAVVPTELSNF

SEQ ID NO: 11249 - protein, 228 aa, Homo sapiens
MQPRRQRLPAPWSGPRGPRPTAPLLALLLLLAPVAAPAGSGDPDDPGQPQDAGVPRRLLQQAARAALHFFNFRSGSPSALRVLAEVQEGRAWINPKEGCKVHVVFSTERYNPESLLQEGEGRLGKCSARVFFKNQKPRPTINVTCTRLIEKKKRQQEDYLLYKQMKQLKNPLEIVSIPDNHGHIDPSLRLIWDLAFLGSSYVMWEMTTQVSHYYLAQLTSVRQWVRKT

SEQ ID NO: 11250 - protein, 163 aa, Homo sapiens
MRRLLIPLALWLGAVGVGVAELTEAQRRGLQVALEEFHKHPPVQWAFQETSVESAVDTPFPAGIFVRLEFKLQQTSCRKRDWKKPECKVRPNGRKRKCLACIKLGSEDKVLGRLVHCPIETQVLREAEEHQETQCLRVQRAGEDPHSFYFPGQFAFSKALPRS

SEQ ID NO: 11251 - protein, 163 aa, Homo sapiens; identical to SEQ ID NO: 11250

SEQ ID NO: 11252 - protein, 163 aa, Homo sapiens; identical to SEQ ID NO: 11250

SEQ ID NO: 11253 - protein, 159 aa, Homo sapiens
MRRLLIPLALWLGAVGVGVAELTEAQRRGLQVALEEFHKHPPVQWAFQETSVESAVDTPFPAGIFVRLEFKLQQTSCRKRDWKKPECKVRPNGRKRKCLACIKLGSEDKVLGRLVHCPIETQVLRRCVVPPGPLRVVTSGRPQPPGRGTRSIPSHDNKA

SEQ ID NO: 11254 - protein, 47 aa, Homo sapiens
MAAAAPAAAAASSEAPAASATAEPEAGDQDSREVKQKIYCHILDPTK

SEQ ID NO: 11255 - protein, 849 aa, Homo sapiens
MAAAAPAAAAASSEAPAASATAEPEAGDQDSREVRVLQSLRGKICEAKNLLPYLGPHKMRDCFCTINLDQEEVYRTQVVEKSLSPFFSEEFYFEIPRTFQYLSFYVYDKNVLQRDLRIGKVAIKKEDLCNHSGKETWFSLQPVDSNSEVQGKVHLELKLNELITENGTVCQQLVVHIKACHGLPLINGQSCDPYATVSLVGPSRNDQKKTKVKKKTSNPQFNEIFYFEVTRSSSYTRKSQFQVEEEDIEKLEIRIDLWNNGNLVQDVFLGEIKVPVNVLRTDSSHQAWYLLQPRDNGNKSSKTDDLGSLRLNICYTEDYVLPSEYYGPLKTLLLKSPDVQPISASAAYILSEICRDKNDAVLPLVRLLLHHDKLVPFATAVAELDLKDTQDANTIFRGNSLATRCLDEMMKIVGGHYLKVTLKPILDEICDSSKSCEIDPIKLKEGDNVENNKENLRYYVDKLFNTIVKSSMSCPTVMCDIFYSLRQMATQRFPNDPHVQYSAVSSFVFLRFFAVAVVSPHTFHLRPHHPDAQTIRTLTLISKTIQTLGSWGSLSKSKSSFKETFMCEFFKMFQEEGYIIAVKKFLDEISSTETKESSGTSEPVHLKEGEMYKRAQGRTRIGKKNFKKRWFCLTSRELTYHKQPGKDAIYTIPVKNILAVEKLEESSFNKKNMFQVIHTEKPLYVQANNCVEANEWIDVLCRVSRCNQNRLSFYHPSVYLNGNWLCCQETGENTLGCKPCTAGVPADIQIDIDEDRETERIYSLFTLSLLKLQKMEEACGTIAVYQGPQKEPDDYSNFVIEDSVTTFKTIQQIKSIIEKLDEPHEKYRKKRSSSAKYGSKENPIVGKAS

SEQ ID NO: 11256 - protein, 853 aa, Homo sapiens [sequence omitted]

SEQ ID NO: 11257 - protein, 155 aa, Homo sapiens
MAPRTWCPAGIFGLFCPLTLACSSLTIALTDCQPIILVSPTLSLWMVVRSVWIMQASLLGEPEEVALGPMGVVAATLEVVGTRAMGVAGIMTVDLEGMDMDMDVPETIMAETRVVMTATQEEITETIMTTEMRHAHNIGETWISALSEPVCHTLS

SEQ ID NO: 11258 - protein, 157 aa, Homo sapiens
MSSEEGKLFVGGLNFNTDEQALEDHFSSFGPISEVVVVKDRETQRSRGFGFITFTNPEHASVAMRAMNGESLDGRQIRVDHAGKSARGTRGGGFGAHGRGRSYSRGGGDQGYGSGRYYDSRPGGYGYGYGRSRDYNGRNQGGYDRYSGGNYRDNYDN

SEQ ID NO: 11259 - protein, 157 aa, Homo sapiens; identical to SEQ ID NO: 11258

SEQ ID NO: 11260 - protein, 1247 aa, Homo sapiens
MMREWVLLMSVLLCGLAGPTHLFQPSLVLDMAKVLLDNYCFPENLLGMQEAIQQAIKSHEILSISDPQTLASVLTAGVQSSLNDPRLVISYEPSTPEPPPQVPALTSLSEEELLAWLQRGLRHEVLEGNVGYLRVDSVPGQEVLSMMGEFLVAHVWGNLMGTSALVLDLRHCTGGQVSGIPYIISYLHPGNTILHVDTIYNRPSNTTTEIWTLPQVLGERYGADKDVVVLTSSQTRGVAEDIAHILKQMRRAIVVGERTGGGALDLRKLRIGESDFFFTVPVSRSLGPLGGGSQTWEGSGVLPCVGTPAEQALEKALAILTLRSALPGVVHCLQEVLKDYYTLVDRVPTLLQHLASMDFSTVVSEEDLVTKLNAGLQAASEDPRLLVRAIGPTETPSWPAPDAAAEDSPGVAPELPEDEAIRQALVDSVFQVSVLPGNVGYLRFDSFADASVLGVLAPYVLRQVWEPLQDTEHLIMDLRHNPGGPSSAVPLLLSYFQGPEAGPVHLFTTYDRRTNITQEHFSHMELPGPRYSTQRGVYLLTSHRTATAAEEFAFLMQSLGWATLVGEITAGNLLHTRTVPLLDTPEGSLALTVPVLTFIDNHGEAWLGGGVVPDAIVLAEEALDKAQEVLEFHQSLGALVEGTGHLLEAHYARPEVVGQTSALLRAKLAQGAYRTAVDLESLASQLTADLQEVSGDHRLLVFHSPGELVVEEAPPPPPAVPSPEELTYLIEALFKTEVLPGQLGYLRFDAMAELETVKAVGPQLVRLVWQQLVDTAALVIDLRYNPGSYSTAIPLLCSYFFEAEPRQHLYSVFDRATSKVTEVWTLPQVAGQRYGSHKDLYILMSHTSGSAAEAFAHTMQDLQRATVIGEPTAGGALSVGIYQVGSSPLYASMPTQMAMSATTGKAWDLAGVEPDITVPMSEALSIAQDIVALRAKVPTVLQTAGKLVADNYASAELGAKMATKLSGLQSRYSRVTSEVALAEILGADLQMLSGDPHLKAAHIPENAKDRIPGIVPMQIPSPEVFEELIKFSFHTNVLEDNIGYLRFDMFGDGELLTQVSRLLVEHIWKKIMHTDAMIIDMRFNIGGPTSSIPILCSYFFDEGPPVLLDKIYSRPDDSVSELWTHAQVVGERYGSKKSMVILTSSVTAGTAEEFTYIMKRLGRALVIGEVTSGGCQPPQTYHVDDTNLYLTIPTARSVGASDGSSWEGVGVTPHVVVPAEEALARAKEMLQHNQLRVKRSPGLQDHL

SEQ ID NO: 11261 - protein, 201 aa, Homo sapiens
MKWVWALLLLAALGSGRAERDCRVSSFRVKENFDKARFSGTWYAMAKKDPEGLFLQDNIVAEFSVDETGQMSATAKGRVRLLNNWDVCADMVGTFTDTEDPAKFKMKYWGVASFLQKGNDDHWIVDTDYDTYAVQYSCRLLNLDGTCADSYSFVFSRDPNGLPPEAQKIVRQRQEELCLARQYRLIVHNGYCDGRSERNLL

SEQ ID NO: 11262 - protein, 201 aa, Homo sapiens; identical to SEQ ID NO: 11261

SEQ ID NO: 11263 - protein, 199 aa, Homo sapiens
MNYSKIPAQVDLRRQTERDCRVSSFRVKENFDKARFSGTWYAMAKKDPEGLFLQDNIVAEFSVDETGQMSATAKGRVRLLNNWDVCADMVGTFTDTEDPAKFKMKYWGVASFLQKGNDDHWIVDTDYDTYAVQYSCRLLNLDGTCADSYSFVFSRDPNGLPPEAQKIVRQRQEELCLARQYRLIVHNGYCDGRSERNLL

SEQ ID NO: 11264 - protein, 199 aa, Homo sapiens; identical to SEQ ID NO: 11263

SEQ ID NO: 11265 - protein, 28 aa, Homo sapiens
EILENWNMFVGSQATNYGEDLTKNHDEL

SEQ ID NO: 11266 - protein, 331 aa, Homo sapiens
MARGGRGRRLGLALGLLLALVLAPRVLRAKPTVRKERVVRPDSELGERPPEDNQSFQYDHEAFLGKEDSKTFDQLTPDESKERLGKIVDRIDNDGDGFVTTEELKTWIKRVQKRYIFDNVAKVWKDYDRDKDDKISWEEYKQATYGYYLGNPAEFHDSSDHHTFKKMLPRDERRFKAADLNGDLTATREEFTAFLHPEEFEHMKEIVVLETLEDIDKNGDGFVDQDEYIADMFSHEENGPEPDWVLSEREQFNEFRDLNKDGKLDKDEIRHWILPQDYDHAQAEARHLVYESDKNKDEKLTKEEILENWNMFVGSQATNYGEDLTKNHDEL

SEQ ID NO: 11267 - protein, 20 aa, Homo sapiens
MLPRDERRFKAADLNGDLTA

SEQ ID NO: 11268 - protein, 57 aa, Homo sapiens
  VARIANT 1: note = misc_feature - Xaa can be any naturally occurring amino acid
XETLEDIDKNGDGFVDQDEYIDKETSGSVTELSQKPGFIFWLLNSVLSTPPHGLHHE

SEQ ID NO: 11269 - protein, 335 aa, Homo sapiens
MRLGPRTAALGLLLLCAAAAGAGKAEELHYPLGERRSDYDREALLGVQEDVDEYVKLGHEEQQKRLQAIIKKIDLDSDGFLTESELSSWIQMSFKHYAMQEAKQQFVEYDKNSDDTVTWDEYNIQMYDRVIDFDENTALDDAEEESFRKEFAICKKQSFCFWLLRFNLHLKDKKRFEKANQDSGPGLSLEEFIAFEHPEEVDYMTEFVIQEALEEHDKNGDGFVSLEEFLGDYRWDPTANEDPEWILVEKDRFVNDYDKDNDGRLDPQELLPWVVPNNQGIAQEEALHLIDEMDLNGDKKLSEEEILENPDLFLTSEATDYGRQLHDDYFYHDEL

SEQ ID NO: 11270 - protein, 317 aa, Homo sapiens
MRLGPRTAALGLLLLCAAAAGAGKAEELHYPLGERRSDYDREALLGVQEDVDEYVKLGHEEQQKRLQAIIKKIDLDSDGFLTESELSSWIQMSFKHYAMQEAKQQFVEYDKNSDDTVTWDEYNIQMYDRVIDFDENTALDDAEEESFRKLHLKDKKRFEKANQDSGPGLSLEEFIAFEHPEEVDYMTEFVIQEALEEHDKNGDGFVSLEEFLGDYRWDPTANEDPEWILVEKDRFVNDYDKDNDGRLDPQELLPWVVPNNQGIAQEEALHLIDEMDLNGDKKLSEEEILENPDLFLTSEATDYGRQLHDDYFYHDEL

SEQ ID NO: 11271 - protein, 216 aa, Homo sapiens
MRLGPRTAALGLLLLCAAAAGAGKAEELHYPLGERRSDYDREALLGVQLHLKDKKRFEKANQDSGPGLSLEEFIAFEHPEEVDYMTEFVIQEALEEHDKNGDGFVSLEEFLGDYRWDPTANEDPEWILVEKDRFVNDYDKDNDGRLDPQELLPWVVPNNQGIAQEEALHLIDEMDLNGDKKLSEEEILENPDLFLTSEATDYGRQLHDDYFYHDEL

SEQ ID NO: 11272 - protein, 155 aa, Homo sapiens
  VARIANT 1: note = misc_feature - Xaa can be any naturally occurring amino acid
XGLLLLCAAAAGAGKAEELHYPLGERRSDYDREALLGVQEDVDEYVKLGHEEQQKRLQAIIKKIDLDSDGFLTESELSSWIQMSFKHYAMQEAKQQFVEYDKNSDDTVTWDEYNIQMYDRVIDFDENTALDDAEEESFRKHQCGGLGLHPQSQSA

SEQ ID NO: 11273 - protein, 169 aa, Homo sapiens
FQYDHEAFLGREVAKEFDQLTPEESQARLGRIVDRMDRAGDGDGWVSLAELRAWIAHTQQRHIRDSVSAAWDTYDTDRDGRVGWEELRNATYGHYAPGEEFHDVEDAETYKKMLARDERRFRVADQDGDSMATREELTAFLHPEEFPHMRDIVIALFFSRIYLLTFLLL

SEQ ID NO: 11274 - protein, 150 aa, Homo sapiens
MMWRPSVLLLLLLLRHGAQGKPSPDAGPHGQGRVHQAAPLSDAPHDDAHGNFQYDHEAFLGREVAKEFDQLTPEESQARLGRIVDRMDRAGDGDGWVSLAELRAWIAHTQQRHIRDSVKNFMTWRMQRPTKRCWLGTSGVSGWPTRMGTR

SEQ ID NO: 11275 - protein, 328 aa, Homo sapiens
MMWRPSVLLLLLLLRHGAQGKPSPDAGPHGQGRVHQAAPLSDAPHDDAHGNFQYDHEAFLGREVAKEFDQLTPEESQARLGRIVDRMDRAGDGDGWVSLAELRAWIAHTQQRHIRDSVSAAWDTYDTDRDGRVGWEELRNATYGHYAPGEEFHDVEDAETYKKMLARDERRFRVADQDGDSMATREELTAFLHPEEFPHMRDIVIAETLEDLDRNKDGYVQVEEYIADLYSAEPGEEEPAWVQTERQQFRDFRDLNKDGHLDGSEVGHWVLPPAQDQPLVEANHLLHESDTDKDGRLSKAEILGNWNMFVGSQATNYGEDLTRHHDEL

SEQ ID NO: 11276 - protein, 58 aa, Homo sapiens
  VARIANT 1: note = misc_feature - Xaa can be any naturally occurring amino acid
XTERQQFRDFRDLNKDGHLDGSEDGRLSKAEILGNWNMFVGSQATNYGEDLTRHHDEL

SEQ ID NO: 11277 - protein, 485 aa, Homo sapiens
MPAMVEKGPEVSGKRRGRNNAAASASAAAASAAASAACASPAATAASGAAASSASAAAASAAAAPNNGQNKSLAAAAPNGNSSSNSWEEGSSGSSSDEEHGGGGMRVGPQYQAVVPDFDPAKLARRSQERDNLGMLVWSPNQNLSEAKLDEYIAIAKEKHGYNMEQALGMLFWHKHNIEKSLADLPNFTPFPDEWTVEDKVLFEQAFSFHGKTFHRIQQMLPDKSIASLVKFYYSWKKTRTKTSVMDRHARKQKREREESEDELEEANGNNPIDIEVDQNKESKKEVPPTETVPQVKKEKHSTQAKNRAKRKPPKGMFLSQEDVEAVSANATAATTVLRQLDMELVSVKRQIQNIKQTNSALKEKLDGGIEPYRLPEVIQKCNARWTTEEQLLAVQAIRKYGRDFQAISDVIGNKSVVQVKNFFVNYRRRFNIDEVLQEWEAEHGKEETNGPSNQKPVKSPDNSIKMPEEEDEAPVLDVRYASAS

SEQ ID NO: 11278 - protein, 35 aa, Homo sapiens
QTNSALKEKLDGGIEPYRLPEPSGNMAEIFRQSQT

SEQ ID NO: 11279 - protein, 305 aa, Homo sapiens
MVELMFPLLLLLLPFLLYMAAPQIRKMLSSGVCTSTVQLPGKVVVVTGANTGARVYLACRDVEKGELVAKEIQTTTGNQQVLVRKLDLSDTKSIRAFAKGFLAEEKHLHVLINNAGVMMCPYSKTADGFEMHIGVNHLGHFLLTHLLLEKLKESAPSRIVNVSSLAHHLGRIHFHNLQGEKFYNAGLAYCHSKLANILFTQELARRLKGSGVTTYSVHPGTVQSELVRHSSFMRWMWWLFSFFIKTPQQGAQTSLHCALTEGLEILSGNHFSDCHVAWVSAQARNETIARRLWDVSCDLLGLPID

SEQ ID NO: 11280 - protein, 187 aa, Homo sapiens [sequence omitted]

SEQ ID NO: 11281 - protein, 318 aa, Homo sapiens
MVELMFPLLLLLLPFLLYMAAPQIRKMLSSGVCTSTVQLPGKVVVVTGANTGIGKETAKELAQRGARVYLACRDVEKGELVAKEIQTTTGNQQVLVRKLDLSDTKSIRAFAKGFLAEEKHLHVLINNAGVMMCPYSKTADGFEMHIGVNHLGHFLLTHLLLEKLKESAPSRIVNVSSLAHHLGRIHFHNLQGEKFYNAGLAYCHSKLANILFTQELARRLKGSGVTTYSVHPGTVQSELVRHSSFMRWMWWLFSFFIKTPQQGAQTSLHCALTEGLEILSGNHFSDCHVAWVSAQARNETIARRLWDVSCDLLGLPID

SEQ ID NO: 11282 - protein, 248 aa, Homo sapiens
MVELMFPLLLLLLPFLLYMAAPQIRKMLSSGVCTSTVQLPGKVVVVTGANTGIGKETAKELAQRGARVYLACRDVEKGELVAKEIQTTTGNQQVLVRKLDLSDTKSIRAFAKGFLAEEKHLHVLINNAGVMMCPYSKTADGFEMHIGVNHLGSGVTTYSVHPGTVQSELVRHSSFMRWMWWLFSFFIKTPQQGAQTSLHCALTEGLEILSGNHFSDCHVAWVSAQARNETIARRLWDVSCDLLGLPID

SEQ ID NO: 11283 - protein, 178 aa, Homo sapiens
MVELMFPLLLLLLPFLLYMAAPQIRKMLSSGVCTSTVQLPGKVVVVTGANTGIGKETAKELAQRGHFLLTHLLLEKLKESAPSRIVNVSSLAHHLGRIHFHNLQGEKFYNAGLAYCHSKLANILFTQELARRLKGSGVTTYSVHPGTVQSELVRHSSFMRWMWWLFSFFIKTPQQGAQ

SEQ ID NO: 11284 - protein, 61 aa, Homo sapiens
MVELMFPLLLLLLPFLLYMAAPQIRSLPPNPSAARETKGISPIKDSKCVFPRTSPGKDPLP

SEQ ID NO: 11285 - protein, 62 aa, Homo sapiens
MVELMFPLLLLLLPFLLYMAAPQIRSSSIFSLPGCGKGGIGGQRDPDHDREPAGVGAETGPV

SEQ ID NO: 11286 - protein, 204 aa, Homo sapiens
SDTKSIRAFAKGFLAEEKHLHVLINNAGVMMCPYSKTADGFEMHIGVNHLGHFLLTHLLLEKLKESAPSRIVNVSSLAHHLGRIHFHNLQGEKFYNAGLAYCHSKLANILFTQELARRLKVQSELVRHSSFMRWMWWLFSFFIKTPQQGAQTSLHCALTEGLEILSGNHFSDCHVAWVSAQARNETIARRLWDVSCDLLGLPID

SEQ ID NO: 11287 - protein, 316 aa, Homo sapiens
MLVTLGLLTSFFSFLYMVAPSIRKFFAGGVCRTNVQLPGKVVVITGANTGIGKETARELASRGARVYIACRDVLKGESAASEIRVDTKNSQVLVRKLDLSDTKSIRAFAEGFLAEEKQLHILINNAGVMMCPYSKTADGFETHLGVNHLGHFLLTYLLLERLKVSAPARVVNVSSVAHHIGKIPFHDLQSEKRYSRGFAYCHSKLANVLFTRELAKRLQGTGVTTYAVHPGVVRSELVRHSSLLCLLWRLFSPFVKTAREGAQTSLHCALAEGLEPLSGKYFSDCKRTWVSPRARNNKTAERLWNVSCELLGIRWE

SEQ ID NO: 11288 - protein, 316 aa, Homo sapiens; identical to SEQ ID NO: 11287

SEQ ID NO: 11289 - protein, 42 aa, Homo sapiens
MEKCEAAAKDIRGETLNHHVNARHLDLASLKSIREFAAKIIE

SEQ ID NO: 11290 - protein, 260 aa, Homo sapiens
MEKCEAAAKDIRGETLNHHVNARHLDLASLKSIREFAAKIIEEEERVDILINNAGVMRCPHWTTEDGFEMQFGVNHLGHFLLTNLLLDKLKASAPSRIINLSSLAHVAGHIDFDDLNWQTRKYNTKAAYCQSKLAIVLFTKELSRRLQGSGVTVNALHPGVARTELGRHTGIHGSTFSSTTLGPIFWLLVKSPELAAQPSTYLAVAEELADVSGKYFDGLKQKAPAPEAEDEEVARRLWAESARLVGLEAPSVREQPLPR

SEQ ID NO: 11291 - protein, 260 aa, Homo sapiens; identical to SEQ ID NO: 11290

SEQ ID NO: 11292 - protein, 29 aa, Homo sapiens
MSRYLLPLSALGTVAGAAVLLKDYVTGGA

SEQ ID NO: 11293 - protein, 220 aa, Homo sapiens
MSRYLLPLSALGTVAGAAVLLKDYVTGGACPSKATIPGKTVIVTGANTGIGKQTALELARRGGNIILACRDMEKCEAAAKDIRGETLNHHVNARHLDLASLKSIREFAAKIIEEEERVDILINNAGVMRCPHWTTEDGFEMQFGVNHLGHFLLTNLLLDKLKASAPSRIINLSSLAHVAGHIDFDDLNWQTRKYNTKAAYCQSKLAIVLFTKELSRRLQG

SEQ ID NO: 11294 - protein, 220 aa, Homo sapiens; identical to SEQ ID NO: 11293

SEQ ID NO: 11295 - protein, 331 aa, Homo sapiens
MSRYLLPLSALGTVAGAAVLLKDYVTGGACPSKATIPGKTVIVTGANTGIGKQTALELARRGGNIILACRDMEKCEAAAKDIRGETLNHHVNARHLDLASLKSIREFAAKIIEEEERVDILINNAGVMRCPHWTTEDGFEMQFGVNHLGHFLLTNLLLDKLKASAPSRIINLSSLAHVAGHIDFDDLNWQTRKYNTKAAYCQSKLAIVLFTKELSRRLQGSGVTVNALHPGVARTELGRHTGIHGSTFSSTTLGPIFWLLVKSPELAAQPSTYLAVAEELADVSGKYFDGLKQKAPAPEAEDEEVARRLWAESARLVGLEAPSVREQPLPR

SEQ ID NO: 11296 - protein, 35 aa, Homo sapiens
MSRYLLPLSALGTVAGAAVLLKRQHHPGLPRHGEV

SEQ ID NO: 11297 - protein, 35 aa, Homo sapiens; identical to SEQ ID NO: 11296

SEQ ID NO: 11298 - protein, 55 aa, Homo sapiens
MHVKEAGLFGLVNNAGVAGIIGPTPWLTRDDFQRVLNVNTMGPIGVTLALLPLLQ

SEQ ID NO: 11299 - protein, 221 aa, Homo sapiens
MHVKEAGLFGLVNNAGVAGIIGPTPWLTRDDFQRVLNVNTMGPIGVTLALLPLLQQARGRVINITSVLGRLAANGGGYCVSKFGLEAFSDSLRRDVAHFGIRVSIVEPGFFRTPVTNLESLEKTLQACWARLPPATQAHYGGAFLTKYLKMQQRIMNLICDPDLTKVSRCLEHALTARHPRTRYSPGWDAKLLWLPASYLPASLVDAVLTWVLPKPAQAVY

SEQ ID NO: 11300 - protein, 318 aa, Homo sapiens
MWLPLLLGALLWAVLWLLRDRQSLPASNAFVFITGCDSGFGRLLALQLDQRGFRVLASCLTPSGAEDLQRVASSRLHTTLLDITDPQSVQQAAKWVEMHVKEAGLFGLVNNAGVAGIIGPTPWLTRDDFQRVLNVNTMGPIGVTLALLPLLQQARGRVINITSVLGRLAANGGGYCVSKFGLEAFSDSLRRDVAHFGIRVSIVEPGFFRTPVTNLESLEKTLQACWARLPPATQAHYGGAFLTKYLKMQQRIMNLICDPDLTKVSRCLEHALTARHPRTRYSPGWDAKLLWLPASYLPASLVDAVLTWVLPKPAQAVY

SEQ ID NO: 11301 - protein, 318 aa, Homo sapiens; identical to SEQ ID NO: 11300

SEQ ID NO: 11302 - protein, 103 aa, Homo sapiens
  VARIANT 1: note = misc_feature - Xaa can be any naturally occurring amino acid
XLLLGALLWAVLWLLRDRQSLPASNAFVFITGCDSGFGRLLALQLDQRGFRVLASCLTPSGAEDLQRVASSRLHTTLLDITDPQSVQQAAKWVEMHVKEAGGM

SEQ ID NO: 11303 - protein, 331 aa, Homo sapiens
MNGQSQVLPGGGHESREGINMAAAPRTVLISGCSSGIGLELAVQLAHDPKKRYQVVATMRDLGKKETLEAAAGEALGQTLTVAQLDVCSDESVAQCLSCIQGEVDVLVNNAGMGLVGPLEGLSLAAMQNVFDTNFFGAVRLVKAVLPGMKRRRQGHIVVISSVMGLQGVIFNDVYAASKFALEGFFESLAIQLLQFNIFISLVEPGPVVTEFEGKLLAQVSMAEFPGTDPETLHYFRDLYLPASRKLFCSVGQNPQDVVQAIVNVISSTRPPLRRQTNIRYSPLTTLKTVDSSGSLYVRTTHRLLFRCPRLLNLGLQCLSCGCLPTRVRPR

SEQ ID NO: 11304 - protein, 79 aa, Homo sapiens
  VARIANT 1: note = misc_feature - Xaa can be any naturally occurring amino acid
XFESLAIQLLQFNILFLWLSSQALTLRPCTTSGTSISQPPGSCFAPWDRTHRTWFRPLSTSSARLDHPCADRPTSATRR

SEQ ID NO: 11305 - protein, 166 aa, Homo sapiens
MAQTSSYFMLISCLMFLSQSQGQEAQTELPQARISCPEGTNAYRSYCYYFNEDRETWVDADLYCQNMNSGNLVSVLTQAEGAFVASLIKESGTDDFNVWIGLHDPKKNRRWHWSSGSLVSYKSWGIGAPSSVNPGYCVSLTSSTGFQKWKDVPCEDKFSFVCKFKN

SEQ ID NO: 11306 - protein, 149 aa, Homo sapiens
FNEDPETWVDADLYCQNMNSGNLVSVLTQAEGAFVASLIKESSTDDSNVWIGLHDPKKNRRWHWSSGSLVSYKSWDTGSPSSANAGYCASLTSCSGERQTIYPPVAISFPLISGDEHGDWDRGKDSRNGRMNLVRRSSPLFASSKTRGS

SEQ ID NO: 11307 - protein, 166 aa, Homo sapiens
MAQTNSFFMLISSLMFLSLSQGQESQTELPNPRISCPEGTNAYRSYCYYFNEDPETWVDADLYCQNMNSGNLVSVLTQAEGAFVASLIKESSTDDSNVWIGLHDPKKNRRWHWSSGSLVSYKSWDTGSPSSANAGYCASLTSCSGFKKWKDESCEKKFSFVCKFKN

SEQ ID NO: 11308 - protein, 175 aa, Homo sapiens
MLPPMALPSVSWMLLSCLMLLSQVQGEEPQRELPSARIRCPKGSKAYGSHCYALFLSPKSWTDADLACQKRPSGNLVSVLSGAEGSFVSSLVKSIGNSYSYVWIGLHDPTQGTEPNGEGWEWSSSDVMNYFAWERNPSTISSPGHCASLSRSTAFLRWKDYNCNVRLPYVCKFTD

SEQ ID NO: 11309 - protein, 175 aa, Homo sapiens; identical to SEQ ID NO: 11308

SEQ ID NO: 11310 - protein, 175 aa, Homo sapiens; identical to SEQ ID NO: 11308

SEQ ID NO: 11311 - protein, 129 aa, Homo sapiens
MLPPMALPSVSWMLLSCLILLCQVQGEETQKELPSPRISCPKGSKAYGSPCYALFLSPKSWMDADGSEPDGDGWEWSSTDVMNYFAWEKNPSTILNPGHCGSLSRSTGFLKWKDYNCDAKLPYVCKFKD

SEQ ID NO: 11312 - protein, 175 aa, Homo sapiens
MLPPMALPSVSWMLLSCLILLCQVQGEETQKELPSPRISCPKGSKAYGSPCYALFLSPKSWMDADLACQKRPSGKLVSVLSGAEGSFVSSLVRSISNSYSYIWIGLHDPTQGSEPDGDGWEWSSTDVMNYFAWEKNPSTILNPGHCGSLSRSTGFLKWKDYNCDAKLPYVCKFKD

SEQ ID NO: 11313 - protein, 175 aa, Homo sapiens; identical to SEQ ID NO: 11312

SEQ ID NO: 11314 - protein, 158 aa, Homo sapiens
MASRSMRLLLLLSCLAKTGVLGDIIMRPSCAPGWFYHKSNCYGYFRKLRNWSDAELECQSYGNGAHLASILSLKEASTIAEYISGYQRSQPIWIGLHDPQKRQQWQWIDGAMYLYRSWSGKSMGGNKHCAEMSSNNNFLTWSSNECNKRQHFLCKYRP

SEQ ID NO: 11315 - protein, 158 aa, Homo sapiens; identical to SEQ ID NO: 11314

SEQ ID NO: 11316 - protein, 103 aa, Homo sapiens
MASRSMRLLLLLSCLAKTGVLGDIIMRPSCAPGWFYHKSNCYGYFRKLRNWSDAELECQSYGNGAHLASILSLKEASTIAEYISGYQRSQPIWIGLHDPQKTF

SEQ ID NO: 11317 - protein, 134 aa, Homo sapiens
MASRSMRLLLLLSCLAKTGVLGDIIMRPSCAPGWFYHKSNCYGYFRKLRNWSDAEVRNLLPAWPGLSRAKDQPEPQISFDSGSSVLPGHYEEKPLWLVKWREEGCVFNSFNSVSIAEAGAVCQTLDGLQAHTDT

SEQ ID NO: 11318 - protein, 3458 aa, Homo sapiens
MERSGWARQTFLLALLLGATLRARAAAGYYPRFSPFFFLCTHHGELEGDGEQGEVLISLHIAGNPTYYVPGQEYHVTISTSTFFDGLLVTGLYTSTSVQASQSIGGSSAFGFGIMSDHQFGNQFMCSVVASHVSHLPTTNLSFIWIAPPAGTGCVNFMATATHRGQVIFKDALAQQLCEQGAPTDVTVHPHLAEIHSDSIILRDDFDSYHQLQLNPNIWVECNNCETGEQCGAIMHGNAVTFCEPYGPRELITTGLNTTTASVLQFSIGSGSCRFSYSDPSIIVLYAKNNSADWIQLEKIRAPSNVSTIIHILYLPEDAKGENVQFQWKQENLRVGEVYEACWALDNILIINSAHRQVVLEDSLDPVDTGNWLFFPGATVKHSCQSDGNSIYFHGNEGSEFNFATTRDVDLSTEDIQEQWSEEFESQPTGWDVLGAVIGTECGTIESGLSMVFLKDGERKLCTPSMDTTGYGNLRFYFVMGGICDPGNSHENDIILYAKIEGRKEHITLDTLSYSSYKVPSLVSVVINPELQTPATKFCLRQKNHQGHNRNVWAVDFFHVLPVLPSTMSHMIQFSINLGCGTHQPGNSVSLEFSTNHGRSWSLLHTECLPEICAGPHLPHSTVYSSENYSGWNRITIPLPNAALTRNTRIRWRQTGPILGNMWAIDNVYIGPSCLKFCSGRGQCTRHGCKCDPGFSGPACEMASQTFPMFISESFGSSRLSSYHNFYSIRGAEVSFGCGVLASGKALVFNKDGRRQLITSFLDSSQSRFLQFTLRLGSKSVLSTCRAPDQPGEGVLLHYSYDNGITWKLLEHYSYLSYHEPRIISVELPGDAKQFGIQFRWWQPYHSSQREDVWAIDEIIMTSVLFNSISLDFTNLVEVTQSLGFYLGNVQPYCGHDWTLCFTGDSKLASSMRYVETQSMQIGASYMIQFSLVMGCGQKYTPHMDNQVKLEYSTNHGLTWHLVQEECLPSMPSCQEFTSASIYHASEFTQWRRVIVLLPQKTWSSATRFRWSQSYYTAQDEWALDSIYIGQQCPNMCSGHGSCDHGICRCDQGYQGTECHPEAALPSTIMSDFENQNGWESDWQEVIGGEIVKPEQGCGVISSGSSLYFSKAGKRQLVSWDLDTSWVDFVQFYIQIGGESASCNKPDSREEGVLLQYSNNGGIQWHLLAEMYFSDFSKPRFVYLELPAAAKTPCTRFRWWQPVFSGEDYDQWAVDDIIILSEKQKQIIPVINPTLPQNFYEKPAFDYPMNQMSVWLMLANEGMVKNETFCAATPSAMIFGKSDGDRFAVTRDLTLKPGYVLQFKLNIGCANQFSSTAPVLLQYSHDAGMSWFLVKEGCYPASAGKGCEGNSRELSEPTMYHTGDFEEWTRITIVIPRSLASSKTRFRWIQESSSQKNVPPFGLDGVYISEPCPSYCSGHGDCISGVCFCDLGYTAAQGTCVSNVPNHNEMFDRFEGKLSPLWYKITGAQVGTGCGTLNDGKSLYFNGPGKREARTVPLDTRNIRLVQFYIQIGSKTSGITCIKPRTRNEGLIVQYSNDNGILWHLLRELDFMSFLEPQIISIDLPQDAKTPATAFRWWQPQHGKHSAQWALDDVLIGMNDSSQTGFQDKFDGSIDLQANWYRIQGGQVDIDCLSMDTALIFTENIGKPRYAETWDFHVSASTFLQFEMSMGCSKPFSNSHSVQLQYSLNNGKDWHLVTEECVPPTIGCLHYTESSIYTSERFQNWKRITVYLPLSTISPRTRFRWIQANYTVGADSWAIDNVVLASGCPWMCSGRGICDAGRCVCDRGFGGPYCVPVVPLPSILKDDFNGNLHPDLWPEVYGAERGNLNGETIKSGTSLIFKGEGLRMLISRDLDCTNTMYVQFSLRFIAKSTPERSHSILLQFSISGGITWHLMDEFYFPQTTNILFINVPLPYTAQTNATRFRLWQPYNNGKKEEIWIVDDFIIDGNNVNNPVMLLDTFDFGPREDNWFFYPGGNIGLYCPYSSKGAPEEDSAMVFVSNEVGEHSITTRDLNVNENTIIQFEINVGCSTDSSSADPVRLEFSRDFGATWHLLLPLCYHSSSHVSSLCSTEHHPSSTYYAGTMQGWRREVVHFGKLHLCGSVRFRWYQGFYPAGSQPVTWAIDNVYIGPQCEEMCNGQGSCINGTKCICDPGYSGPTCKISTKNPDFLKDDFEGQLESDRFLLMSGGKPSRKCGILSSGNNLFFNEDGLRMLMTRDLDLSHARFVQFFMRLGCGKGVPDPRSQPVLLQYSLNGGLSWSLLQEFLFSNSSNVGRYIALEIPLKARSGSTRLRWWQPSENGHFYSPWVIDQILIGGNISGNTVLEDDFTTLDSRKWLLHPGGTKMPVCGSTGDALVFIEKASTRYVVSTDVAVNEDSFLQIDFAASCSVTDSCYAIELEYSVDLGLSWHPLVRDCLPTNVECSRYHLQRILVSDTFNKWTRITLPLPPYTRSQATRFRWHQPAPFDKQQTWAIDNVYIGDGCIDMCSGHGRCIQGNCVCDEQWGGLYCDDPETSLPTQLKDNFNRAPSSQNWLTVNGGKLSTVCGAVASGMALHFSGGCSRLLVTVDLNLTNAEFIQFYFMYGCLITPNNRNQGVLLEYSVNGGITWNLLMEIFYDQYSKPGFVNILLPPDAKEIATRFRWWQPRHDGLDQNDWAIDNVLISGSADQRTVMLDTFSSAPVPQHERSPADAGPVGRIAFDMFMEDKTSVNEHWLFHDDCTVERFCDSPDGVMLCGSHDGREVYAVTHDLTPTEGWIMQFKISVGCKVSEKIAQNQIHVQYSTDFGVSWNYLVPQCLPADPKCSGSVSQPSVFFPTKGWKRITYPLPESLVGNPVRFRFYQKYSDMQWAIDNFYLGPGCLDNCRGHGDCLREQCICDPGYSGPNCYLTHTLKTFLKERFDSEEIKPDLWMSLEGGSTCTECGILAEDTALYFGGSTVRQAVTQDLDLRGAKFLQYWGRIGSENNMTSCHRPICRKEGVLLDYSTDGGITWTLLHEMDYQKYISVRHDYILLPEDALTNTTRLRWWQPFVISNGIVVSGVERAQWALDNILIGGAEINPSQLVDTFDDEGTSHEENWSFYPNAVRTAGFCGNPSFHLYWPNKKKDKTHNALSSRELIIQPGYMMQFKIVVGCEATSCGDLHSVMLEYTKDARSDSWQLVQTQCLPSSSNSIGCSPFQFHEATIYNSVNSSSWKRITIQLPDHVSSSATQFRWIQKGEETEKQSWAIDHVYIGEACPKLCSGHGYCTTGAICICDESFQGDDCSVFSHDLPSYIKDNFESARVTEANWETIQGGVIGSGCGQLAPYAHGDSLYFNGCQIRQAATKPLDLTRASKIMFVLQIGSMSQTDSCNSDLSGPHAVDKAVLLQYSVNNGITWHVIAQHQPKDFTQAQRVSYNVPLEARMKGVLLRWWQPRHNGTGHDQWALDHVEVVLTRKQNYMMNFSRQHGLRHFYNRRRRSLRRYP

SEQ ID NO: 11319 - protein, 3460 aa, Homo sapiens [sequence omitted]

SEQ ID NO: 11320 - protein, 3460 aa, Homo sapiens
MERSGWARQTFLLALLLGATLRARAAAGYYPRFSPFFFLCTHHGELEGDGEQGEVLISLHIAGNPTYYVPGQEYHVTISTSTFFDGLLVTGLYTSTSVQASQSIGGSSAFGFGIMSDHQFGNQFMCSVVASHVSHLPTTNLSFIWIAPPAGTGCVNFMATATHRGQVIFKDALAQQLCEQGAPTDVTVHPHLAEIHSDSIILRDDFDSYHQLQLNPNIWVECNNCETGEQCGAIMHGNAVTFCEPYGPRELITTGLNTTTASVLQFSIGSGSCRFSYSDPSIIVLYAKNNSADWIQLEKIRAPSNVSTIIHILYLPEDAKGENVQFQWKQENLRVGEVYEACWALDNILIINSAHRQVVLEDSLDPVDTGNWLFFPGATVKHSCQSDGNSIYFHGNEGSEFNFATTRDVDLSTEDIQEQWSEEFESQPTGWDVLGAVIGTECGTIESGLSMVFLKDGERKLCTPSMDTTGYGNLRFYFVMGGICDPGNSHENDIILYAKIEGRKEHITLDTLSYSSYKVPSLVSVVINPELQTPATKFCLRQKNHQGHNRNVWAVDFFHVLPVLPSTMSHMIQFSINLGCGTHQPGNSVSLEFSTNHGRSWSLLHTECLPEICAGPHLPHSTVYSSENYSGWNRITIPLPNAALTRNTRIRWRQTGPILGNMWAIDNVYIGPSCLKFCSGRGQCTRHGCKCDPGFSGPACEMASQTFPMFISESFGSSRLSSYHNFYSIRGAEVSFGCGVLASGKALVFNKDGRRQLITSFLDSSQSRFLQFTLRLGSKSVLSTCRAPDQPGEGVLLHYSYDNGITWKLLEHYSYLSYHEPRIISVELPGDAKQFGIQFRWWQPYHSSQREDVWAIDEIIMTSVLFNSISLDFTNLVEVTQSLGFYLGNVQPYCGHDWTLCFTGDSKLASSMRYVETQSMQIGASYMIQFSLVMGCGQKYTPHMDNQVKLEYSTNHGLTWHLVQEECLPSMPSCQEFTSASIYHASEFTQWRRVIVLLPQKTWSSATRFRWSQSYYTAQDEWALDSIYIGQQCPNMCSGHGSCDHGICRCDQGYQGTECHPEAALPSTIMSDFENQNGWESDWQEVIGGEIVKPEQGCGVISSGSSLYFSKAGKRQLVSWDLDTSWVDFVQFYIQIGGESASCNKPDSREEGVLLQYSNNGGIQWHLLAEMYFSDFSKPRFVYLELPAAAKTPCTRFRWWQPVFSGEDYDQWAVDDIIILSEKQKQIIPVINPTLPQNFYEKPAFDYPMNQMSVWLMLANEGMVKNETFCAATPSAMIFGKSDGDRFAVTRDLTLKPGYVLQFKLNIGCANQFSSTAPVLLQYSHDAGMSWFLVKEGCYPASAGKGCEGNSRELSEPTMYHTGDFEEWTRITIVIPRSLASSKTRFRWIQESSSQKNVPPFGLDGVYISEPCPSYCSGHGDCISGVCFCDLGYTAAQGTCVSNVPNHNEMFDRFEGKLSPLWYKITGAQVGTGCGTLNDGKSLYFNGPGKREARTVPLDTRNIRLVQFYIQIGSKTSGITCIKPRTRNEGLIVQYSNDNGILWHLLRELDFMSFLEPQIISIDLPQDAKTPATAFRWWQPQHGKHSAQWALDDVLIGMNDSSQTGFQDKFDGSIDLQANWYRIQGGQVDIDCLSMDTALIFTENIGKPRYAETWDFHVSASTFLQFEMSMGCSKPFSNSHSVQLQYSLNNGKDWHLVTEECVPPTIGCLHYTESSIYTSERFQNWKRITVYLPLSTISPRTRFRWIQANYTVGADSWAIDNVVLASGCPWMCSGRGICDAGRCVCDRGFGGPYCVPVVPLPSILKDDFNGNLHPDLWPEVYGAERGNLNGETIKSGTSLIFKGEGLRMLISRDLDCTNTMYVQFSLRFIAKSTPERSHSILLQFSISGGITWHLMDEFYFPQTTNILFINVPLPYTAQTNATRFRLWQPYNNGKKEEIWIVDDFIIDGNNVNNPVMLLDTFDFGPREDNWFFYPGGNIGLYCPYSSKGAPEEDSAMVFVSNEVGEHSITTRDLNVNENTIIQFEINVGCSTDSSSADPVRLEFSRDFGATWHLLLPLCYHSSSHVSSLCSTEHHPSSTYYAGTMQGWRREVVHFGKLHLCGSVRFRWYQGFYPAGSQPVTWAIDNVYIGPQCEEMCNGQGSCINGTKCICDPGYSGPTCKISTKNPDFLKDDFEGQLESDRFLLMSGGKPSRKCGILSSGNNLFFNEDGLRMLMTRDLDLSHARFVQFFMRLGCGKGVPDPRSQPVLLQYSLNGGLSWSLLQEFLFSNSSNVGRYIALEIPLKARSGSTRLRWWQPSENGHFYSPWVIDQILIGGNISGNTVLEDDFTTLDSRKWLLHPGGTKMPVCGSTGDALVFIEKASTRYVVSTDVAVNEDSFLQIDFAASCSVTDSCYAIELEYSVDLGLSWHPLVRDCLPTNVECSRYHLQRILVSDTFNKWTRITLPLPPYTRSQATRFRWHQPAPFDKQQTWAIDNVYIGDGCIDMCSGHGRCIQGNCVCDEQWGGLYCDDPETSLPTQLKDNFNRAPSSQNWLTVNGGKLSTVCGAVASGMALHFSGGCSRLLVTVDLNLTNAEFIQFYFMYGCLITPNNRNQGVLLEYSVNGGITWNLLMEIFYDQYSKPGFVNILLPPDAKEIATRFRWWQPRHDGLDQNDWAIDNVLISGSADQRTVMLDTFSSAPVPQHERSPADAGPVGRIAFDMFMEDKTSVNEHWLFHDDCTVERFCDSPDGVMLCGSHDGREVYAVTHDLTPTEGWIMQFKISVGCKVSEKIAQNQIHVQYSTDFGVSWNYLVPQCLPADPKCSGSVSQPSVFFPTKGWKRITYPLPESLVGNPVRFRFYQKYSDMQWAIDNFYLGPGCLDNCRGHGDCLREQCICDPGYSGPNCYLTHTLKTFLKERFDSEEIKPDLWMSLEGGSTCTECGILAEDTALYFGGSTVRQAVTQDLDLRGAKFLQYWGRIGSENNMTSCHRPICRKEGVLLDYSTDGGITWTLLHEMDYQKYISVRHDYILLPEDALTNTTRLRWWQPFVISNGIVVSGVERAQWALDNILIGGAEINPSQLVDTFDDEGTSHEENWSFYPNAVRTAGFCGNPSFHLYWPNKKKDKTHNALSSRELIIQPGYMMQFKIVVGCEATSCGDLHSVMLEYTKDARSDSWQLVQTQCLPSSSNSIGCSPFQFHEATIYNSVNSSSWKRITIQLPDHVSSSATQFRWIQKGEETEKQSWAIDHVYIGEACPKLCSGHGYCTTGAICICDESFQGDDCSVFSHDLPSYIKDNFESARVTEANWETIQGGVIGSGCGQLAPYAHGDSLYFNGCQIRQAATKPLDLTRASKIMFVLQIGSMSQTDSCNSDLSGPHAVDKAVLLQYSVNNGITWHVIAQHQPKDFTQAQRVSYNVPLEARMKGVLLRWWQPRHNGTGHDQWALDHVEVVLVSTRKQNYMMNFSRQHGLRHFYNRRRRSLRRYP

SEQ ID NO: 11321 - protein, 68 aa, Homo sapiens
  VARIANT 1: note = misc_feature - Xaa can be any naturally occurring amino acid
XLRWWQPRHNGTGHDQWALDHVEVVLDEKSYIASKPDQTFMTNHSAACIERHFLTCVIFHYLLSLVFH

SEQ ID NO: 11322 - protein, 103 aa, Homo sapiens
MKPSLLCRPLSCFLMLLPWPLATLTSTTLWQCPPGEEPDLDPGQGTLCRPCPPGTFSAAWGSSPCQPHARCSLWRRLEAQVGMATRDTLCGDCWPGNQPCLPD

SEQ ID NO: 11323 - protein, 101 aa, Homo sapiens
MKPSLLCRPLSCFLMLLPWPLATLTSTTLWQCPPGEEPDLDPGQGTLCRPCPPGTFSAAWGSSPCQPHARCSLWRRLEAQVGMATRDTLCGDCWPGWFGPW

SEQ ID NO: 11324 - protein, 430 aa, Homo sapiens
MKPSLLCRPLSCFLMLLPWPLATLTSTTLWQCPPGEEPDLDPGQGTLCRPCPPGTFSAAWGSSPCQPHARCSLWRRLEAQVGMATRDTLCGDCWPGWFGPWGVPRVPCQPCSWAPLGTHGCDEWGRRARRGVEVAAGASSGGETRQPGNGTRAGGPEETAAQYAVIAIVPVFCLMGLLGILVCNLLKRKGYHCTAHKEVGPGPGGGGSGINPAYRTEDANEDTIGVLVRLITEKKENAAALEELLKEYHSKQLVQTSHRPVSKLPPAPPNVPHICPHRHHLHTVQGLASLSGPCCSRCSQKKWPEVLLSPEAVAATTPVPSLLPNPTRVPKAGAKAGRQGEITILSVGRFRVARIPEQRTSSMVSEVKTITEAGPSWGDLPDSPQPGLPPEQQALLGSGGSRTKWLKPPAENKAEENRYVVRLSESNLVI

SEQ ID NO: 11325 - protein, 430 aa, Homo sapiens; identical to SEQ ID NO: 11324

SEQ ID NO: 11326 - protein, 406 aa, Homo sapiens
MDGWRRMPRWGLLLLLWGSCTFGLPTDTTTFKRIFLKRMPSIRESLKERGVDMARLGPEWSQPMKRLTLGNTTSSVILTNYMDTQYYGEIGIGTPPQTFKVVFDTGSSNVWVPSSKCSRLYTACVYHKLFDASDSSSYKHNGTELTLRYSTGTVSGFLSQDIITVGGITVTQMFGEVTEMPALPFMLAEFDGVVGMGFIEQAIGRVTPIFDNIISQGVLKEDVFSFYYNRDSENSQSLGGQIVLGGSDPQHYEGNFHYINLIKTGVWQIQMKGVSVGSSTLLCEDGCLALVDTGASYISGSTSSIEKLMEALGAKKRLFDYVVKCNEGPTLPDISFHLGGKEYTLTSADYVFQESYSSKKLCTLAIHAMDIPPPTGPTWALGATFIRKFYTEFDRRNNRIGFALAR

SEQ ID NO: 11327 - protein, 368 aa, Homo sapiens
MPSIRESLKERGVDMARLGPEWSQPMKRLTLGNTTSSVILTNYMDTQYYGEIGIGTPPQTFKVVFDTGSSNVWVPSSKCSRLYTACVYHKLFDASDSSSYKHNGTELTLRYSTGTVSGFLSQDIITVGGITVTQMFGEVTEMPALPFMLAEFDGVVGMGFIEQAIGRVTPIFDNIISQGVLKEDVFSFYYNRDSENSQSLGGQIVLGGSDPQHYEGNFHYINLIKTGVWQIQMKGVSVGSSTLLCEDGCLALVDTGASYISGSTSSIEKLMEALGAKKRLFDYVVKCNEGPTLPDISFHLGGKEYTLTSADYVFQESYSSKKLCTLAIHAMDIPPPTGPTWALGATFIRKFYTEFDRRNNRIGFALAR

SEQ ID NO: 11328 - protein, 394 aa, Homo sapiens
MDGRRVPAQPAAEFSLTPGGYRSVGRSRRCSRGSIPRNIPKRSWKKPHPQLCSLQAEEEPMLERRCRGPLAMGLAQPRLLSGPSQESPQTLGKESRGLRQQGTSVAQSGAQAPGRAHRCAHCRRHFPGWVALWLHTRRCQARLPLPCPECGRRFRHAPFLALHRQVHAAATPDLGFACHLCGQSFRGWVALVLHLRAHSAAKRPIACPKCERRFWRRKQLRAHLRRCHPPAPEARPFICGNCGRSFAQWDQLVAHKRVHVAEALEEAAAKALGPRPRGRPAVTAPRPGGDAVDRPFQCACCGKRFRHKPNLIAHRRVHTGERPHQCPECGKRFTNKPYLTSHRRIHTGEKPYPCKECGRRFRHKPNLLSHSKIHKRSEGSAQAAPGPGSPQLPA

SEQ ID NO: 11329 - protein, 366 aa, Homo sapiens
MDGRRVPAQPAAEFSLTPGGYRSVGRSRRCSRGSIPRNIPKRSWKKPHPQLCSLQEEEPMLERRCRGPLAMGLAQPRLLSGPSQESPQTLGKESRGLRQQGTSVAQSGAQAPGRAHRCAHCRRHFPGWVALWLHTRRCQARLPLPCPECGRRFRHAPFLALHRQVHAAATPDLGFACHLCGQSFRGWVALVLHLRAHSAAKRPIACPKCERRFWRRKQLRAHLRRCHPPAPEARPFICGNCGRSFAQWDQLVAHKRVHVAEALEEAAAKALGPRPRGRPAVTAPRPGGDAVDRPFQCACCGKRFRHKPNLIAHRRVHTGERPHQCPECGKRFTNKPYLTSHRRIHTGEKPYPCKECGRRFRHKPNL

SEQ ID NO: 11330 - protein, 55 aa, Homo sapiens
MDGRRVPAQPAAEQRKNRCWNVVAGAPWPWAWPSPDSFLGPPRSHPRPWGRSPAG

SEQ ID NO: 11331 - protein, 47 aa, Homo sapiens
MDGRRVPAQPAAEVRPGQGRGATAGPRGAAPPAGRVTVRLASLQSEV

SEQ ID NO: 11332 - protein, 47 aa, Homo sapiens; identical to SEQ ID NO: 11331

SEQ ID NO: 11333 - protein, 136 aa, Homo sapiens
MDGRRVPAQPAAEVRPGQGRGATAGPRGAAPPAGRVTVSVRDRVRGRTDAGTSLQGPPGHGPGPAPTPFWALPGVTPDPGEGVPRAEATRHVSGPVWCPSPRQGPSLCPLSKALPWLGGSVASHPPVPGPAALALP

SEQ ID NO: 11334 - protein, 624 aa, Homo sapiens
MGIGVSLLLQFSLTPGGYRSVGRSRRCSRGSIPRNIPKRSWKKPHPQLCSLQAEEEPMLERRCRGPLAMGLAQPRLLSGPSQESPQTLGKESRGLRQQGTSVAQSGAQAPGRAHRCAHCRRHFPGWVALWLHTRRCQARLPLPCPECGRRFRHAPFLALHRQVHAAATPDLGFACHLCGQSFRGWVALVLHLRAHSAAKRPIACPKCERRFWRRKQLRAHLRRCHPPAPEARPFICGNCGRSFAQWDQLVAHKRVHVAEALEEAAAKALGPRPRGRPAVTAPRPGGDAVDRPFQCACCGKRFRHKPNLIAHRRVHTGERPHQCPECGKRFTNKPYLTSHRRIHTGEKPYPCKECGRRFRHKPNLLSHSKIHKRSEGSAQAAPGPGSPQLPAGPQESAAEPTPAVPLKPAQEPPPGAPPEHPQDPIEAPPSLYSCDDCGRSFRLERFLRAHQRQHTGERPFTCAECGKNFGKKTHLVAHSRVHSGERPFACEECGRRFSQGSHLAAHRRDHAPDRPFVCPDCGKAFRHKPYLAAHRRIHTGEKPYVCPDCGKAFSQKSNLVSHRRIHTGERPYACPDCDRSFSQKSNLITHRKSHIRDGAFCCAICGQTFDDEERLLAHQKKHDV

SEQ ID NO: 11335 - protein, 87 aa, Homo sapiens
MGIGVSLLLQFSLTPGGYRSVGRSRRCSRGSIPRNIPKRSWKKPHPQLCSLQGLVIFDVSQLLHLLNRELSVCLSSFSELLCSSDVA

SEQ ID NO: 11336 - protein, 136 aa, Homo sapiens
MGIGVSLLLQFSLTPGGYRSVGRSRRCSRGSIPRNIPKRSWKKPHPQLCSLQGSSVSVCPASQSCCAARMWHRKQQTQGEGSIRHCREQWPHFLQRKNRCWNVVAGAPWPWAWPSPDSFLGPPRSHPRPWGRSPAG

SEQ ID NO: 11337 - protein, 136 aa, Homo sapiens; identical to SEQ ID NO: 11336

SEQ ID NO: 11338 - protein, 146 aa, Homo sapiens
MLERRCRGPLAMGLAQPRLLSGPSQESPQTLGKESRGLRQQGTSVAQSGAQAPGRAHRCAHCRRHFPGWVALWLHTRRCQARLPLPCPECGRRFRHAPFLALHRQVHAAATPDLGFACHLCGQSFRGWVALVLHLRAHSAAKRPIA

SEQ ID NO: 11339 - protein, 567 aa, Homo sapiens
MLERRCRGPLAMGLAQPRLLSGPSQESPQTLGKESRGLRQQGTSVAQSGAQAPGRAHRCAHCRRHFPGWVALWLHTRRCQARLPLPCPECGRRFRHAPFLALHRQVHAAATPDLGFACHLCGQSFRGWVALVLHLRAHSAAKRPIACPKCERRFWRRKQLRAHLRRCHPPAPEARPFICGNCGRSFAQWDQLVAHKRVHVAEALEEAAAKALGPRPRGRPAVTAPRPGGDAVDRPFQCACCGKRFRHKPNLIAHRRVHTGERPHQCPECGKRFTNKPYLTSHRRIHTGEKPYPCKECGRRFRHKPNLLSHSKIHKRSEGSAQAAPGPGSPQLPAGPQESAAEPTPAVPLKPAQEPPPGAPPEHPQDPIEAPPSLYSCDDCGRSFRLERFLRAHQRQHTGERPFTCAECGKNFGKKTHLVAHSRVHSGERPFACEECGRRFSQGSHLAAHRRDHAPDRPFVCPDCGKAFRHKPYLAAHRRIHTGEKPYVCPDCGKAFSQKSNLVSHRRIHTGERPYACPDCDRSFSQKSNLITHRKSHIRDGAFCCAICGQTFDDEERLLAHQKKHDV

SEQ ID NO: 11340 - protein, 567 aa, Homo sapiens; identical to SEQ ID NO: 11339

SEQ ID NO: 11341 - protein, 567 aa, Homo sapiens; identical to SEQ ID NO: 11339

SEQ ID NO: 11342 - protein, 659 aa, Homo sapiens
MEAAAAAAAAAAAAAAAGGGCGSGPPPLLLSEGEQQCYSELFARCAGAAGGGPGSGPPEAARVAPGTATAAAGPVADLFRASQLPAETLHQITELCGAKRVGYFGPTQFYIALKLIAAAQSGLPVRIESIKCELPLPRFMMSKNDGEIRFGNPAELHGTKVQIPYLTTEKNSFKRMDDEDKQETQSPTMSPLASPPSSPPHYQRVPLSHGYSKLRSSAEQMHPAPYEARQPLVQPEGSSSGGPGTKPLRHQASLIRSFSVERELQDNSSYPDEPWRITEEQREYYVNQFRSLQPDPSSFISGSVAKNFFTKSKLSIPELSYIWELSDADCDGALTLPEFCAAFHLIVARKNGYPLPEGLPPTLQPEYLQAAFPKPKWDCQLFDSYSESLPANQQPRDLNRMEKTSVKDMADLPVPNQDVTSDDKQALKSTINEALPKDVSEDPATPKDSNSLKARPRSRSYSSTSIEEAMKRGEDPPTPPPRPQKTHSRASSLDLNKVFQPSVPATKSGLLPPPPALPPRPCPSQSEQVSEAELLPQLSRAPSQAAESSPAKKDVLYSQPPSKPIRRKFRPENQATENQEPSTAASGPASAATMKPHPTVQKQSSKQKKAIQTAIRKNKEANAVLARLNSELQQQLKEVHQERIALENQLEQLRPVTVL

SEQ ID NO: 11343 - protein, 660 aa, Homo sapiens
MEAAAAAAAAAAAAAAAGGGCGSGPPPLLLSEGEQQCYSELFARCAGAAGGGPGSGPPEAARVAPGTATAAAGPVADLFRASQLPAETLHQITELCGAKRVGYFGPTQFYIALKLIAAAQSGLPVRIESIKCELPLPRFMMSKNDGEIRFGNPAELHGTKVQIPYLTTEKNSFKRMDDEDKQQETQSPTMSPLASPPSSPPHYQRVPLSHGYSKLRSSAEQMHPAPYEARQPLVQPEGSSSGGPGTKPLRHQASLIRSFSVERELQDNSSYPDEPWRITEEQREYYVNQFRSLQPDPSSFISGSVAKNFFTKSKLSIPELSYIWELSDADCDGALTLPEFCAAFHLIVARKNGYPLPEGLPPTLQPEYLQAAFPKPKWDCQLFDSYSESLPANQQPRDLNRMEKTSVKDMADLPVPNQDVTSDDKQALKSTINEALPKDVSEDPATPKDSNSLKARPRSRSYSSTSIEEAMKRGEDPPTPPPRPQKTHSRASSLDLNKVFQPSVPATKSGLLPPPPALPPRPCPSQSEQVSEAELLPQLSRAPSQAAESSPAKKDVLYSQPPSKPIRRKFRPENQATENQEPSTAASGPASAATMKPHPTVQKQSSKQKKAIQTAIRKNKEANAVLARLNSELQQQLKEVHQERIALENQLEQLRPVTVL

SEQ ID NO: 11344 - protein, 181 aa, Homo sapiens
MAKATSGAAGLRLLLLLLLPLLGKDVAEEAGCPLSCAVSKRRLECEECGGLGSPTGRCEWRQGDGKGITRNFSTCSPSTKTCPDGHCDVVETQDINICPQDCLRGSIVGGHEPGEPRGIKAGYGTCNCFPEEEKCFCEPEDIQDPLCDELCRTVIAAAVLFSFIVSVLLSAFCIHCYHKFA

SEQ ID NO: 11345 - protein, 1114 aa, Homo sapiens
MAKATSGAAGLRLLLLLLLPLLGKVALGLYFSRDAYWEKLYVDQAAGTPLLYVHALRDAPEEVPSFRLGQHLYGTYRTRLHENNWICIQEDTGLLYLNRSLDHSSWEKLSVRNRGFPLLTVYLKVFLSPTSLREGECQWPGCARVYFSFFNTSFPACSSLKPRELCFPETRPSFRIRENRPPGTFHQFRLLPVQFLCPNISVAYRLLEGEGLPFRCAPDSLEVSTRWALDREQREKYELVAVCTVHAGAREEVVMVPFPVTVYDEDDSAPTFPAGVDTASAVVEFKRKEDTVVATLRVFDADVVPASGELVRRYTSTLLPGDTWAQQTFRVEHWPNETSVQANGSFVRATVHDYRLVLNRNLSISENRTMQLAVLVNDSDFQGPGAGVLLLHFNVSVLPVSLHLPSTYSLSVSRRARRFAQIGKVCVENCQAFSGINVQYKLHSSGANCSTLGVVTSAEDTSGILFVNDTKALRRPKCAELHYMVVATDQQTSRQAQAQLLVTVEGSYVAEEAGCPLSCAVSKRRLECEECGGLGSPTGRCEWRQGDGKGITRNFSTCSPSTKTCPDGHCDVVETQDINICPQDCLRGSIVGGHEPGEPRGIKAGYGTCNCFPEEEKCFCEPEDIQDPLCDELCRTVIAAAVLFSFIVSVLLSAFCIHCYHKFAHKPPISSAEMTFRRPAQAFPVSYSSSGARRPSLDSMENQVSVDAFKILEDPKWEFPRKNLVLGKTLGEGEFGKVVKATAFHLKGRAGYTTVAVKMLKENASPSELRDLLSEFNVLKQVNHPHVIKLYGACSQDGPLLLIVEYAKYGSLRGFLRESRKVGPGYLGSGGSRNSSSLDHPDERALTMGDLISFAWQISQGMQYLAEMKLVHRDLAARNILVAEGRKMKISDFGLSRDVYEEDSYVKRSQGRIPVKWMAIESLFDHIYTTQSDVWSFGVLLWEIVTLGGNPYPGIPPERLFNLLKTGHRMERPDNCSEEMYRLMLQCWKQEPDKRPVFADISKDLEKMMVKRRDYLDLAASTPSDSLIYDDGLSEEETPLVDCNNAPLPRALPSTWIENKLYGMSDPNWPGESPVPLTRADGTNTGFPRYPNDSVYANWMLSPSAAKLMDTFDS

SEQ ID NO: 11346 - protein, 1072 aa, Homo sapiens
MAKATSGAAGLRLLLLLLLPLLGKVALGLYFSRDAYWEKLYVDQAAGTPLLYVHALRDAPEEVPSFRLGQHLYGTYRTRLHENNWICIQEDTGLLYLNRSLDHSSWEKLSVRNRGFPLLTVYLKVFLSPTSLREGECQWPGCARVYFSFFNTSFPACSSLKPRELCFPETRPSFRIRENRPPGTFHQFRLLPVQFLCPNISVAYRLLEGEGLPFRCAPDSLEVSTRWALDREQREKYELVAVCTVHAGAREEVVMVPFPVTVYDEDDSAPTFPAGVDTASAVVEFKRKEDTVVATLRVFDADVVPASGELVRRYTSTLLPGDTWAQQTFRVEHWPNETSVQANGSFVRATVHDYRLVLNRNLSISENRTMQLAVLVNDSDFQGPGAGVLLLHFNVSVLPVSLHLPSTYSLSVSRRARRFAQIGKVCVENCQAFSGINVQYKLHSSGANCSTLGVVTSAEDTSGILFVNDTKALRRPKCAELHYMVVATDQQTSRQAQAQLLVTVEGSYVAEEAGCPLSCAVSKRRLECEECGGLGSPTGRCEWRQGDGKGITRNFSTCSPSTKTCPDGHCDVVETQDINICPQDCLRGSIVGGHEPGEPRGIKAGYGTCNCFPEEEKCFCEPEDIQDPLCDELCRTVIAAAVLFSFIVSVLLSAFCIHCYHKFAHKPPISSAEMTFRRPAQAFPVSYSSSGARRPSLDSMENQVSVDAFKILEDPKWEFPRKNLVLGKTLGEGEFGKVVKATAFHLKGRAGYTTVAVKMLKENASPSELRDLLSEFNVLKQVNHPHVIKLYGACSQDGPLLLIVEYAKYGSLRGFLRESRKVGPGYLGSGGSRNSSSLDHPDERALTMGDLISFAWQISQGMQYLAEMKLVHRDLAARNILVAEGRKMKISDFGLSRDVYEEDSYVKRSQGRIPVKWMAIESLFDHIYTTQSDVWSFGVLLWEIVTLGGNPYPGIPPERLFNLLKTGHRMERPDNCSEEMYRLMLQCWKQEPDKRPVFADISKDLEKMMVKRRDYLDLAASTPSDSLIYDDGLSEEETPLVDCNNAPLPRALPSTWIENKLYGRISHAFTRF

SEQ ID NO: 11347 - protein, 458 aa, Homo sapiens
MAKATSGAAGLRLLLLLLLPLLGKVALGLYFSRDAYWEKLYVDQAAGTPLLYVHALRDAPEEVPSFRLGQHLYGTYRTRLHENNWICIQEDTGLLYLNRSLDHSSWEKLSVRNRGFPLLTVYLKVFLSPTSLREGECQWPGCARVYFSFFNTSFPACSSLKPRELCFPETRPSFRIRENRPPGTFHQFRLLPVQFLCPNISVAYRLLEGEGLPFRCAPDSLEVSTRWALDREQREKYELVAVCTVHAGAREEVVMVPFPVTVYDEDDSAPTFPAGVDTASAVVEFKRKEDTVVATLRVFDADVVPASGELVRRYTSTLLPGDTWAQQTFRVEHWPNETSVQANGSFVRATVHDYRLVLNRNLSISENRTMQLAVLVNDSDFQGPGAGVLLLHFNVSVLPVSLHLPSTYSLSVSRRARRFAQIGKVCVENCLADLTGDAVSGRDEARSSGLGSQKHPGS

SEQ ID NO: 11348 - protein, 114 aa, Homo sapiens
  VARIANT 1: note = misc_feature - Xaa can be any naturally occurring amino acid
XDAYWEKLYVDQAAGTPLLYVHALRDAPEEVPSFRLGQHLYGTYRTRLHENNWICIQEDTGLLYLNRSLDHSSWEKLSVRNVADAPTDLTSLCRPRLSPAHRLPQGLPVTHIPS

SEQ ID NO: 11349 - protein, 191 aa, Homo sapiens
  VARIANT 1: note = misc_feature - Xaa can be any naturally occurring amino acid
XDAYWEKLYVDQAAGTPLLYVHALRDAPEEVPSFRLGQHLYGTYRTRLHENNWICIQEDTGLLYLNRSLDHSSWEKLSVRTCSSLKPRELCFPETRPSFRIRENRPPGTFHQFRLLPVQFLCPNISVAYRLLEGECRPCGAAPQCLLLLVLLCEPLTQAIWFILHLHAISSFNIPEVPLACLPGARYCSRS

SEQ ID NO: 11350 - protein, 108 aa, Homo sapiens
MKALCLLLLPVLGLLVSSKTLCSMEEAINERIQEVAGSLIFRAISSIGLECQSVTSRGDLATCPRGFAVTGCTCGSACGSWDVRAETTCHCQCAGMDWTGARCCRVQP

SEQ ID NO: 11351 - protein, 82 aa, Homo sapiens
MKALCLLLLPVLGLLVSSKTLCSMEEAINERIQEVAGSLSFAVTGCTCGSACGSWDVRAETTCHCQCAGMDWTGARCCRVQP

SEQ ID NO: 11352 - protein, 82 aa, Homo sapiens; identical to SEQ ID NO: 11351

SEQ ID NO: 11353 - protein, 111 aa, Homo sapiens
MGPSSCLLLILIPLLQLINPGSTQCSLDSVMDKKIKDVLNSLEYSPSPISKKLSCASVKSQGRPSSCPAGMAVTGCACGYGCGSWDVQLETTCHCQCSVVDWTTARCCHLT

SEQ ID NO: 11354 - protein, 610 aa, Homo sapiens
MWLPLVLLLAVLLLAVLCKVYLGLFSGSSPNPFSEDVKRPPAPLVTDKEARKKVLKQAFSANQVPEKLDVVVIGSGFGGLAAAAILAKAGKRVLVLEQHTKAGGCCHTFGKNGLEFDTGIHYIGRMEEGSIGRFILDQITEGQLDWAPLSSPFDIMVLEGPNGRKEYPMYSGEKAYIQGLKEKFPQEEAIIDKYIKLVKVVSSGAPHAILLKFLPLPVVQLLDRCGLLTRFSPFLQASTQSLAEVLQQLGASSELQAVLSYIFPTYGVTPNHSAFSMHALLVNHYMKGGFYPRGGSSEIAFHTIPVIQRAGGAVLTKATVQSVLLDSAGKACGVSVKKGHELVNIYCPIVVSNAGLFNTYEHLLPGNARCLPGVKQQLGTVRPGLGMTSVFICLRGTKEDLHLPSTNYYVYYDTDMDQAMERYVSMPREEAAEHIPLLFFAFPSAKDPTWEDRFPGRSTMIMLIPTAYEWFEEWQAELKGKRGSDYETFKNSFVEASMSVVLKLFPQLEGKVESVTAGSPLTNQFYLAAPRGACYGADHDLGRLHPCVMASLRAQSPIPNLYLTGQDIFTCGLVGALQGALLCSSAILKRNLYSDLKNLDSRIRAQKKKN

SEQ ID NO: 11355 - protein, 140 aa, Homo sapiens
  VARIANT 1: note = misc_feature - Xaa can be any naturally occurring amino acid
XFHTIPVIQRAGGAVLTKATVQSVLLDSAGKACGVSVKKGHELVNIYCPIVVSNAGLFNTYEHLLPGNARCLPGKRRVCTAPLAGSPMCPLLEPTCSVWVMLLLFLAGPLIVLKQQGENATSNIILTLAFNVGETEAHTD

SEQ ID NO: 11356 - protein, 320 aa, Homo sapiens
  VARIANT 1: note = misc_feature - Xaa can be any naturally occurring amino acid
XGRKEYPMYSGEKAYIQGLKEKFPQEEAIIDKYIKLVKVVSSGAPHAILLKFLPLPVVQLLDRCGLLTRFSPFLQASTQSLAEVLQQLGASSELQAVLSYIFPTYGVTPNHSAFSMHALLVNHYMKGGFYPRGGSSEIAFHTIPVIQRAGGAVLTKATVQSVLLDSAGKACGVSVKKGHELVNIYCPIVVSNAGLFNTYEHLLPGNARCLPGVKQQLGTVRPGLGMTSVFICLRGTKEDLHLPSTNYYVYYDTDMDQAMERYVSMPREEAAEHIPLLFFAFPSAKDPTWEDRFPGGECDCRIPTHQPVLSGCSPRCLLRG

SEQ ID NO: 11357 - protein, 399 aa, Homo sapiens
  VARIANT 1: note = misc_feature - Xaa can be any naturally occurring amino acid
XPLVLLLAVLLLAVLCKVYLGLFSGSSPNPFSEDVKRPPAPLVTDKEARKKVLKQGVTPNHSAFSMHALLVNHYMKGGFYPRGGSSEIAFHTIPVIQRAGGAVLTKATVQSVLLDSAGKACGVSVKKGHELVNIYCPIVVSNAGLFNTYEHLLPGNARCLPGVKQQLGTVRPGLGMTSVFICLRGTKEDLHLPSTNYYVYYDTDMDQAMERYVSMPREEAAEHIPLLFFAFPSAKDPTWEDRFPGRSTMIMLIPTAYEWFEEWQAELKGKRGSDYETFKNSFVEASMSVVLKLFPQLEGKVESVTAGSPLTNQFYLAAPRGACYGADHDLGRLHPCVMASLRAQSPIPNLYLTGQDIFTCGLVGALQGALLCSSAILKRNLYSDLKNLDSRIRAQKKKN

SEQ ID NO: 11358 - protein, 255 aa, Homo sapiens
  VARIANT 1: note = misc_feature - Xaa can be any naturally occurring amino acid
XWLPLVLLLAVLLLAVLCKVYLGLFSGSSPNPFSEDVKRPPAPLVTDKEARKKVLKQGIHYIGRMEEGSIGRFILDQITEGQLDWAPLSSPFDIMVLEGPNGRKEYPMYSGEKAYIQGLKEKFPQEEAIIDKYIKLVKVVSSGAPHAILLKFLPLPVVQLLDRCGLLTRFSPFLQASTQSLAEVLQQLGASSELQAVLSYIFPTYGVTPNHSAFSMHALLVNHYMKGGFYPRGGSSEIAFHTIPVIQRAGGAVLT

SEQ ID NO: 11359 - protein, 331 aa, Homo sapiens
MSRARGALCRACLALAAALAALLLLPLPLPRAPAPARTPAPAPRAPPSRPAAPSLRPDDVFIAVKTTRKNHGPRLRLLLRTWISRARQQTFIFTDGDDPELELQGGDRVINTNCSAVRTRQALCCKMSVEYDKFIESGRKWFCHVDDDNYVNARSLLHLLSSFSPSQDVYLGRPSLDHPIEATERVQGGRTVTTVKFWFATGGAGFCLSRGLALKMSPWASLGSFMSTAEQVRLPDDCTVGYIVEGLLGARLLHSPLFHSHLENLQRLPPDTLLQQVTLSHGGPENPHNVVNVAGGFSLHQDPTRFKSIHCLLYPDTDWCPRQKQGAPTSR

SEQ ID NO: 11360 - protein, 60 aa, Homo sapiens
MSVEYDKFIESGRKWFCHVDDDNYVNARSLLHLLSSFSPSQDVYLGRPSLDHPIEATERV

SEQ ID NO: 11361 - protein, 205 aa, Homo sapiens
MSVEYDKFIESGRKWFCHVDDDNYVNARSLLHLLSSFSPSQDVYLGRPSLDHPIEATERVQGGRTVTTVKFWFATGGAGFCLSRGLALKMSPWASLGSFMSTAEQVRLPDDCTVGYIVEGLLGARLLHSPLFHSHLENLQRLPPDTLLQQVTLSHGGPENPHNVVNVAGGFSLHQDPTRFKSIHCLLYPDTDWCPRQKQGAPTSR

SEQ ID NO: 11362 - protein, 137 aa, Homo sapiens
MKPPAAQGSPAAAAAAAPALDSAAAEDLSDALCEFDAVLADFASPFHERHFHYEEHLERMKRRSSASVSDSSGFSDSESADSLYRNSFSFSDEKLNSPTDSTPALLSATVTPQKAKLGDTKELEAFIADLDKTLASM

SEQ ID NO: 11363 - protein, 337 aa, Homo sapiens
MPALEPAPPLLADLGPALEPESPAALGPPGYLHSAPGPAPAPGEGPPPGTVLEPQSAPESSCPCRGSVKNQPSEELPDMTTFPPRLLAEQLTLMDAELFKKVVLHECLGCIWGQGHLKGNEHMAPTVRATIAHFNRLTNCITTSCLGDHSMRARDRARVVEHWIKVARECLSLNNFSSVHVIVSALCSNPIGQLHKTWAGVSSKSMKELKELCKKDTAVKRDLLIKAGSFKVATQERNPQRVQMRLRRQKKGVVPFLGDFLTELQRLDSAIPDDLDGNTNKRSKEVRVLQEMQLLQVAAMNYRLRPLEKFVTYFTRMEQLSDKESYKLSCQLEPENP

SEQ ID NO: 11364 - protein, 356 aa, Homo sapiens
MPALEPAPPLLADLGPALEPESPAALGPPGYLHSAPGPAPAPGEGPPPGTVLEPQSAPESSCPCRGSVKNQPSEELPDMTTFPPRLLAEQLTLMDAELFKKVVLHECLGCIWGQGHLKGNEHMAPTVRATIAHFNRLTNCITTSCLGDHSMRARDRARVVEHWIKVARECLSLNNFSSVHVIVSALCSNPIGQLHKTWAGVSSKSMKELKELCKKDTAVKRDLLIKAGSFKVATQERNPQRVQMRLRRQKKGVVPFLGDFLTELQRLDSAIPDDLDGNTNKRSKEVRVLQEMQLLQVAAMNYRLRPLEKFVTYFTRMEQLSDKERWGFTMMSRIVSNSWPQAIHPPQPPKVLTLQV

SEQ ID NO: 11365 - protein, 410 aa, Homo sapiens
MPALEPAPPLLADLGPALEPESPAALGPPGYLHSAPGPAPAPGEGPPPGTVLEPQSAPESSCPCRGSVKNQPSEELPDMTTFPPRLLAEQLTLMDAELFKKVVLHECLGCIWGQGHLKGNEHMAPTVRATIAHFNRLTNCITTSCLGDHSMRARDRARVVEHWIKVARECLSLNNFSSVHVIVSALCSNPIGQLHKTWAGVSSKSMKELKELCKKDTAVKRDLLIKAGSFKVATQERNPQRVQMRLRRQKKGVVPFLGDFLTELQRLDSAIPDDLDGNTNKRSKEVRVLQEMQLLQVAAMNYRLRPLEKFVTYFTRMEQLSDKERLHCSVTISVHCNVCLLGSSPSSASQAAGTTAVHHHVRLFCCCCSATSCPASWSPKTRRLATSCSGWEPTGMLARTPALHHPSPRP

SEQ ID NO: 11366 - protein, 473 aa, Homo sapiens
MRKLLTNLPAAAVLSAQVYSAVLQGLWEENVCGTPGRTRVCTALLYGQVCPFQDSTDGLRTITSILFNWPPENTSVYYQPPQRSSFRIKLAFRNLSWPGLGLEDHQEIVLGQLVLPEPNEAKPDDPAPRPGQHALTMPALEPAPPLLADLGPALEPESPAALGPPGYLHSAPGPAPAPGEGPPPGTVLEPQSAPESSCPCRGSVKNQPSEELPDMTTFPPRLLAEQLTLMDAELFKKVVLHECLGCIWGQGHLKGNEHMAPTVRATIAHFNRLTNCITTSCLGDHSMRARDRARVVEHWIKVARECLSLNNFSSVHVIVSALCSNPIGQLHKTWAGVSSKSMKELKELCKKDTAVKRDLLIKAGSFKVATQERNPQRVQMRLRRQKKGVVPFLGDFLTELQRLDSAIPDDLDGNTNKRSKEVRVLQEMQLLQVAAMNYRLRPLEKFVTYFTRMEQLSDKESYKLSCQLEPENP

SEQ ID NO: 11367 - protein, 536 aa, Homo sapiens
MRKLLTNLPAAAVLSAQVYSAVLQGLWEENVCGTPGRTRVCTALLYGQVCPFQDSTDGLRTITSILFNWPPENTSVYYQPPQRSSFRIKLAFRNLSWPGLGLEDHQEIVLGQLVLPEPNEAKPDDPAPRPGQHALTMPALEPAPPLLADLGPALEPESPAALGPPGYLHSAPGPAPAPGEGPPPGTVLEPQSAPESSCPCRGSVKNQPSEELPDMTTFPPRLLAEQLTLMDAELFKKVVLHECLGCIWGQGHLKGNEHMAPTVRATIAHFNRLTNCITTSCLGDHSMRARDRARVVEHWIKVARECLSLNNFSSVHVIVSALCSNPIGQLHKTWAGVSSKSMKELKELCKKDTAVKRDLLIKAGSFKVATQERNPQRVQMRLRRQKKGVVPFLGDFLTELQRLDSAIPDDLDGNTNKRSKEVRVLQEMQLLQVAAMNYRLRPLEKFVTYFTRMEQLSDKERWGFTMMSRIVSNSWPQAIHPPQPPKVLTLQLQAVLPAGARKPVGWQHPAVAGNPPGCWPEHRLCTIPHPDRRHQG

SEQ ID NO: 11368 - protein, 435 aa, Homo sapiens
MRKLLTNLPAAAVLSAQVYSAVLQGLWEENVCGTPGRTRVCTALLYGQVCPFQDSTDGLRTITSILFNWPPENTSVYYQPPQRSSFRIKLAFRNLSWPGLGLEDHQEIVLGQLVLPEPNEAKPDDPAPRPGQHALTMPALEPAPPLLADLGPALEPESPAALGPPGYLHSAPGPAPAPGEGPPPGTVLEPQSAPESSCPCRGSVKNQPSEELPDMTTFPPRLLAEQLTLMDAELFKKVVLHECLGCIWGQGHLKGNEHMAPTVRATIAHFNRLTNCITTSCLGDHSMRARDRARVVEHWIKVARECLSLNNFSSVHVIVSALCSNPIGQLHKTWAGVSSKSMKELKELCKKDTAVKRDLLIKRDDGENNGNSYRKLSPQRPCEVAVVCITLYRRGNSLREARLQDWVTHTGSVDLGQWRGALRWPPRRGTPRESR

SEQ ID NO: 11369 - protein, 155 aa, Homo sapiens
  VARIANT 1: note = misc_feature - Xaa can be any naturally occurring amino acid
XWASGMSTVPGGSRHSLGIQVRGGWGVTGGEEESLTVPVADTWQAGSFKVATQERNPQRVQMRLRRQKKGVVPFLGDFLTELQRLDSAIPDDLDGNTNKRSKEVRVLQEMQLLQVAAMNYRLRPLEKFVTYFTRMEQLSDKESYKLSCQLEPENP

SEQ ID NO: 11370 - protein, 458 aa, Homo sapiens
MGGLGPRRAGTSRERLVVTGRAGWMGMGRGAGRSALGFWPTLAFLLCSFPAATSPCKILKCNSEFWSATSGSHAPASDDTPEFCAALRSYALCTRRTARTCRGDLAYHSAVHGIEDLMSQHNCSKDGPTSQPRLRTLPPAGDSQERSDSPEICHYEKSFHKHSATPNYTHCGLFGDPHLRTFTDRFQTCKVQGAWPLIDNNYLNVQVTNTPVLPGSAATATSKLTIIFKNFQECVDQKVYQAEMDELPAAFVDGSKNGGDKHGANSLKITEKVSGQHVEIQAKYIGTTIVVRQVGRYLTFAVRMPEEVVNAVEDWDSQGLYLCLRGCPLNQQIDFQAFHTNAEGTGARRLAAASPAPTAPETFPYETAVAKCKEKLPVEDLYYQACVFDLLTTGDVNFTLAAYYALEDVKMLHSNKDKLHLYERTRDLPGRAAAGLPLAPRPLLGALVPLLALLPVFC

SEQ ID NO: 11371 - protein, 10 aa, Homo sapiens
MGMGRGAGRS

SEQ ID NO: 11372 - protein, 46 aa, Homo sapiens
MGMGRGAGRSALGFWPTLAFLLCSFPAAHHHLQELPGVCGPEGVPG

SEQ ID NO: 11373 - protein, 61 aa, Homo sapiens
MGMGRGAGRSALGFWPTLAFLLCSFPAAIKRSPGSFCAALEMRRLWNLMSWKERRVQKPLM

SEQ ID NO: 11374 - protein, 90 aa, Homo sapiens
MGMGRGAGRSALGFWPTLAFLLCSFPAATSPCKILKCNSEFWSATSGSHAPASDDTPEFCAALRSYALCTRRTARTCRGDLAYHSAVHGI

SEQ ID NO: 11375 - protein, 434 aa, Homo sapiens
MGMGRGAGRSALGFWPTLAFLLCSFPAATSPCKILKCNSEFWSATSGSHAPASDDTPEFCAALRSYALCTRRTARTCRGDLAYHSAVHGIEDLMSQHNCSKDGPTSQPRLRTLPPAGDSQERSDSPEICHYEKSFHKHSATPNYTHCGLFGDPHLRTFTDRFQTCKVQGAWPLIDNNYLNVQVTNTPVLPGSAATATSKLTIIFKNFQECVDQKVYQAEMDELPAAFVDGSKNGGDKHGANSLKITEKVSGQHVEIQAKYIGTTIVVRQVGRYLTFAVRMPEEVVNAVEDWDSQGLYLCLRGCPLNQQIDFQAFHTNAEGTGARRLAAASPAPTAPETFPYETAVAKCKEKLPVEDLYYQACVFDLLTTGDVNFTLAAYYALEDVKMLHSNKDKLHLYERTRDLPGRAAAGLPLAPRPLLGALVPLLALLPVFC

SEQ ID NO: 11376 - protein, 434 aa, Homo sapiens; identical to SEQ ID NO: 11375

SEQ ID NO: 11377 - protein, 434 aa, Homo sapiens; identical to SEQ ID NO: 11375

SEQ ID NO: 11378 - protein, 450 aa, Homo sapiens
MQPPRERLVVTGRAGWMGMGRGAGRSALGFWPTLAFLLCSFPAATSPCKILKCNSEFWSATSGSHAPASDDTPEFCAALRSYALCTRRTARTCRGDLAYHSAVHGIEDLMSQHNCSKDGPTSQPRLRTLPPAGDSQERSDSPEICHYEKSFHKHSATPNYTHCGLFGDPHLRTFTDRFQTCKVQGAWPLIDNNYLNVQVTNTPVLPGSAATATSKLTIIFKNFQECVDQKVYQAEMDELPAAFVDGSKNGGDKHGANSLKITEKVSGQHVEIQAKYIGTTIVVRQVGRYLTFAVRMPEEVVNAVEDWDSQGLYLCLRGCPLNQQIDFQAFHTNAEGTGARRLAAASPAPTAPETFPYETAVAKCKEKLPVEDLYYQACVFDLLTTGDVNFTLAAYYALEDVKMLHSNKDKLHLYERTRDLPGRAAAGLPLAPRPLLGALVPLLALLPVFC

SEQ ID NO: 11379 - protein, 341 aa, Homo sapiens
MSQHNCSKDGPTSQPRLRTLPPAGDSQERSDSPEICHYEKSFHKHSATPNYTHCGLFGDPHLRTFTDRFQTCKVQGAWPLIDNNYLNVQVTNTPVLPGSAATATSKLTIIFKNFQECVDQKVYQAEMDELPAAFVDGSKNGGDKHGANSLKITEKVSGQHVEIQAKYIGTTIVVRQVGRYLTFAVRMPEEVVNAVEDWDSQGLYLCLRGCPLNQQIDFQAFHTNAEGTGARRLAAASPAPTAPETFPYETAVAKCKEKLPVEDLYYQACVFDLLTTGDVNFTLAAYYALEDVKMLHSNKDKLHLYERTRDLPGRAAAGLPLAPRPLLGALVPLLALLPVFC

SEQ ID NO: 11380 - protein, 437 aa, Homo sapiens
MGLRAAPSSAAAAAAEVEQRRSPGLCPPPLELLLLLLFSLGLLHAGDCQQPAQCRIQKCTTDFVSLTSHLNSAVDGFDSEFCKALRAYAGCTQRTSKACRGNLVYHSAVLGISDLMSQRNCSKDGPTSSTNPEVTHDPCNYHSHAGAREHRRGDQNPPSYLFCGLFGDPHLRTFKDNFQTCKVEGAWPLIDNNYLSVQVTNVPVVPGSSATATNKITIIFKAHHECTDQKVYQAVTDDLPAAFVDGTTSGGDSDAKSLRIVERESGHYVEMHARYIGTTVFVRQVGRYLTLAIRMPEDLAMSYEESQDLQLCVNGCPLSERIDDGQGQVSAILGHSLPRTSLVQAWPGYTLETANTQCHEKMPVKDIYFQSCVFDLLTTGDANFTAAAHSALEDVEALHPRKERWHIFPSSGNGTPRGGSDLSVSLGLTCLILIVFL

SEQ ID NO: 11381 - protein, 478 aa, Homo sapiens
MIRKKRKRSAPPGPCRSHGPRPATAPAPPPSPEPTRPAWTGMGLRAAPSSAAAAAAEVEQRRSPGLCPPPLELLLLLLFSLGLLHAGDCQQPAQCRIQKCTTDFVSLTSHLNSAVDGFDSEFCKALRAYAGCTQRTSKACRGNLVYHSAVLGISDLMSQRNCSKDGPTSSTNPEVTHDPCNYHSHAGAREHRRGDQNPPSYLFCGLFGDPHLRTFKDNFQTCKVEGAWPLIDNNYLSVQVTNVPVVPGSSATATNKITIIFKAHHECTDQKVYQAVTDDLPAAFVDGTTSGGDSDAKSLRIVERESGHYVEMHARYIGTTVFVRQVGRYLTLAIRMPEDLAMSYEESQDLQLCVNGCPLSERIDDGQGQVSAILGHSLPRTSLVQAWPGYTLETANTQCHEKMPVKDIYFQSCVFDLLTTGDANFTAAAHSALEDVEALHPRKERWHIFPSSGNGTPRGGSDLSVSLGLTCLILIVFL

SEQ ID NO: 11382 - protein, 50 aa, Homo sapiens
MAHGPGALMLKCVVVGDGAVGKTCLLMSYANDAFPEEYVPTVFDHYAGRL

SEQ ID NO: 11383 - protein, 205 aa, Homo sapiens
MAHGPGALMLKCVVVGDGAVGKTCLLMSYANDAFPEEYVPTVFDHYAVSVTVGGKQYLLGLYDTAGQEDYDRLRPLSYPMTDVFLICFSVVNPASFQNVKEEWVPELKEYAPNVPFLLIGTQIDLRDDPKTLARLNDMKEKPICVEQGQKLAKEIGACCYVECSALTQKGLKTVFDEAIIAILTPKKHTVKKRIGSRCINCCLIT

SEQ ID NO: 11384 - protein, 75 aa, Homo sapiens
MTDVFLICFSVVNPASFQNVKEEWVPELKEYAPNVPFLLIGTQIDLRDDPKTLARLNDMKEKPICVEQGQKLAKE

SEQ ID NO: 11385 - protein, 91 aa, Homo sapiens
PEEYVPTVFDHYAVSVTVGGKQYLLGLYDTAGQALQQSELDFWEEISVSSGSWGHVITFSFHTRAWVSSGQDLLCPLAPASAVLLLDRGRL

SEQ ID NO: 11386 - protein, 34 aa, Homo sapiens
  VARIANT 1: note = misc_feature - Xaa can be any naturally occurring amino acid
XGGKQYLLGLYDTAGQEDTGELAVRSCDFDKSIF

SEQ ID NO: 11387 - protein, 45 aa, Homo sapiens
MAYSTVQRVALASGLVLALSLLLPKAFLSRGKRQEPPPTPEEHRL

SEQ ID NO: 11388 - protein, 43 aa, Homo sapiens
MAYSTVQRVALASGLVLALSLLLPKAFLSRGKRQEPPPTPEEN

SEQ ID NO: 11389 - protein, 288 aa, Homo sapiens
MAYSTVQRVALASGLVLALSLLLPKAFLSRGKRQEPPPTPEGKLGRFPPMMHHHQAPSDGQTPGARFQRSHLAEAFAKAKGSGGGAGGGGSGRGLMGQIIPIYGFGIFLYILYILFKLSKGKTTAEDGKCYTAMPGNTHRKISYPEETYPIYDLSDCIKRRQETILVDYPDPKELSAEEIAERMGMIEEEESDHLGWESLPTDPRAQEDNSVTSCDPKPETCSCCFHEDEDPAVLAENAGFSADSYPEQEETTKEEWSQDFKDEGLGISTDKAYTGSMLRKRNPQGLE

SEQ ID NO: 11390 - protein, 368 aa, Homo sapiens
MAYSTVQRVALASGLVLALSLLLPKAFLSRGKRQEPPPTPEGKLGRFPPMMHHHQAPSDGQTPGARFQRSHLAEAFAKAKGSGGGAGGGGSGRGLMGQIIPIYGFGIFLYILYILFKLSKGKTTAEDGKCYTAMPGNTHRKITSFELAQLQEKLKETEAAMEKLINRVGPNGERAQTVTSDQEKRLLHQLREITRVMKEGKFIDRFSPEKEAEEAPYMEDWEGYPEETYPIYDLSDCIKRRQETILVDYPDPKELSAEEIAERMGMIEEEESDHLGWESLPTDPRAQEDNSVTSCDPKPETCSCCFHEDEDPAVLAENAGFSADSYPEQEETTKEEWSQDFKDEGLGISTDKAYTGSMLRKRNPQGLE

SEQ ID NO: 11391 - protein, 369 aa, Homo sapiens
MAYSTVQRVALASGLVLALSLLLPKAFLSRGKRQEPPPTPEGKLGRFPPMMHHHQAPSDGQTPGARFQRSHLAEAFAKAKGSGGGAGGGGSGRGLMGQIIPIYGFGIFLYILYILFKLSKGKTTAEDGKCYTAMPGNTHRKITSFELAQLQEKLKETEAAMEKLINRVGPNGESRAQTVTSDQEKRLLHQLREITRVMKEGKFIDRFSPEKEAEEAPYMEDWEGYPEETYPIYDLSDCIKRRQETILVDYPDPKELSAEEIAERMGMIEEEESDHLGWESLPTDPRAQEDNSVTSCDPKPETCSCCFHEDEDPAVLAENAGFSADSYPEQEETTKEEWSQDFKDEGLGISTDKAYTGSMLRKRNPQGLE

SEQ ID NO: 11392 - protein, 328 aa, Homo sapiens
MAYSTVQRVALASGLVLALSLLLPKAFLSRGKRQEPPPTPEGKLGRFPPMMHHHQAPSDGQTPGARFQRSHLAEAFAKAKGSGGGAGGGGSGRGLMGQIIPIYGFGIFLYILYILFKLSKGKTTAEDGKCYTAMPGNTHRKITSFELAQLQEKLKETEAAMEKLINRVGPNGESTQTDHSDVYVHCLGVFTTKWLDCLIFLSRAQTVTSDQEKRLLHQLREITRVMKEGKFIDRFSPEKEAEEAPYMEDWEGYPEETYPIYDLSDCIKRRQETILVDYPDPKELSAEEIAERMGMIEEEESDHLGWESLPTDPRAQEDNSVTSCDPKP

SEQ ID NO: 11393 - protein, 128 aa, Homo sapiens
MAYSTVQRVALASGLVLALSLLLPKAFLSRGKRQEPPPTPEGKLGRFPPMMHHHQAPSDGQTPGARFQRSHLAEAFAKAKGSGGGAGGGGSGRGLMGQIIPIYGFGIFLYILYILFKVSRIILIILHQ

SEQ ID NO: 11394 - protein, 187 aa, Homo sapiens
MAYSTVQRVALASGLVLALSLLLPKAFLSRGKRQEPPPTPEGYPEETYPIYDLSDCIKRRQETILVDYPDPKELSAEEIAERMGMIEEEESDHLGWESLPTDPRAQEDNSVTSCDPKPETCSCCFHEDEDPAVLAENAGFSADSYPEQEETTKEEWSQDFKDEGLGISTDKAYTGSMLRKRNPQGLE

SEQ ID NO: 11395 - protein, 42 aa, Homo sapiens
MSSLIRRVISTAKAPGAIGPYRTDRHGPFKWTACVRRGSRRS

SEQ ID NO: 11396 - protein, 137 aa, Homo sapiens
MSSLIRRVISTAKAPGAIGPYSQAVLVDRTIYISGQIGMDPSSGQLVSGGVAEEAKQALKNMGEILKAAGCDFTNVVKTTVLLADINDFNTVNEIYKQYFKSNFPARAAYQVAALPKGSRIEIEAVAIQGPLTTASL

SEQ ID NO: 11397 - protein, 148 aa, Homo sapiens
  VARIANT 1: note = misc_feature - Xaa can be any naturally occurring amino acid
XGRLSHVVLDQKGDQHRESPRGHWTLQLSVYCSQAVLVDRTIYISGQIGMDPSSGQLVSGGVAEEAKQALKNMGEILKAAGCDFTNVVKTTVLLADINDFNTVNEIYKQYFKSNFPARAAYQVAALPKGSRIEIEAVAIQGPLTTASL

SEQ ID NO: 11398 - protein, 127 aa, Homo sapiens
  VARIANT 1: note = misc_feature - Xaa can be any naturally occurring amino acid
XSSKKPAGLVLGLLLLKGLQEGRLSHVVLDQKGDQHRESPRGHWTLQALKNMGEILKAAGCDFTNVVKTTVLLADINDFNTVNEIYKQYFKSNFPARAAYQVAALPKGSRIEIEAVAIQGPLTTASL

SEQ ID NO: 11399 - protein, 219 aa, Homo sapiens
MAAEMRKMVRQPSRESTDGSINSYSSEGNLIFPGVRLGADSQFSDFLDGLGPAQLVGRQTLATPAMGDIQIGMEDKKGQLEVEVIRARSLTQKPGSKSTPAPYVKVYLLENGACIAKKKTRIARKTLDPLYQQSLVFDESPQGKVLQVIVWGDYGRMDHKCFMGVAQILLEELDLSSMVIGWYKLFPPSSLVDPTLTPLTRRASQSSLESSTGPPCIRS

SEQ ID NO: 11400 - protein, 1012 aa, Homo sapiens
MCAPGIHVSSEGWEEVRSVDSEEGTIEARRAVAGDLDYYWLDPATWHSRETSPISSHPVTWQPSKEGDRLIGRVILNKRTTMPKDSGALLGLKVVGGKMTDLGRLGAFITKVKKGSLADVVGHLRAGDEVLEWNGKPLPGATNEEVYNIILESKSEPQVEIIVSRPIGDIPRIPESSHPPLESSSSSFESQKMERPSISVISPTSPGALKDAPQVLPGQLSVKLWYDKVGHQLIVNVLQATDLPARVDGRPRNPYVKMYFLPDRSDKSKRRTKTVKKILEPKWNQTFVYSHVHRRDFRERMLEITVWDQPRVQEEESEFLGEILIELETALLDDEPHWYKLQTHDESSLPLPQPSPFMPRRHIHGESSSKKLQRSQRISDSDISDYEVDDGIGVVPPGYRSSARESKSTTLTVPEQQRTTHHRSRSVSPHRGNDQGKPRSRLPNVPLQRSLDEIHPTRRSRSPTRHHDASRSPVDHRTRDVDSQYLSEQDSELLMLPRAKRGRSAECLHTTSELQPFLDRARSASTNCLRPDTSLHSPERERHSRKSERSSIQKQTRKGTASDAERMHRQRSPTQSPPADTSFSSRRGRQLPQVPVRSGSIEQASLVVEERTRQMKMKVHRFKQTTGSGSSQELDREQYSKYNIHKDQYRSCDNVSAKSSDSDVSDVSAISRTSSASRLSSTSFMSEQSERPRGRISSFTPKMQGRRMGTSGRSIMKSTSVSGEMYTLEHNDGSQSDTAVGTVGAGGKKRRSSLSAKVVAIVSRRSRSTSQLSQTESGHKKLKSTIQRSTETGMAAEMRKMVRQPSRESTDGSINSYSSEGNLIFPGVRLGADSQFSDFLDGLGPAQLVGRQTLATPAMGDIQIGMEDKKGQLEVEVIRARSLTQKPGSKSTPAPYVKVYLLENGACIAKKKTRIARKTLDPLYQQSLVFDESPQGKVLQVIVWGDYGRMDHKCFMGVAQILLEELDLSSMVIGWYKLFPPSSLVDPTLTPLTRRASQSSLESSTGPPCIRS

SEQ ID NO: 11401 - protein, 817 aa, Homo sapiens
MCAPGIHVSSEGWEEVRSVDSEEGTIEARRAVAGDLDYYWLDPATWHSRETSPISSHPVTWQPSKEGDRLIGRVILNKRTTMPKDSGALLGLKVVGGKMTDLGRLGAFITKVKKGSLADVVGHLRAGDEVLEWNGKPLPGATNEEVYNIILESKSEPQVEIIVSRPIGDIPRIPESSHPPLESSSSSFESQKMERPSISVISPTSPGALKDAPQVLPGQLSVKLWYDKVGHQLIVNVLQATDLPARVDGRPRNPYVKMYFLPDRSDKSKRRTKTVKKILEPKWNQTFVYSHVHRRDFRERMLEITVWDQPRVQEEESEFLGEILIELETALLDDEPHWYKLQTHDESSLPLPQPSPFMPRRHIHGESSSKKLQRSQRISDSDISDYEVDDGIGVVPPVGYRSSARESKSTTLTVPEQQRTTHHRSRSVSPHRGNDQGKPRSRLPNVPLQRSLDEIHPTRRSRSPTRHHDASRSPVDHRTRDVDSQYLSEQDSELLMLPRAKRGRSAECLHTTSELQPFLDRARSASTNCLRPDTSLHSPERERMHRQRSPTQSPPADTSFSSRRGRQLPQVPVRSGSIEQESGHKKLKSTIQRSTETGMAAEMRKMVRQPSRESTDGSINSYSSEGNLIFPGVRLGADSQFSDFLDGLGPAQLVGRQTLATPAMGDIQIGMEDKKGQLEVEVIRARSLTQKPGSKSTPAPYVKVYLLENGACIAKKKTRIARKTLDPLYQQSLVFDESPQGKVLQVIVWGDYGRMDHKCFMGVAQILLEELDLSSMVIGWYKLFPPSSLVDPTLTPLTRRASQSSLESSTGPPCIRS

SEQ ID NO: 11402 - protein, 826 aa, Homo sapiens
MFAGFLQFLLLHTLHSGTGDLDYYWLDPATWHSRETSPISSHPVTWQPSKEGDRLIGRVILNKRTTMPKDSGALLGLKVVGGKMTDLGRLGAFITKVKKGSLADVVGHLRAGDEVLEWNGKPLPGATNEEVYNIILESKSEPQVEIIVSRPIGDIPRIPESSHPPLESSSSSFESQKMERPSISVISPTSPGALKDAPQVLPGQLSVKLWYDKVGHQLIVNVLQATDLPARVDGRPRNPYVKMYFLPDRSDKSKRRTKTVKKILEPKWNQTFVYSHVHRRDFRERMLEITVWDQPRVQEEESEFLGEILIELETALLDDEPHWYKLQTHDESSLPLPQPSPFMPRRHIHGESSSKKLQRSQRISDSDISDYEVDDGIGVVPPVGYRSSARESKSTTLTVPEQQRTTHHRSRSVSPHRGNDQGKPRSRLPNVPLQRSLDEIHPTRRSRSPTRHHDASRSPVDHRTRDVDSQYLSEQDSELLMLPRAKRGRSAECLHTTSELQPFLDRARSASTNCLRPDTSLHSPERERHSRKSERSSIQKQTRKGTASDAERMHRQRSPTQSPPADTSFSSRRGRQLPQVPVRSGSIEQESGHKKLKSTIQRSTETGMAAEMRKMVRQPSRESTDGSINSYSSEGNLIFPGVRLGADSQFSDFLDGLGPAQLVGRQTLATPAMGDIQIGMEDKKGQLEVEVIRARSLTQKPGSKSTPAPYVKVYLLENGACIAKKKTRIARKTLDPLYQQSLVFDESPQGKVLQVIVWGDYGRMDHKCFMGVAQILLEELDLSSMVIGWYKLFPPSSLVDPTLTPLTRRASQSSLESSTGPPCIRS

SEQ ID NO: 11403 - protein, 753 aa, Homo sapiens
MPKDSGALLGLKVVGGKMTDLGRLGAFITKVKKGSLADVVGHLRAGDEVLEWNGKPLPGATNEEVYNIILESKSEPQVEIIVSRPIGDIPRIPESSHPPLESSSSSFESQKMERPSISVISPTSPGALKDAPQVLPGQLSVKLWYDKVGHQLIVNVLQATDLPARVDGRPRNPYVKMYFLPDRSDKSKRRTKTVKKILEPKWNQTFVYSHVHRRDFRERMLEITVWDQPRVQEEESEFLGEILIELETALLDDEPHWYKLQTHDESSLPLPQPSPFMPRRHIHGESSSKKLQRSQRISDSDISDYEVDDGIGVVPPVGYRSSARESKSTTLTVPEQQRTTHHRSRSVSPHRGNDQGKPRSRLPNVPLQRSLDEIHPTRRSRSPTRHHDASRSPVDHRTRDVDSQYLSEQDRMHRQRSPTQSPPADTSFSSRRGRQLPQVPVRSGSIEQASLVVEERTRQMKMKVHRFKQTTGSGSSQELDREQYSKYNIHKDQYRSCDNVSAKSSDSDVSDVSAISRTSSASRLSSTSFMSEQSERPRGRISSFTPKMQGRRMGTSGRSIMKSTSVSGEMYTLEHNDGSQSDTAVGTVGAGGKKRRSSLSAKVVAIVSRRSRSTSQLSQTESGHKKLKSTIQRSTETGMAAEMRKMVRQPSRESTDGSINSYSSEGNLIFPGVRLGADSQFSDFLDGLGPAQLVGRQTLATPAMGDIQIGMEDKKGQLEVEVIRARSLTQKPGSKSTPAPYVKVYLLENGACI

SEQ ID NO: 11404 - protein, 760 aa, Homo sapiens
MPKDSGALLGLKVVGGKMTDLGRLGAFITKVKKGSLADVVGHLRAGDEVLEWNGKPLPGATNEEVYNIILESKSEPQVEIIVSRPIGDIPRIPESSHPPLESSSSSFESQKMERPSISVISPTSPGALKDAPQVLPGQLSVKLWYDKVGHQLIVNVLQATDLPARVDGRPRNPYVKMYFLPDRSDKSKRRTKTVKKILEPKWNQTFVYSHVHRRDFRERMLEITVWDQPRVQEEESEFLGEILIELETALLDDEPHWYKLQTHDESSLPLPQPSPFMPRRHIHGESSSKKLQRSQRISDSDISDYEVDDGIGVVPPVGYRSSARESKSTTLTVPEQQRTTHHRSRSVSPHRGNDQGKPRSRLPNVPLQRSLDEIHPTRRSRSPTRHHDASRSPVDHRTRDVDSQYLSEQDSELLMLPRAKRGRSAECLHTTSELQPFLDRARSASTNCLRPDTSLHSPERERHSRKSERSSIQKQTRKGTASDAERMHRQRSPTQSPPADTSFSSRRGRQLPQVPVRSGSIEQESGHKKLKSTIQRSTETGMAAEMRKMVRQPSRESTDGSINSYSSEGNLIFPGVRLGADSQFSDFLDGLGPAQLVGRQTLATPAMGDIQIGMEDKKGQLEVEVIRARSLTQKPGSKSTPAPYVKVYLLENGACIAKKKTRIARKTLDPLYQQSLVFDESPQGKVLQVIVWGDYGRMDHKCFMGVAQILLEELDLSSMVIGWYKLFPPSSLVDPTLTPLTRRASQSSLESSTGPPCIRS

SEQ ID NO: 11405 - protein, 1541 aa, Homo sapiens
MSSAVGPRGPRPPTVPPPMQELPDLSHLTEEERNIIMAVMDRQKEEEEKEEAMLKCVVRDMAKPAACKTPRNAENQPHQPSPRLHQQFESYKEQVRKIGEEARRYQGEHKDDAPTCGICHKTKFADGCGHLCSYCRTKFCARCGGRVSLRSNNEDKVVMWVCNLCRKQQEILTKSGAWFFGSGPQQTSQDGTLSDTATGAGSEVPREKKARLQERSRSQTPLSTAAASSQDAAPPSAPPDRSKGAEPSQQALGPEQKQASSRSRSEPPRERKKTPGLSEQNGKGALKSERKRVPKTSAQPVEGAVEERERKERRESRRLEKGRSQDYPDTPEKRDEGKAADEEKQRKEEDYQTRYRSDPNLARYPVKPPPEEQQMRMHARVSRARHERRHSDVALPRTEAGAALPEGKAGKRAPAAARASPPDSPRAYSAERTAETRAPGAKQLTNHSPPAPRHGPVPAEAPELKAQEPLRKQSRLDPSSAVLMRKAKREKVETMLRNDSLSSDQSESVRPSPPKPHRSKRGGKKRQMSVSSSEEEGVSTPEYTSCEDVELESESVSEKGDLDYYWLDPATWHSRETSPISSHPVTWQPSKEGDRLIGRVILNKRTTMPKDSGALLGLKVVGGKMTDLGRLGAFITKVKKGSLADVVGHLRAGDEVLEWNGKPLPGATNEEVYNIILESKSEPQVEIIVSRPIGDIPRIPESSHPPLESSSSSFESQKMERPSISVISPTSPGALKDAPQVLPGQLSVKLWYDKVGHQLIVNVLQATDLPARVDGRPRNPYVKMYFLPDRSDKSKRRTKTVKKILEPKWNQTFVYSHVHRRDFRERMLEITVWDQPRVQEEESEFLGEILIELETALLDDEPHWYKLQTHDESSLPLPQPSPFMPRRHIHGESSSKKLQRSQRISDSDISDYEVDDGIGVVPPVGYRSSARESKSTTLTVPEQQRTTHHRSRSVSPHRGNDQGKPRSRLPNVPLQRSLDEIHPTRRSRSPTRHHDASRSPVDHRTRDVDSQYLSEQDSELLMLPRAKRGRSAECLHTTRHLVRHYKTLPPKMPLLQSSSHWNIYSELQPFLDRARSASTNCLRPDTSLHSPERERMHRQRSPTQSPPADTSFSSRRGRQLPQVPVRSGSIEQASLVVEERTRQMKMKVHRFKQTTGSGSSQELDREQYSKYNIHKDQYRSCDNVSAKSSDSDVSDVSAISRTSSASRLSSTSFMSEQSERPRGRISSFTPKMQGRRMGTSGRSIMKSTSVSGEMYTLEHNDGSQSDTAVGTVGAGGKKRRSSLSAKVVAIVSRRSRSTSQLSQTESGHKKLKSTIQRSTETGMAAEMRKMVRQPSRESTDGSINSYSSEGNLIFPGVRLGADSQFSDFLDGLGPAQLVGRQTLATPAMGDIQIGMEDKKGQLEVEVIRARSLTQKPGSKSTPAPYVKVYLLENGACIAKKKTRIARKTLDPLYQQSLVFDESPQGKVLQVIVWGDYGRMDHKCFMGVAQILLEELDLSSMVIGWYKLFPPSSLVDPTLTPLTRRASQSSLESSTGPPCIRS

SEQ ID NO: 11406 - protein, 1291 aa, Homo sapiens
MSSAVGPRGPRPPTVPPPMQELPDLSHLTEEERNIIMAVMDRQKEEEEKEEAMLKCVVRDMAKPAACKTPRNAENQPHQPSPRLHQQFESYKEQVRKIGEEARRYQGEHKDDAPTCGICHKTKFADGCGHLCSYCRTKFCARCGGRVSLRSNNEDKVVMWVCNLCRKQQEILTKSGAWFFGSGPQQTSQDGTLSDTATGAGSEVPREKKARLQERSRSQTPLSTAAASSQDAAPPSAPPDRSKGAEPSQQALGPEQKQASSRSRSEPPRERKKTPGLSEQNGKGALKSERKRVPKTSAQPVEGAVEERERKERRESRRLEKGRSQDYPDTPEKRDEGKAADEEKQRKEEDYQTRYRSDPNLARYPVKPPPEEQQMRMHARVSRARHERRHSDVALPRTEAGAALPEGKAGKRAPAAARASPPDSPRAYSAERTAETRAPGAKQLTNHSPPAPRHGPVPAEAPELKAQEPLRKQSRLDPSSAVLMRKAKREKVETMLRNDSLSSDQSESVRPSPPKPHRSKRGGKKRQMSVSSSEEEGVSTPEYTSCEDVELESESVSEKGDLDYYWLDPATWHSRETSPISSHPVTWQPSKEGDRLIGRVILNKRTTMPKDSGALLGLKVVGGKMTDLGRLGAFITKVKKGSLADVVGHLRAGDEVLEWNGKPLPGATNEEVYNIILESKSEPQVEIIVSRPIGDIPRIPESSHPPLESSSSSFESQKMERPSISVISPTSPGALKDAPQVLPGQLSVKLWYDKVGHQLIVNVLQATDLPARVDGRPRNPYVKMYFLPDRSDKSKRRTKTVKKILEPKWNQTFVYSHVHRRDFRERMLEITVWDQPRVQEEESEFLGEILIELETALLDDEPHWYKLQTHDESSLPLPQPSPFMPRRHIHGESSSKKLQRSQRISDSDISDYEVDDGIGVVPPGYRSSARESKSTTLTVPEQQRTTHHRSRSVSPHRGNDQGKPRSRLPNVPLQRSLDEIHPTRRSRSPTRHHDASRSPVDHRTRDVDSQYLSEQDRMHRQRSPTQSPPADTSFSSRRGRQLPQVPVRSGSIEQESGHKKLKSTIQRSTETGMAAEMRKMVRQPSRESTDGSINSYSSEGNLIFPGVRLGADSQFSDFLDGLGPAQLVGRQTLATPAMGDIQIGMEDKKGQLEVEVIRARSLTQKPGSKSTPAPYVKVYLLENGACIAKKKTRIARKTLDPLYQQSLVFDESPQGKVLQVIVWGDYGRMDHKCFMGVAQILLEELDLSSMVIGWYKLFPPSSLVDPTLTPLTRRASQSSLESSTGPPCIRS

SEQ ID NO: 11407 - protein, 1342 aa, Homo sapiens
MSSAVGPRGPRPPTVPPPMQELPDLSHLTEEERNIIMAVMDRQKEEEEKEEAMLKCVVRDMAKPAACKTPRNAENQPHQPSPRLHQQFESYKEQVRKIGEEARRYQGEHKDDAPTCGICHKTKFADGCGHLCSYCRTKFCARCGGRVSLRSNNEDKVVMWVCNLCRKQQEILTKSGAWFFGSGPQQTSQDGTLSDTATGAGSEVPREKKARLQERSRSQTPLSTAAASSQDAAPPSAPPDRSKGAEPSQQALGPEQKQASSRSRSEPPRERKKTPGLSEQNGKGALKSERKRVPKTSAQPVEGAVEERERKERRESRRLEKGRSQDYPDTPEKRDEGKAADEEKQRKEEDYQTRYRSDPNLARYPVKPPPEEQQMRMHARVSRARHERRHSDVALPRTEAGAALPEGKAGKRAPAAARASPPDSPRAYSAERTAETRAPGAKQLTNHSPPAPRHGPVPAEAPELKAQEPLRKQSRLDPSSAVLMRKAKREKVETMLRNDSLSSDQSESVRPSPPKPHRSKRGGKKRQMSVSSSEEEGVSTPEYTSCEDVELESESVSEKGDLDYYWLDPATWHSRETSPISSHPVTWQPSKEGDRLIGRVILNKRTTMPKDSGALLGLKVVGGKMTDLGRLGAFITKVKKGSLADVVGHLRAGDEVLEWNGKPLPGATNEEVYNIILESKSEPQVEIIVSRPIGDIPRIPESSHPPLESSSSSFESQKMERPSISVISPTSPGALKDAPQVLPGQLSVKLWYDKVGHQLIVNVLQATDLPARVDGRPRNPYVKMYFLPDRSDKSKRRTKTVKKILEPKWNQTFVYSHVHRRDFRERMLEITVWDQPRVQEEESEFLGEILIELETALLDDEPHWYKLQTHDESSLPLPQPSPFMPRRHIHGESSSKKLQRSQRISDSDISDYEVDDGIGVVPPGYRSSARESKSTTLTVPEQQRTTHHRSRSVSPHRGNDQGKPRSRLPNVPLQRSLDEIHPTRRSRSPTRHHDASRSPVDHRTRDVDSQYLSEQDSELLMLPRAKRGRSAECLHTTSELQPFLDRARSASTNCLRPDTSLHSPERERMHRQRSPTQSPPADTSFSSRRGRQLPQVPVRSGSIEQESGHKKLKSTIQRSTETGMAAEMRKMVRQPSRESTDGSINSYSSEGNLIFPGVRLGADSQFSDFLDGLGPAQLVGRQTLATPAMGDIQIGMEDKKGQLEVEVIRARSLTQKPGSKSTPAPYVKVYLLENGACIAKKKTRIARKTLDPLYQQSLVFDESPQGKVLQVIVWGDYGRMDHKCFMGVAQILLEELDLSSMVIGWYKLFPPSSLVDPTLTPLTRRASQSSLESSTGPPCIRS

SEQ ID NO: 11408 - protein, 1371 aa, Homo sapiens
MSSAVGPRGPRPPTVPPPMQELPDLSHLTEEERNIIMAVMDRQKEEEEKEEAMLKCVVRDMAKPAACKTPRNAENQPHQPSPRLHQQFESYKEQVRKIGEEARRYQGEHKDDAPTCGICHKTKFADGCGHLCSYCRTKFCARCGGRVSLRSNNEDKVVMWVCNLCRKQQEILTKSGAWFFGSGPQQTSQDGTLSDTATGAGSEVPREKKARLQERSRSQTPLSTAAASSQDAAPPSAPPDRSKGAEPSQQALGPEQKQASSRSRSEPPRERKKTPGLSEQNGKGALKSERKRVPKTSAQPVEGAVEERERKERRESRRLEKGRSQDYPDTPEKRDEGKAADEEKQRKEEDYQTRYRSDPNLARYPVKPPPEEQQMRMHARVSRARHERRHSDVALPRTEAGAALPEGKAGKRAPAAARASPPDSPRAYSAERTAETRAPGAKQLTNHSPPAPRHGPVPAEAPELKAQEPLRKQSRLDPSSAVLMRKAKREKVETMLRNDSLSSDQSESVRPSPPKPHRSKRGGKKRQMSVSSSEEEGVSTPEYTSCEDVELESESVSEKGDLDYYWLDPATWHSRETSPISSHPVTWQPSKEGDRLIGRVILNKRTTMPKDSGALLGLKVVGGKMTDLGRLGAFITKVKKGSLADVVGHLRAGDEVLEWNGKPLPGATNEEVYNIILESKSEPQVEIIVSRPIGDIPRIPESSHPPLESSSSSFESQKMERPSISVISPTSPGALKDAPQVLPGQLSVKLWYDKVGHQLIVNVLQATDLPARVDGRPRNPYVKMYFLPDRSDKSKRRTKTVKKILEPKWNQTFVYSHVHRRDFRERMLEITVWDQPRVQEEESEFLGEILIELETALLDDEPHWYKLQTHDESSLPLPQPSPFMPRRHIHGESSSKKLQRSQRISDSDISDYEVDDGIGVVPPVGYRSSARESKSTTLTVPEQQRTTHHRSRSVSPHRGNDQGKPRSRLPNVPLQRSLDEIHPTRRSRSPTRHHDASRSPVDHRTRDVDSQYLSEQDSELLMLPRAKRGRSAECLHTTSELQPFLDRARSASTNCLRPDTSLHSPERERGRWSPSLDRRRPPSPRIQIQHASPENDRMHRQRSPTQSPPADTSFSSRRGRQLPQVPVRSGSIEQESGHKKLKSTIQRSTETGMAAEMRKMVRQPSRESTDGSINSYSSEGNLIFPGVRLGADSQFSDFLDGLGPAQLVGRQTLATPAMGDIQIGMEDKKGQLEVEVIRARSLTQKPGSKSTPAPYVKVYLLENGACIAKKKTRIARKTLDPLYQQSLVFDESPQGKVLQVIVWGDYGRMDHKCFMGVAQILLEELDLSSMVIGWYKLFPPSSLVDPTLTPLTRRASQSSLESSTGPPCIRS

SEQ ID NO: 11409 - protein, 1692 aa, Homo sapiens
MSSAVGPRGPRPPTVPPPMQELPDLSHLTEEERNIIMAVMDRQKEEEEKEEAMLKCVVRDMAKPAACKTPRNAENQPHQPSPRLHQQFESYKEQVRKIGEEARRYQGEHKDDAPTCGICHKTKFADGCGHLCSYCRTKFCARCGGRVSLRSNNEDKVVMWVCNLCRKQQEILTKSGAWFFGSGPQQTSQDGTLSDTATGAGSEVPREKKARLQERSRSQTPLSTAAASSQDAAPPSAPPDRSKGAEPSQQALGPEQKQASSRSRSEPPRERKKTPGLSEQNGKGALKSERKRVPKTSAQPVEGAVEERERKERRESRRLEKGRSQDYPDTPEKRDEGKAADEEKQRKEEDYQTRYRSDPNLARYPVKPPPEEQQMRMHARVSRARHERRHSDVALPRTEAGAALPEGKAGKRAPAAARASPPDSPRAYSAERTAETRAPGAKQLTNHSPPAPRHGPVPAEAPELKAQEPLRKQSRLDPSSAVLMRKAKREKVETMLRNDSLSSDQSESVRPSPPKPHRSKRGGKKRQMSVSSSEEEGVSTPEYTSCEDVELESESVSEKGDLDYYWLDPATWHSRETSPISSHPVTWQPSKEGDRLIGRVILNKRTTMPKDSGALLGLKVVGGKMTDLGRLGAFITKVKKGSLADVVGHLRAGDEVLEWNGKPLPGATNEEVYNIILESKSEPQVEIIVSRPIGDIPRIPESSHPPLESSSSSFESQKMERPSISVISPTSPGALKDAPQVLPGQLSVKLWYDKVGHQLIVNVLQATDLPARVDGRPRNPYVKMYFLPDRSDKSKRRTKTVKKILEPKWNQTFVYSHVHRRDFRERMLEITVWDQPRVQEEESEFLGEILIELETALLDDEPHWYKLQTHDESSLPLPQPSPFMPRRHIHGESSSKKLQRSQRISDSDISDYEVDDGIGVVPPVGYRSSARESKSTTLTVPEQQRTTHHRSRSVSPHRGNDQGKPRSRLPNVPLQRSLDEIHPTRRSRSPTRHHDASRSPVDHRTRDVDSQYLSEQDSELLMLPRAKRGRSAECLHTTRHLVRHYKTLPPKMPLLQSSSHWNIYSSILPAHTKTKSVTRQDISLHHECFNSTVLRFTDEILVSELQPFLDRARSASTNCLRPDTSLHSPERERGRWSPSLDRRRPPSPRIQIQHASPENDRHSRKSERSSIQKQTRKGTASDAERVLPTCLSRRGHAAPRATDQPVIRGKHPARSRSSEHSSIRTLCSMHHLVPGGSAPPSPLLTRMHRQRSPTQSPPADTSFSSRRGRQLPQVPVRSGSIEQASLVVEERTRQMKMKVHRFKQTTGSGSSQELDREQYSKYNIHKDQYRSCDNVSAKSSDSDVSDVSAISRTSSASRLSSTSFMSEQSERPRGRISSFTPKMQGRRMGTSGRSIMKSTSVSGEMYTLEHNDGSQSDTAVGTVGAGGKKRRSSLSAKVVAIVSRRSRSTSQLSQTESGHKKLKSTIQRSTETGMAAEMRKMVRQPSRESTDGSINSYSSEGNLIFPGVRLGADSQFSDFLDGLGPAQLVGRQTLATPAMGDIQIGMEDKKGQLEVEVIRARSLTQKPGSKSTPAPYVKVYLLENGACIAKKKTRIARKTLDPLYQQSLVFDESPQGKVLQVIVWGDYGRMDHKCFMGVAQILLEELDLSSMVIGWYKLFPPSSLVDPTLTPLTRRASQSSLESSTGPPCIRS

SEQ ID NO: 11410 - protein, 1481 aa, Homo sapiens
MSSAVGPRGPRPPTVPPPMQELPDLSHLTEEERNIIMAVMDRQKEEEEKEEAMLKCVVRDMAKPAACKTPRNAENQPHQPSPRLHQQFESYKEQVRKIGEEARRYQGEHKDDAPTCGICHKTKFADGCGHLCSYCRTKFCARCGGRVSLRSNNEDKVVMWVCNLCRKQQEILTKSGAWFFGSGPQQTSQDGTLSDTATGAGSEVPREKKARLQERSRSQTPLSTAAASSQDAAPPSAPPDRSKGAEPSQQALGPEQKQASSRSRSEPPRERKKTPGLSEQNGKGALKSERKRVPKTSAQPVEGAVEERERKERRESRRLEKGRSQDYPDTPEKRDEGKAADEEKQRKEEDYQTRYRSDPNLARYPVKPPPEEQQMRMHARVSRARHERRHSDVALPRTEAGAALPEGKAGKRAPAAARASPPDSPRAYSAERTAETRAPGAKQLTNHSPPAPRHGPVPAEAPELKAQEPLRKQSRLDPSSAVLMRKAKREKVETMLRNDSLSSDQSESVRPSPPKPHRSKRGGKKRQMSVSSSEEEGVSTPEYTSCEDVELESESVSEKGDLDYYWLDPATWHSRETSPISSHPVTWQPSKEGDRLIGRVILNKRTTMPKDSGALLGLKVVGGKMTDLGRLGAFITKVKKGSLADVVGHLRAGDEVLEWNGKPLPGATNEEVYNIILESKSEPQVEIIVSRPIGDIPRIPESSHPPLESSSSSFESQKMERPSISVISPTSPGALKDAPQVLPGQLSVKLWYDKVGHQLIVNVLQATDLPARVDGRPRNPYVKMYFLPDRSDKSKRRTKTVKKILEPKWNQTFVYSHVHRRDFRERMLEITVWDQPRVQEEESEFLGEILIELETALLDDEPHWYKLQTHDESSLPLPQPSPFMPRRHIHGESSSKKLQRSQRISDSDISDYEVDDGIGVVPPVGYRSSARESKSTTLTVPEQQRTTHHRSRSVSPHRGNDQGKPRSRLPNVPLQRSLDEIHPTRRSRSPTRHHDASRSPVDHRTRDVDSQYLSEQDSELLMLPRAKRGRSAECLHTTSELQPFLDRARSASTNCLRPDTSLHSPERERMHRQRSPTQSPPADTSFSSRRGRQLPQVPVRSGSIEQASLVVEERTRQMKMKVHRFKQTTGSGSSQELDREQYSKYNIHKDQYRSCDNVSAKSSDSDVSDVSAISRTSSASRLSSTSFMSEQSERPRGRISSFTPKMQGRRMGTSGRSIMKSTSVSGEMYTLEHNDGSQSDTAVGTVGAGGKKRRSSLSAKVVAIVSRRSRSTSQLSQTESGHKKLKSTIQRSTETGMAAEMRKMVRQPSRESTDGSINSYSSEGNLIFPGVRLGADSQFSDFLDGLGPAQLVGRQTLATPAMAPYVKVYLLENGACIAKKKTRIARKTLDPLYQQSLVFDESPQGKVLQVIVWGDYGRMDHKCFMGVAQILLEELDLSSMVIGWYKLFPPSSLVDPTLTPLTRRASQSSLESSTGPPCIRS

SEQ ID NO: 11411 - protein, 1475 aa, Homo sapiens
MSSAVGPRGPRPPTVPPPMQELPDLSHLTEEERNIIMAVMDRQKEEEEKEEAMLKCVVRDMAKPAACKTPRNAENQPHQPSPRLHQQFESYKEQVRKIGEEARRYQGEHKDDAPTCGICHKTKFADGCGHLCSYCRTKFCARCGGRVSLRSNNEDKVVMWVCNLCRKQQEILTKSGAWFFGSGPQQTSQDGTLSDTATGAGSEVPREKKARLQERSRSQTPLSTAAASSQDAAPPSAPPDRSKGAEPSQQALGPEQKQASSRSRSEPPRERKKTPGLSEQNGKGALKSERKRVPKTSAQPVEGAVEERERKERRESRRLEKGRSQDYPDTPEKRDEGKAADEEKQRKEEDYQTRYRSDPNLARYPVKPPPEEQQMRMHARVSRARHERRHSDVALPRTEAGAALPEGKAGKRAPAAARASPPDSPRAYSAERTAETRAPGAKQLTNHSPPAPRHGPVPAEAPELKAQEPLRKQSRLDPSSAVLMRKAKREKVETMLRNDSLSSDQSESVRPSPPKPHRSKRGGKKRQMSVSSSEEEGVSTPEYTSCEDVELESESVSEKGDLDYYWLDPATWHSRETSPISSHPVTWQPSKEGDRLIGRVILNKRTTMPKDSGALLGLKVVGGKMTDLGRLGAFITKVKKGSLADVVGHLRAGDEVLEWNGKPLPGATNEEVYNIILESKSEPQVEIIVSRPIGDIPRIPESSHPPLESSSSSFESQKMERPSISVISPTSPGALKDAPQVLPGQLSVKLWYDKVGHQLIVNVLQATDLPARVDGRPRNPYVKMYFLPDRSDKSKRRTKTVKKILEPKWNQTFVYSHVHRRDFRERMLEITVWDQPRVQEEESEFLGEILIELETALLDDEPHWYKLQTHDESSLPLPQPSPFMPRRHIHGESSSKKLQRSQRISDSDISDYEVDDGIGVVPPGYRSSARESKSTTLTVPEQQRTTHHRSRSVSPHRGNDQGKPRSRLPNVPLQRSLDEIHPTRRSRSPTRHHDASRSPVDHRTRDVDSQYLSEQDSELLMLPRAKRGRSAECLHTTRMHRQRSPTQSPPADTSFSSRRGRQLPQVPVRSGSIEQASLVVEERTRQMKMKVHRFKQTTGSGSSQELDREQYSKYNIHKDQYRSCDNVSAKSSDSDVSDVSAISRTSSASRLSSTSFMSEQSERPRGRIRRMGTSGRSIMKSTSVSGEMYTLEHNDGSQSDTAVGTVGAGGKKRRSSLSAKVVAIVSRRSRSTSQLSQTESGHKKLKSTIQRSTETGMAAEMRKMVRQPSRESTDGSINSYSSEGNLIFPGVRLGADSQFSDFLDGLGPAQLVGRQTLATPAMGDIQIGMEDKKGQLEVEVIRARSLTQKPGSKSTPAPYVKVYLLENGACIAKKKTRIARKTLDPLYQQSLVFDESPQGKVLQVIVWGDYGRMDHKCFMGVAQILLEELDLSSMVIGWYKLFPPSSLVDPTLTPLTRRASQSSLESSTGPPCIRS

SEQ ID NO: 11412 - protein, 740 aa, Homo sapiens
RPRNPYVKMYFLPDRSDKSKRRTKTVKKILEPKWNQTFVYSHVHRRDFRERMLEITVWDQPRVQEEESEFLGEILIELETALLDDEPHWYKLQTHDESSLPLPQPSPFMPRRHIHGESSSKKLQRSQRISDSDISDYEVDDGIGVVPPVGYRSSARESKSTTLTVPEQQRTTHHRSRSVSPHRGNDQGKPRSRLPNVPLQRSLDEIHPTRRSRSPTRHHDASRSPVDHRTRDVDSQYLSEQDSELLMLPRAKRGRSAECLHTTSELQPFLDRARSASTNCLRPDTSLHSPERERMHRQRSPTQSPPADTSFSSRRGRQLPQVPVRSGSIEQASLVVEERTRQMKMKVHRFKQTTGSGSSQELDREQYSKYNIHKDQYRSCDNVSAKSSDSDVSDVSAISRTSSASRLSSTSFMSEQSERPRGRISSFTPKMQGRRMGTSGRSIMKSTSVSGEMYTLEHNDGSQSDTAVGTVGAGGKKRRSSLSAKVVAIVSRRSRSTSQLSQTESGHKKLKSTIQRSTETGMAAEMRKMVRQPSRESTDGSINSYSSEGNLIFPGVRLGADSQFSDFLDGLGPAQLVGRQTLATPAMGDIQIGMEDKKGQLEVEVIRARSLTQKPGSKSTPAPYVKVYLLENGACIAKKKTRIARKTLDPLYQQSLVFDESPQGKVLQVIVWGDYGRMDHKCFMGVAQILLEELDLSSMVIGWYKLFPPSSLVDPTLTPLTRRASQSSLESSTGPPCIRS

SEQ ID NO: 11413 - protein, 610 aa, Homo sapiens
  VARIANT 1: note = misc_feature - Xaa can be any naturally occurring amino acid
XDYEVDDGIGVVPPVGYRSSARESKSTTLTVPEQQRTTHHRSRSVSPHRGNDQGKPRSRLPNVPLQRSLDEIHPTRRSRSPTRHHDASRSPVDHRTRDVDSQYLSEQDSELLMLPRAKRGRSAECLHTTRHSRKSERSSIQKQTRKGTASDAERMHRQRSPTQSPPADTSFSSRRGRQLPQVPVRSGSIEQEQEKYNSSTKASLVVEERTRQMKMKVHRFKQTTGSGSSQELDREQYSKYNIHKDQYRSCDNVSAKSSDSDVSDVSAISRTSSASRLSSTSFMSEQSERPRGRISSFTPKMQGRRMGTSGRSIMKSTSVSGEMYTLEHNDGSQSDTAVGTVGAGGKKRRSSLSAKVVAIVSRRSRSTSQLSQTESGHKKLKSTIQRSTETGMAAEMRKMVRQPSRESTDGSINSYSSEGNLIFPGVRLGADSQFSDFLDGLGPAQLVGRQTLATPAMGDIQIGMEDKKGQLEVEVIRARSLTQKPGSKSTPAPYVKVYLLENGACIAKKKTRIARKTLDPLYQQSLVFDESPQGKVLQVIVWGDYGRMDHKCFMGVAQILLEELDLSSMVIGWYKLFPPSSLVDPTLTPLTRRASQSSLESSTGPPCIRS

SEQ ID NO: 11414 - protein, 1038 aa, Homo sapiens
  VARIANT 1: note = misc_feature - Xaa can be any naturally occurring amino acid
XYSAERTAETRAPGAKQLTNHSPPAPRHGPVPAEAPELKAQEPLRKQSRLDPSSAVLMRKAKREKVETMLRNDSLSSDQSESVRPSPPKPHRSKRGGKKRQMSVSSSEEEGVSTPEYTSCEDVELESESVSEKGDLDYYWLDPATWHSRETSPISSHPVTWQPSKEGDRLIGRVILNKRTTMPKDSGALLGLKVVGGKMTDLGRLGAFITKVKKGSLADVVGHLRAGDEVLEWNGKPLPGATNEEVYNIILESKSEPQVEIIVSRPIGDIPRIPESSHPPLESSSSSFESQKMERPSISVISPTSPGALKDAPQVLPGQLSVKLWYDKVGHQLIVNVLQATDLPARVDGRPRNPYVKMYFLPDRSDKSKRRTKTVKKILEPKWNQTFVYSHVHRRDFRERMLEITVWDQPRVQEEESEFLGEILIELETALLDDEPHWYKLQTHDESSLPLPQPSPFMPRRHIHGESSSKKLQRSQRISDSDISDYEVDDGIGVVPPVGYRSSARESKSTTLTVPEQQRTTHHRSRSVSPHRGNDQGKPRSRLPNVPLQRSLDEIHPTRRSRSPTRHHDASRSPVDHRTRDVDSQYLSEQDRMHRQRSPTQSPPADTSFSSRRGRQLPQVPVRSGSIEQASLVVEERTRQMKMKVHRFKQTTGSGSSQELDREQYSKYNIHKDQYRSCDNVSAKSSDSDVSDVSAISRTSSASRLSSTSFMSEQSERPRGRISSFTPKMQGRRMGTSGRSIMKSTSVSGEMYTLEHNDGSQSDTAVGTVGAGGKKRRSSLSAKVVAIVSRRSRSTSQLSQTESGHKKLKSTIQRSTETGMAAEMRKMVRQPSRESTDGSINSYSSEGNLIFPGVRLGADSQFSDFLDGLGPAQLVGRQTLATPAMGDIQIGMEDKKGQLEVEVIRARSLTQKPGSKSTPAPYVKVYLLENGACIAKKKTRIARKTLDPLYQQSLVFDESPQGKVLQVIVWGDYGRMDHKCFMGVAQILLEELDLSSMVIGWYKLFPPSSLVDPTLTPLTRRASQSSLESSTGPPCIRS

SEQ ID NO: 11415 - protein, 151 aa, Homo sapiens
MDSAACAAAATPVPALALALAPDLAQAPLALPGLLSPSCLLSSGQEVNGSERGTCLWRPWLSSTNDSPRQMRKLVDLAAGGATAAEVTKAESKFHHPVRLFWPKSRSFDYLYSAGEILLQNFPVQATINLYEDSDSEEEEEDEEQEDEEEK

SEQ ID NO: 11416 - protein, 104 aa, Homo sapiens
MDSAACAAAATPVPALALALAPDLAQAPLALPGLLSPSCLLSSGQEVNGSERLFWPKSRSFDYLYSAGEILLQNFPVQATINLYEDSDSEEEEEDEEQEDEEEK

SEQ ID NO: 11417 - protein, 185 aa, Homo sapiens
MPRLFLFHLLEFCLLLNQFSRAVAAKWKDDVIKLCGRELVRAQIAICGMSTWSKRSLSQEDAPQTPRPVAEIVPSFINKDTETIIIMLEFIANLPPELKAALSERQPSLPELQQYVPALKDSNLSFEEFKKLIRNRQSEAADSNPSELKYLGLDTHSQKKRRPYVALFEKCCLIGCTKRSLAKYC

SEQ ID NO: 11418 - protein, 185 aa, Homo sapiens
MPRLFFFHLLGVCLLLNQFSRAVADSWMEEVIKLCGRELVRAQIAICGMSTWSKRSLSQEDAPQTPRPVAEIVPSFINKDTETINMMSEFVANLPQELKLTLSEMQPALPQLQQHVPVLKDSSLLFEEFKKLIRNRQSEAADSSPSELKYLGLDTHSRKKRQLYSALANKCCHVGCTKRSLARFC

SEQ ID NO: 11419 - protein, 68 aa, Homo sapiens
  VARIANT 1: note = misc_feature - Xaa can be any naturally occurring amino acid
XTWSKRSLSQEDAPQTPRPVAGDFIQTVSLGISPDGGKALRTGSCFTREFLGALSKLCHPSSTKIQKP

SEQ ID NO: 11420 - protein, 109 aa, Homo sapiens
MARYMLLLLLAVWVLTGELWPGAEARAAPYGVRLCGREFIRAVIFTCGGSRWRRSDILAHEAMEKNIEAPRSKFTCSRLEKLDSCSVSPAPKCTRSSINKERYLPGCRC

SEQ ID NO: 11421 - protein, 142 aa, Homo sapiens
MARYMLLLLLAVWVLTGELWPGAEARAAPYGVRLCGREFIRAVIFTCGGSRWRRSDILAHEAMGDTFPDADADEDSLAGELDEAMGSSEWLALTKSPQAFYRGRPSWQGTPGVLRGSRDVLAGLSSSCCKWGCSKSEISSLC

SEQ ID NO: 11422 - protein, 165 aa, Homo sapiens
EEKKLLVYEALEYAKRALEKNESSFASHKWYAICLSDVGDYEGIKAKIANAYIIKEHFEKAIELNPKDATSIHLMGIWCYTFAEMPWYQRRIAKMLFATPPSSTYEKALGYFHRAEQGKTYLKLHNKKLAAFWLMKAKDYPAHTEEDKQIQTEAAQLLTSFSEKN

SEQ ID NO: 11423 - protein, 108 aa, Homo sapiens
MALAARLWRLLPFRRGAAPGSRLPAGTSGSRGHCGPCRFRGFEVMGNPGTFKRGLLLSALSYLGFETYQVISQAAVVHATAKESRCVTEGRVWRCDLSSLQPLPPGFK

SEQ ID NO: 11424 - protein, 271 aa, Homo sapiens
MALAARLWRLLPFRRGAAPGSRLPAGTSGSRGHCGPCRFRGFEVMGNPGTFKRGLLLSALSYLGFETYQVISQAAVVHATAKVEEILEQADYLYESGETEKLYQLLTQYKESEDAELLWRLARASRDVAQLSRTSEEEKKLLVYEALEYAKRALEKNESSFASHKKAIELNPKDATSIHLMGIWCYTFAEMPWYQRRIAKMLFATPPSSTYEKALGYFHRAEQGKTYLKLHNKKLAAFWLMKAKDYPAHTEEDKQIQTEAAQLLTSFSEKN

SEQ ID NO: 11425 - protein, 284 aa, Homo sapiens
MALAARLWRLLPFRRGAAPGSRLPAGTSGSRGHCGPCRFRGFEVMGNPGTFKRGLLLSALSYLGFETYQVISQAAVVHATAKVEEILEQADYLYESGETEKLYQLLTQYKESEDAELLWRLARASRDVAQLSRTSEEEKKLLVYEALEYAKRALEKNESSFASHKKAIELNPKDATSIHLMGIWCYTFAEMPWYQRRIAKMLFATPPSSTYEKALGYFHRAEQVDPNFYSKNLLLLGKTYLKLHNKKLAAFWLMKAKDYPAHTEEDKQIQTEAAQLLTSFSEKN

SEQ ID NO: 11426 - protein, 314 aa, Homo sapiens
MALAARLWRLLPFRRGAAPGSRLPAGTSGSRGHCGPCRFRGFEVMGNPGTFKRGLLLSALSYLGFETYQVISQAAVVHATAKVEEILEQADYLYESGETEKLYQLLTQYKESEDAELLWRLARASRDVAQLSRTSEEEKKLLVYEALEYAKRALEKNESSFASHKWYAICLSDVGDYEGIKAKIANAYIIKEHFEKAIELNPKDATSIHLMGIWCYTFAEMPWYQRRIAKMLFATPPSSTYEKALGYFHRAEQVDPNFYSKNLLLLGKTYLKLHNKKLAAFWLMKAKDYPAHTEEDKQIQTEAAQLLTSFSEKN

SEQ ID NO: 11427 - protein, 64 aa, Homo sapiens
MGNPGTFKRGLLLSALSYLGFETYQVISQAAVVHATAKESRCVTEGRVWRCDLSSLQPLPPGFK

SEQ ID NO: 11428 - protein, 95 aa, Homo sapiens
MGNPGTFKRGLLLSALSYLGFETYQVISQAAVVHATAKVEEILEQADYLYESGETEKLYQLLTQYKESEDAELLWRLARASRDVAQLSRTSEEEK

SEQ ID NO: 11429 - protein, 248 aa, Homo sapiens
MGNPGTFKRGLLLSALSYLGFETYQVISQAAVVHATAKVEEILEQADYLYESGETEKLYQLLTQYKESEDAELLWRLARASRDVAQLSRTSEEEKKLLVYEALEYAKRALEKNESSFASHKWYAICLSDVGDYEGIKAKIANAYIIKEHFEKAIELNPKDATSIHLMGIWCYTFAEMPWYQRRIAKMLFATPPSSTYEKALGYFHRAEQGKTYLKLHNKKLAAFWLMKAKDYPAHTEEDKQVKRNRSS

SEQ ID NO: 11430 - protein, 42 aa, Homo sapiens
MGNPGTFKRGLLLSALSYLGFETYQVISQAAVVHATAKVRQY

SEQ ID NO: 11431 - protein, 159 aa, Homo sapiens
  VARIANT 1: note = misc_feature - Xaa can be any naturally occurring amino acid
XCYTFAEMPWYQRRIAKMLFATPPSSTYEKALGYFHRAEQVDPNFYSKNLLLLGKTYLKLHNKKLAAFWLMKAKDYPAHTEEDKQEPDSPRVTLVRDVSPLRVRPITENKPQESLTFSFPCSPHLIVLVWIPELTAGLRCLFPHVHVYQRFCVASPSAS

SEQ ID NO: 11432 - protein, 107 aa, Homo sapiens
  VARIANT 1: note = misc_feature - Xaa can be any naturally occurring amino acid
XKAIELNPKDATSIHLMGIWCYTFAEMPWYQRRIAKMLFATPPSSTYEKALGYFHRAEQVDPNFYSKNLLLLGKTYLKLHNKKLAAFWLMKAKDYPAHTEEDKQEII

SEQ ID NO: 11433 - protein, 151 aa, Homo sapiens
  VARIANT 1: note = misc_feature - Xaa can be any naturally occurring amino acid
XKNESSFASHKWYAICLSDVGDYEGIKAKIANAYIIKEHFEKAIELNPKDATSIHLMGIWCYTFAEMPWYQRRIAKMLFATPPSSTYEKALGYFHRAEQVDPNFYSKNLLLLGKTYLKLHNKKLAAFWLMKAKDYPAHTEEDKQVKRNRSS

SEQ ID NO: 11434 - protein, 130 aa, Homo sapiens
  VARIANT 1: note = misc_feature - Xaa can be any naturally occurring amino acid
XKTYLKLHNKKLAAFWLMKAKDYPAHTEEDKQEPDSPRVTLVRDVSPLRVRPITENKPQESLTFSFPCSPHLIVLVWIPELTAGLRCLFPHVHVYQSLKITRVFIIRIWKRSLFNQADLCLSFVFTMNSE

SEQ ID NO: 11435 - protein, 225 aa, Homo sapiens
  VARIANT 1: note = misc_feature - Xaa can be any naturally occurring amino acid
XLLSALSYLGFETYQVISQAAVVHATAKVEEILEQADYLYESGETEKLYQLLTQYKESEDAELLWRLARASRDVAQLSRTSEEEKKLLVYEALEYAKRALEKNESSFASHKWYAICLSDVGDYEGIKAKIANAYIIKEHFEKAIELNPKDATSIHLMGIWCYTFAEMPWYQRRIAKMLFATPPSSTYEKALGYFHRAEQGEEKQKQLKGQEVGLSRDVAFCWMAF

SEQ ID NO: 11436 - protein, 156 aa, Homo sapiens
MALEKSLVRLLLLVLILLVLGWVQPSLGKESRAKKFQRQHMDSDSSPSSSSTYCNQMMRRRNMTQGRCKPVNTFVHEPLVDVQNVCFQEKVTCKNGQGNCYKSNSSMHITDCRLTNGSRYPNCAYRTSPKERHIIVACEGSPYVPVHFDASVEDST

SEQ ID NO: 11437 - protein, 156 aa, Homo sapiens; identical to SEQ ID NO: 11436

SEQ ID NO: 11438 - protein, 156 aa, Homo sapiens; identical to SEQ ID NO: 11436

SEQ ID NO: 11439 - protein, 156 aa, Homo sapiens; identical to SEQ ID NO: 11436

SEQ ID NO: 11440 - protein, 116 aa, Homo sapiens
MDSDSSPSSSSTYCNQMMRRRNMTQGRCKPVNTFVHEPLVDVQNVCFQEKVTCKNGQGNCYKSNSSMHITDCRLTNGSRYPNCAYRTSPKERHIIVACEGSPYVPVHFDASVEDST

SEQ ID NO: 11441 - protein, 216 aa, Homo sapiens
MKLNLVQIFFMLLMLLLGLGMGLGLGLHMATAVLEESDQPLNEFWSSDSQDKAEATEEGDGTQTTETLVLSNKEVVQPGWPEDPILGEDEVGGNKMLRASALFQSNKDYLRLDQTDRECNDMMAHKMKEPSQSCIAQYAFIHEDLNTVKAVCNSPVIACELKGGKCHKSSRPFDLTLCELSQPDQVTPNCNYLTSVIKKHIIITCNDMKRQLPTGQ

SEQ ID NO: 11442 - protein, 244 aa, Homo sapiens
MWGAPLPRRPVWDVRSASAGPQPCLGGKMKLNLVQIFFMLLMLLLGLGMGLGLGLHMATAVLEESDQPLNEFWSSDSQDKAEATEEGDGTQTTETLVLSNKEVVQPGWPEDPILGEDEVGGNKMLRASALFQSNKDYLRLDQTDRECNDMMAHKMKEPSQSCIAQYAFIHEDLNTVKAVCNSPVIACELKGGKCHKSSRPFDLTLCELSQPDQVTPNCNYLTSVIKKHIIITCNDMKRQLPTGQ

SEQ ID NO: 11443 - protein, 136 aa, Homo sapiens
METFPLLLLSLGLVLAEASESTMKIIKEEFTDEEMQYDMAKSGQEKQTIEILMNPILLVKNTSLSMSKDDMSSTLLTFRSLHYNDPKGNSSGNDKECCNDMTVWRKVSEANGSCKWSNNFIRSSTEVMRRVHRAPS

SEQ ID NO: 11444 - protein, 143 aa, Homo sapiens
METFPLLLLSLGLVLAEASESTMKIIKEEFTDEEMQYDMAKSGQEKQTIEILMNPILLVKNTSLSMSKDDMSSTLLTFRSLHYNDPKGNSSGNDKECCNDMTVWRKVSEANGSCKWSNNFIRSSTEVMRRVHRAPSCKFVQNP

SEQ ID NO: 11445 - protein, 171 aa, Homo sapiens
METFPLLLLSLGLVLAEASESTMKIIKEEFTDEEMQYDMAKSGQEKQTIEILMNPILLVKNTSLSMSKDDMSSTLLTFRSLHYNDPKGNSSGNDKECCNDMTVWRKVSEANGSCKWSNNFIRSSTEVMRRVHRAPSCKFVQNPGISCCESLELENTVCQFTTGKQFPRCQY

SEQ ID NO: 11446 - protein, 178 aa, Homo sapiens
METFPLLLLSLGLVLAEASESTMKIIKEEFTDEEMQYDMAKSGQEKQTIEILMNPILLVKNTSLSMSKDDMSSTLLTFRSLHYNDPKGNSSGNDKECCNDMTVWRKVSEANGSCKWSNNFIRSSTEVMRRVHRAPSCKFVQNPGISCCESLELENTVCQFTTGKQFPRCQYHSVTSLE

SEQ ID NO: 11447 - protein, 178 aa, Homo sapiens; identical to SEQ ID NO: 11446

SEQ ID NO: 11448 - protein, 199 aa, Homo sapiens
METFPLLLLSLGLVLAEASESTMKIIKEEFTDEEMQYDMAKSGQEKQTIEILMNPILLVKNTSLSMSKDDMSSTLLTFRSLHYNDPKGNSSGNDKECCNDMTVWRKVSEANGSCKWSNNFIRSSTEVMRRVHRAPSCKFVQNPGISCCESLELENTVCQFTTGKQFPRCQYHSVTSLEKILTVLTGHSLMSWLVCGSKL

SEQ ID NO: 11449 - protein, 199 aa, Homo sapiens; identical to SEQ ID NO: 11448

SEQ ID NO: 11450 - protein, 199 aa, Homo sapiens; identical to SEQ ID NO: 11448

SEQ ID NO: 11451 - protein, 199 aa, Homo sapiens; identical to SEQ ID NO: 11448

SEQ ID NO: 11452 - protein, 199 aa, Homo sapiens; identical to SEQ ID NO: 11448

SEQ ID NO: 11453 - protein, 199 aa, Homo sapiens; identical to SEQ ID NO: 11448

SEQ ID NO: 11454 - protein, 147 aa, Homo sapiens
MIIMVIIFLVLLFWENEVNDEAVMSTLEHLHVDYPQNDVPVPARYCNHMIIQRVIREPDHTCKKEHVFIHERPRKINGICISPKKVACQNLSAIFCFQSETKFKMTVCQLIEGTRYPACRYHYSPTEGFVLVTCDDLRPDSFLGYVK

SEQ ID NO: 11455 - protein, 156 aa, Homo sapiens
MAPAVTRLLFLQLVLGPTLVMDIKMQIGSRNFYTLSIDYPRVNYPKGFRGYCNGLMSYMRGKMQNSDCPKIHYVIHAPWKAIQKFCKYSDSFCENYNEYCTLTQDSLPITVCSLSHQQPPTSCYYNSTLTNQKLYLLCSRKYEADPIGIAGLYSGI

SEQ ID NO: 11456 - protein, 161 aa, Homo sapiens
MVPKLFTSQICLLLLLGLLAVEGSLHVKPPQFTWAQWFETQHINMTSQQCTNAMQVINNYQRRCKNQNTFLLTTFANVVNVCGNPNMTCPSNKTRKNCHHSGSQVPLIHCNLTTPSPQNISNCRYAQTPANMFYIVACDNRDQRRDPPQYPVVPVHLDRII

SEQ ID NO: 11457 - protein, 160 aa, Homo sapiens
MVPKLFTSQICLLLLLGLMGVEGSLHARPPQFTRAQWFAIQHISLNPPRCTIAMRAINNYRWRCKNQNTFLRTTFANVVNVCGNQSIRCPHNRTLNNCHRSRFRVPLLHCDLINPGAQNISNCTYADRPGRRFYVVACDNRDPRDSPRYPVVPVHLDTTI

SEQ ID NO: 11458 - protein, 147 aa, Homo sapiens
MALQRTHSLLLLLLLTLLGLGLVQPSYGQDGMYQRFLRQHVHPEETGGSDRYCNLMMQRRKMTLYHCKRFNTFIHEDIWNIRSICSTTNIQCKNGKMNCHEGVVKVTDCRDTGSSRAPNCRYRAIASTRRVVIACEGNPQVPVHFDG

SEQ ID NO: 11459 - protein, 147 aa, Homo sapiens; identical to SEQ ID NO: 11458

SEQ ID NO: 11460 - protein, 147 aa, Homo sapiens; identical to SEQ ID NO: 11458

SEQ ID NO: 11461 - protein, 150 aa, Homo sapiens
MVLCFPLLLLLLVLWGPVCPLHAWPKRLTKAHWFEIQHIQPSPLQCNRAMSGINNYTQHCKHQNTFLHDSFQNVAAVCDLLSIVCKNRRHNCHQSSKPVNMTDCRLTSGKYPQCRYSAAAQYKFFIVACDPPQKSDPPYKLVPVHLDSIL

SEQ ID NO: 11462 - protein, 156 aa, Homo sapiens
MAPARAGFCPLLLLLLLGLWVAEIPVSAKPKGMTSSQWFKIQHMQPSPQACNSAMKNINKHTKRCKDLNTFLHEPFSSVAATCQTPKIACKNGDKNCHQSHGAVSLTMCKLTSGKHPNCRYKEKRQNKSYVVACKPPQKKDSQQFHLVPVHLDRVL

SEQ ID NO: 11463 - protein, 156 aa, Homo sapiens; identical to SEQ ID NO: 11462

SEQ ID NO: 11464 - protein, 154 aa, Homo sapiens
MAPARAGCCPLLLLLLGLWVAEVLVRAKPKDMTSSQWFKTQHVQPSPQACNSAMSIINKYTERCKDLNTFLHEPFSSVAITCQTPNIACKNSCKNCHQSHGPMSLTMGELTSGKYPNCRYKEKHLNTPYIVACDPPQQGDPGYPLVPVHLDKVV

SEQ ID NO: 11465 - protein, 205 aa, Homo sapiens
MMRTLITTHPLPLLLLPQQLLQLVQFQEVDTDFDFPEEDKKEEFEECLEKFFSTGPARPPTKEKVKRRVLIEPGMPLNHIEYCNHEIMGKNVYYKHRWVAEHYFLLMQYDELQKICYNRFVPCKNGIRKCNRSKGLVEGVYCNLTEAFEIPACKYESLYRKGYVLITCSWQNEMQKRIPHTINDLVEPPEHRSFLSEDGVFVISP

SEQ ID NO: 11466 - protein, 205 aa, Homo sapiens; identical to SEQ ID NO: 11465

SEQ ID NO: 11467 - protein, 205 aa, Homo sapiens; identical to SEQ ID NO: 11465

SEQ ID NO: 11468 - protein, 205 aa, Homo sapiens; identical to SEQ ID NO: 11465

SEQ ID NO: 11469 - protein, 205 aa, Homo sapiens; identical to SEQ ID NO: 11465

SEQ ID NO: 11470 - protein, 205 aa, Homo sapiens; identical to SEQ ID NO: 11465

SEQ ID NO: 11471 - protein, 210 aa, Homo sapiens
MSAGKMMRTLITTHPLPLLLLPQQLLQLVQFQEVDTDFDFPEEDKKEEFEECLEKFFSTGPARPPTKEKVKRRVLIEPGMPLNHIEYCNHEIMGKNVYYKHRWVAEHYFLLMQYDELQKICYNRFVPCKNGIRKCNRSKGLVEGVYCNLTEAFEIPACKYESLYRKGYVLITCSWQNEMQKRIPHTINDLVEPPEHRSFLSEDGVFVISP

SEQ ID NO: 11472 - protein, 210 aa, Homo sapiens; identical to SEQ ID NO: 11471

SEQ ID NO: 11473 - protein, 210 aa, Homo sapiens; identical to SEQ ID NO: 11471

SEQ ID NO: 11474 - protein, 210 aa, Homo sapiens; identical to SEQ ID NO: 11471

SEQ ID NO: 11475 - protein, 210 aa, Homo sapiens; identical to SEQ ID NO: 11471

SEQ ID NO: 11476 - protein, 43 aa, Homo sapiens
MSWLLFLAHRVALAALPCRRGSRGFGMFYAVRRGRKTGVFLTC

SEQ ID NO: 11477 - protein, 43 aa, Homo sapiens
MSWLLFLAHRVALAALPCRRGSRGFGMFYAVRRGRKTGVFLTW

SEQ ID NO: 11478 - protein, 286 aa, Homo sapiens
MSWLLFLAHRVALAALPCRRGSRGFGMFYAVRRGRKTGVFLTWNECRAQVDRFPAARFKKFATEDEAWAFVRKSASPEVSEGHENQHGQESEAKASKRLREPLDGDGHESAEPYAKHMKPSVEPAPPVSRDTFSYMGDFVVVYTDGCCSSNGRRRPRAGIGVYWGPGHPLNVGIRLPGRQTNQRAEIHAACKAIEQAKTQNINKLVLYTDSMFTINGITNWVQGWKKNGWKTSAGKEVINKEDFVALERLTQGMDIQWMHVPGHSGFIGNEEADRLAREGAKQSED

SEQ ID NO: 11479 - protein, 254 aa, Homo sapiens
MRPAALRGALLGCLCLALLCLGGADKRLRDNHEWKKLIMVQHWPETVCEKIQNDCRDPPDYWTIHGLWPDKSEGCNRSWPFNLEEIKDLLPEMRAYWPDVIHSFPNRSRFWKHEWEKHGTCAAQVDALNSQKKYFGRSLELYRELDLNSVLLKLGIKPSINYYQVADFKDALARVYGVIPKIQCLPPSQDEEVQTIGQIELCLTKQDQQLQNCTEPGEQPSPKQEVWLANGAAESRGLRVCEDGPVFYPPPKKT

SEQ ID NO: 11480 - protein, 256 aa, Homo sapiens
MRPAALRGALLGCLCLALLCLGGADKRLRDNHEWKKLIMVQHWPETVCEKIQNDCRDPPDYWTIHGLWPDKSEGCNRSWPFNLEEIKDLLPEMRAYWPDVIHSFPNRSRFWKHEWEKHGTCAAQVDALNSQKKYFGRSLELYRELDLNSVLLKLGIKPSINYYQVADFKDALARVYGVIPKIQCLPPSQDEEVQTIGQIELCLTKQDQQLQNCTEPGEQPSPKQEVWLANGAAESRGLRVCEDGPVFYPPPKKTKH

SEQ ID NO: 11481 - protein, 256 aa, Homo sapiens; identical to SEQ ID NO: 11480

SEQ ID NO: 11482 - protein, 238 aa, Homo sapiens
MRPAALRGALLGCLCLALLCLGGADKRLRDNHEWKKLIMVQHWPETVCEKIQNDCRDPPDYWTIHGLWPDKSEGCNRSWPFNLEEIKKNWMEITDSSLPSPSMGPAPPRWMRSTPRRSTLAEAWNSTGSWTSTGGCALPPAALPSGDLCCRPSLTAGSRGVGVDLTALQQLLHVHYSATGIIPEECSEPTKPFQIILHHDHTEWVQSIGMPIWTISSSESAIGKTRTQPACAVLSHDS

SEQ ID NO: 11483 - protein, 121 aa, Homo sapiens
MRPAALRGALLGCLCLALLCLGGADKRLRDNHEWKKLIMVQHWPETVCEKIQNDCRDPPDYWTIHGLWPDKSEGCNRSWPFNLEEIKKNWMEITDSSLPSPSTLPIINIFYSVLHLLQLMN

SEQ ID NO: 11484 - protein, 306 aa, Homo sapiens [sequence omitted]

SEQ ID NO: 11485 - protein, 71 aa, Homo sapiens
MRPAALRGALLGCLCLALLCLGGADKRLRDNHEWKKLIMVQHWPETVCEKIQNDCRDPPDYWTIHGLWQAR

SEQ ID NO: 11486 - protein, 218 aa, Homo sapiens
MVQHWPETVCEKIQNDCRDPPDYWTIHGLWPDKSEGCNRSWPFNLEEIKDLLPEMRAYWPDVIHSFPNRSRFWKHEWEKHGTCAAQVDALNSQKKYFGRSLELYRELDLNSVLLKLGIKPSINYYQVADFKDALARVYGVIPKIQCLPPSQDEEVQTIGQIELCLTKQDQQLQNCTEPGEQPSPKQEVWLANGAAESRGLRVCEDGPVFYPPPKKTKH

SEQ ID NO: 11487 - protein, 9 aa, Homo sapiens
MAGCGEIDH

SEQ ID NO: 11488 - protein, 358 aa, Homo sapiens
MAGCGEIDHSINMLPTNRKANESCSNTAPSLTVPECAICLQTCVHPVSLPCKHVFCYLCVKGASWLGKRCALCRQEIPEDFLDKPTLLSPEELKAASRGNGEYAWYYEGRNGWWQYDERTSRELEDAFSKGKKNTEMLIAGFLYVADLENMVQYRRNEHGRRRKIKRDIIDIPKKGVAGLRLDCDANTVNLARESSADGADSVSAQSGASVQPLVSSVRPLTSVDGQLTSPATPSPDASTSLEDSFAHLQLSGDNTAERSHRGEGEEDHESPSSGRVPAPDTSIEETESDASSDSEDVSAVVAQHSLTQQRLLVSNANQTVPDRSDRSGTDRSVAGGGTVSVSVRSRRPDGQCTVTEV

SEQ ID NO: 11489 - protein, 358 aa, Homo sapiens; identical to SEQ ID NO: 11488

SEQ ID NO: 11490 - protein, 14 aa, Homo sapiens
MCWGSSIFMLFSPL

SEQ ID NO: 11491 - protein, 42 aa, Homo sapiens
MCWGSSIFMLFSPLVLYDCYLYEALVITKHFFCPFLPELCKL

SEQ ID NO: 11492 - protein, 42 aa, Homo sapiens; identical to SEQ ID NO: 11491

SEQ ID NO: 11493 - protein, 42 aa, Homo sapiens; identical to SEQ ID NO: 11491

SEQ ID NO: 11494 - protein, 40 aa, Homo sapiens
MGSSIFMLFSPLVLYDCYLYEALVITKHFFCPFLPELCKL

SEQ ID NO: 11495 - protein, 40 aa, Homo sapiens; identical to SEQ ID NO: 11494

SEQ ID NO: 11496 - protein, 359 aa, Homo sapiens
MMAGCGEIDHSINMLPTNRKANESCSNTAPSLTVPECAICLQTCVHPVSLPCKHVFCYLCVKGASWLGKRCALCRQEIPEDFLDKPTLLSPEELKAASRGNGEYAWYYEGRNGWWQYDERTSRELEDAFSKGKKNTEMLIAGFLYVADLENMVQYRRNEHGRRRKIKRDIIDIPKKGVAGLRLDCDANTVNLARESSADGADSVSAQSGASVQPLVSSVRPLTSVDGQLTSPATPSPDASTSLEDSFAHLQLSGDNTAERSHRGEGEEDHESPSSGRVPAPDTSIEETESDASSDSEDVSAVVAQHSLTQQRLLVSNANQTVPDRSDRSGTDRSVAGGGTVSVSVRSRRPDGQCTVTEV

SEQ ID NO: 11497 - protein, 359 aa, Homo sapiens; identical to SEQ ID NO: 11496

SEQ ID NO: 11498 - protein, 359 aa, Homo sapiens; identical to SEQ ID NO: 11496

SEQ ID NO: 11499 - protein, 101 aa, Homo sapiens
MSFLRITPSTHSSVSSGLLRLSIFLLLSFPDSNGKAIWTAHLNITFQGTENIVAVMISNLKGMEILHSIQKGVYVTVIIEVGRMHMQWEAKSNKDRCEESY

SEQ ID NO: 11500 - protein, 305 aa, Homo sapiens
MSFLRITPSTHSSVSSGLLRLSIFLLLSFPDSNGKAIWTAHLNITFQVGNEITSELGESGVFGNHSPLERVSGVVALPEGWNQNACHPLTNFSRPKQADSWLALIERGGCTFTHKINVAAEKGANGVIIYNYQGTGSKVFPMSHQGTENIVAVMISNLKGMEILHSIQKGVYVTVIIEVGRMHMQWVSHYIMYLFTFLAATIAYFYLDCVWRLTPRVPNSFTRRRSQIKTDVKKAIDQLQLRVLKEGDEELDLNEDNCVVCFDTYKPQDVVRILTCKHFFHKACIDPWLLAHRTCPMCKCDILKT

SEQ ID NO: 11501 - protein, 396 aa, Homo sapiens
MAMSLIQACCSLALSTWLLSFCFVHLLCLDFTVAEKEEWYTAFVNITYAEPAPDPGAGAAGGGGAELHTEKTECGRYGEHSPKQDARGEVVMASSAHDRLACDPNTKFAAPTRGKNWIALIPKGNCTYRDKIRNAFLQNASAVVIFNVGSNTNETITMPHAGVEDIVAIMIPEPKGKEIVSLLERNITVTMYITIGTRNLQKYRRLGDAAKKAISKLQIRTIKKGDKETESDFDNCAVCIEGYKPNDVVRILPCRHLFHKSCVDPWLLDHRTCPMCKMNILKALGIPPNADCMDDLPTDFEGSLGGPPTNQITGASDTTVNESSVTLDPAVRTVGALQVVQDTDPIPQEGDVIFTTNSEQEPAVSSDSDISLIMAMEVGLSDVELSTDQDCEEVKS

SEQ ID NO: 11502 - protein, 405 aa, Homo sapiens
MAMSLIQACCSLALSTWLLSFCFVHLLCLDFTVAEKEEWYTAFVNITYAEPAPDPGAGAAGGGGAELHTEKTECGRYGEHSPKQDARGEVVMASSAHDRLACDPNTKFAAPTRGKNWIALIPKGNCTYRDKIRNAFLQNASAVVIFNVGSNTNETITMPHAGVEDIVAIMIPEPKGKEIVSLLERNITVTMYITIGTRNLQKYVSRTSVVFVSISFIVLMIISLAWLVFYYIQRFRYANARDRNQRRLGDAAKKAISKLQIRTIKKGDKETESDFDNCAVCIEGYKPNDVVRILPCRHLFHKSCVDPWLLDHRTCPMCKMNILKALGIPPNADCMDDLPTDFEGSLGGPPTNQITGASDTTVNESSVTLDPAVRTVGALQVVQDTDPIPQEGDVIFTTNSEFCHT

SEQ ID NO: 11503 - protein, 438 aa, Homo sapiens
MAMSLIQACCSLALSTWLLSFCFVHLLCLDFTVAEKEEWYTAFVNITYAEPAPDPGAGAAGGGGAELHTEKTECGRYGEHSPKQDARGEVVMASSAHDRLACDPNTKFAAPTRGKNWIALIPKGNCTYRDKIRNAFLQNASAVVIFNVGSNTNETITMPHAGVEDIVAIMIPEPKGKEIVSLLERNITVTMYITIGTRNLQKYVSRTSVVFVSISFIVLMIISLAWLVFYYIQRFRYANARDRNQRRLGDAAKKAISKLQIRTIKKGDKETESDFDNCAVCIEGYKPNDVVRILPCRHLFHKSCVDPWLLDHRTCPMCKMNILKALGIPPNADCMDDLPTDFEGSLGGPPTNQITGASDTTVNESSVTLDPAVRTVGALQVVQDTDPIPQEGDVIFTTNSEQEPAVSSDSDISLIMAMEVGLSDVELSTDQDCEEVKS

SEQ ID NO: 11504 - protein, 230 aa, Homo sapiens
MIPEPKGKEIVSLLERNITVTMYITIGTRNLQKYVSRTSVVFVSISFIVLMIISLAWLVFYYIQRFRYANARDRNQRRLGDAAKKAISKLQIRTIKKGDKETESDFDNCAVCIEGYKPNDVVRILPCRHLFHKSCVDPWLLDHRTCPMCKMNILKALGIPPNADCMDDLPTDFEGSLGGPPTNQITGASDTTVNESSVTLDPAVRTVGALQVVQDTDPIPQEGDVIFTTN

SEQ ID NO: 11505 - protein, 297 aa, Homo sapiens
MSSHAQPLKLISPCPYSLSSGVEDIVAIMIPEPKGKEIVSLLERNITVTMYITIGTRNLQKYVSRTSVVFVSISFIVLMIISLAWLVFYYIQRFRYANARDRNQRRLGDAAKKAISKLQIRTIKKGDKETESDFDNCAVCIEGYKPNDVVRILPCRHLFHKSCVDPWLLDHRTCPMCKMNILKALGIPPNADCMDDLPTDFEGSLGGPPTNQITGASDTTVNESSVTLDPAVRTVGALQVVQDTDPIPQEGDVIFTTNSEQEPAVSSDSDISLIMAMEVGLSDVELSTDQDCEEVKS

SEQ ID NO: 11506 - protein, 208 aa, Homo sapiens
HNVNSNELLNMVWNSEEIQQQIWIPSVFIGERSSEYLRALFVYEKGARVLLVPDNTFPLGYYLIPFTGIVGLLVLAMGAVMIARCIQHRKRLQRNRLTKEQLKQIPTHDYQKGDQYDVCAICLDEYEDGDKLRVLPCAHGEALTACPCPSATSSHQVLHLVPLCSLPQPLRGPLAHSDPEDLPHLQAACSSGSWGRRPRGRNSRARGG

SEQ ID NO: 11507 - protein, 72 aa, Homo sapiens
MDFADLPALFGATLSQEGLQGFLVEAHPDNACSPIAPPPPAPVNGSVFIALLRRFDCNFDLKVLNAQKAGYG

SEQ ID NO: 11508 - protein, 315 aa, Homo sapiens
MDFADLPALFGATLSQEGLQGFLVEAHPDNACSPIAPPPPAPVNGSVFIALLRRFDCNFDLKVLNAQKAGYGAAVVHNVNSNELLNMVWNSEEIQQQIWIPSVFIGERSSEYLRALFVYEKGARVLLVPDNTFPLGYYLIPFTGIVGLLVLAMGAVMIARCIQHRKRLQRNRLTKEQLKQIPTHDYQKGDQYDVCAICLDEYEDGDKLRVLPCAHAYHSRCVDPWLTQTRKTCPICKQPVHRGPGDEDQEEETQGQEEGDEGEPRDHPASERTPLLGSSPTLPTSFGSLAPAPLVFPGPSTDPPLSPPSSPVILV

SEQ ID NO: 11509 - protein, 133 aa, Homo sapiens
MHPAAFPLPVVVAAVLWGAAPTRGLIRAGFLVEAHPDNACSPIAPPPPAPVNGSVFIALLRRFDCNFDLKVLNAQKAGYGAAVVHNVNSNELLNMVWNSEEIQQQIWIPSVFIGERSSEYLRALFVYEKGRPV

SEQ ID NO: 11510 - protein, 97 aa, Homo sapiens
MHPAAFPLPVVVAAVLWGAAPTRGLIRATSDHNASMDFADLPALFGATLSQEGLQGFLVEAHPDNACSPIAPPPPAPVNGSVFIALLRRFDCNFDLK

SEQ ID NO: 11511 - protein, 122 aa, Homo sapiens
MHPAAFPLPVVVAAVLWGAAPTRGLIRATSDHNASMDFADLPALFGATLSQEGLQGFLVEAHPDNACSPIAPPPPAPVNGSVFIALLRRFDCNFDLKVLNAQKAGYGAAVVHNVNSNELLNM

SEQ ID NO: 11512 - protein, 350 aa, Homo sapiens [sequence omitted]

SEQ ID NO: 11513 - protein, 350 aa, Homo sapiens [sequence omitted]

SEQ ID NO: 11514 - protein, 350 aa, Homo sapiens [sequence omitted]

SEQ ID NO: 11515 - protein, 350 aa, Homo sapiens [sequence omitted]

SEQ ID NO: 11516 - protein, 74 aa, Homo sapiens
  VARIANT 1: note = misc_feature - Xaa can be any naturally occurring amino acid
XEIQQQIWIPSVFIGERSSEYLRALFVYEKGLPQPLRGPLAHSDPEDLPHLQAACSSGSWGRRPRGRNSRARGG

SEQ ID NO: 11517 - protein, 566 aa, Homo sapiens
MDLHRAAFKMENSSYLPNPLASPALMVLASTAEASRDASIPCQQPRPFGVPVSVDKDVHIPFTNGSYTFASMYHRQGGVPGTFANRDFPPSLLHLHPQFAPPNLDCTPISMLNHSGVGAFRPFASTEDRESYQSAFTPAKRLKNCHDTESPHLRFSDADGKEYDFGTQLPSSSPGSLKVDDTGKKIFAVSGLISDREASSSPEDRNDRCKKKAAALFDSQAPICPICQVLLRPSELQEHMEQELEQLAQLPSSKNSLLKDAMAPGTPKSLLLSASIKREGESPTASPHSSATDDLHHSDRYQTFLRVRANRQTRLNARIGKMKRRKQDEGQREGSCMAEDDAVDIEHENNNRFEEYEWCGQKRIRATTLLEGGFRGSGFIMCSGKENPDSDADLDVDGDDTLEYGKPQYTEADVIPCTGEEPGEAKEREALRGAVLNGGPPSTRITPEFSKWASDEMPSTSNGESSKQEAMQKTCKNSDIEKITEDSAVTTFEALKARVRELERQLSRGDRYKCLICMDSYSMPLTSIQCWHVHCEECWLRTLGAKKLCPQCNTITAPGDLRRIYL

SEQ ID NO: 11518 - protein, 566 aa, Homo sapiens; identical to SEQ ID NO: 11517

SEQ ID NO: 11519 - protein, 566 aa, Homo sapiens; identical to SEQ ID NO: 11517

SEQ ID NO: 11520 - protein, 259 aa, Homo sapiens
MPRARSGRRSRGAGGREETFLRVRANRQTRLNARIGKMKRRKQDEGQREGSCMAEDDAVDIEHENNNRFEEYEWCGQKRIRATTLLEGGFRGSGFIMCSGKENPDSDADLDVDGDDTLEYGKPQYTEADVIPCTGEEPGEAKEREALRGAVLNGGPPSTRITPEFSKWASDEMPSTSNGESSKQEAMQKTCKNSDIEKITEDSAVTTFEALKARVRELERQLSRGDRYKCLICMDSYSMPLTSIQCWHVHCEECWLRTL

SEQ ID NO: 11521 - protein, 260 aa, Homo sapiens
MPRARSGRRSRGAGGREETFLRVRANRQTRLNARIGKMKRRKQDEGQVCPLCNRPLAGSEQEMSRHVEHCLSKREGSCMAEDDAVDIEHENNNRFEEYEWCGQKRIRATTLLEGGFRGSGFIMCSGKENPDSDADLDVDGDDTLEYGKPQYTEADVIPCTGEEPGEAKEREALRGAVLNGGPPSTRITPEFSKWASDEMPSTSNGESSKQEAMQKTCKNSDIEKITEDSAVTTFEALKARVRELERQLSRGDRYKCLICM

SEQ ID NO: 11522 - protein, 45 aa, Homo sapiens
MPRARSGRRSRGAGGREEVDLSASTSQPADPTECSDWENETEEAR

SEQ ID NO: 11523 - protein, 121 aa, Homo sapiens
  VARIANT 1: note = misc_feature - Xaa can be any naturally occurring amino acid
XEGESPTASPHSSATDDLHHSDRYQTFLRVRANRQTRLNARIGKMKRRKQDEGQVCPLCNRPLAGSEQEMSRHVEHCLSKREGSCMAEDDAVDIEHENNNRFEEYEWCGQKRIRATTLLEG

SEQ ID NO: 11524 - protein, 372 aa, Homo sapiens
MKAGATSMWASCCGLLNEVMGTGAVRGQQSAFAGATGPFRFTPNPEFSTYPPAATEGPNIVCKACGLSFSVFRKKHVCCDCKKDFCSVCSVLQENLRRCSTCHLLQETAFQRPQLMRLKVKDLRQYLILRNIPIDTCREKEDLVDLVLCHHGLGSEDDMDTSSLNSSRSQTSSFFTRSFFSNYTAPSATMSSFQGELMDGDQTSRSGVPAQVQSEITSANTEDDDDDDDEDDDDEEENAEDRNPGLSKERVRASLSDLSSLDDVEGMSVRQLKEILARNFVNYSGCCEKWELVEKVNRLYKENEENQKSYGERLQLQDEEDDSLCRICMDAVIDCVLLECGHMVTCTKCGKRMSECPICRQYVVRAVHVFKS

SEQ ID NO: 11525 - protein, 507 aa, Homo sapiens
MKAGATSMWASCCGLLNEVMGTGAVRGQQSAFAGATGPFRFTPNPEFSTYPPAATEGPNIVCKACGLSFSVFRKKHVCCDCKKDFCSVCSVLQENLRRCSTCHLLQETAFQRPQLMRLKVKDLRQYLILRNIPIDTCREKEDLVDLVLCHHGLGSEDDMDTSSLNSSRSQTSSFFTRSFFSNYTAPSATMSSFQGELMDGDQTSRSGVPAQVQSEITSANTEDDDDDDDEDDDDEEENAEDRNPGLSKERVRASLSDLSSLDDVEGMSVRQLKEILARNFVNYSGCCEKWELVEKVNRLYKENEENQKSYGERLQLQDEEDDSLCRICMDAVIDCVLLECGHMVTCTKCGKRMRMSSCKGRLRNGPESSAVTIQKDQRKVSAHSSPKRVVEQLLPWKDLQNGIALWSVVPRSKWKIKALIFVKSLPSQSPPRIYILILGLTQFLQEFFFYLPKLDTHRHLGYELLTAFLGDLLAVPQVNMTDVSTAFEEGQALISDLIAVCREEIVM

SEQ ID NO: 11526 - protein, 180 aa, Homo sapiens
MKGELMDGDQTSRSGVPAQVQSEITSANTEDDDDDDDEDDDDEEENAEDRNPGLSKERVRASLSDLSSLDDVEGMSVRQLKEILARNFVNYSGCCEKWELVEKVNRLYKENEENQKSYGERLQLQDEEDDSLCRICMDAVIDCVLLECGHMVTCTKCGKRMSECPICRQYVVRAVHVFKS

SEQ ID NO: 11527 - protein, 45 aa, Homo sapiens
MKMASGCSCRMRKTTACVASAWMPSSTVSYWSVGTWLPAPSAASA

SEQ ID NO: 11528 - protein, 373 aa, Homo sapiens
MRKAGATSMWASCCGLLNEVMGTGAVRGQQSAFAGATGPFRFTPNPEFSTYPPAATEGPNIVCKACGLSFSVFRKKHVCCDCKKDFCSVCSVLQENLRRCSTCHLLQETAFQRPQLMRLKVKDLRQYLILRNIPIDTCREKEDLVDLVLCHHGLGSEDDMDTSSLNSSRSQTSSFFTRSFFSNYTAPSATMSSFQGELMDGDQTSRSGVPAQVQSEITSANTEDDDDDDDEDDDDEEENAEDRNPGLSKERVRASLSDLSSLDDVEGMSVRQLKEILARNFVNYSGCCEKWELVEKVNRLYKENEENQKSYGERLQLQDEEDDSLCRICMDAVIDCVLLECGHMVTCTKCGKRMSECPICRQYVVRAVHVFKS

SEQ ID NO: 11529 - protein, 38 aa, Homo sapiens
MWASCCGLLNEVMGTGAVRGQQSAFAGATGPFRFTPNP

SEQ ID NO: 11530 - protein, 74 aa, Homo sapiens
MWASCCGLLNEVMGTGAVRGQQSAFAGATGPFRFTPNPEFSTYPPAATEGPNIVCKACGLSFSVFRKKHVCCDC

SEQ ID NO: 11531 - protein, 163 aa, Homo sapiens
MWASCCGLLNEVMGTGAVRGQQSAFAGATGPFRFTPNPEFSTYPPAATEGPNIVCKACGLSFSVFRKKHVCCDCKKDFCSVCSVLQENLRRCSTCHLLQETAFQRPQLMRLKVKDLRQYLILRNIPIDTCREKEDLVDLVLCHHGLGSEDDMDTSSLNSSRSQ

SEQ ID NO: 11532 - protein, 175 aa, Homo sapiens
MAQVLIVGAGMTGSLCAALLRRQTSGPLYLAVWDKAEDSGGRMTTACSPHNPQCTADLGAQYITCTPHYAKKHQRFYDELLAYGVLRPLSSPIEGMVMKEGDCNFVAPQGISSIIKHYLKESGAEVYFRHRVTQINLRDDKWEVSKQTGSPEQFDLIVLTMPVPEILQLQGDITT

SEQ ID NO: 11533 - protein, 342 aa, Homo sapiens
MAQVLIVGAGMTGSLCAALLRRQTSGPLYLAVWDKAEDSGGRMTTACSPHNPQCTADLGAQYITCTPHYAKKHQRFYDELLAYGVLRPLSSPIEGMVMKEGDCNFVAPQGISSIIKHYLKESGAEVYFRHRVTQINLRDDKWEVSKQTGSPEQFDLIVLTMPVPEILQLQGDITTLISECQRQQLEAVSYSSRYALGLFYEAGTKIDVPWAGQYITSNPCIRFVSIDNKKRNIESSEIGPSLVIHTTVPFGVTYLEHSIEDVQELVFQQLENILPGLPQPIATKCQKWRHSQVTNAAANCPGQMTLHHKPFLACGGDGFTQSNFDGCITSALCVLEALKNYI

SEQ ID NO: 11534 - protein, 315 aa, Homo sapiens
MAQVLIVGAGMTGSLCAALLRRQTSGPLYLAVWDKAEDSGGRMTTACSPHNPQCTADLGAQYITCTPHYAKKHQRFYDELLAYGVLRPLSSPIEGMVMKEGDCNFVAPQGISSIIKHYLKESGAEVYFRHRVTQINLRDDKWEVSKQTGSPEQFDLIVLTMPVPEILQLQGDITTLISECQRQQLEAVSYSSRYALGLFYEAGTKIDVPWAGQYITSNPCIRFVSIDNKKRNIESSEIGPSLVIHTTVPFGVTYLEHSIEDVQELVFQQLENILPGLPQPIATKCQKWRHSQVPSAGVILGCAKSPWMMAIGFPI

SEQ ID NO: 11535 - protein, 171 aa, Homo sapiens
FRAFELLHLHLDLRAEFGPPGPGAGSRGLSGTAVLDLRCLEPEGAAELRLDSHPCLEVTAAALRRERPGSEEPPAEPVSFYTQPFSHYGQALCVSFPQPCRAAERLQVLLTYRVGEGPGVCWLAPEQTAGKKKPFVYTQGQAVLNRAFFPCFDTPAVKYKYSALIEEPGVG

SEQ ID NO: 11536 - protein, 168 aa, Homo sapiens
LIDAAKEEYNGVIEEFLATGEKLFGPYVWGRYDLLFMPPSFPFGGMENPCLTFVTPCLLAGDRSLADVIIHEISHSWFGNLVTNANWGEFWLNEGFTMYAQRRISTILFGVDPDDTYNETPYEKGFCFVSYLAHLVGDQDQFDSFLKAYVHEFKFRSILADDFLDFYL

SEQ ID NO: 11537 - protein, 650 aa, Homo sapiens
MASGEHSPGSGAARRPLHSAQAVDVASASNFRAFELLHLHLDLRAEFGPPGPGAGSRGLSGTAVLDLRCLEPEGAAELRLDSHPCLEVTAAALRRERPGSEEPPAEPVSFYTQPFSHYGQALCVSFPQPCRAAERLQVLLTYRVGEGPGVCWLAPEQTAGKKKPFVYTQGQAVLNRAFFPCFDTPAVKYKYSALIEVPDGFTAVMSASTWEKRGPNKFFFQMCQPIPSYLIALAIGDLVSAEVGPRSRVWAEPCLIDAAKEEYNGVIEEFLATGEKLFGPYVWGRYDLLFMPPSFPFGGMENPCLTFVTPCLLAGDRSLADVIIHEISHSWFGNLVTNANWGEFWLNEGFTMYAQRRISTILFGAAYTCLEAATGRALLRQHMDITGEENPLNKLRVKIEPGVDPDDTYNETPYEKGFCFVSYLAHLVGDQDQFDSFLKAYVHEFKFRSILADDFLDFYLEYFPELKKKRVDIIPGFEFDRWLNTPGWPPYLPDLSPGDSLMKPAEELAQLWAAEELDMKAIEAVAISPWKTYQLVYFLDKILQKSPLPPGNVKKLGDTYPSISNARNAELRLRWGQIVLKNDHQEDFWKVKEFLHNQGKQKYTLPLYHAMMGGSEVAQTLAKETFASTASQLHSNVVNYVQQIVAPKGS

SEQ ID NO: 11538 - protein, 611 aa, Homo sapiens
MASGEHSPGSGAARRPLHSAQAVDVASASNFRAFELLHLHLDLRAEFGPPGPGAGSRGLSGTAVLDLRCLEPEGAAELRLDSHPCLEVTAAALRRERPGSEEPPAEPVSFYTQPFSHYGQALCVSFPQPCRAAERLQVLLTYRVGEGPGVCWLAPEQTAGKKKPFVYTQGQAVLNRAFFPCFDTPAVKYKYSALIEVPDGFTAVMSASTWEKRGPNKFFFQMCQPIPSYLIALAIGDLVSAEVGPRYDLLFMPPSFPFGGMENPCLTFVTPCLLAGDRSLADVIIHEISHSWFGNLVTNANWGEFWLNEGFTMYAQRRISTILFGAAYTCLEAATGRALLRQHMDITGEENPLNKLRVKIEPGVDPDDTYNETPYEKGFCFVSYLAHLVGDQDQFDSFLKAYVHEFKFRSILADDFLDFYLEYFPELKKKRVDIIPGFEFDRWLNTPGWPPYLPDLSPGDSLMKPAEELAQLWAAEELDMKAIEAVAISPWKTYQLVYFLDKILQKSPLPPGNVKKLGDTYPSISNARNAELRLRWGQIVLKNDHQEDFWKVKEFLHNQGKQKYTLPLYHAMMGGSEVAQTLAKETFASTASQLHSNVVNYVQQIVAPKGS

SEQ ID NO: 11539 - protein, 344 aa, Homo sapiens
MTCCSCTSLSALLDFWAEVCWLAPEQTAGKKKPFVYTQGQAVLNRAFFPCFDTPAVKYKYSALIEVPDGFTAVMSASTWEKRGPNKFFFQMCQPIPSYLIALAIGDLVSAEVGPRSRVWAEPCLIDAAKEEYNGVIEEFLATGEKLFGPYVWGRYDLLFMPPSFPFGGMENPCLTFVTPCLLAGDRSLADVIIHEISHSWFGNLVTNANWGEFWLNEGFTMYAQRRISTILFGAAYTCLEAATGRALLRQHMDITGEENPLNKLRVKIEPGVDPDDTYNETPYEKGFCFVSYLAHLVGDQDQFDSFLKAYVHEFKFRSILADDFLDFYLEYFPELKKKRVDIIP

SEQ ID NO: 11540 - protein, 151 aa, Homo sapiens
  VARIANT 1: note = misc_feature - Xaa can be any naturally occurring amino acid
XPGAGSRGLSGTAVLDLRCLEPEGAAELRLDSHPCLEVTAAALRRERPGSEEPPAEPVSFYTQPFSHYGQALCVSFPQPCRAAERLQVLLTYRVGEGPGVCWLAPEQTAGKKKPFVYTQGQAVLNRAFFPCFDTPAVKYKYSALIEEPGVG

SEQ ID NO: 11541 - protein, 937 aa, Homo sapiens
MHRPRRRGTRPPLLALLAALLLAARGAAAQETELSVSAELVPTSSWNISSELNKDSYLTLDEPMNNITTSLGQTAELHCKVSGNPPPTIRWFKNDAPVVQEPRRLSFRSTIYGSRLRIRNLDTTDTGYFQCVATNGKEVVSSTGVLFVKFGPPPTASPGYSDEYEEDGFCQPYRGIACARFIGNRTVYMESLHMQGEIENQITAAFTMIGTSSHLSDKCSQFAIPSLCHYAFPYCDETSSVPKPRDLCRDECEILENVLCQTEYIFARSNPMILMRLKLPNCEDLPQPESPEAANCIRIGIPMADPINKNHKCYNSTGVDYRGTVSVTKSGRQCQPWNSQYPHTHTFTALRFPELNGGHSYCRNPGNQKEAPWCFTLDENFKSDLCDIPACDSKDSKEKNKMEILYILVPSVAIPLAIALLFFFICVCRNNQKSSSAPVQRQPKHVRGQNVEMSMLNAYKPKSKAKELPLSAVRFMEELGECAFGKIYKGHLYLPGMDHAQLVAIKTLKDYNNPQQWTEFQQEASLMAELHHPNIVCLLGAVTQEQPVCMLFEYINQGDLHEFLIMRSPHSDVGCSSDEDGTVKSSLDHGDFLHIAIQIAAGMEYLSSHFFVHKDLAARNILIGEQLHVKISDLGLSREIYSADYYRVQSKSLLPIRWMPPEAIMYGKFSSDSDIWSFGVVLWEIFSFGLQPYYGFSNQEVIEMVRKRQLLPCSEDCPPRMYSLMTECWNEIPSRRPRFKDIHVRLRSWEGLSSHTSSTTPSGGNATTQTTSLSASPVSNLSNPRYPNYMFPSQGITPQGQIAGFIGPPIPQNQRFIPINGYPIPPGYAAFPAAHYQPTGPPRVIQHCPPPKSRSPSSASGSTSTGHVTSLPSSGSNQEANIPLLPHMSIPNHPGGMGITVFGNKSQKPYKIDSKQASLLGDANIHGHTESMISAEL

SEQ ID NO: 11542 - protein, 393 aa, Homo sapiens
MHRPRRRGTRPPLLALLAALLLAARGAAAQETELSVSAELVPTSSWNISSELNKDSYLTLDEPMNNITTSLGQTAELHCKVSGNPPPTIRWFKNDAPVVQEPRRLSFRSTIYGSRLRIRNLDTTDTGYFQCVATNGKEVVSSTGVLFVKFGPPPTASPGYSDEYEEDGFCQPYRGIACARFIGNRTVYMESLHMQGEIENQITAAFTMIGTSSHLSDKCSQFAIPSLCHYAFPYCDETSSVPKPRDLCRDECEILENVLCQTEYIFARSNPMILMRLKLPNCEDLPQPESPEAANCIRIGIPMADPINKNHKCYNSTGVDYRGTVSVTKSGRQCQPWNSQYPHTHTFTALRFPELNGGHSYCRNPGNQKEAPWCFTLDENFKSDLCDIPACGK

SEQ ID NO: 11543 - protein, 882 aa, Homo sapiens
SYLTLDEPMNNITTSLGQTAELHCKVSGNPPPTIRWFKNDAPVVQEPRRLSFRSTIYGSRLRIRNLDTTDTGYFQCVATNGKEVVSSTGVLFVKFGPPPTASPGYSDEYEEDGFCQPYRGIACARFIGNRTVYMESLHMQGEIENQITAAFTMIGTSSHLSDKCSQFAIPSLCHYAFPYCDETSSVPKPRDLCRDECEILENVLCQTEYIFARSNPMILMRLKLPNCEDLPQPESPEAANCIRIGIPMADPINKNHKCYNSTGVDYRGTVSVTKSGRQCQPWNSQYPHTHTFTALRFPELNGGHSYCRNPGNQKEAPWCFTLDENFKSDLCDIPACDSKDSKEKNKMEILYILVPSVAIPLAIALLFFFICVCRNNQKSSSAPVQRQPKHVRGQNVEMSMLNAYKPKSKAKELPLSAVRFMEELGECAFGKIYKGHLYLPGMDHAQLVAIKTLKDYNNPQQWTEFQQEASLMAELHHPNIVCLLGAVTQEQPVCMLFEYINQGDLHEFLIMRSPHSDVGCSSDEDGTVKSSLDHGDFLHIAIQIAAGMEYLSSHFFVHKDLAARNILIGEQLHVKISDLGLSREIYSADYYRVQSKSLLPIRWMPPEAIMYGKFSSDSDIWSFGVVLWEIFSFGLQPYYGFSNQEVIEMVRKRQLLPCSEDCPPRMYSLMTECWNEIPSRRPRFKDIHVRLRSWEGLSSHTSSTTPSGGNATTQTTSLSASPVSNLSNPRYPNYMFPSQGITPQGQIAGFIGPPIPQNQRFIPINGYPIPPGYAAFPAAHYQPTGPPRVIQHCPPPKSRSPSSASGSTSTGHVTSLPSSGSNQEANIPLLPHMSIPNHPGGMGITVFGNKSQKPYKIDSKQASLLGDANIHGHTESMISAEL

SEQ ID NO: 11544 - protein, 180 aa, Homo sapiens
MSHRKFSAPRHGSLGFLPRKRSSRHRGKVKSFPKDDPSKPVHLTAFLGYKAGMTHIVREVDRPGSKVNKKEVVEAVTIVETPPMVVVGIVGYVETPRGLRTFKTVFAEHISDECKRRFYKNCSARLCPMSSIQAPLAGGKGSLEAGNELHPHAVPVCLPLTPRRGDEGLHLVPSPTLLCS

SEQ ID NO: 11545 - protein, 403 aa, Homo sapiens
MSHRKFSAPRHGSLGFLPRKRSSRHRGKVKSFPKDDPSKPVHLTAFLGYKAGMTHIVREVDRPGSKVNKKEVVEAVTIVETPPMVVVGIVGYVETPRGLRTFKTVFAEHISDECKRRFYKNWHKSKKKAFTKYCKKWQDEDGKKQLEKDFSSMKKYCQVIRVIAHTQMRLLPLRQKKAHLMEIQVNGGTVAEKLDWARERLEQQVPVNQVFGQDEMIDVIGVTKGKGYKGVTSRWHTKKLPRKTHRGLRKVACIGAWHPARVAFSVARAGQKGYHHRTEINKKIYKIGQGYLIKDGKLIKNNASTDYDLSDKSINPLGGFVHYGEVTNDFVMLKGCVVGTKKRVLTLRKSLLVQTKRRALEKIDLKFIDTTSKFGHGRFQTMEEKKAFMGPLKKDRIAKEEGA

SEQ ID NO: 11546 - protein, 351 aa, Homo sapiens
MTHIVREVDRPGSKVNKKEVVEAVTIVETPPMVVVGIVGYVETPRGLRTFKTVFAEHISDECKRRFYKNWHKSKKKAFTKYCKKWQDEDGKKQLEKDFSSMKKYCQVIRVIAHTQMRLLPLRQKKAHLMEIQVNGGTVAEKLDWARERLEQQVPVNQVFGQDEMIDVIGVTKGKGYKGVTSRWHTKKLPRKTHRGLRKVACIGAWHPARVAFSVARAGQKGYHHRTEINKKIYKIGQGYLIKDGKLIKNNASTDYDLSDKSINPLGGFVHYGEVTNDFVMLKGCVVGTKKRVLTLRKSLLVQTKRRALEKIDLKFIDTTSKFGHGRFQTMEEKKAFMGPLKKDRIAKEEGA

SEQ ID NO: 11547 - protein, 272 aa, Homo sapiens
MTHIVREVDRPGSKVNKKEVVEAVTIVETPPMVVVGIVGYVETPRGLRTFKTVFAEHISDECKRRFYKNWHKSKKKAFTKYCKKWQDEDGKKQLEKDFSSMKKYCQVIRVIAHTQMRLLPLRQKKAHLMEIQVNGGTVAEKLDWARERLEQQVPVNQVFGQDEMIDVIGVTKGKGYKGVTSRWHTKKLPRKTHRGLRKVACIGAWHPARVAFSVARAGQKGYHHRTEINKKIYKIGQGYLIKDGKLIKNNASTDYDLSDKSINPLGGFVHYG

SEQ ID NO: 11548 - protein, 305 aa, Homo sapiens
QMMNLLTGGQKLCADCHVLIWLCGVLWPSHRKFSAPRHGSLGFLPRKRSSRHRGKVKSFPKDDPSKPVHLTAFLGYKAGMTHIVREVDRPGSKVNKKEVVEAVTIVETPPMVVVGIVGYVETPRGLRTFKTVFAEHISDECKRRFYKNWHKSKKKAFTKYCKKWQDEDGKKQLEKDFSSMKKYCQVIRVIAHTQMRLLPLRQKKAHLMEIQVNGGTVAEKLDWARERLEQQVPVNQVFGQDEMIDVIGVTKGKGYKGVTSRWHTKKLPRKTHRGLRKVACIGAWHPARVAFSVARAGQKGYHHRT

SEQ ID NO: 11549 - protein, 261 aa, Homo sapiens
  VARIANT 1: note = misc_feature - Xaa can be any naturally occurring amino acid
XVCVVMAAVSLSPASARLNPRRIAAIPSWPAPGSHRKFSAPRHGSLGFLPRKRSSRHRGKVKSFPKDDPSKPVHLTAFLGYKAGMTHIVREVDRPGSKVNKKEVVEAVTIVETPPMVVVGIVGYVETPRGLRTFKTVFAEHISDECKRRFYKNWHKSKKKAFTKYCKKWQDEDGKKQLEKDFSSMKKYCQVIRVIAHTQMRLLPLRQKKAHLMEIQVNGGTVAEKLDWARERLEQQVPVNQVFGQDEMIDVIGVTKGKGYK

SEQ ID NO: 11550 - protein, 115 aa, Homo sapiens
MRYVASYLLAALGGNSSPSAKDIKKILDSVGIEADDDRLNKVISELNGKNIEDVIAQGIGKLASVPAGGAVAVSAAPGSAAPAAGSAPAAAEEKKDEKKEESEESDDDMGFGLFD

SEQ ID NO: 11551 - protein, 115 aa, Homo sapiens; identical to SEQ ID NO: 11550

SEQ ID NO: 11552 - protein, 92 aa, Homo sapiens
  VARIANT 1: note = misc_feature - Xaa can be any naturally occurring amino acid
XGGNSSPSAKDIKKILDSVISELNGKNIEDVIAQGIGKLASVPAGGAVAVSAAPGSAAPAAGSAPAAAEEKKDEKKEESEESDDDMGFGLFD

SEQ ID NO: 11553 - protein, 138 aa, Homo sapiens
ELDTSERKIEFDSASGTYTLYLIIGDATLKNPILWNVADVVIKFPEEEAPSTVLSQNLFTPKQEIQWIRIGANVSNFTFAPSTIIFHLGHAAMLGLMYVYWTQLNMFQTLKYLAILGSVTFLAGNRMLAQQAVKRTAH

SEQ ID NO: 11554 - protein, 615 aa, Homo sapiens
MAPPGSSTVFLLALTIIASTWALTPTHYLTKHDVERLKASLDRPFTNLESAFYSIVGLSSLGAQVPDAKISISNETKDLLLAAVSEDSSVTQIYHAVAALSGFGLPLASQEALSALTARLSKEETVLATVQALQTASHLSQQADLRSIVEEIEDLVARLDELGGVYLQFEEGLETTALFVAATYKLMDHVGTEPSIKEDQVIQLMNAIFSKKNFESLSEAFSVASAAAVLSHNRYHVPVVVVPEGSASDTHEQAILRLQVTNVLSQPLTQATVKLEHAKSVASRATVLQKTSFTPVGDVFELNFMNVKFSSGYYDFLVEVEGDNRYIANTVELRVKISTEVGITNVDLSTVDKDQSIAPKTTRVTYPAKAKGTFIADSHQNFALFFQLVDVNTGAELTPHQTFVRLHNQKTGQEVVFVAEPDNKNVYKFELDTSERKIEFDSASGTYTLYLIIGDATLKNPILWNVADVVIKFPEEEAPSTVLSQNLFTPKQEIQHLFREPEKRPPTVVSNTFTALILSPLLLLFALWIRIGANVSNFTFAPSTIIFHLGHAAMLGLMYVYWTQLNMFQTLKYLAILGSVTFLAGNRMLAQQAVKRIAAEQSSRLAKYRTLRTAH

SEQ ID NO: 11555 - protein, 345 aa, Homo sapiens
MAPPGSSTVFLLALTIIASTWALTPTHYLTKHDVERLKASLDRPFTNLESAFYSIVGLSSLGAQVPDAKKACTYIRSNLDPSNVDSLFYAAQASQALSGCEISISNETKDLLLAAVSEDSSVTQIYHAVAALSGFGLPLASQEALSALTARLSKEETVLARVWSTVLESRSLFSKRTVQALQTASHLSQQADLRSIVEEIEDLVARLDELGGVYLQFEEGLETTALFVAATYKLMDHVGTEPSIKEDQVIQLMNAIFSKKNFESLSEAFSVASAAAVLSHNRYHVPVVVVPEGSASDTHEQAILRLQVTNVLSQPLTQATVKLEHAKSVASRATVLQKTSFTPVG

SEQ ID NO: 11556 - protein, 631 aa, Homo sapiens
MAPPGSSTVFLLALTIIASTWALTPTHYLTKHDVERLKASLDRPFTNLESAFYSIVGLSSLGAQVPDAKKACTYIRSNLDPSNVDSLFYAAQASQALSGCEISISNETKDLLLAAVSEDSSVTQIYHAVAALSGFGLPLASQEALSALTARLSKEETVLATVQALQTASHLSQQADLRSIVEEIEDLVARLDELGGVYLQFEEGLETTALFVAATYKLMDHVGTEPSIKEDQVIQLMNAIFSKKNFESLSEAFSVASAAAVLSHNRYHVPVVVVPEGSASDTHEQAILRLQVTNVLSQPLTQATVKLEHAKSVASRATVLQKTSFTPVGDVFELNFMNVKFSSGYYDFLVEVEGDNRYIANTVELRVKISTEVGITNVDLSTVDKDQSIAPKTTRVTYPAKAKGTFIADSHQNFALFFQLVDVNTGAELTPHQTFVRLHNQKTGQEVVFVAEPDNKNVYKFELDTSERKIEFDSASGTYTLYLIIGDATLKNPILWNVADVVIKFPEEEAPSTVLSQNLFTPKQEIQHLFREPEKRPPTVVSNTFTALILSPLLLLFALWIRIGANVSNFTFAPSTIIFHLGHAAMLGLMYVYWTQLNMFQTLKYLAILGSVTFLAGNRMLAQQAVKRTAH

SEQ ID NO: 11557 - protein, 162 aa, Homo sapiens
MQRKHVPTSDLTLIPAMWIPSSTLPRPARPSQDVRTVQALQTASHLSQQADLRSIVEEIEDLVARLDELGGVYLQFEEGLETTALFVAATYKLMDHVGTEPSIKEDQVIQLMNAIFSKKNFESLSEAFSVASAAAVLSHNRYHVPVVVVPEGSASDTHEQAI

SEQ ID NO: 11558 - protein, 167 aa, Homo sapiens
MQRTVQALQTASHLSQQADLRSIVEEIEDLVARLDELGGVYLQFEEGLETTALFVAATYKLMDHVGTEPSIKEDQVIQLMNAIFSKKNFESLSEAFSVASAAAVLSHNRYHVPVVVVPEGSASDTHEQAILRLQVTNVLSQPLTQATVKLEHAKSVASRATVLQKTS

SEQ ID NO: 11559 - protein, 147 aa, Homo sapiens
  VARIANT 1: note = misc_feature - Xaa can be any naturally occurring amino acid
XGTYTLYLIIGDATLKNPILWNVADVVIKFPEEEAPSTVLSQNLFTPKQEIQHLFREPEKRPPTVVSNTFTALILSPLLLLFALWIRIGANVSNFTFAPSTIIFHLGHAEQHISSRRKMEILKTECQEKESRTIHSMRRKMEKKNFI

SEQ ID NO: 11560 - protein, 100 aa, Homo sapiens
MCQRCGLKLIVIICFFVQLARDLLHPSLEEEKKKHKKKRLVQSPNSYFMDVKCPGCYKITTVFSHAQTVVLCVGCSTVLCQPTGGKARLTEGCSFRRKQH

SEQ ID NO: 11561 - protein, 52 aa, Homo sapiens
MDVKCPGCYKITTVFSHAQTVVLCVGCSTVLCQPTGGKARLTEGCSFRRKQH

SEQ ID NO: 11562 - protein, 52 aa, Homo sapiens; identical to SEQ ID NO: 11561

SEQ ID NO: 11563 - protein, 52 aa, Homo sapiens; identical to SEQ ID NO: 11561

SEQ ID NO: 11564 - protein, 84 aa, Homo sapiens
MPLARDLLHPSLEEEKKKHKKKRLVQSPNSYFMDVKCPGCYKITTVFSHAQTVVLCVGCSTVLCQPTGGKARLTEGCSFRRKQH

SEQ ID NO: 11565 - protein, 97 aa, Homo sapiens
MPLARDLLHPSLEEEKKKHKKKRLVQSPNSYFMDVKCPGCYKITTVFSHAQTVVLCVGCSTVLCQPTGGKARLTEGISFGILQPSDEIDDYKCLYLH

SEQ ID NO: 11566 - protein, 224 aa, Homo sapiens
MSRKIEGFLLLLLFGYEATLGLSSTEDEGEDPWYQKACKCDCQGGPNALWSAGATSLDCIPECPYHKPLGFESGEVTPDQITCSNPEQYVGWYSSWTANKARLNSQGFGCAWLSKFQDSSQWLQIDLKEIKVISGILTQGRCDIDEWMTKYSVQYRTDERLNWIYYKDQTGNNRVFYGNSDRTSTVQNLLRPPIISRFIRLIPLGWHVRIAIRMELLECVSKCA

SEQ ID NO: 11567 - protein, 702 aa, Homo sapiens
ATAAAAAAVMAPPGCPGSCPNFAVVCSFLERYGPLLDLPELPFPELERVLQAPPPDVGNGEVPKELVELHLKLMRKIGKSVTADRWEKYLIKICQEFNSTWAWEMEKKGYLEMSVECKLALLKYLCECQFDDNLKFKNIINEEDADTMRLQPIGRDKDGLMYWYQLDQDHNVRMYIEEQDDQDGSSWKCIVRNRNELAETLALLKAQIDPVLLKNSSQQDNSSRESPSLEDEETKKEEETPKQEEQKESEKMKSEEQPMDLENRSTANVLEETTVKKEKEDEKELVKLPVIVKLEKPLPENEEKKIIKEESDSFKENVKPIKVEVKECRADPKDTKSSMEKPVAQEPERIEFGGNIKSSHEITEKSTEETEKLKNDQQAKIPLKKREIKLSDDFDSPVKGPLCKSVTPTKEFLKDEIKQEEETCKRISTITALGHEGKQLVNGEVSDERVAPNFKTEPIETKFYETKEESYSPSKDRNIITEGNGTESLNSVITSMKTGELEKETAPLRKDADSSISVLEIHSQKAQIEEPDPPEMETSLDSSEMAKDLSSKTALSSTESCTMKGEEKSPKTKKDKRPPILECLEKLEKSKKTFLDKDAQRLSPIPEEVPKSTLESEKPGSPEAAETSPPSNIIDHCEKLASEKEVVECQSTSTVGGQSVKKVDLETLKEDSEFTKVEMDNLDNAQTSGIEEPSETKGSMQK

SEQ ID NO: 11568 - protein, 276 aa, Homo sapiens
EPCKKCGLPNHPELILLCDSCDSGYHTACLRPPLMIIPDGEWFCPPCQHKLLCEKLEEQLQDLDVALKKKERAERRKERLVYVGISIENIIPPQEPDFSEDQEEKKKDSKKSKANLLERRSTRTRKCISYRFDEFDEAIDEAIEDDIKEADGGGVGRGKDISTITGHRGKDISTILDEERKENKRPQRAAAARRKKRRRLNDLDSDSNLDEEESEDEFKISDGSQDEFVVSDENPDESEEDPPSNDDSDTDFCSRRLRRHPSRPMRQSRRLRRKTP

SEQ ID NO: 11569 - protein, 803 aa, Homo sapiens
ETLALLKAQIDPVLLKNSSQQDNSSRESPSLEDEETKKEEETPKQEEQKESEKMKSEEQPMDLENRSTANVLEETTVKKEKEDEKELVKLPVIVKLEKPLPENEEKKIIKEESDSFKENVKPIKVEVKECRADPKDTKSSMEKPVAQEPERIEFGGNIKSSHEITEKSTEETEKLKNDQQAKIPLKKREIKLSDDFDSPVKGPLCKSVTPTKEFLKDEIKQEEETCKRISTITALGHEGKQLVNGEVSDERVAPNFKTEPIETKFYETKEESYSPSKDRNIITEGNGTESLNSVITSMKTGELEKETAPLRKDADSSISVLEIHSQKAQIEEPDPPEMETSLDSSEMAKDLSSKTALSSTESCTMKGEEKSPKTKKDKRPPILECLEKLEKSKKTFLDKDAQRLSPIPEEVPKSTLESEKPGSPEAAETSPPSNIIDHCEKLASEKEVVECQSTSTVGGQSVKKVDLETLKEDSEFTKVEMDNLDNAQTSGIEEPSETKGSMQKSKFKYKLVPEEETTASENTEITSERQKEGIKLTIRISSRKKKPDSPPKVLEPENKQEKTEKEEEKTNVGRTLRRSPRISRPTAKVAEIRDQKADKKRGEGEDEVEEESTALQKTDKKEILKKSEKDTNSKVSKVKPKGKVRWTGSRTRGRWKYSSNDESEGSGSEKSSAASEEEEEKESEEAILADDDEPCKKCGLPNHPELILLCDSCDSGYHTACLRPPLMIIPDGEWFCPPCQHKLLCEKLEEQLQDLDVALKKKERAERRKERLVYVGISIENIIPPQEPDFSEDQEEKKKDSKK

SEQ ID NO: 11570 - protein, 1441 aa, Homo sapiens
MATAAAAAAVMAPPGCPGSCPNFAVVCSFLERYGPLLDLPELPFPELERVLQAPPPDVGNGEVPKELVELHLKLMRKIGKSVTADRWEKYLIKICQEFNSTWAWEMEKKGYLEMSVECKLALLKYLCECQFDDNLKFKNIINEEDADTMRLQPIGRDKDGLMYWYQLDQDHNVRMYIEEQDDQDGSSWKCIVRNRNELAETLALLKAQIDPVLLKNSSQQDNSSRESPSLEDEETKKEEETPKQEEQKESEKMKSEEQPMDLENRSTANVLEETTVKKEKEDEKELVKLPVIVKLEKPLPENEEKKIIKEESDSFKENVKPIKVEVKECRADPKDTKSSMEKPVAQEPERIEFGGNIKSSHEITEKSTEETEKLKNDQQAKIPLKKREIKLSDDFDSPVKGPLCKSVTPTKEFLKDEIKQEEETCKRISTITALGHEGKQLVNGEVSDERVAPNFKTEPIETKFYETKEESYSPSKDRNIITEGNGTESLNSVITSMKTGELEKETAPLRKDADSSISVLEIHSQKAQIEEPDPPEMETSLDSSEMAKDLSSKTALSSTESCTMKGEEKSPKTKKDKRPPILECLEKLEKSKKTFLDKDAQRLSPIPEEVPKSTLESEKPGSPEAAETSPPSNIIDHCEKLASEKEVVECQSTSTVGGQSVKKVDLETLKEDSEFTKVEMDNLDNAQTSGIEEPSETKGSMQKSKFKYKLVPEEETTASENTEITSERQKEGIKLTIRISSRKKKPDSPPKVLEPENKQEKTEKEEEKTNVGRTLRRSPRISRPTAKVAEIRDQKADKKRGEGEDEVEEESTALQKTDKKEILKKSEKDTNSKVSKVKPKGKVRWTGSRTRGRWKYSSNDESEGSGSEKSSAASEEEEEKESEEAILADDDEPCKKCGLPNHPELILLCDSCDSGYHTACLRPPLMIIPDGEWFCPPCQHKLLCEKLEEQLQDLDVALKKKERAERRKERLVYVGISIENIIPPQEPDFSEDQEEKKKDSKKSKANLLERRSTRTRKCISYRFDEFDEAIDEAIEDDIKEADGGGVGRGKDISTITGHRGKDISTILDEERKENKRPQRAAAARRKKRRRLNDLDSDSNLDEEESEDEFKISDGSQDEFVVSDENPDESEEDPPSNDDSDTDFCSRRLRRHPSRPMRQSRRLRRKTPKKKYSDDDEEEESEENSRDSESDFSDDFSDDFVETRRRRSRRNQKRQINYKEDSESDGSQKSLRRGKEIRRVHKRRLSSSESEESYLSKNSEDDELAKESKRSVRKRGRSTDEYSEADEEEEEEEGKPSRKRLHRIETDEEESCDNAHGDANQPARDSQPRVLPSEQESTKKPYRIESDEEEDFENVGKVGSPLDYSLVDLPSTNGQSPGKAIENLIGKPTEKSQTPKDNSTASASLASNGTSGGQEAGAPEEEEDELLRVTDLVDYVCNSEQL

SEQ ID NO: 11571 - protein, 1189 aa, Homo sapiens
MKSEEQPMDLENRSTANVLEETTVKKEKEDEKELVKLPVIVKLEKPLPENEEKKIIKEESDSFKENVKPIKVEVKECRADPKDTKSSMEKPVAQEPERIEFGGNIKSSHEITEKSTEETEKLKNDQQAKIPLKKREIKLSDDFDSPVKGPLCKSVTPTKEFLKDEIKQEEETCKRISTITALGHEGKQLVNGEVSDERVAPNFKTEPIETKFYETKEESYSPSKDRNIITEGNGTESLNSVITSMKTGELEKETAPLRKDADSSISVLEIHSQKAQIEEPDPPEMETSLDSSEMAKDLSSKTALSSTESCTMKGEEKSPKTKKDKRPPILECLEKLEKSKKTFLDKDAQRLSPIPEEVPKSTLESEKPGSPEAAETSPPSNIIDHCEKLASEKEVVECQSTSTVGGQSVKKVDLETLKEDSEFTKVEMDNLDNAQTSGIEEPSETKGSMQKSKFKYKLVPEEETTASENTEITSERQKEGIKLTIRISSRKKKPDSPPKVLEPENKQEKTEKEEEKTNVGRTLRRSPRISRPTAKVAEIRDQKADKKRGEGEDEVEEESTALQKTDKKEILKKSEKDTNSKVSKVKPKGKVRWTGSRTRGRWKYSSNDESEGSGSEKSSAASEEEEEKESEEAILADDDEPCKKCGLPNHPELILLCDSCDSGYHTACLRPPLMIIPDGEWFCPPCQHKLLCEKLEEQLQDLDVALKKKERAERRKERLVYVGISIENIIPPQEPDFSEDQEEKKKDSKKSKANLLERRSTRTRKCISYRFDEFDEAIDEAIEDDIKEADGGGVGRGKDISTITGHRGKDISTILDEERKENKRPQRAAAARRKKRRRLNDLDSDSNLDEEESEDEFKISDGSQDEFVVSDENPDESEEDPPSNDDSDTDFCSRRLRRHPSRPMRQSRRLRRKTPKKKYSDDDEEEESEENSRDSESDFSDDFSDDFVETRRRRSRRNQKRQINYKEDSESDGSQKSLRRGKEIRRVHKRRLSSSESEESYLSKNSEDDELAKESKRSVRKRGRSTDEYSEADEEEEEEEGKPSRKRLHRIETDEEESCDNAHGDANQPARDSQPRVLPSEQESTKKPYRIESDEEEDFENVGKVGSPLDYSLVDLPSTNGQSPGKAIENLIGKPTEKSQTPKDNSTASASLASNGTSGGQEAGAPEEEEDELLRVTDLVDYVCNSEQL

SEQ ID NO: 11572 - protein, 202 aa, Homo sapiens
  VARIANT 1: note = misc_feature - Xaa can be any naturally occurring amino acid
XAAAAAAVMAPPGCPGSCPNFAVVCSFLERYGPLLDLPELPFPELERVLQAPPPDVGNGEVPKELVELHLKLMRKIGKSVTADRWEKYLIKYLCECQFDDNLKFKNIINEEDADTMRLQPIGRDKDGLMYWYQLDQDHNVRMYIEEQDDQDGSSWKCIVRNRNELAETLALLKAQIDPVLLKNSSQQDNSSRESPSLEDEET

SEQ ID NO: 11573 - protein, 165 aa, Homo sapiens
  VARIANT 1: note = misc_feature - Xaa can be any naturally occurring amino acid
XKPDSPPKVLEPENKQEKTEKEEEKTNVGRTLRRSPRISRPTAKVAEIRDQKADKKRGEGEDEVEEESTALQKTDKKEILKKSEKDTNSKVKPKGKVRWTGSRTRGRWKYSSNDESEGSGSEKSSAASEEEEEKESEEAILADDDEPCKKCGLPNHPELILLCDS

SEQ ID NO: 11574 - protein, 236 aa, Homo sapiens
MIFRVSAEGSQACAKGCELCSEVNGCLKCSPKLFILLERNDIRQVGVCLPSCPPGYFDARNPDMNKCIKCKIEHCEACFSHNFCTKCKEGLYLHKGRCYPACPEGSSAANGTMECSSPAQCEMSEWSPWGPCSKKQQLCGFRRGSEERTRRVLHAPVGDHAACSDTKETRRCTVRRVPCPEGQKRRKGGQGRRENANRNLARKESKEAGAGSRRRKGQQQQQQQGTVGPLTSAGPA

SEQ ID NO: 11575 - protein, 263 aa, Homo sapiens
MRLGLCVVALVLSWTHLTISSRGIKGKRQRRISAEGSQACAKGCELCSEVNGCLKCSPKLFILLERNDIRQVGVCLPSCPPGYFDARNPDMNKCIKCKIEHCEACFSHNFCTKCKEGLYLHKGRCYPACPEGSSAANGTMECSSPAQCEMSEWSPWGPCSKKQQLCGFRRGSEERTRRVLHAPVGDHAACSDTKETRRCTVRRVPCPEGQKRRKGGQGRRENANRNLARKESKEAGAGSRRRKGQQQQQQQGTVGPLTSAGPA

SEQ ID NO: 11576 - protein, 263 aa, Homo sapiens; identical to SEQ ID NO: 11575

SEQ ID NO: 11577 - protein, 200 aa, Homo sapiens
MRLGLCVVALVLSWTHLTISSRGIKGKRQRRISAEGSQACAKGCELCSEVNGCLKCSPKLFILLERNDIRQVGVCLPSCPPGYFDARNPDMNKCIKCKIEHCEACFSHNFCTKCKEGLYLHKGRCYPACPEGSSAANGTMECSSPGQKRRKGGQGRRENANRNLARKESKEAGAGSRRRKGQQQQQQQGTVGPLTSAGPA

SEQ ID NO: 11578 - protein, 89 aa, Homo sapiens
MDLASYVSNPICKGCLSCSKDNGCSRCQQKLFFFLRREGMRQYGECLHSCPSGYYGHRAPDMNRCARCRIENCDSCFSKDFCTKCKVGF

SEQ ID NO: 11579 - protein, 77 aa, Homo sapiens
MQFRLFSFALIILNCMDYSHCQGNRWRRSKRASYVSNPICKGCLSCSKDNGCSRCQQKLFFFLRREGMRQYGECLHS

SEQ ID NO: 11580 - protein, 121 aa, Homo sapiens
MQFRLFSFALIILNCMDYSHCQGNRWRRSKRASYVSNPICKGCLSCSKDNGCSRCQQKLFFFLRREGMRQYGECLHSCPSGYYGHRAPDMNRCARCRIENCDSCFSKDFCTKCKVGFYLHR

SEQ ID NO: 11581 - protein, 243 aa, Homo sapiens
MQFRLFSFALIILNCMDYSHCQGNRWRRSKRASYVSNPICKGCLSCSKDNGCSRCQQKLFFFLRREGMRQYGECLHSCPSGYYGHRAPDMNRCARCRIENCDSCFSKDFCTKCKVGFYLHRGRCFDECPDGFAPLEETMECVEGCEVGHWSEWGTCSRNNRTCGFKWGLETRTRQIVKKPVKDTILCPTIAESRRCKMTMRHCPGGKRTPKAKEKRNKKKKRKLIERAQEQHSVFLATDRANQ

SEQ ID NO: 11582 - protein, 179 aa, Homo sapiens
MQFRLFSFALIILNCMDYSHCQGNRWRRSKRGCRIENCDSCFSKDFCTKCKVGFYLHRGRCFDECPDGFAPLEETMECVGCEVGHWSEWGTCSRNNRTCGFKWGLETRTRQIVKKPVKDTILCPTIAESRRCKMTMRHCPGGKRTPKAKEKRNKKKKRKLIERAQEQHSVFLATDRANQ

SEQ ID NO: 11583 - protein, 89 aa, Homo sapiens
MRQYGECLHSCPSGYYGHRAPDMNRCARCRIENCDSCFSKDFCTKCKVGFYLHRGRCFDECPDGFAPLEETMECVEGCEVGHWSEWGTC

SEQ ID NO: 11584 - protein, 168 aa, Homo sapiens
MRQYGECLHSCPSGYYGHRAPDMNRCARCRIENCDSCFSKDFCTKCKVGFYLHRGRCFDECPDGFAPLEETMECVEGCEVGHWSEWGTCSRNNRTCGFKWGLETRTRQIVKKPVKDTILCPTIAESRRCKMTMRHCPGGKRTPKAKEKRNKKKKRKLIERAQEQHSVF

SEQ ID NO: 11585 - protein, 176 aa, Homo sapiens
MRQYGECLHSCPSGYYGHRAPDMNRCARCRIENCDSCFSKDFCTKCKVGFYLHRGRCFDECPDGFAPLEETMECVEGCEVGHWSEWGTCSRNNRTCGFKWGLETRTRQIVKKPVKDTILCPTIAESRRCKMTMRHCPGGKRTPKAKEKRNKKKKRKLIERAQEQHSVFLATDRANQ

SEQ ID NO: 11586 - protein, 272 aa, Homo sapiens
MHLRLISWLFIILNFMEYIGSQNASRGRRQRRMHPNVSQGCQGGCATCSDYNGCLSCKPRLFFALERIGMKQIGVCLSSCPSGYYGTRYPDINKCTKCKADCDTCFNKNFCTKCKSGFYLHLGKCLDNCPEGLEANNHTMECVSIVHCEVSEWNPWSPCTKKGKTCGFKRGTETRVREIIQHPSAKGNLCPPTNETRKCTVQRKKCQKGERGKKGRERKRKKPNKGESKEAIPDSKSLESSKEIPEQRENKQQQKKRKVQDKQKSVSVSTVH

SEQ ID NO: 11587 - protein, 292 aa, Homo sapiens
MHLRLISWLFIILNFMEYIGSQNASRGRRQRRMHPNVSQGCQGGCATCSDYNGCLSCKPRLFFALERIGMKQIGVCLSSCPSGYYGTRYPDINKCTKCKADCDTCFNKNFCTKCKSGFYLHLGKCLDNCPEGLEANNHTMECVSIVHCEVSEWNPWSPCTKKGKTCGFKRGTETRVREIIQHPSAKGNLCPPTNETRKCTVQRKKCQKGERGKKGRERKRKKPNKGESKEAIPDSKSLESSKEIPEQRENKQQQKKRKVQDKQKSGIEVTLAEGLTSVSQRTQPTPCRRRYL

SEQ ID NO: 11588 - protein, 172 aa, Homo sapiens
MRAPLCLLLLVAHAVDMLALNRRKKQVGTGLGGNCTGCIICSEENGCSTCQQRLFLFIRREGIRQYGKCLHDCPPGYFGIRGQEVNRCKKCGATCESCFSQDFCIRCKRQFYLYKGKCLPTCPPGTLAHQNTRECQERSPGQKKGRKDRRPRKDRKLDRRLDVRPRQPGLQP

SEQ ID NO: 11589 - protein, 234 aa, Homo sapiens
MRAPLCLLLLVAHAVDMLALNRRKKQVGTGLGGNCTGCIICSEENGCSTCQQRLFLFIRREGIRQYGKCLHDCPPGYFGIRGQEVNRCKKCGATCESCFSQDFCIRCKRQFYLYKGKCLPTCPPGTLAHQNTRECQGECELGPWGGWSPCTHNGKTCGSAWGLESRVREAGRAGHEEAATCQVLSESRKCPIQRPCPGERSPGQKKGRKDRRPRKDRKLDRRLDVRPRQPGLQP

SEQ ID NO: 11590 - protein, 45 aa, Homo sapiens
MITLHEMAETDEGWLDVVQSLIRVIPLEDPLGPAVITLLLDECPL

SEQ ID NO: 11591 - protein, 172 aa, Homo sapiens
MIVFGWAVFLASRSLGQGLLLTLEEHIAHFLGTGGAATTMGNSCICRDDSGTDDSVDTQQQQAENSAVPTADTRSQPRDPVRPPRRGRGPHEPRRKKQNVDGLVLDTLAVIRTLVDKRKLQNEDAYIGPCFHKSSTGIVVSLPGISLSDQEPPYSMITLHEMAETDEGWLDV

SEQ ID NO: 11592 - protein, 121 aa, Homo sapiens
MIVFGWAVFLASRSLGQGLLLTLEEHIAHFLGTGGAATTMGNSCICRDDSGTDDSVDTQQQQAENSAVPTADTRSQPRDPVRPPRRGRGPHEPRRKKQNVDGLVLDTLAVIRTLVDNDQEP

SEQ ID NO: 11593 - protein, 146 aa, Homo sapiens
MIVFGWAVFLASRSLGQGLLLTLEEHIAHFLGTGGAATTMGNSCICRDDSGTDDSVDTQQQQAENSAVPTADTRSQPRDPVRPPRRGRGPHEPRRKKQNVDGLVLDTLAVIRTLVDNDQEPPYSMITLHEMAETDEGWLDVVQSLI

SEQ ID NO: 11594 - protein, 146 aa, Homo sapiens; identical to SEQ ID NO: 11593

SEQ ID NO: 11595 - protein, 576 aa, Homo sapiens
MIVFGWAVFLASRSLGQGLLLTLEEHIAHFLGTGGAATTMGNSCICRDDSGTDDSVDTQQQQAENSAVPTADTRSQPRDPVRPPRRGRGPHEPRRKKQNVDGLVLDTLAVIRTLVDNDQEPPYSMITLHEMAETDEGWLDVVQSLIRVIPLEDPLGPAVITLLLDECPLPTKDALQKLTEILNLNGEVACQDSSHPAKHRNTSAVLGCLAEKLAGPASIGLLSPGILEYLLQCLKLQSHPTVMLFALIALEKFAQTSENKLTISESSISDRLVTLESWANDPDYLKRQVGFCAQWSLDNLFLKEGRQLTYEKVNLSSIRAMLNSNDVSEYLKISPHGLEARCDASSFESVRCTFCVDAGVWYYEVTVVTSGVMQIGWATRDSKFLNHEGYGIGDDEYSCAYDGCRQLIWYNARSKPHIHPCWKEGDTVGFLLDLNEKQMIFFLNGNQLPPEKQVFSSTVSGFFAAASFMSYQQCEFNFGAKPFKYPPSMKFSTFNDYAFLTAEEKIILPRHRRLALLKQVSIRENCCSLCCDEVADTQLKPCGHSDLCMDCALQLETCPLCRKEIVSRIRQISHIS

SEQ ID NO: 11596 - protein, 576 aa, Homo sapiens; identical to SEQ ID NO: 11595

SEQ ID NO: 11597 - protein, 239 aa, Homo sapiens
MARQLLSQVDMDCRVHMRPIGLTWVLQLTLAWILLEACGGSRPLQARSQQHHGLAADLGKGKLHLAGPCCPSEMDTTETSGPGNHPERCGVPSPECESFLEHLQRALRSRFRLRLLGVRQAQPLCEELCQAWFANCEDDITCGPTWLPLSEKRGCEPSCLTYGQTFADGTDLCRSALGHALPVAAPGARHCFNISISAVPRPRPGRRGREAPSRRSRSPRTSILDAAGSGSGSGSGSGP

SEQ ID NO: 11598 - protein, 191 aa, Homo sapiens
MARQVDMDCRVHMRPIGLTWVLQLTLAWILLEACGGSRPLQARSQQHHGLAADLGKGKLHLAGPCCPSEMDTTETSGPGNHPERCGVPSPECESFLEHLQRALRSRFRLRLLGVRQAQPLCEELCQAWFANCEDDITCGPTWLPLSEKRGCEPSCLTYGQTFADGTDLCRSALGHALPVAAPGARHCFNIS

SEQ ID NO: 11599 - protein, 70 aa, Homo sapiens
MDCRVHMRPIGLTWVLQLTLAWILLEACGGSRPLQARSQQHHGLAADLGKGKLHLAEMDTTETSGPGNHP

SEQ ID NO: 11600 - protein, 193 aa, Homo sapiens
MDCRVHMRPIGLTWVLQLTLAWILLEACGGSRPLQARSQQHHGLAADLGKGKLHLAEMDTTETSGPGNHPERCGVPSPECESFLEHLQRALRSRFRLRLLGVRQAQPLCEELCQAWFANCEDDITCGPTWLPLSEKRGCEPSCLTYGQTFADGTDLCRSALGHALPVAAPGARHCFNISISAVPRPRPGRRGR

SEQ ID NO: 11601 - protein, 174 aa, Homo sapiens
MDCRVHMRPIGLTWVLQLTLAWILLEACGGSRPLQARSQQHHGLAADLGKGKLHLAGDPQASVPKPYLNIQDPSSQGSPLPGPCCPSEMDTTETSGPGNHPERCGVPSPECESFLEHLQRALRSRFRLRLLGVRQAQPLCEELCQAWFANCEDDITCGPTWLPLSEKRGCEPSC

SEQ ID NO: 11602 - protein, 130 aa, Homo sapiens
MDCRVHMRPIGLTWVLQLTLAWILLEACGGSRPLQARSQQHHGLAADLGKGKLHLAGPCCPSEMDTTETSGPGNHPERCGVPSPECESFLEHLQRALRSRFRLRLLGVRQAQPLCEELCQAWFANCEDDI

SEQ ID NO: 11603 - protein, 186 aa, Homo sapiens
MDCRVHMRPIGLTWVLQLTLAWILLEACGGSRPLQARSQQHHGLAADLGKGKLHLAGPCCPSEMDTTETSGPGNHPERCGVPSPECESFLEHLQRALRSRFRLRLLGVRQAQPLCEELCQAWFANCEDDITCGPTWLPLSEKRGCEPSCLTYGQTFADGTDLCRSALGHALPVAAPGARHCFNISI

SEQ ID NO: 11604 - protein, 214 aa, Homo sapiens
MDCRVHMRPIGLTWVLQLTLAWILLEACGGSRPLQARSQQHHGLAADLGKGKLHLAGPCCPSEMDTTETSGPGNHPERCGVPSPECESFLEHLQRALRSRFRLRLLGVRQAQPLCEELCQAWFANCEDDITCGPTWLPLSEKRGCEPSCLTYGQTFADGTDLCRSALGHALPVAAPGARHCFNISISAVPRPRPGRRGREAPSRRSRSPRTSIL

SEQ ID NO: 11605 - protein, 229 aa, Homo sapiens
MDCRVHMRPIGLTWVLQLTLAWILLEACGGSRPLQARSQQHHGLAADLGKGKLHLAGPCCPSEMDTTETSGPGNHPERCGVPSPECESFLEHLQRALRSRFRLRLLGVRQAQPLCEELCQAWFANCEDDITCGPTWLPLSEKRGCEPSCLTYGQTFADGTDLCRSALGHALPVAAPGARHCFNISISAVPRPRPGRRGREAPSRRSRSPRTSILDAAGSGSGSGSGSGP

SEQ ID NO: 11606 - protein, 229 aa, Homo sapiens; identical to SEQ ID NO: 11605

SEQ ID NO: 11607 - protein, 114 aa, Homo sapiens [sequence omitted]

SEQ ID NO: 11608 - protein, 205 aa, Homo sapiens
MDEALETQLKTSRGRFSATESLPTLELLSQVDMDCRVHMRPIGLTWVLQLTLAWILLEACGGSRPLQARSQQHHGLAADLGKGKLHLAGPCCPSEMDTTETSGPGNHPERCGVPSPECESFLEHLQRALRSRFRLRLLGVRQAQPLCEELCQAWFANCEDDITCGPTWLPLSEKRGCEPSCLTYGQAGVQWRDLSSMQPPPPGFK

SEQ ID NO: 11609 - protein, 261 aa, Homo sapiens
MDEALETQLKTSRGRFSATESLPTLELLSQVDMDCRVHMRPIGLTWVLQLTLAWILLEACGGSRPLQARSQQHHGLAADLGKGKLHLAGPCCPSEMDTTETSGPGNHPERCGVPSPECESFLEHLQRALRSRFRLRLLGVRQAQPLCEELCQAWFANCEDDITCGPTWLPLSEKRGCEPSCLTYGQTFADGTDLCRSALGHALPVAAPGARHCFNISISAVPRPRPGRRGREAPSRRSRSPRTSILDAAGSGSGSGSGSGP

SEQ ID NO: 11610 - protein, 441 aa, Homo sapiens
MLRKGCCVELLLLLVAAELPLGGGCPRDCVCYPAPMTVSCQAHNFAAIPEGIPVDSERVFLQNNRIGLLQPGHFSPAMVTLWIYSNNITYIHPSTFEGFVHLEELDLGDNRQLRTLAPETFQGLVKLHALYLYKCGLSALPAGVFGGLHSLQYLYLQDNHIEYLQDDIFVDLVNLSHLFLHGNKLWSLGPGTFRGLVNLDRLLLHENQLQWVHHKAFHDLRRLTTLFLFNNSLSELQGECLAPLGALEFLRLNGNPWDCGCRARSLWEWLQRFRGSSSAVPCVSPGLRHGQDLKLLRAEDFRNCTGPASPHQIKSHTLTTTDRAARKEHHSPHGPTRSKGHPHGPRPGHRKPGKNCTNPRNRNQISKAGAGKQAPELPDYAPDYQHKFSFDIMPTARPKRKGKCARRTPIRAPSGVQQASSASSLGASLLAWTLGLAVTLR

SEQ ID NO: 11611 - protein, 420 aa, Homo sapiens
MLPGLRRLLQAPASACLLLMLLALPLAAPSCPMLCTCYSSPPTVSCQANNFSSVPLSLPPSTQRLFLQNNLIRTLRPGTFGSNLLTLWLFSNNLSTIYPGTFRHLQALEELDLGDNRHLRSLEPDTFQGLERLQSLHLYRCQLSSLPGNIFRGLVSLQYLYLQENSLLHLQDDLFADLANLSHLFLHGNRLRLLTEHVFRGLGSLDRLLLHGNRLQGVHRAAFRGLSRLTILYLFNNSLASLPGEALADLPSLEFLRLNANPWACDCRARPLWAWFQRARVSSSDVTCATPPERQGRDLRALREADFQACPPAAPTRPGSRARGNSSSNHLYGVAEAGAPPADPSTLYRDLPAEDSRGRQGGDAPTEDDYWGGYGGEDQRGEQMCPGAACQAPPDSRGPALSAGLPSPLLCLLLLVPHHL

SEQ ID NO: 11612 - protein, 204 aa, Homo sapiens
MLPGLRRLLQAPASACLLLMLLALPLAAPSCPMLCTCYSSPPTVSCQANNFSSVPLSLPPSTQRLFLQNNLIRTLRPGTFGSNLLTLWLFSNNLSTIYPGTFRHLQALEELDLGDNRHLRSLEPDTFQGLERLQSLHLYRCQLSSLPGNIFRGLVSLQYLYLQENSLLHLQGKKEKGKSLLCSWRMDALKMEGIPVIVIHCYYY

SEQ ID NO: 11613 - protein, 193 aa, Homo sapiens
MLPGLRRLLQAPASACLLLMLLALPLAAPSCPMLCTCYSSPPTVSCQANNFSSVPLSLPPSTQRLFLQNNLIRTLRPGTFGSNLLTLWLFSNNLSTIYPGTFRHLQALEELDLGDNRHLRSLEPDTFQGLERLQSLHLYRCQLSSLPGNIFRGLVSLQYLYLQENSLLHLQGPLPKGLCSCFSHPPSSLPTSR

SEQ ID NO: 11614 - protein, 122 aa, Homo sapiens
MKLLTGLVFCSLVLGVSSRSFFSFLGEAFDGARDMWRAYSDMREANYIGSDKYFHARGNYDAAKRGPGGAWAAEVITDARENIQRFFGHGAEDSLADQAANEWGRSGKDPNHFRPAGLPEKY

SEQ ID NO: 11615 - protein, 122 aa, Homo sapiens; identical to SEQ ID NO: 11614

SEQ ID NO: 11616 - protein, 122 aa, Homo sapiens; identical to SEQ ID NO: 11614

SEQ ID NO: 11617 - protein, 80 aa, Homo sapiens
MKLLTGLVFCSLVLSVSSRSFFSFLGEAFDGARDMWRAYSDMREANYIGSDKYFHARGNYDAAKRGPGGAWAAEVIREDD

SEQ ID NO: 11618 - protein, 113 aa, Homo sapiens
MKLLTGLVFCSLVLSVSSRSFFSFLGEAFDGARDMWRAYSDMREANYIGSDKYFHARGNYDAAKRGPGGAWAAEVIRLKCHGMIMAHCNLDLPGLKRSSHFSLLNNWDCRCAP

SEQ ID NO: 11619 - protein, 83 aa, Homo sapiens
MKLLTGLVFCSLVLSVSSRSFFSFLGEAFDGARDMWRAYSDMREANYIGSDKYFHARGNYDAAKRGPGGAWAAEVISLFSAEL

SEQ ID NO: 11620 - protein, 122 aa, Homo sapiens
MKLLTGLVFCSLVLSVSSRSFFSFLGEAFDGARDMWRAYSDMREANYIGSDKYFHARGNYDAAKRGPGGAWAAEVISNARENIQRLTGRGAEDSLADQAANKWGRSGRDPNHFRPAGLPEKY

SEQ ID NO: 11621 - protein, 122 aa, Homo sapiens; identical to SEQ ID NO: 11620

SEQ ID NO: 11622 - protein, 122 aa, Homo sapiens; identical to SEQ ID NO: 11620

SEQ ID NO: 11623 - protein, 130 aa, Homo sapiens
MRLFTGIVFCSLVMGVTSESWRSFFKEALQGVGDMGRAYWDIMISNHQNSNRYLYARGNYDAAQRGPGGVWAAKLISRSRVYLQGLIDCYLFGNSSTVLEDSKSNEKAEEWGRSGKDPDRFRPDGLPKKY

SEQ ID NO: 11624 - protein, 220 aa, Homo sapiens
MNGFTPDEMSRGGDAAAAVAAVVAAAAAAASAGNGTGAGTGAEVPGAGAVSAAGPPGAAGPGPGQLCCLREDGERCGRAAGNASFSKRIQKSISQKKVKIELDKSARHLYICDYHKNLIQSVRNRRKRKGSDDDGGDSPVQDIDTPEVDLYQLQVNTLRRYKRHFKLPTRPGLNKAQLVEIVGCHFRSIPVNEKDTLTYFIYSVKNDKNKSDLKVDSGVH

SEQ ID NO: 11625 - protein, 51 aa, Homo sapiens
MSFIFEWIYNGFSSVLQFLGLYKKSGKLVFLGLDNAGKTTLLHMLKDDRLG

SEQ ID NO: 11626 - protein, 198 aa, Homo sapiens
MSFIFEWIYNGFSSVLQFLGLYKKSGKLVFLGLDNAGKTTLLHMLKDDRLGQHVPTLHPTSEELTIAGMTFTTFDLGGHEQARRVWKNYLPAINGIVFLVDCADHSRLVESKVELNALMTDETISNVPILILGNKIDRTDAISEEKLREIFGLYGQTTGKGNVTLKELNARPMEVFMCSVLKRQGYGEGFRWLSQYID

SEQ ID NO: 11627 - protein, 198 aa, Homo sapiens; identical to SEQ ID NO: 11626

SEQ ID NO: 11628 - protein, 198 aa, Homo sapiens; identical to SEQ ID NO: 11626

SEQ ID NO: 11629 - protein, 198 aa, Homo sapiens; identical to SEQ ID NO: 11626

SEQ ID NO: 11630 - protein, 121 aa, Homo sapiens
MSFIFEWIYNGFSSVLQFLGLYKKSGKLVFLGLDNAGKTTLLHMLKDDRLGQHVPTLHPTSEELTIAGMTFTTFDLGGHEQARRVWKNYLPAINGIVFLVDCADHSRLVESKVELNVCFVL

SEQ ID NO: 11631 - protein, 115 aa, Homo sapiens
  VARIANT 1: note = misc_feature - Xaa can be any naturally occurring amino acid
XSFWWTVQIILASWNPKLSLMIYCSSLLTLAPNALMTDETISNVPILILGNKIDRTDAISEEKLREIFGLYGQTTGKGNVTLKELNARPMEVFMCSVLKRQGYGEGFRWLSQYID

SEQ ID NO: 11632 - protein, 213 aa, Homo sapiens
IAYKFGKTVVSCEGYESSEDQYVLRGSCGLEYNLDYTELGLQKLKESGKQHGFASFSDYYYKWSSADSCNMSGLITIVVLLGIAFVVYKLFLSDGQYSPPPYSEYPPFSHRYQRFTNSAGPPPPGFKSEFTGPQNTGHGATSGFGSAFTGQQGYENSGPGFWTGLGTGGILGYLFGSNRAYSPLHGGSGSYSVCSNSDTKTRTASGYGGTRRR

SEQ ID NO: 11633 - protein, 36 aa, Homo sapiens
MAAACGPGAAGYCLLLGLHLFLLTAGPALGWIPSHS

SEQ ID NO: 11634 - protein, 147 aa, Homo sapiens
MAAACGPGAAGYCLLLGLHLFLLTAGPALGWNDPALTLHYDRYTTSRRLDPIPQLKCVGGTAGCDSYTPKVIQCQNKGWDGYDVQWECKTDLDIAYKFGKTVVSCEGYESSEDQYVLRGSCGLEYNLDYTELGLQKLKESGKQHGFA

SEQ ID NO: 11635 - protein, 339 aa, Homo sapiens
MAAACGPGAAGYCLLLGLHLFLLTAGPALGWNDPDRMLLRDVKALTLHYDRYTTSRRLDPIPQLKCVGGTAGCDSYTPKVIQCQNKGWDGYDVQWECKTDLDIAYKFGKTVVSCEGYESSEDQYVLRGSCGLEYNLDYTELGLQKLKESGKQHGFASFSDYYYKWSSADSCNMSGLITIVVLLGIAFVVYKLFLSDGQYSPPPYSEYPPFSHRYQRFTNSAGPPPPGFKSEFTGPQNTGHGATSGFGSAFTGQQGYENSGPGFWTGLGTGGILGYLFGSNRAATPFSDSWYYPSYPPSYPGTWNRAYSPLHGGSGSYSVCSNSDTKTRTASGYGGTRRR

SEQ ID NO: 11636 - protein, 40 aa, Homo sapiens
MAAACGPGAAGYCLLLGLHLFLLTAGPALGWNDPECCCGM

SEQ ID NO: 11637 - protein, 37 aa, Homo sapiens
MAAACGPGAAGYCLLLGLHLFLLTAGPALGWNDPVGM

SEQ ID NO: 11638 - protein, 37 aa, Homo sapiens; identical to SEQ ID NO: 11637

SEQ ID NO: 11639 - protein, 202 aa, Homo sapiens
MLLRDVKALTLHYDRYTTSRRLDPIPQLKCVGGTAGCDSYTPKVIQCQNKGWDGYDVQWECKTDLDIAYKFGKTVVSCEGYESSEDQYVLRGSCGLEYNLDYTELGLQKLKESGKQHGFASFSDYYYKWSSADSCNMSGLITIVVLLGIAFVVYKLFLSDGQYSPPPYSEYPPFSHRYQRFTNSAGPPPPGFKSEFTGPQNT

SEQ ID NO: 11640 - protein, 167 aa, Homo sapiens
MSGLITIVVLLGIAFVVYKLFLSDGQYSPPPYSEYPPFSHRYQRFTNSAGPPPPGFKSEFTGPQNTGHGATSGFGSAFTGQQGYENSGPGFWTGLGTGGILGYLFGSNRAATPFSDSWYYPSYPPSYPGTWNRAYSPLHGGSGSYSVCSNSDTKTRTASGYGGTRRR

SEQ ID NO: 11641 - protein, 347 aa, Homo sapiens
  VARIANT 1: note = misc_feature - Xaa can be any naturally occurring amino acid
XAAACGPGAAGYCLLLGLHLFLLTAGPALGWNDPDRMLLRDVKALTLHYDRYTTSRRLDPIPQLKCVGGTAGCDSYTPKVIQCQNKGWDGYDVQWECKTDLDIAYKFGKTVVSCEGYESSEDQYVLRGSCGLEYNLDYTELGLQKLKESGKQHGFASFSDYYYKWSSADSCNMSGLITIVVLLGIAFVVYKLFLSDGQYSPPPYSEYPPFSHRYQRFTNSAGPPPPGFKSEFTGPQNTGHGATSGFGSAFTGQQGYENSGPGFWTGLGTGGILGYLFGSNRAATPFSDSWYYPSYPPSYPGTWNRAYSPLHGGSGSYSDMVVPGDDKVESWSQTLDAEILDFSSLSL

SEQ ID NO: 11642 - protein, 218 aa, Homo sapiens
  VARIANT 1: note = misc_feature - Xaa can be any naturally occurring amino acid
XLEYNLDYTELGLQKLKESGKQHGFASFSDYYYKWSSADSCNMSGLITIVVLLGIAFVVYKLFLSDGQYSPPPYSEYPPFSHRYQRFTNSAGPPPPGFKSEFTGPQNTGHGATSGFGSAFTGQQGYENSGPGFWTGLGTGGILGYLFGSNRAATPFSDSWYYPSYPPSYPGTWNRAYSPLHGGSGSYSVCSNSDTKTRTASGKSKKYKFLLPRSKVQK

SEQ ID NO: 11643 - protein, 724 aa, Homo sapiens
MVLTLLLSAYKLCRFFAMSGPRPGAERLAVPGPDGGGGTGPWWAAGGRGPREVSPGAGTEVQDALERALPELQQALSALKQAGGARAVGAGLAEVFQLVEEAWLLPAVGREVAQGLCDAIRLDGGLDLLLRLLQAPELETRVQAARLLEQILVAENRDRVARIGLGVILNLAKEREPVELARSVAGILEHMFKHSEETCQRLVAAGGLDAVLYWCRRTDPALLRHCALALGNCALHGGQAVQRRMVEKRAAEWLFPLAFSKEDELLRLHACLAVAVLATNKEVEREVERSGTLALVEPLVASLDPGRFARCLVDASDTSQGRGPDDLQRLVPLLDSNRLEAQCIGAFYLCAEAAIKSLQGKTKVFSDIGAIQSLKRLVSYSTNGTKSALAKRALRLLGEEVPRPILPSVPSWKEAEVQTWLQQIGFSKYCESFREQQVDGDLLLRLTEEELQTDLGMKSGITRKRFFRELTELKTFANYSTCDRSNLADWLGSLDPRFRQYTYGLVSCGLDRSLLHRVSEQQLLEDCGIHLGVHRARILTAAREMLHSPLPCTGGKPSGDTPDVFISYRRNSGSQLASLLKVHLQLHGFSVFIDVEKLEAGKFEDKLIQSVMGARNFVLVLSPGALDKCMQDHDCKDWVHKEIVTALSCGKNIVPIIDGFEWPEPQVLPEDMQAVLTFNGIKWSHEYQEATIEKIIRFLQGRSSRDSSAGSDTSLEGAAPMGPT

SEQ ID NO: 11644 - protein, 107 aa, Homo sapiens
  VARIANT 1: note = misc_feature - Xaa can be any naturally occurring amino acid
XASLLKVHLQLHGFSVFIDVEKLEAGKFEDKLIQSVMGARNFVLVLSPGALDKCMQDHDCKDWVHKEIVTALSCGKNIVPIIDGFEWPEPQVLPEDMQAVLTFNGIK

SEQ ID NO: 11645 - protein, 118 aa, Homo sapiens
  VARIANT 1: note = misc_feature - Xaa can be any naturally occurring amino acid
XLLPQEQQVDGDLLLRLTEEELQTDLGMKSGITRKRFFRELTELKTFANYSTCDRSNLADWLGSLDPRFRQYTYGLVSCGLDRSLLHRVSEQQLLEDCGIHLGVHRARILTAARAITD

SEQ ID NO: 11646 - protein, 257 aa, Homo sapiens
  VARIANT 1: note = misc_feature - Xaa can be any naturally occurring amino acid
XNLADWLGSLDPRFRQYTYGLVSCGLDRSLLHRVSEQQLLEDCGIHLGVHRARILTAARVSDAEGPPSPCCLLPTSEMLHSPLPCTGGKPSGDTPDVFISYRRNSGSQLASLLKVHLQLHGFSVFIDVEKLEAGKFEDKLIQSVMGARNFVLVLSPGALDKCMQDHDCKDWVHKEIVTALSCGKNIVPIIDGFEWPEPQVLPEDMQAVLTFNGIKWSHEYQEATIEKIIRFLQGRSSRDSSAGSDTSLEGAAPMGPT

SEQ ID NO: 11647 - protein, 8 aa, Homo sapiens
MDHLNEAT

SEQ ID NO: 11648 - protein, 82 aa, Homo sapiens
MDHLNEATQGKEHSEMSNNVSDPKGPPAKIARLEQNGSPLGRGRLGSTGAKMQGVPLKHSGHLMKTNLRKDIEIVYYEHQFG

SEQ ID NO: 11649 - protein, 71 aa, Homo sapiens
MDHLNEATQGKEHSEMSNNVSDPKGPPAKIARLEQNGSPLGRGRLGSTGAKMQGVPLKHSGHLMKTNLRKG

SEQ ID NO: 11650 - protein, 116 aa, Homo sapiens
MDHLNEATQGKEHSEMSNNVSDPKGPPAKIARLEQNGSPLGRGRLGSTGAKMQGVPLKHSGHLMKTNLRKGTMLPVFCVVEHYENAIEYDCKEEHAEFVLVRKDMLFNQLIEMALL

SEQ ID NO: 11651 - protein, 130 aa, Homo sapiens
MDHLNEATQGKEHSEMSNNVSDPKGPPAKIARLEQNGSPLGRGRLGSTGAKMQGVPLKHSGHLMKTNLRKGTMLPVFCVVEHYENAIEYDCKEEHAEFVLVRKDMLFNQLIEMALLSLGYSHSSAAQAKG

SEQ ID NO: 11652 - protein, 166 aa, Homo sapiens
MDHLNEATQGKEHSEMSNNVSDPKGPPAKIARLEQNGSPLGRGRLGSTGAKMQGVPLKHSGHLMKTNLRKGTMLPVFCVVEHYENAIEYDCKEEHAEFVLVRKDMLFNQLIEMALLSLGYSHSSAAQAKGLIQVGKWNPVPLSYVTDAPDATVADMLQDVYHVVTL

SEQ ID NO: 11653 - protein, 172 aa, Homo sapiens
MDHLNEATQGKEHSEMSNNVSDPKGPPAKIARLEQNGSPLGRGRLGSTGAKMQGVPLKHSGHLMKTNLRKGTMLPVFCVVEHYENAIEYDCKEEHAEFVLVRKDMLFNQLIEMALLSLGYSHSSAAQAKGLIQVGKWNPVPLSYVTDAPDATVADMLQDVYHVVTLKIQLHR

SEQ ID NO: 11654 - protein, 224 aa, Homo sapiens
MDHLNEATQGKEHSEMSNNVSDPKGPPAKIARLEQNGSPLGRGRLGSTGAKMQGVPLKHSGHLMKTNLRKGTMLPVFCVVEHYENAIEYDCKEEHAEFVLVRKDMLFNQLIEMALLSLGYSHSSAAQAKGLIQVGKWNPVPLSYVTDAPDATVADMLQDVYHVVTLKIQLHSCPKLEDLPPEQWSHTTVRNALKDLLKDMNQSSLAKECPLSQSMISSIVNSTY

SEQ ID NO: 11655 - protein, 763 aa, Homo sapiens
MDHLNEATQGKEHSEMSNNVSDPKGPPAKIARLEQNGSPLGRGRLGSTGAKMQGVPLKHSGHLMKTNLRKGTMLPVFCVVEHYENAIEYDCKEEHAEFVLVRKDMLFNQLIEMALLSLGYSHSSAAQAKGLIQVGKWNPVPLSYVTDAPDATVADMLQDVYHVVTLKIQLHSCPKLEDLPPEQWSHTTVRNALKDLLKDMNQSSLAKECPLSQSMISSIVNSTYYANVSAAKCQEFGRWYKHFKKTKDMMVEMDSLSELSQQGANHVNFGQQPVPGNTAEQPPSPAQLSHGSQPSVRTPLPNLHPGLVSTPISPQLVNQQLVMAQLLNQQYAVNRLLAQQSLNQQYLNHPPPVSRSMNKPLEQQVSTNTEVSSEIYQWVRDELKRAGISQAVFARVAFNRTQGLLSEILRKEEDPKTASQSLLVNLRAMQNFLQLPEAERDRIYQDERERSLNAASAMGPAPLISTPPSRPPQVKTATIATERNGKPENNTMNINASIYDEIQQEMKRAKVSQALFAKVAATKSQGWLCELLRWKEDPSPENRTLWENLSMIRRFLSLPQPERDAIYEQESNAVHHHGDRPPHIIHVPAEQIQQQQQQQQQQQQQQQAPPPPQPQQQPQTGPRLPPRQPTVASPAESDEENRQKTRPRTKISVEALGILQSFIQDVGLYPDEEAIQTLSAQLDLPKYTIIKFFQNQRYYLKHHGKLKDNSGLEVDVAEYKEEELLKDLEESVQDKNTNTLFSVKLEEELSVEGNTDINTDLKD

SEQ ID NO: 11656 - protein, 763 aa, Homo sapiens; identical to SEQ ID NO: 11655

SEQ ID NO: 11657 - protein, 795 aa, Homo sapiens
MDHLNEATQGKEHSEMSNNVSDPKGPPAKIARLEQNGSPLGRGRLGSTGAKMQGVPLKHSGHLMKTNLRKGTMLPVFCVVEHYENAIEYDCKEEHAEFVLVRKDMLFNQLIEMALLSLGYSHSSAAQAKGLIQVGKWNPVPLSYVTDAPDATVADMLQDVYHVVTLKIQLHSCPKLEDLPPEQWSHTTVRNALKDLLKDMNQSSLAKECPLSQSMISSIVNSTYYANVSAAKCQEFGRWYKHFKKTKDMMVEMDSLSELSQQGANHVNFGQQPVPGNTAEQPPSPAQLSHGSQPSVRTPLPNLHPGLVSTPISPQLVNQQLVMAQLLNQQYAVNRLLAQQSLNQQYLNHPPPVSRSMNKPLEQQVSTNTEVSSEIYQWVRDELKRAGISQAVFARVAFNRTQGLLSEILRKEEDPKTASQSLLVNLRAMQNFLQLPEAERDRIYQDERERSLNAASAMGPAPLISTPPSRPPQVKTATIATERNGKPENNTMNINASIYDEIQQEMKRAKVSQALFAKVAATKSQGWLCELLRWKEDPSPENRTLWENLSMIRRFLSLPQPERDAIYEQESNAVHHHGDRPPHIIHVPAEQIQSPSPTTLGKGESRGVFLPGLPTPAPWLGAAPQQQQQQQQQQQQQQQAPPPPQPQQQPQTGPRLPPRQPTVASPAESDEENRQKTRPRTKISVEALGILQSFIQDVGLYPDEEAIQTLSAQLDLPKYTIIKFFQNQRYYLKHHGKLKDNSGLEVDVAEYKEEELLKDLEESVQDKNTNTLFSVKLEEELSVEGNTDINTDLKD

SEQ ID NO: 11658 - protein, 138 aa, Homo sapiens
MLFNQLIEMALLSLGYSHSSAAQAKGLIQVGKWNPVPLSYVTDAPDATVADMLQDVYHVVTLKIQLHSCPKLEDLPPEQWSHTTVRNALKDLLKDMNQSSLAKECPLSQHPEISNMLDNLFINGKINFKKKLPRAPEA

SEQ ID NO: 11659 - protein, 166 aa, Homo sapiens
MLPVFCVVEHYENAIEYDCKEEHAEFVLVRKDMLFNQLIEMALLSLGYSHSSAAQAKGLIQVGKWNPVPLSYVTDAPDATVADMLQDVYHVVTLKIQLHSCPKLEDLPPEQWSHTTVRNALKDLLKDMNQSSLAKECPLSQSMISSIVNSTYYANVSAAKCQEFGR

SEQ ID NO: 11660 - protein, 41 aa, Homo sapiens
MGAKSMRSWCLCQICSCGFLSSQPDHIPIPVQAAVLWDPPD

SEQ ID NO: 11661 - protein, 29 aa, Homo sapiens
MGAKSMRSWCLCQICSCGPGLTREPLPLP

SEQ ID NO: 11662 - protein, 398 aa, Homo sapiens
MGAKSMRSWCLCQICSCGSDYCPYEIVKQPRHVPEEYKPKQGKIDLGTTYKRDLNSYKVQPVAIVRPLERQVKKGKLDTVPTYKDDYRAWDLHKSELYKPEQTYHPPTVKFGNSTTFQDDFVPQEIKPRQSFKPSSVVKRSTAPFNGITSHRLDYIPHQLELKFERPKEVYKPTDQRFEDLTTHRCDFQGLIGETAKLCRPVHTRVTQNALFEGSTEFRESFQPWEIPPPEVKKVPEYVPPTGSMLLNSTSHLDYVPYQANHVVPIRPVSQKRSNNFPFQGKSIMKEDFPAWESCRQGLIKKQQQIPNPSGKFDGLSTFRSHYVPHELIPTESCKPLNIAFKSSVPFDDVTMYSVEYTPKRQEICPASYPSPPGYIFDNTNSQGHKFFRKIIPAVKAF

SEQ ID NO: 11663 - protein, 30 aa, Homo sapiens
MYDNVLPPQSLKAKQEIRACHGKMEGITTF

SEQ ID NO: 11664 - protein, 104 aa, Homo sapiens
MYDNVLPPQSLKAKQEIRACHGKMEGITTFKSDYCPYEIVKQPRHVPEEYKPKQGKIDLGTTYKRDLNSYKVQPVAIVRPLERQVKKGKLDTVPTYKGNLLFHT

SEQ ID NO: 11665 - protein, 149 aa, Homo sapiens
GWAASDDPIEKVIEGINRGLSNAEREVGKALDGINSGITHAGREVEKVFNGLSNMGSHTGKELDKGVQGLNHGMDKVAHEINHGIGQAGKEAEKLGHGVNNAAGQGNHQSGSSSHQGGATTTPLASGASVNTPFINLPALWRSVANIMP

SEQ ID NO: 11666 - protein, 247 aa, Homo sapiens
MHLARLVGSCSLLLLLGALSGWAASDDPIEKVIEGINRGLSNAEREVGKALDGINSGITHAGREVEKVFNGLSNMGSHTGKELDKGVQGLNHGMDKVAHEINHGIGQAGKEAEKLGHGVNNAAGQAGKEADKAVQGFHTGVHQAGKEAEKLGQGVNHAADQAGKEVEKLGQGAHHAAGQAGKELQNAHNGVNQASKEANQLLNGNHQSGSSSHQGGATTTPLASGASVNTPFINLPALWRSVANIMP

SEQ ID NO: 11667 - protein, 590 aa, Homo sapiens
MHLARLVGSCSLLLLLGALSGWAASDDPIEKVIEGINRGLSNAEREVGKALDGINSGITHAGREVEKVFNGLSNMGSHTGKELDKGVQGLNHGMDKVAHEINHGIGQAGKEAEKLGHGVNNAAGQVGKEADKLIHHGVHHGANQAGSEAGKFGQGVDNAAGQAGNEAGRFGQGVHHAAGQAGNEAGRFGQGVHHAAGQAGNEAGRFGQGAHHGLSEGWKETEKFGQGIHHAAGQVGKEAEKFGQGAHHAAGQAGNEAGRFGQGVHHGLSEGWKETEKFGQGVHHTAGQVGKEAEKFGQGAHHAAGQAGNEAGRFGQGAHHAAGQAGNEAGRFGQGVHHGLSEGWKETEKFGQGVHHAASQFGKETEKLGHGVHHGVNEAWKEAEKFGQGVHHAASQVGKEEDRVVQGLHHGVSQAGREAGQFGHDIHHTAGQAGKEGDIAVHGVQPGVHEAGKEAGQFGQGVHHTLEQAGKEADKAVQGFHTGVHQAGKEAEKLGQGVNHAADQAGKEVEKLGQGAHHAAGQAGKELQNAHNGVNQASKEANQLLNGNHQSGSSSHQGGATTTPLASGASVNTPFINLPALWRSVANIMP

SEQ ID NO: 11668 - protein, 264 aa, Homo sapiens
MRTLWMALCALSRLWPGAQAGCAEAGRCCPGRDPACFARGWRLDRVYGTCFCDQACRFTGDCCFDYDRACPARPCFVGEWSPWSGCADQCKPTTRVRRRSVQQEPQNGGAPCPPLEERAGCLEYSTPQGQDCGHTYVPAFITTSAFNKERTRQATSPHWSTHTEDAGYCMEFKTESLTPHCALENWPLTRWMQYLREGYTVCVDCQPPAMNSVSLRCSGDGLDSDGNQTLHWQAIGNPRCQGTWKKVRRVDQCSCPAVHSFIFI

SEQ ID NO: 11669 - protein, 49 aa, Homo sapiens
MGLGLLLPLLLLWTRGTQGSELDPKGQHVCVASRWVSWESDACGQQPLC

SEQ ID NO: 11670 - protein, 830 aa, Homo sapiens
MGLGLLLPLLLLWTRGTQGSELDPKGQHVCVASSPSAELQCCAGWRQKDQECTIPICEGPDACQKDEVCVKPGLCRCKPGFFGAHCSSRCPGQYWGPDCRESCPCHPHGQCEPATGACQCQADRWGARCEFPCACGPHGRCDPATGVCHCEPGWWSSTCRRPCQCNTAAARCEQATGACVCKPGWWGRRCSFRCNCHGSPCEQDSGRCACRPGWWGPECQQQCECVRGRCSAASGECTCPPGFRGARCELPCPAGSHGVQCAHSCGRCKHNEPCSPDTGSCESCEPGWNGTQCQQPCLPGTFGESCEQQCPHCRHGEACEPDTGHCQRCDPGWLGPRCEDPCPTGTFGEDCGSTCPTCVQGSCDTVTGDCVCSAGYWGPSCNASCPAGFHGNNCSVPCECPEGLCHPVSGSCQPGSGSRDTALIAGSLVPLLLLFLGLACCACCCWAPRSDLKDRPARDGATVSRMKLQVWGTLTSLGSTLPCRSLSSHKLPWVTVSHHDPEVPFNHSFIEPPSAGWATDDSFSSDPESGEADEVPAYCVPPQEGMVPVAQAGSSEASLAAGAFPPPEDASTPFAIPRTSSLARAKRPSVSFAEGTKFAPQSRRSSGELSSPLRKPKRLSRGAQSGPEGREAEESTGPEEAEAPESFPAAASPGDSATGHRRPPLGGRTVAEHVEAIEGSVQESSGPVTTIYMLAGKPRGSEGPVRSVFRHFGSFQKGQAEAKVKRAIPKPPRQALNRKKGSPGLASGSVGQSPNSAPKAGLPGATGPMAVRPEEAVRGLGAGTESSRRAQEPVSGCGSPEQDPQKQAEEERQEEPEYENVVPISRPPEP

SEQ ID NO: 11671 - protein, 744 aa, Homo sapiens
MGLGLLLPLLLLWTRGTQGSELDPKGQHVCVASSPSAELQCCAGWRQKDQECTIPICEGPDACQKDEVCVKPGLCRCKPGFFGAHCSSRCPGQYWGPDCRESCPCHPHGQCEPATGACQCQADRWGARCEFPCACGPHGRCDPATGVCHCEPGWWSSTCRRPCQCNTAAARCEQATGACVCKPGWWGRRCSFRCNCHGSPCEQDSGRCACRPGWWGPECQQQCECVRGRCSAASGECTCPPGFRGARCELPCPAGSHGVQCAHSCGRCKHNEPCSPDTGSCESCEPGWNGTQCQQPCLPGTFGESCEQQCPHCRHGEACEPDTGHCQPGSGSRDTALIAGSLVPLLLLFLGLACCACCCWAPRSDLKDRPARDGATVSRMKLQVWGTLTSLGSTLPCRSLSSHKLPWVTVSHHDPEVPFNHSFIEPPSAGWATDDSFSSDPESGEADEVPAYCVPPQEGMVPVAQAGSSEASLAAGAFPPPEDASTPFAIPRTSSLARAKRPSVSFAEGTKFAPQSRRSSGELSSPLRKPKRLSRGAQSGPEGREAEESTGPEEAEAPESFPAAASPGDSATGHRRPPLGGRTVAEHVEAIEGSVQESSGPVTTIYMLAGKPRGSEGPVRSVFRHFGSFQKGQAEAKVKRAIPKPPRQALNRKKGSPGLASGSVGQSPNSAPKAGLPGATGPMAVRPEEAVRGLGAGTESSRRAQEPVSGCGSPEQDPQKQAEEERQEEPEYENVVPISRPPEP

SEQ ID NO: 11672 - protein, 342 aa, Homo sapiens
MGLGLLLPLLLLWTRGTQGSELDPKGQHVCVASSPSAELQCCAGWRQKDQECTIPICEGPDACQKDEVCVKPGLCRCKPGFFGAHCSSRCPGQYWGPDCRESCPCHPHGQCEPATGACQCQADRWGARCEFPCACGPHGRCDPATGVCHCEPGWWSSTCRRPCQCNTAAARCEQATGACVCKPGWWGRRCSFRCNCHGSPCEQDSGRCACRPGWWGPECQQQCECVRGRCSAASGECTCPPGFRGARCELPCPAGSHGVQCAHSCGRCKHNEPCSPDTGSCESCEPGWNGTQCQQPCLPGTFGESCEQQCPHCRHGEACEPDTGHCQRCDPGWLGPRGPVIL

SEQ ID NO: 11673 - protein, 569 aa, Homo sapiens
MGLGLLLPLLLLWTRGTQGSELDPKGQHVCVASSPSAELQCCAGWRQKDQECTIPICEGPDACQKDEVCVKPGLCRCKPGFFGAHCSSRCPGQYWGPDCRESCPCHPHGQCEPATGACQCQADRWGARCEFPCACGPHGRCDPATGVCHCEPGWWSSTCRRPCQCNTAAARCEQATGACVCKPGWWGRRCSFRCNCHGSPCEQDSGRCACRPGWWGPECQQQCECVRGRCSAASGECTCPPGFRGARCELPCPAGSHGVQCAHSCGRCKHNEPCSPDTGSCESCEPGWNGTQCQQPCLPGTFGESCEQQCPHCRHGEACEPDTGHCQRCDPGWLGPRCEDPCPTGTFGEDCGSTCPTCVQGSCDTVTGDCVCSAGYWGPSCNASCPAGFHGNNCSVPCECPEGLCHPVSGSCQPGSGSRDTALIAGSLVPLLLLFLGLACCACCCWAPRSDLKDRPARDGATVSRMKLQVWGTLTSLGSTLPCRSLSSHKLPWVTASSSRPLPAGPLMTPSHPILSLERQMRFLPTVCHPKKGWSLWPRQGRQRPAWLQVLSRPLRTPPRHSPSRAPPA

SEQ ID NO: 11674 - protein, 125 aa, Homo sapiens
MAEAKTHWLGAALSLIPLIFLISGAEAASFQRNQLLQKEPDLRLENVQKFPSPEMIRALEYIENLRQQAHKEESSPDYNPYQGVSVPLQQKENGDESHLPERDSLSEEDWMRIILEALRQAENEP

SEQ ID NO: 11675 - protein, 144 aa, Homo sapiens
MAEAKTHWLGAALSLIPLIFLISGAEAASFQRNQLLQKEPDLRLENVQKFPSPEMIRALEYIENLRQQAHKEESSPDYNPYQGVSVPLQQKENGDESHLPERDSLSEEDWMRIILEALRQAENEPQSAPKENKPYALNSEKNFP

SEQ ID NO: 11676 - protein, 617 aa, Homo sapiens
MAEAKTHWLGAALSLIPLIFLISGAEAASFQRNQLLQKEPDLRLENVQKFPSPEMIRALEYIENLRQQAHKEESSPDYNPYQGVSVPLQQKENGDESHLPERDSLSEEDWMRIILEALRQAENEPQSAPKENKPYALNSEKNFPMDMSDDYETQQWPERKLKHMQFPPMYEENSRDNPFKRTNEIVEEQYTPQSLATLESVFQELGKLTGPNNQKRERMDEEQKLYTDDEDDIYKANNIAYEDVVGGEDWNPVEEKIESQTQEEVRDSKENIEKNEQINDEMKRSGQLGIQEEDLRKESKDQLSDDVSKVIAYLKRLVNAAGSGRLQNGQNGERATRLFEKPLDSQSIYQLIEISRNLQIPPEDLIEMLKTGEKPNGSVEPERELDLPVDLDDISEADLDHPDLFQNRMLSKSGYPKTPGRAGTEALPDGLSVEDILNLLGMESAANQKTSYFPNPYNQEKVLPRLPYGAGRSRSNQLPKAAWIPHVENRQMAYENLNDKDQELGEYLARMLVKYPEIINSNQVKRVPGQGSSEDDLQEEEQIEQAIKEHLNQGSSQETDKLAPVSKRFPVGPPKNDDTPNRQYWDEDLLMKVLEYLNQEKAEKGREHIAKRAMENM

SEQ ID NO: 11677 - protein, 57 aa, Homo sapiens
MAAIQDGLAKGENDETVSNTLTLTNGLERRTKTYSEDNFEELQYFPNFYALLKSIDS

SEQ ID NO: 11678 - protein, 236 aa, Homo sapiens
MAAIQDGLAKGENDETVSNTLTLTNGLERRTKTYSEDNFEELQYFPNFYALLKSIDSEKEAKEKETLITIMKTLIDFVKMMVKYGTISPEEGVSYLENLDEMIALQTKNKLEKNATDNISKLFPAPSEKSHEETDSTKEEAAKMEKEYGSLKDSTKDDNSNPGGKTDEPKGKTEAYLEAIRKNIEWLKKHDKKGNKEDYDLSKMRDFINKQADAYVEKGILDKEEAEAIKRIYSSL

SEQ ID NO: 11679 - protein, 468 aa, Homo sapiens
MGFLGTGTWILVLVLPIQAFPKPGGSQDKSLHNRELSAERPLNEQIAEAEEDKIKKTYPPENKPGQSNYSFVDNLNLLKAITEKEKIEKERQSIRSSPLDNKLNVEDVDSTKNRKLIDDYDSTKSGLDHKFQDDPDGLHQLDGTPLTAEDIVHKIAARIYEENDRAVFDKIVSKLLNLGLITESQAHTLEDEVAEVLQKLISKEANNYEEDPNKPTSWTENQAGKIPEKVTPMAAIQDGLAKGENDETVSNTLTLTNGLERRTKTYSEDNFEELQYFPNFYALLKSIDSEKEAKEKETLITIMKTLIDFVKMMVKYGTISPEEGVSYLENLDEMIALQTKNKLEKNATDNISKLFPAPSEKSHEETDSTKEEAAKMEKEYGSLKDSTKDDNSNPGGKTDEPKGKTEAYLEAIRKNIEWLKKHDKKGNKEDYDLSKMRDFINKQADAYVEKGILDKEEAEAIKRIYSSL

SEQ ID NO: 11680 - protein, 212 aa, Homo sapiens
MVSRMVSTMLSGLLFWLASGWTPAFAYSPRTPDRVSEADIQRLLHGVMEQLGIARPRVEYPAHQAMNLVGPQSIEGGAHEGLQHLGPFGNIPNIVAELTGDNIPKDFSEDQGYPDPPNPCPVGKTADDGCLENTPDTAEFSREFQLHQHLFDPEHDYPGLGKWNKKLLYEKMKGGERRKRRSVNPYLQGQRLDNVVAKKSVPHFSDEDKDPE

SEQ ID NO: 11681 - protein, 194 aa, Homo sapiens
MVSRMVSTMLSGLLFWLASGWTPAFAYSPRTPDRVSEADIQRLLHGVMEQLGIARPRVEYPAHQAMNLVGPQSIEGGAHEGLQHLGPFGNIPNIVAELTGDNIPKDFSEDQGYPDPPNPCPVGKTADDGCLENTPDTAEFSREFQLHQHLFDPEHDYPGLGKWSVNPYLQGQRLDNVVAKKSVPHFSDEDKDPE

SEQ ID NO: 11682 - protein, 211 aa, Homo sapiens
MVSRMVSTMLSGLLFWLASGWTPAFAYSPRTPDRVSEADIQRLLHGVMEQLGIARPRVEYPAHQAMNLVGPQSIEGGAHEGLQHLGPFGNIPNIVAELTGDNIPKDFSEDQGYPDPPNPCPVGKTDDGCLENTPDTAEFSREFQLHQHLFDPEHDYPGLGKWNKKLLYEKMKGGERRKRRSVNPYLQGQRLDNVVAKKSVPHFSDEDKDPE

SEQ ID NO: 11683 - protein, 193 aa, Homo sapiens
MVSRMVSTMLSGLLFWLASGWTPAFAYSPRTPDRVSEADIQRLLHGVMEQLGIARPRVEYPAHQAMNLVGPQSIEGGAHEGLQHLGPFGNIPNIVAELTGDNIPKDFSEDQGYPDPPNPCPVGKTDDGCLENTPDTAEFSREFQLHQHLFDPEHDYPGLGKWSVNPYLQGQRLDNVVAKKSVPHFSDEDKDPE

SEQ ID NO: 11684 - protein, 216 aa, Homo sapiens
SGLLFWLASGWTPAFAYSPRTPDRVSEADIQRLLHGVMEQLGIARPRVEYPAHQAMNLVGPQSIEGGAHEGLQHLGPFGNIPNIVAELTGDNIPKDFSEDQGYPDPPNPCPVGKTADDGCLENTPDTAEFSREFQLHQHLFDPEHDYPGLGKWNKKLLYEKMKGGERRKRRVTRAWLDCCGDAWSFLSGAVNRLKPSLVGKSQNPPLCSPEKHWSM

SEQ ID NO: 11685 - protein, 56 aa, Homo sapiens
MDTPSSYEAAMELFSPDQDMREAGAQLKKLVDTLPQKPRESIIKLMEKIAQSSLCN

SEQ ID NO: 11686 - protein, 91 aa, Homo sapiens
MKLAVTLTLVTLALCCSSASAEICPSFQRVIETLLMDTPSSYEAAMELFSPDQDMREAGAQLKKLVDTLPQKPRESIIKLMEKIAQSSLCN

SEQ ID NO: 11687 - protein, 95 aa, Homo sapiens
MKGSRALLLVALTLFCICRMATGEDNDEFFMDFLQTLLVGTPEELYEGTLGKYNVNEDAKAAMTELKSCIDGLQPMHKAELVKLLVQVLGSQDGA

SEQ ID NO: 11688 - protein, 95 aa, Homo sapiens
MKGSRALLLVALTLFCICRMATGEDNDEFFMDFLQTLLVGTPEELYEGTLGKYNVNEDAKAAMTELKSCRDGLQPMHKAELVKLLVQVLGSQDGA

SEQ ID NO: 11689 - protein, 90 aa, Homo sapiens
MRLSVCLLLLTLALCCYRANAVVCQALGSEITGFLLAGKPVFKFQLAKFKAPLEAVAAKMEVKKCVDTMAYEKRVLITKTLGKIAEKCDR

SEQ ID NO: 11690 - protein, 90 aa, Homo sapiens
MKLSVCLLLVTLALCCYQANAEFCPALVSELLDFFFISEPLFKLSLAKFDAPPEAVAAKLGVKRCTDQMSLQKRSLIAEVLVKILKKCSV

SEQ ID NO: 11691 - protein, 83 aa, Homo sapiens
MRLSVCLLMVSLALCCYQAHALVCPAVASEITVFLFLSDAAVNLQVAKLNPPPEALAAKLEVKHCTDQISFKKRLSLKKSWWK

SEQ ID NO: 11692 - protein, 95 aa, Homo sapiens
MKLLMVLMLAALLLHCYADSGCKLLEDMVEKTINSDISIPEYKELLQEFIDSDAAAEAMGKFKQCFLNQSHRTLKNFGLMMHTVYDSIWCNMKSN

SEQ ID NO: 11693 - protein, 93 aa, Homo sapiens
MKLLMVLMLAALSQHCYAGSGCPLLENVISKTINPQVSKTEYKELLQEFIDDNATTNAIDELKECFLNQTDETLSNVEVFMQLIYDSSLCDLF

SEQ ID NO: 11694 - protein, 120 aa, Homo sapiens
MKLLMVLMLAALSQHCYAGSGCPLLENVISKTINPQVSKTEYKELLQEFIDDNATTNAIDELKECFLNQTDETLSNVEVFMVISFSSYKLFKSPDQGQVGSSFLTDNAKATSEQAFSYIG

SEQ ID NO: 11695 - protein, 96 aa, Homo sapiens
MRVTSATCALLLALICSVQLGDACLDIDKLLANVVFDVSQDLLKEELARYNPSPLTEESFLNVQQCFANVSVTERFAHSVVIKKILQSNDCIEAAF

SEQ ID NO: 11696 - protein, 96 aa, Homo sapiens; identical to SEQ ID NO: 11695

SEQ ID NO: 11697 - protein, 104 aa, Homo sapiens
MKLAALLGLCVALSCSSAAAFLVGSAKPVAQPVAALESAAEAGAGTLANPLGTLNPLKLLLSSLGIPVNHLIEGSQKCVAELGPQAVGAVKALKALLGALTVFG

SEQ ID NO: 11698 - protein, 48 aa, Homo sapiens
MDPLKLLLKTLGISVEHLVEGLRKCVNELGPEASEAVKKLLEALSHLV

SEQ ID NO: 11699 - protein, 93 aa, Homo sapiens
MKLVTIFLLVTISLCSYSATAFLINKVPLPVDKLAPLPLDNILPFMDPLKLLLKTLGISVEHLVEGLRKCVNELGPEASEAVKKLLEALSHLV

SEQ ID NO: 11700 - protein, 218 aa, Homo sapiens
MGRLLALVVGAALVSSACGGCVEVDSETEAVYGMTFKILCISCKRRSETNAETFTEWTFRQKGTEEFVKILRYENEVLQLEEDERFEGRVVWNGSRGTKDLQDLSIFITNVTYNHSGDYECHVYRLLFFENYEHNTSVVKKIHIEVVDKANRDMASIVSEIMMYVLIVVLTIWLVAEMIYCYKKIAAATETAAQENASEYLAITSESKENCTGVQVAE

SEQ ID NO: 11701 - protein, 218 aa, Homo sapiens; identical to SEQ ID NO: 11700

SEQ ID NO: 11702 - protein, 268 aa, Homo sapiens
MGRLLALVVGAALVSSACGGCVEVDSETEAVYGMTFKILCISCKRRSETNAETFTEWTFRQKGTEEFVKILRYENEVLQLEEDERFEGRVVWNGSRGTKDLQDLSIFITNVTYNHSGDYECHVYRLLFFENYEHNTSVVKKIHIEVVDKGESGAACPFTVTHRRARWRDRWQAVDRTGWLCAWPANRPQQRAEGEGSSPSCPLQLWPLFLSSPRRGQSMPVPHRRSGYRTQLCHLCCMTSGRCLLSLSQRVVLGLPGIIIRCVSRGVV

SEQ ID NO: 11703 - protein, 147 aa, Homo sapiens
MGRLLALVVGAALVSSACGGCVEVDSETEAVYGMTFKILCISCKRRSETNAETFTEWTFRQKGTEEFVKKIHIEVVDKANRDMASIVSEIMMYVLIVVLTIWLVAEMIYCYKKIAAATETAAQENASEYLAITSESKENCTGVQVAE

SEQ ID NO: 11704 - protein, 185 aa, Homo sapiens
MTFKILCISCKRRSETNAETFTEWTFRQKGTEEFVKILRYENEVLQLEEDERFEGRVVWNGSRGTKDLQDLSIFITNVTYNHSGDYECHVYRLLFFENYEHNTSVVKKIHIEVVDKANRDMASIVSEIMMYVLIVVLTIWLVAEMIYCYKKIAAATETAAQENASEYLAITSESKENCTGVQVAE

SEQ ID NO: 11705 - protein, 235 aa, Homo sapiens
MTFKILCISCKRRSETNAETFTEWTFRQKGTEEFVKILRYENEVLQLEEDERFEGRVVWNGSRGTKDLQDLSIFITNVTYNHSGDYECHVYRLLFFENYEHNTSVVKKIHIEVVDKGESGAACPFTVTHRRARWRDRWQAVDRTGWLCAWPANRPQQRAEGEGSSPSCPLQLWPLFLSSPRRGQSMPVPHRRSGYRTQLCHLCCMTSGRCLLSLSQRVVLGLPGIIIRCVSRGVV

SEQ ID NO: 11706 - protein, 93 aa, Homo sapiens
MPAFNRLFPLASLVLIYWVSVCFPVCVEVPSETEAVQGNPMKLRCISCMKREEVEATTVVEWFYRPEGGKDFLIYEYRNGHQEVESPFQGRLQ

SEQ ID NO: 11707 - protein, 141 aa, Homo sapiens
MPAFNRLFPLASLVLIYWVSVCFPVCVEVPSETEAVQGNPMKLRCISCMKREEVEATTVVEWFYRPEGGKDFLIYEYRNGHQEVESPFQGRLQWNGSKDLQDVSITVLNVTLNDSGLYTCNVSREFEFEAHRPFVKTTRLI

SEQ ID NO: 11708 - protein, 215 aa, Homo sapiens
MPAFNRLFPLASLVLIYWVSVCFPVCVEVPSETEAVQGNPMKLRCISCMKREEVEATTVVEWFYRPEGGKDFLIYEYRNGHQEVESPFQGRLQWNGSKDLQDVSITVLNVTLNDSGLYTCNVSREFEFEAHRPFVKTTRLIPLRVTEEAGEDFTSVVSEIMMYILLVFLTLWLLIEMIYCYRKVSKAEEAAQENASDYLAIPSENKENSAVPVEE

SEQ ID NO: 11709 - protein, 215 aa, Homo sapiens; identical to SEQ ID NO: 11708

SEQ ID NO: 11710 - protein, 215 aa, Homo sapiens; identical to SEQ ID NO: 11708

SEQ ID NO: 11711 - protein, 147 aa, Homo sapiens
MELALRRSPVPRWLLLLPLLLGLNAGAVIDWPTEEGKEVWDYVTVRKDAYMFWWLYYATNSCKNFSELPLVMWLQGGPGGSSTGFGNFEEIGPFSEGPSSATLRGLPWVIPGSPLLIRCSPGDLTCTACLFSKTKVWQRCLRLQSKY

SEQ ID NO: 11712 - protein, 147 aa, Homo sapiens; identical to SEQ ID NO: 11711

SEQ ID NO: 11713 - protein, 452 aa, Homo sapiens
MELALRRSPVPRWLLLLPLLLGLNAGAVIDWPTEEGKEVWDYVTVRKDAYMFWWLYYATNSCKNFSELPLVMWLQGGPGGSSTGFGNFEEIGPLDSDLKPRKTTWLQAASLLFVDNPVGTGFSYVNGSGAYAKDLAMVASDMMVLLKTFFSCHKEFQTVPFYIFSESYGGKMAAGIGLELYKAIQRGTIKCNFAGVALGDSWISPVDSVLSWGPYLYSMSLLEDKGLAEVSKVAEQVLNAVNKGLYREATELWGKAEMIIEQNTDGVNFYNILTKSTPTSTMESSLEFTQSHLVCLCQRHVRHLQRDALSQLMNGPIRKKLKIIPEDQSWGGQATNVFVNMEEDFMKPVISIVDELLEAGINVTVYNGQLDLIVDTMGQEAWVRKLKWPELPKFSQLKWKALYSDPKSLETSAFVKSYKNLAFYWILKAGHMVPSDQGDMALKMMRLVTQQE

SEQ ID NO: 11714 - protein, 296 aa, Homo sapiens
MELALRRSPVPRWLLLLPLLLGLNAGAVIDWPTEEGKEVWDYVTVRKDAYMFWWLYYATNSCKNFSELPLVMWLQGGPGGSSTGFGNFEEIGPLDSDLKPRKTTWLQAASLLFVDNPVGTGFSYVNGSGAYAKDLAMVASDMMVLLKTFFSCHKEFQTVPFYIFSESYGGKMAAGIGLELYKAIQRGTIKCNFAGVALGDSWISPVDSVLSWGPYLYSMSLLEDKGLAEVSKVAEQVLNAVNKGLYREATELWGKAEMIIEQNTDGVNFYNILTKSTPTSTMESSLEFTQSHLVWF

SEQ ID NO: 11715 - protein, 176 aa, Homo sapiens
MELALRRSPVPRWLLLLPLLLGLNAGAVIDWPTEEGKEVWDYVTVRKDAYMFWWLYYATNSCKNFSELPLVMWLQLQAASLLFVDNPVGTGFSYVNGSGAYAKDLAMVASDMMVLLKTFFSCHKEFQTVPFYIFSESYGGKMAAGIGLELYKAIQRGTIKCNFAGVALGDSWISPV

SEQ ID NO: 11716 - protein, 69 aa, Homo sapiens
MELALRRSPVPRWLLLLPLLLGLNAGSMGLCDGPQGCLHVLVALLCHQLLQELLRTAPGHVASGRSRRF

SEQ ID NO: 11717 - protein, 95 aa, Homo sapiens
MVASDMMVLLKTFFSCHKEFQTVPFYIFSESYGGKMAAGIGLELYKAIQRGTIKCNFAGVALGDSWISPVDSVLSWGPYLYSMSLLEDKGLAEVS

SEQ ID NO: 11718 - protein, 135 aa, Homo sapiens
  VARIANT 1: note = misc_feature - Xaa can be any naturally occurring amino acid
XTMESSLEFTQSHLGQATNVFVNMEEDFMKPVISIVDELLEAGINVTVYNGQLDLIVDTMGQEAWVRKLKWPELPKFSQLKWKALYSDPKSLETSAFVKSYKNLAFYWILKAGHMVPSDQGDMALKMMRLVTQQE

SEQ ID NO: 11719 - protein, 92 aa, Homo sapiens
MKLMVLVFTIGLTLLLGVQAMPANRLSCYRKILKDHNCHNLPEGVADLTQIDVNVQDHFWDGKGCEMICYCNFSELLCCPKCHHIFILLRNL

SEQ ID NO: 11720 - protein, 98 aa, Homo sapiens
MKLMVLVFTIGLTLLLGVQAMPANRLSCYRKILKDHNCHNLPEGVADLTQIDVNVQDHFWDGKGCEMICYCNFSELLCCPKDVFFGPKISFVIPCNNQ

SEQ ID NO: 11721 - protein, 121 aa, Homo sapiens
MAPRPLLLLLLLLGGSAARPAPPRARRHSDGTFTSELSRLREGARLQRLLQGLVGKRSEQDAENSMAWTRLSAGLLCPSGSNMPILQAWMPLDGTWSPWLPPGPMVSEPAGAAAEGTLRPR

SEQ ID NO: 11722 - protein, 347 aa, Homo sapiens
MGAAAVRWHLCVLLALGTRGRLAGGSGLPGSVDVDECSEGTDDCHIDAICQNTPKSYKCLCKPGYKGEGKQCEDIDECENDYYNGGCVHECINIPGNYRCTCFDGFMLAHDGHNCLDVDECQDNNGGCQQICVNAMGSYECQCHSGFFLSDNQHTCIHRSNEGMNCMNKDHGCAHICRETPKGGVACDCRPGFDLAQNQKDCTLTCNYGNGGCQHSCEDTDTGPTCGCHQKYALHSDGRTCIEKDEAAIERSQFNATSVADVDKRVKRRLLMETCAVNNGGCDRTCKDTATGVRCSCPVGFTLQPDGKTCKGQHVELCGCPCLYWPGQEPPCACIAGPRAGLNGGHV

SEQ ID NO: 11723 - protein, 988 aa, Homo sapiens
MGAAAVRWHLCVLLALGTRGRLAGGSGLPGSVDVDECSEGTDDCHIDAICQNTPKSYKCLCKPGYKGEGKQCEDIDECENDYYNGGCVHECINIPGNYRCTCFDGFMLAHDGHNCLDVDECQDNNGGCQQICVNAMGSYECQCHSGFFLSDNQHTCIHRSNEGMNCMNKDHGCAHICRETPKGGVACDCRPGFDLAQNQKDCTLTCNYGNGGCQHSCEDTDTGPTCGCHQKYALHSDGRTCIETCAVNNGGCDRTCKDTATGVRCSCPVGFTLQPDGKTCKDINECLVNNGGCDHFCRNTVGSFECGCRKGYKLLTDERTCQDIDECSFERTCDHICINSPGSFQCLCHRGYILYGTTHCGDVDECSMSNGSCDQGCVNTKGSYECVCPPGRRLHWNGKDCVETGKCLSRAKTSPRAQLSCSKAGGVESCFLSCPAHTLFVPDSENSYVLSCGVPGPQGKALQKRNGTSSGLGPSCSDAPTTPIKQKARFKIRDAKCHLRPHSQARAKETARQPLLDHCHVTFVTLKCDSSKKRRRGRKSPSKEVSHITAEFEIETKMEEASDTCEADCLRKRAEQSLQAAIKTLRKSIGRQQFYVQVSGTEYEVAQRPAKALEGQGACGAGQVLQDSKCVACGPGTHFGGELGQCVSCMPGTYQDMEGQLSCTPCPSSDGLGLPGARNVSECGGQCSPGFFSADGFKPCQACPVGTYQPEPGRTGCFPCGGGLLTKHEGTTSFQDCEAKVHCSPGHHYNTTTHRCIRCPVGTYQPEFGQNHCITCPGNTSTDFDGSTNVTHCKNQHCGGELGDYTGYIESPNYPGDYPANAECVWHIAPPPKRRILIVVPEIFLPIEDECGDVLVMRKSASPTSITTYETCQTYERPIAFTSRSRKLWIQFKSNEGNSGKGFQVPYVTYDEDYQQLIEDIVRDGRLYASENHQEILKDKKLIKALFDVLAHPQNYFKYTAQESKEMFPRSFIKLLRSKVSRFLRPYK

SEQ ID NO: 11724 - protein, 363 aa, Homo sapiens [sequence omitted]

SEQ ID NO: 11725 - protein, 175 aa, Homo sapiens
  VARIANT 1: note = misc_feature - Xaa can be any naturally occurring amino acid
XRETPKGGVACDCRPGFDLAQNQKDCTLTCNYGNGGCQHSCEDTDTGPTCGCHQKYALHSDGRTCIEKDEAAIERSQFNATSVADVDKRVKRRLLMETCAVNNGGCDRTCKDTATGVRCSCPVGFTLQPDGKTCKDINECLVNNGGCDHFCRNTVGSFECGCRKGYKLLTDERTC

SEQ ID NO: 11726 - protein, 999 aa, Homo sapiens
MGVAGRNRPGAAWAVLLLLLLLPPLLLLAGAVPPGRGRAAGPQEDVDECAQGLDDCHADALCQNTPTSYKCSCKPGYQGEGRQCEDIDECGNELNGGCVHDCLNIPGNYRCTCFDGFMLAHDGHNCLDVDECLENNGGCQHTCVNVMGSYECCCKEGFFLSDNQHTCIHRSEEGLSCMNKDHGCSHICKEAPRGSVACECRPGFELAKNQRDCILTCNHGNGGCQHSCDDTADGPECSCHPQYKMHTDGRSCLEREDTVLEVTESNTTSVVDGDKRVKRRLLMETCAVNNGGCDRTCKDTSTGVHCSCPVGFTLQLDGKTCKDIDECQTRNGGCDHFCKNIVGSFDCGCKKGFKLLTDEKSCQDVDECSLDRTCDHSCINHPGTFACACNRGYTLYGFTHCGDTNECSINNGGCQQVCVNTVGSYECQCHPGYKLHWNKKDCVEVKGLLPTSVSPRVSLHCGKSGGGDGCFLRCHSGIHLSSDVTTIRTSVTFKLNEGKCSLKNAELFPEGLRPALPEKHSSVKESFRYVNLTCSSGKQVPGAPGRPSTPKEMFITVEFELETNQKEVTASCDLSCIVKRTEKRLRKAIRTLRKAVHREQFHLQLSGMNLDVAKKPPRTSERQAESCGVGQGHAENQCVSCRAGTYYDGARERCILCPNGTFQNEEGQMTCEPCPRPGNSGALKTPEAWNMSECGGLCQPGEYSADGFAPCQLCALGTFQPEAGRTSCFPCGGGLATKHQGATSFQDCETRVQCSPGHFYNTTTHRCIRCPVGTYQPEFGKNNCVSCPGNTTTDFDGSTNITQCKNRRCGGELGDFTGYIESPNYPGNYPANTECTWTINPPPKRRILIVVPEIFLPIEDDCGDYLVMRKTSSSNSVTTYETCQTYERPIAFTSRSKKLWIQFKSNEGNSARGFQVPYVTYDEDYQELIEDIVRDGRLYASENHQEILKDKKLIKALFDVLAHPQNYFKYTAQESREMFPRSFIRLLRSKVSRFLRPYK

SEQ ID NO: 11727 - protein, 807 aa, Homo sapiens
MGVAGRNRPGAAWAVLLLLLLLPPLLLLAGAVPPGRGRAAGPQEDVDECAQGLDDCHADALCQNTPTSYKCSCKPGYQGEGRQCEDIDECGNELNGGCVHDCLNIPGNYRCTCFDGFMLAHDGHNCLDVDECLENNGGCQHTCVNVMGSYECCCKEGFFLSDNQHTCIHRSEEGLSCMNKDHGCSHICKEAPRGSVACECRPGFELAKNQRDCILTCNHGNGGCQHSCDDTADGPECSCHPQYKMHTDGRSCLEREDTVLEVTESNTTSVVDGDKRVKRRLLMETCAVNNGGCDRTCKDTSTGVHCSCPVGFTLQLDGKTCKDIDECQTRNGGCDHFCKNIVGSFDCGCKKGFKLLTDEKSCQDVDECSLDRTCDHSCINHPGTFACACNRGYTLYGFTHCGDTNECSINNGGCQQVCVNTVGSYECQCHPGYKLHWNKKDCVASCDLSCIVKRTEKRLRKAIRTLRKAVHREQFHLQLSGMNLDVAKKPPRTSERQAESCGVGQGHAENQCVSCRAGTYYDGARERCILCPNGTFQNEEGQMTCEPCPRPGNSGALKTPEAWNMSECGGLCQPGEYSADGFAPCQLCALGTFQPEAGRTSCFPCGGGLATKHQGATSFQDCETRVQCSPGHFYNTTTHRCIRCPVGTYQPEFGKNNCVSCPGNTTTDFDGSTNITQCKTSSNSVTTYETCQTYERPIAFTSRSKKLWIQFKSNEGNSARGFQVPYVTYDEDYQELIEDIVRDGRLYASENHQEILKDKKLIKALFDVLAHPQNYFKYTAQESREMFPRSFIRLLRSKVSRFLRPYK

SEQ ID NO: 11728 - protein, 971 aa, Homo sapiens
MGVAGRNRPGAAWAVLLLLLLLPPLLLLAGAVPPGRGRAAGPQEDVDECAQGLDDCHADALCQNTPTSYKCSCKPGYQGEGRQCEDIDECGNELNGGCVHDCLNIPGNYRCTCFDGFMLAHDGHNCLDVDECLENNGGCQHTCVNVMGSYECCCKEGFFLSDNQHTCIHRSEEGLSCMNKDHGCSHICKEAPRGSVACECRPGFELAKNQRDCILTCNHGNGGCQHSCDDTADGPECSCHPQYKMHTDGRSCLEREDTVLEVTESNTTSVVDGDKRVKRRLLMETCAVNNGGCDRTCKDTSTGVHCSCPVGFTLQLDGKTCKDIDECQTRNGGCDHFCKNIVGSFDCGCKKGFKLLTDEKSCQDVDECSLDRTCDHSCINHPGTFACACNRGYTLYGFTHCGDTNECSINNGGCQQVCVNTVGSYECQCHPGYKLHWNKKDCVEVKGLLPTSVSPRVSLHCGKSGGGDGCFLRCHSGIHLSSGLQGAYSVTCGSSSPLRNKQQKSNDSAFGDVTTIRTSVTFKLNEGKCSLKNAELFPEGLRPALPEKHSSVKESFRYVNLTCSSGKQVPGAPGRPSTPKEMFITVEFELETNQKEVTASCDLSCIVKRTEKRLRKAIRTLRKAVHREQFHLQLSGMNLDVAKKPPRTSERQAESCGVGQGHAENQCGLCQPGEYSADGFAPCQLCALGTFQPEAGRTSCFPCGGGLATKHQGATSFQDCETRVQCSPGHFYNTTTHRCIRCPVGTYQPEFGKNNCVSCPGNTTTDFDGSTNITQCKNRRCGGELGDFTGYIESPNYPGNYPANTECTWTINPPPKRRILIVVPEIFLPIEDDCGDYLVMRKTSSSNSVTTYETCQTYERPIAFTSRSKKLWIQFKSNEGNSARGFQVPYVTYDEDYQELIEDIVRDGRLYASENHQEILKDKKLIKALFDVLAHPQNYFKYTAQESREMFPRSFIRLLRSKVSRFLRPYK

SEQ ID NO: 11729 - protein, 172 aa, Homo sapiens
  VARIANT 1: note = misc_feature - Xaa can be any naturally occurring amino acid
XCSCHPQYKMHTDGRSCLEREDTVLEVTESNTTSVVDGDKRVKRRLLMETCAVNNGGCDRTCKDTSTGVHCSCPVGFTLQLDGKTCKDIDECQTRNGGCDHFCKNIVGSFDCGCKKGFKLLTDEKSCQDVDECSLDRTCDHSCINHPGTFACACNRGYTLYGFTHCGEVKGL

SEQ ID NO: 11730 - protein, 112 aa, Homo sapiens
  VARIANT 1: note = misc_feature - Xaa can be any naturally occurring amino acid
XGDFTGYIESPNYPGNYPANTECTWTINPPPKRRILIVVPEIFLPIEDDCGDYLVMRKTSSSNSVTTYETCQTYERPIAFTSRSKKLWIQFKSNEGNSARGFQVPYVTYDDA

SEQ ID NO: 11731 - protein, 192 aa, Homo sapiens
  VARIANT 1: note = misc_feature - Xaa can be any naturally occurring amino acid
XKRRLLMETCAVNNGGCDRTCKDTSTGVHCSCPVGFTLQLDGKTCKDIDECQTRNGGCDHFCKNIVGSFDCGCKKGFKLLTDEKSCQDVDECSLDRTCDHSCINHPGTFACACNRGYTLYGFTHCGDTNECSINNGGCQQVCVNTVGSYECQCHPGYKLHWNKKDCVVKGLLPTSVSPRVSLHCGKSGGGDG

SEQ ID NO: 11732 - protein, 119 aa, Homo sapiens
  VARIANT 1: note = misc_feature - Xaa can be any naturally occurring amino acid
XYIESPNYPGNYPANTECTWTINPPPKRRILIVVPEIFLPIEDDCGDYLVMRKTSSSNSVTTYETCQTYERPIAFTSRSKKLWIQFKSNEGNSARGFQVPYVTYDGKHSLQHMERASLL

SEQ ID NO: 11733 - protein, 993 aa, Homo sapiens
MGSGRVPGLCLLVLLVHARAAQYSKAAQDVDECVEGTDNCHIDAICQNTPRSYKCICKSGYTGDGKHCKDVDECEREDNAGCVHDCVNIPGNYRCTCYDGFHLAHDGHNCLDVDECAEGNGGCQQSCVNMMGSYECHCREGFFLSDNQHTCIQRPEEGMNCMNKNHGCAHICRETPKGGIACECRPGFELTKNQRDCKLTCNYGNGGCQHTCDDTEQGPRCGCHIKFVLHTDGKTCIETCAVNNGGCDSKCHDAATGVHCTCPVGFMLQPDRKTCKDIDECRLNNGGCDHICRNTVGSFECSCKKGYKLLINERNCQDIDECSFDRTCDHICVNTPGSFQCLCHRGYLLYGITHCGDVDECSINRGGCRFGCINTPGSYQCTCPAGQGRLHWNGKDCTEPLKCQGSPGASKAMLSCNRSGKKDTCALTCPSRARFLPESENGFTVSCGTPSPRAAPARAGHNGNSTNSNHCHEAAVLSIKQRASFKIKDAKCRLHLRNKGKTEEAGRITGPGGAPCSECQVTFIHLKCDSSRKGKGRRARTPPGKEVTRLTLELEAEVRAEETTASCGLPCLRQRMERRLKGSLKMLRKSINQDRFLLRLAGLDYELAHKPGLVAGERAEPMESCRPGQHRAGTKCVSCPQGTYYHGQTEQCVPCPAGTFQEREGQLSCDLCPGSDAHGPLGATNVTTCAGQCPPGQHSVDGFKPCQPCPRGTYQPEAGRTLCFPCGGGLTTKHEGAISFQDCDTKVQCSPGHYYNTSIHRCIRCAMGSYQPDFRQNFCSRCPGNTSTDFDGSTSVAQCKNRQCGGELGEFTGYIESPNYPGNYPAGVECIWNINPPPKRKILIVVPEIFLPSEDECGDVLVMRKNSSPSSITTYETCQTYERPIAFTARSRKLWINFKTSEANSARGFQIPYVTYDEDYEQLVEDIVRDGRLYASENHQEILKDKKLIKAFFEVLAHPQNYFKYTEKHKEMLPKSFIKLLRSKVSSFLRPYK

SEQ ID NO: 11734 - protein, 310 aa, Homo sapiens
MRRAALWLWLCALALSLQPALPQIVATNLPPEDQDGSGDDSDNFSGSGAGALQDITLSQQTPSTWKDTQLLTAIPTSPEPTGLEATAASTSTLPAGEGPKEGEAVVLPEVEPGLTAREQEATPRPRETTQLPTTHLASTTTATTAQEPATSHPHRDMQPGHHETSTPAGPSQADLHTPHTEDGGPSATERAAEDGASSQLPAAEGSGEQDFTFETSGENTAVVAVEPDRRNQSPVDQGATGASQGLLDRKEVLGGVIAGGLVGLIFAVCLVGFMLYRMKKKDEGSYSLEEPKQANGGAYQKPTKQEEFYA

SEQ ID NO: 11735 - protein, 310 aa, Homo sapiens; identical to SEQ ID NO: 11734

SEQ ID NO: 11736 - protein, 169 aa, Homo sapiens
MRRAALWLWLCALALSLQPALPQIVATNLPPEDQDGSGDDSDNFSGSGAGALQDITLSQQTPSTWKDTQLLTAIPTSPEPTGLEATAASTSTLPAGEGPKEGEAVVLPEVEPGLTAREQEATPRPRETTQLPTTHLASTTTATTAQEPATSHPHRDMQPVHFVSWGGLI

SEQ ID NO: 11737 - protein, 28 aa, Homo sapiens
MRRAALWLWLCALALSLQPALPSLSHGR

SEQ ID NO: 11738 - protein, 215 aa, Homo sapiens
PRWPGEPGQGCVGGAGERLQGPRACRGRLEQIVATNLPPEDQDGSGDDSDNFSGSGAGALQDITLSQQTPSTWKDTQLLTAIPTSPEPTGLEATAASTSTLPAGEGPKEGEAVVLPEVEPGLTAREQEATPRPRETTQLPTTHLASTTTATTAQEPATSHPHRDMQPGHHETSTPAGPSQADLHTPHTEDGGPSATERAAEDGASSQLPAAEGSG

SEQ ID NO: 11739 - protein, 211 aa, Homo sapiens
MAVVPLLLLGGLWSAVGASSLGVVTCGSVVKLLNTRHNVRLHSHDVRYGSGSGQQSVTGVTSVDDSNSYWRIRGKSATVCERGTPIKCGQPIRLTHVNTGRNLHSHHFTSPLSGNQEVSAFGEEGEGDYLDDWTVLCNGPYWVRDGEVRFKHSSTEVLLSVTGEQYGRPISGQKEVHGMAQPSQNNYWKAMEGIFMKPSELLKAEAHHAEL

SEQ ID NO: 11740 - protein, 104 aa, Homo sapiens
SLGVVTCGSVVKLLNTRHNVRLHSHDVRYGSGSGQQSVTGVTSVDDSNSYWRIRGKSATVCERGTPIKCGQPIRLTHVNTGRNLHSHHFTSPLSGNQLLCKVIL

SEQ ID NO: 11741 - protein, 50 aa, Homo sapiens
  VARIANT 1: note = misc_feature - Xaa can be any naturally occurring amino acid
XRNLHSHHFTSPLSGNQENNMVDLSVGKKRCMAWPSQVRTTTGKPWKASS

SEQ ID NO: 11742 - protein, 221 aa, Homo sapiens
MWSAGRGGAAWPVLLGLLLALLVPGGGAAKTGAELVTCGSVLKLLNTHHRVRLHSHDIKYGSGSGQQSVTGVEASDDANSYWRIRGGSEGGCPRGSPVRCGQAVRLTHVLTGKNLHTHHFPSPLSNNQEVSAFGEDGEGDDLDLWTVRCSGQHWEREAAVRFQHVGTSVFLSVTGEQYGSPIRGQHEVHGMPSANTHNTWKAMEGIFIKPSVEPSAGHDEL

SEQ ID NO: 11743 - protein, 254 aa, Homo sapiens
MVWPWVAMASRWGPLIGLAPCCLWLLGAVLLMDASARPANHSSTRERVANREENEILPPDHLNGVKLEMDGHLNRGFHQEVFLGKDLGGFDEDAEPRRSRRKLMVIFSKVDVNTDRKISAKEMQRWIMEKTAEHFQEAMEESKTHFRAVDPDGDGHVSWDEYKVKFLASKGHSEKEVADAIRLNEELKVDEESCAPLSTGSPGEPEGPLVPGGQPPCRPAADGGGVPVVPPPRAQPGNAQVHGEGDRPGPGPGR

SEQ ID NO: 11744 - protein, 348 aa, Homo sapiens
MVWPWVAMASRWGPLIGLAPCCLWLLGAVLLMDASARPANHSSTRERVANREENEILPPDHLNGVKLEMDGHLNRGFHQEVFLGKDLGGFDEDAEPRRSRRKLMVIFSKVDVNTDRKISAKEMQRWIMEKTAEHFQEAMEESKTHFRAVDPDGDGHVSWDEYKVKFLASKGHSEKEVADAIRLNEELKVDEETQEVLENLKDRWYQADSPPADLLLTEEEFLSFLHPEHSRGMLRFMVKEIVRDLDQDGDKQLSVPEFISLPVGTVENQQGQDIDDNWVKDRKKEFEELIDSNHDGIVTAEELENVPTLPLQPIGTLNSHFVRLAAELGGGKATLTCAPLARRATWTP

SEQ ID NO: 11745 - protein, 362 aa, Homo sapiens
MVWPWVAMASRWGPLIGLAPCCLWLLGAVLLMDASARPANHSSTRERVANREENEILPPDHLNGVKLEMDGHLNRGFHQEVFLGKDLGGFDEDAEPRRSRRKLMVIFSKVDVNTDRKISAKEMQRWIMEKTAEHFQEAMEESKTHFRAVDPDGDGHVSWDEYKVKFLASKGHSEKEVADAIRLNEELKVDEETQEVLENLKDRWYQADSPPADLLLTEEEFLSFLHPEHSRGMLRFMVKEIVRDLDQDGDKQLSVPEFISLPVGTVENQQGQDIDDNWVKDRKKEFEELIDSNHDGIVTAEELESYMDPMNEYNALNEAKQMIAVADENQNHHLEPEEVLKYSEFFTGSKLVDYARSVHEEF

SEQ ID NO: 11746 - protein, 243 aa, Homo sapiens
  VARIANT 1: note = misc_feature - Xaa can be any naturally occurring amino acid
XLEMDGHLNRGFHQEVFLGKDLGGFDEDAEPRRSRRKLMVIFSKVDVNTDRKISAKEMQRWIMEKTAEHFQEAMEESKTHFRAVDPDGDGHVSWDEYKVKFLASKGHSEKEVADAIRLNEELKVDEESSTSRNFLDLRAGVCRPRYPQAAPLSAQEVLENLKDRWYQADSPPADLLLTEEEFLSFLHPEHSRGMLRFMVKEIVRDLDQDGDKQLSVPEFISLPVGTVENQQGQDIDDNWVKDR

SEQ ID NO: 11747 - protein, 65 aa, Homo sapiens
MAVSTVFSTSSLGIGLFVAVGSVSPSGKEDLGFPTPPSSPLAEVTTLTSYLDKLSTSLDWEPLGD

SEQ ID NO: 11748 - protein, 65 aa, Homo sapiens; identical to SEQ ID NO: 11747

SEQ ID NO: 11749 - protein, 28 aa, Homo sapiens
MAVSTVFSTSSLKLNQPQKYLKMKSWPC

SEQ ID NO: 11750 - protein, 88 aa, Homo sapiens
MAVSTVFSTSSLMLALSRHSLLSPLLSVTSFRRFYRGDSPTDSQKDMIEIPLPPWQERTDESIETKRARLLYESRKRGMLENCILLRS

SEQ ID NO: 11751 - protein, 166 aa, Homo sapiens
MAVSTVFSTSSLMLALSRHSLLSPLLSVTSFRRFYRGDSPTDSQKDMIEIPLPPWQERTDESIETKRARLLYESRKRGMLENCILLSLFAKEHLQHMTEKQLNLYDRLINEPSNDWDIYYWATEAKPAPEIFENEVMALLRDFAKNKNKEQRLRAPDLEYLFEKPR

SEQ ID NO: 11752 - protein, 133 aa, Homo sapiens
MAVSTVFSTSSLMLALSRHSLLSPLLSVTSFRRFYRGDSPTDSQKDMIEIPLPPWQERTDESIETKRARLLYESRKRGMLENCILLSLFAKEHLQHMTEKQLNLYDRLINEPSNDWDIYYWATGSSDSPASAS

SEQ ID NO: 11753 - protein, 141 aa, Homo sapiens
MAVSTVFSTSSLMLALSRHSLLSPLLSVTSFRRFYRGDSPTDSQKDMIEIPLPPWQERTDESIETKRARLLYESRKRGMLENCILLSLFAKEHLQHMTEKQLNLYDRLINEPSNDWDIYYWATGTGYDKQHNVKIGQFRLI

SEQ ID NO: 11754 - protein, 129 aa, Homo sapiens
MAVSTVFSTSSLMLALSRHSLLSPLLSVTSFRRFYRGDSPTDSQKDMIEIPLPPWQERTDESIETKRARLLYESRKRGMLENCILLSLFAKEHLQHMTEKQLNLYDRLINEPSNDWDIYYWATGWSAMA

SEQ ID NO: 11755 - protein, 108 aa, Homo sapiens
MTPSRLPWLLSWVSATAWRAARSPLLCHSLRKTSSSQGGKSELVKQSLKKPKLPEGRFDAPEDSHLEKEPLEKFPDDVNPVTKEKGGPRGPEPTRYGDWERKGRCIDF

SEQ ID NO: 11756 - protein, 280 aa, Homo sapiens
MAAVVALSLRRRLPATTLGGACLQASRGAQTAAATAPRIKKFAIYRWDPDKAGDKPHMQTYEVDLNKCGPMVLDALIKIKNEVDSTLTFRRSCREGICGSCAMNINGGNTLACTRRIDTNLNKVSKIYPLPHMYVIKDLVPDLSNFYAQYKSIEPYLKKKDESQEGKQQYLQSIEEREKLDGLYECILCACCSTSCPSYWWNGDKYLGPAVLMQAYRWMIDSRDDFTEERLAKLQDPFSLYRCHTIMNCTRTCPKGLNPGKAIAEIKKMMATYKEKKASV

SEQ ID NO: 11757 - protein, 200 aa, Homo sapiens
MFNLTLVHYKASRGAQTAAATAPRIKKFAIYRWDPDKAGDKPHMQTYEVDLNKCGPMVLDALIKIKNEVDSTLTFRRSCREGICGSCAMNINGGNTLACTRRIDTNLNKVSKIYPLPHMYVIKDLVPDLSNFYAQYKSIEPYLKKKDESQEGKQQYLQSIEEREKLDGLYECILCACCSTSCPSYWWNGDKYLGPAVLMQ

SEQ ID NO: 11758 - protein, 123 aa, Homo sapiens
MQTYEVDLNKCGPMVLDALIKIKNEVDSTLTFRRSCREGICGSCAMNINGGNTLACTRRIDTNLNKVSKIYPLPHMYVIKDLVPDLSNFYAQYKSIEPYLKKKDESQEGKQQYLQSIEEREKL

SEQ ID NO: 11759 - protein, 120 aa, Homo sapiens
MAVLWRLSAVCGALGGRAGSKAASLHWTSERVVSVLLLGLLPAAYLNPCSAMDYSLAAALTLHGHWGLGQVVTDYVHGDALQKAAKAGLLALSALTFAGLCYFNYHDVGICKAVAMLWKL

SEQ ID NO: 11760 - protein, 72 aa, Homo sapiens
MAVLWRLSAVCGALGGRALLLRTPVVRPAHISAFLQDRPIPEWCGVQHIHLSPSHHCWSAVVRSRLTATSTF

SEQ ID NO: 11761 - protein, 131 aa, Homo sapiens
MAVLWRLSAVCGALGGRALLLRTPVVRPAHISAFLQDRPIPEWCGVQHIHLSPSHHSGSKAASLHWTSERVVSVLLLGLLPAAYLNPCSAMDYSLAAALTLHGALDKLLLTMFMGMPCRKLPRQGFWHFQL

SEQ ID NO: 11762 - protein, 104 aa, Homo sapiens
MAVLWRLSAVCGALGGRALLLRTPVVRPAHISAFLQDRPIPEWCGVQHIHLSPSHHSGSKAASLHWTSERVVSVLLLGLLPAAYLNPCSAMDYSLAAALTLHGH

SEQ ID NO: 11763 - protein, 159 aa, Homo sapiens
MAVLWRLSAVCGALGGRALLLRTPVVRPAHISAFLQDRPIPEWCGVQHIHLSPSHHSGSKAASLHWTSERVVSVLLLGLLPAAYLNPCSAMDYSLAAALTLHGHWGLGQVVTDYVHGDALQKAAKAGLLALSALTFAGLCYFNYHDVGICKAVAMLWKL

SEQ ID NO: 11764 - protein, 143 aa, Homo sapiens
MAVLWRLSAVCGALGGRALLLRTPVVRPAHISAFLQDRPIPEWCGVQHIHLSPSHHSGSKAASLHWTSERVVSVLLLGLLPAAYLNPCSAMDYSLAAALTLHGHWLECNGAILARHDLGSARSQLTATSAFRVQAILLPQPPK

SEQ ID NO: 11765 - protein, 143 aa, Homo sapiens; identical to SEQ ID NO: 11764

SEQ ID NO: 11766 - protein, 85 aa, Homo sapiens
MAVLWRLSAVCGALGGRALLLRTPVVRPAHISAFLQDRPIPEWCGVQHIHLSPSHHWALDKLLLTMFMGMPCRKLPRQGFWHFQL

SEQ ID NO: 11767 - protein, 55 aa, Homo sapiens
  VARIANT 1: note = misc_feature - Xaa can be any naturally occurring amino acid
XGSKAASLHWTSERVVSVLLLGLLPAAYLNPCSAMDYSLAAALTLHGHWKIKNNE

SEQ ID NO: 11768 - protein, 101 aa, Homo sapiens
  VARIANT 1: note = misc_feature - Xaa can be any naturally occurring amino acid
XWRLSAVCGALGGRALLLRTPVVRPAHISAFLQDRPIPEWCGVQHIHLSPSHHSGSKAASLHWTSERVVSVLLLGLLPAAYLNPCSAMDYSLAAALTLHGH

SEQ ID NO: 11769 - protein, 353 aa, Homo sapiens
MEFRKTMDIDHILDWQPPEVIQKYMPGGLCGYDRDGCPVWYDIIGPLDPKGLLFSVTKQDLLKTKMRDCERILHECDLQTERLGKKIETIVMIFDCEGLGLKHFWKPLVEVYQEFFGLLEENYPETLKFMLIVKATKLFPVGYNLMKPFLSEDTRRKIIVLGNNWKEGLLKLISPEELPAQFGGTLTDPDGNPKCLTKINYGGEIPKSMYVRDQVKTQYEHSVQINRGSSHQVEYEILFPGCVLRWQFSSDGADIGFGVFLKTKMGERQRAGEMTDVLPSQRYNAHMVPEDGNLTCSEAGVYVESESGKSCCHLPVIICSHELQNSHSNSQVMAYQMVRKCKLSRPLPLPASN

SEQ ID NO: 11770 - protein, 341 aa, Homo sapiens
MEFRKTMDIDHILDWQPPEVIQKYMPGGLCGYDRDGCPVWYDIIGPLDPKGLLFSVTKQDLLKTKMRDCERILHECDLQTERLGKKIETIVMIFDCEGLGLKHFWKPLVEVYQEFFGLLEENYPETLKFMLIVKATKLFPVGYNLMKPFLSEDTRRKIIVLGNNWKEGLLKLISPEELPAQFGGTLTDPDGNPKCLTKINYGGEIPKSMYVRDQVKTQYEHSVQINRGSSHQVEYEILFPGCVLRWQFSSDGADIGFGVFLKTKMGERQRAGEMTDVLPSQRYNAHMVPEDGNLTCSEAGVYVLRFDNTYSFVHAKKVSFTVEVLLPDEGMQKYDKELTPV

SEQ ID NO: 11771 - protein, 400 aa, Homo sapiens
MSGRVGDLSPKQAETLAKFRENVQDVLPALPNPDDYFLLRWLRARNFDLQKSEALLRKYMEFRKTMDIDHILDWQPPEVIQKYMPGGLCGYDRDGCPVWYDIIGPLDPKGLLFSVTKQDLLKTKMRDCERILHECDLQTERLGKKIETIVMIFDCEGLGLKHFWKPLVEVYQEFFGLLEENYPETLKFMLIVKATKLFPVGYNLMKPFLSEDTRRKIIVLGNNWKEGLLKLISPEELPAQFGGTLTDPDGNPKCLTKINYGGEIPKSMYVRDQVKTQYEHSVQINRGSSHQVEYEILFPGCVLRWQFSSDGADIGFGVFLKTKMGERQRAGEMTDVLPSQRYNAHMVPEDGNLTCSEAGVYVLRFDNTYSFVHAKKVSFTVEVLLPDEGMQKYDKELTPV

SEQ ID NO: 11772 - protein, 51 aa, Homo sapiens
MSGRVGDLSPKQAETLAKMESLSSRLECCGAISAHCSLCLPGSSNSPASAS

SEQ ID NO: 11773 - protein, 323 aa, Homo sapiens
MVIQKYMPGGLCGYDRDGCPVWYDIIGPLDPKGLLFSVTKQDLLKTKMRDCERILHECDLQTERLGKKIETIVMIFDCEGLGLKHFWKPLVEVYQEFFGLLEENYPETLKFMLIVKATKLFPVGYNLMKPFLSEDTRRKIIVLGNNWKEGLLKLISPEELPAQFGGTLTDPDGNPKCLTKINYGGEIPKSMYVRDQVKTQYEHSVQINRGSSHQVEYEILFPGCVLRWQFSSDGADIGFGVFLKTKMGERQRAGEMTDVLPSQRYNAHMVPEDGNLTCSEAGVYVLRFDNTYSFVHAKKVSFTVEVLLPDEGMQKYDKELTPV

SEQ ID NO: 11774 - protein, 323 aa, Homo sapiens; identical to SEQ ID NO: 11773

SEQ ID NO: 11775 - protein, 231 aa, Homo sapiens
  VARIANT 1: note = misc_feature - Xaa can be any naturally occurring amino acid
XKTSRMCFLPCPTLMIISFYAGSEYMEFRKTMDIDHILDWQPPEVIQKYMPGGLCGYDRDGCPVWYDIIGPLDPKGLLFSVTKQDLLKTKMRDCERILHECDLQTERLGKKIETIVMIFDCEGLGLKHFWKPLVEVYQEFFGLLEENYPETLKFMLIVKATKLFPVGYNLMKPFLSEDTRRKIIVLGNNWKEGLLKLISPEELPAQFGGTLTDPDGNPKCLTKINYGGEIP

SEQ ID NO: 11776 - protein, 1059 aa, Homo sapiens
ARVRDPRTYDRRYWCDAEYDAYRREHSAFGDRPEKRDNNWRYDPRFTGSFDDDPDPHRDPYGEEVDRRSVHSEHSARSLHSAHSLASRRSSLSSHSHQSQIYRSHNVAAGSYEAPLPPGSFHGDFAYGTYRSNFSSGPGFPEYGYPADTVWPAMEQVSSRPTSPEKFSVPHVCARFGPGGQLIKVIPNLPSEGQPALVEVHSMEALLQHTSEQEEMRAFPGPLAKDDTHKVDVINFAQNKAMKCLQNENLIDKESASLLWNFIVLLCRQNGTVVGTDIAELLLRDHRTVWLPGKSPNEANLIDFTNEAVEQVEEEESGEAQLSFLTGGPAAAASSLERETERFRELLLYGRKKDALESAMKNGLWGHALLLASKMDSRTHARVMTRFANSLPINDPLQTVYQLMSGRMPAASTCCGDEKWGDWRPHLAMVLSNLNNNMDVESRTMATMGDTLASRGLLDAAHFCYLMAQAGFGVYTKKTTKLVLIGSNHSLPFLKFATNEAIQRTEAYEYAQSLGAETCPLPSFQVFKFIYSCRLAEMGLATQAFHYCEAIAKSILTQPHLYSPVLISQLVQMASQLRLFDPQLKEKPEEESLAAPTWLVHLQQVERQIKEGAGVWHQDGALPQQCPGTPSSEMEQLDRPGLSQPGALGIANPLLAVPAPSPEHSSPSVRLLPSAPQTLPDGPLASPARVPMFPVPLPPGPLEPGPGCVTPGPALGFLEPSGPGLPPGVPPLQERRHLLQEARSPDPGIVPQEAPVGNSLSELSEENFDGKFANLTPSRTVPDSEAPPGWDRADSGPTQPPLSLSPAPETKRPGQAAKKETKEPKKGESWFFRWLPGKKKTEAYLPDDKNKSIVWDEKKNQWVNLNEPEEEKKAPPPPPTSMPKTVQAAPPALPGPPGAPVNMYSRRAAGTRARYVDVLNPSGTQRSEPALAPADFVAPLAPLPIPSNLFVPTPDAEEPQLPDGTGREGPAAARGLANPEPAPEPKVLSSAASLPGSELPSSRPEGSQGGEAPGDLPAAGGPPSGAMPFYNPAQLAQACATSGSSRLGRIGQRKHLVLN

SEQ ID NO: 11777 - protein, 385 aa, Homo sapiens
MDLLPTSILLASLWICSHLHPPGVSVDLPPTSILLVSLWICSHLHPPGVSVDRPPPPSSWCLCGSPPTSILLVSLWICSPPPSSWCLCGSAPTSILLVSLWIWRLWGLTEGESWFFRWLPGKKKTEAYLPDDKNKSIVWDEKKNQWVNLNEPEEEKKAPPPPPTSMPKTVQAAPPALPGPPGAPVNMYSRRAAGTRARYVDVLNPSGTQRSEPALAPADFVAPLAPLPIPSNLFVPTPVSSVRPQGRSGRNDGLLALSSPDAEEPQLPDGTGREGPAAARGLANPEPAPEPKVLSSAASLPGSELPSSRPEGSQGGELSRCSSMSSLSREVSQHFNQAPGDLPAAGGPPSGAMPFYNPAQLAQACATSGSSRLGRIGQRKHLVLN

SEQ ID NO: 11778 - protein, 2134 aa, Homo sapiens
MPGLDRPLSRQNPHDGVVTPAASPSLPQPGLQMPGQWGPVQGGPQPSGQHRSPCPEGPVPSGVPCATSVPHFPTPSILHQGPGHEQHSPLVAPPAALPSDGRDEVSHLQSGSHLANNSDPESTFRQNPRIVNHWASPELRQNPGVKNEHRPASALVNPLARGDSPENRTHHPLGAGAGSGCAPLEADSGASGALAMFFQGGETENEENLSSEKAGLSGQADFDDFCSSPGLGRPPAPTHVGAGSLCQALLPGPSNEAAGDVWGDTASTGVPDASGSQYENVENLEFVQNQEVLPSEPLNLDPSSPSDQFRYGPLPGPAVPRHGAVCHTGAPDATLHTVHPDSVSSSYSSRSHGRLSGSARPQELVGTFIQQEVGKPEDEASGSFFKQIDSSPVGGETDETTVSQNYRGSVSQPSTPSPPKPTGIFQTSANSSFEPVKSHLVGVKPFEADRANVVGEVRETCVRQKQCRPAAALPDASPGNLEQPPDNMETLCAPQVCPLPLNSTTEAVHMLPHAGAPPLDTVYPAPEKRPSARTQGPVKCESPATTLWAQSELPDFGGNVLLAPAAPALYVCAKPQPPVVQPPEEAMSGQQSRNPSSAAPVQSRGGIGASENLENPPKMGEEEALQSQASSGYASLLSSPPTESLQNPPVLIAQPDHSYNLAQPINFSVSLSNSHEKNQSWREALVGDRPAVSSWALGGDSGENTSLSGIPTSSVLSLSLPSSVAQSNFPQGSGASEMVSNQPANLLVQPPSQPVPENLVPESQKDRKAGSALPGFANSPAGSTSVVLVPPAHGTLVPDGNKANHSSHQEDTYGALDFTLSRTLENPVNVYNPSHSDSLASQQSVASHPRQSGPGAPNLDRFYQQVTKDAQGQPGLERAQQELVPPQQQASPPQLPKAMFSELSNPESLPAQGQAQNSAQSPASLVLVDAGQQLPPRPPQSSSVSLVSSGSGQAAVPSEQPWPQPVPALAPGPPPQDLAAYYYYRPLYDAYQPQYSLPYPPEPGAASLYYQDVYSLYEPRYRPYDGAASAYAQNYRYPEPERPSSRASHSSERPPPRQGYPEGYYSSKSGWSSQSDYYASYYSSQYDYGDPGHWDRYHYSARVRDPRTYDRRYWCDAEYDAYRREHSAFGDRPEKRDNNWRYDPRFTGSFDDDPDPHRDPYGEEVDRRSVHSEHSARSLHSAHSLASRRSSLSSHSHQSQIYRSHNVAAGSYEAPLPPGSFHGDFAYGTYRSNFSSGPGFPEYGYPADTVWPAMEQVSSRPTSPEKFSVPHVCARFGPGGQLIKVIPNLPSEGQPALVEVHSMEALLQHTSEQEEMRAFPGPLAKDDTHKVDVINFAQNKAMKCLQNENLIDKESASLLWNFIVLLCRQNGTVVGTDIAELLLRDHRTVWLPGKSPNEANLIDFTNEAVEQVEEEESGEAQLSFLTGGPAAAASSLERETERFRELLLYGRKKDALESAMKNGLWGHALLLASKMDSRTHARVMTRFANSLPINDPLQTVYQLMSGRMPAASTCCGDEKWGDWRPHLAMVLSNLNNNMDVESRTMATMGDTLASRGLLDAAHFCYLMAQAGFGVYTKKTTKLVLIGSNHSLPFLKFATNEAIQRTEAYEYAQSLGAETCPLPSFQVFKFIYSCRLAEMGLATQAFHYCEAIAKSILTQPHLYSPVLISQLVQMASQLRLFDPQLKEKPEEESLAAPTWLVHLQQVERQIKEGAGVWHQDGALPQQCPGTPSSEMEQLDRPGLSQPGALGIANPLLAVPAPSPEHSSPSVRLLPSAPQTLPDGPLASPARVPMFPVPLPPGPLEPGPGCVTPGPALGFLEPSGPGLPPGVPPLQERRHLLQEARSPDPGIVPQEAPVGNSLSELSEENFDGKFANLTPSRTVPDSEAPPGWDRADSGPTQPPLSLSPAPETKRPGQAAKKETKEPKKGESWFFRWLPGKKKTEAYLPDDKNKSIVWDEKKNQWVNLNEPEEEKKAPPPPPTSMPKTVQAAPPALPGPPGAPVNMYSRRAAGTRARYVDVLNPSGTQRSEPALAPADFVAPLAPLPIPSNLFVPTPDAEEPQLPDGTGREGPAAARGLANPEPAPEPKAPGDLPAAGGPPSGAMPFYNPAQLAQACATSGSSRLGRIGQRKHLVLN

SEQ ID NO: 11779 - protein, 2154 aa, Homo sapiens
MPGLDRPLSRQNPHDGVVTPAASPSLPQPGLQMPGQWGPVQGGPQPSGQHRSPCPEGPVPSGVPCATSVPHFPTPSILHQGPGHEQHSPLVAPPAALPSDGRDEVSHLQSGSHLANNSDPESTFRQNPRIVNHWASPELRQNPGVKNEHRPASALVNPLARGDSPENRTHHPLGAGAGSGCAPLEADSGASGALAMFFQGGETENEENLSSEKAGLSGQADFDDFCSSPGLGRPPAPTHVGAGSLCQALLPGPSNEAAGDVWGDTASTGVPDASGSQYENVENLEFVQNQEVLPSEPLNLDPSSPSDQFRYGPLPGPAVPRHGAVCHTGAPDATLHTVHPDSVSSSYSSRSHGRLSGSARPQELVGTFIQQEVGKPEDEASGSFFKQIDSSPVGGETDETTVSQNYRGSVSQPSTPSPPKPTGIFQTSANSSFEPVKSHLVGVKPFEADRANVVGEVRETCVRQKQCRPAAALPDASPGNLEQPPDNMETLCAPQVCPLPLNSTTEAVHMLPHAGAPPLDTVYPAPEKRPSARTQGPVKCESPATTLWAQSELPDFGGNVLLAPAAPALYVCAKPQPPVVQPPEEAMSGQQSRNPSSAAPVQSRGGIGASENLENPPKMGEEEALQSQASSGYASLLSSPPTESLQNPPVLIAQPDHSYNLAQPINFSVSLSNSHEKNQSWREALVGDRPAVSSWALGGDSGENTSLSGIPTSSVLSLSLPSSVAQSNFPQGSGASEMVSNQPANLLVQPPSQPVPENLVPESQKDRKAGSALPGFANSPAGSTSVVLVPPAHGTLVPDGNKANHSSHQEDTYGALDFTLSRTLENPVNVYNPSHSDSLASQQSVASHPRQSGPGAPNLDRFYQQVTKDAQGQPGLERAQQELVPPQQQASPPQLPKAMFSELSNPESLPAQGQAQNSAQSPASLVLVDAGQQLPPRPPQSSSVSLVSSGSGQAAVPSEQPWPQPVPALAPGPPPQDLAAYYYYRPLYDAYQPQYSLPYPPEPGAASLYYQDVYSLYEPRYRPYDGAASAYAQNYRYPEPERPSSRASHSSERPPPRQGYPEGYYSSKSGWSSQSDYYASYYSSQYDYGDPGHWDRYHYSARVRDPRTYDRRYWCDAEYDAYRREHSAFGDRPEKRDNNWRYDPRFTGSFDDDPDPHRDPYGEEVDRRSVHSEHSARSLHSAHSLASRRSSLSSHSHQSQIYRSHNVAAGSYEAPLPPGSFHGDFAYGTYRSNFSSGPGFPEYGYPADTVWPAMEQVSSRPTSPEKFSVPHVCARFGPGGQLIKVIPNLPSEGQPALVEVHSMEALLQHTSEQEEMRAFPGPLAKDDTHKVDVINFAQNKAMKCLQNENLIDKESASLLWNFIVLLCRQNGTVVGTDIAELLLRDHRTVWLPGKSPNEANLIDFTNEAVEQVEEEESGEAQLSFLTGGPAAAASSLERETERFRELLLYGRKKDALESAMKNGLWGHALLLASKMDSRTHARVMTRFANSLPINDPLQTVYQLMSGRMPAASTCCGDEKWGDWRPHLAMVLSNLNNNMDVESRTMATMGDTLASRGLLDAAHFCYLMAQAGFGVYTKKTTKLVLIGSNHSLPFLKFATNEAIQRTEAYEYAQSLGAETCPLPSFQVFKFIYSCRLAEMGLATQAFHYCEAIAKSILTQPHLYSPVLISQLVQMASQLRLFDPQLKEKPEEESLAAPTWLVHLQQVERQIKEGAGVWHQDGALPQQCPGTPSSEMEQLDRPGLSQPGALGIANPLLAVPAPSPEHSSPSVRLLPSAPQTLPDGPLASPARVPMFPVPLPPGPLEPGPGCVTPGPALGFLEPSGPGLPPGVPPLQERRHLLQEARSPDPGIVPQEAPVGNSLSELSEENFDGKFANLTPSRTVPDSEAPPGWDRADSGPTQPPLSLSPAPETKRPGQAAKKETKEPKKGESWFFRWLPGKKKTEAYLPDDKNKSIVWDEKKNQWVNLNEPEEEKKAPPPPPTSMPKTVQAAPPALPGPPGAPVNMYSRRAAGTRARYVDVLNPSGTQRSEPALAPADFVAPLAPLPIPSNLFVPTPDAEEPQLPDGTGREGPAAARGLANPEPAPEPKLSRCSSMSSLSREVSQHFNQAPGDLPAAGGPPSGAMPFYNPAQLAQACATSGSSRLGRIGQRKHLVLN

SEQ ID NO: 11780 - protein, 2357 aa, Homo sapiens
MQPPPQTVPSGMAGPPPAGNPRSVFWASSPYRRRANNNAAVAPTTCPLQPVTDPFAFSRQALQSTPLGSSSKSSPPVLQGPAPAGFSQHPGLLVPHTHARDSSQGPCEPLPGPLTQPRAHASPFSGALTPSAPPGPEMNRSAEVGPSSEPEVQTLPYLPHYIPGVDPETSHGGHPHGNMPGLDRPLSRQNPHDGVVTPAASPSLPQPGLQMPGQWGPVQGGPQPSGQHRSPCPEGPVPSGVPCATSVPHFPTPSILHQGPGHEQHSPLVAPPAALPSDGRDEVSHLQSGSHLANNSDPESTFRQNPRIVNHWASPELRQNPGVKNEHRPASALVNPLARGDSPENRTHHPLGAGAGSGCAPLEADSGASGALAMFFQGGETENEENLSSEKAGLSGQADFDDFCSSPGLGRPPAPTHVGAGSLCQALLPGPSNEAAGDVWGDTASTGVPDASGSQYENVENLEFVQNQEVLPSEPLNLDPSSPSDQFRYGPLPGPAVPRHGAVCHTGAPDATLHTVHPDSVSSSYSSRSHGRLSGSARPQELVGTFIQQEVGKPEDEASGSFFKQIDSSPVGGETDETTVSQNYRGSVSQPSTPSPPKPTGIFQTSANSSFEPVKSHLVGVKPFEADRANVVGEVRETCVRQKQCRPAAALPDASPGNLEQPPDNMETLCAPQVCPLPLNSTTEAVHMLPHAGAPPLDTVYPAPEKRPSARTQGPVKCESPATTLWAQSELPDFGGNVLLAPAAPALYVCAKPQPPVVQPPEEAMSGQQSRNPSSAAPVQSRGGIGASENLENPPKMGEEEALQSQASSGYASLLSSPPTESLQNPPVLIAQPDHSYNLAQPINFSVSLSNSHEKNQSWREALVGDRPAVSSWALGGDSGENTSLSGIPTSSVLSLSLPSSVAQSNFPQGSGASEMVSNQPANLLVQPPSQPVPENLVPESQKDRKAGSALPGFANSPAGSTSVVLVPPAHGTLVPDGNKANHSSHQEDTYGALDFTLSRTLENPVNVYNPSHSDSLASQQSVASHPRQSGPGAPNLDRFYQQVTKDAQGQPGLERAQQELVPPQQQASPPQLPKAMFSELSNPESLPAQGQAQNSAQSPASLVLVDAGQQLPPRPPQSSSVSLVSSGSGQAAVPSEQPWPQPVPALAPGPPPQDLAAYYYYRPLYDAYQPQYSLPYPPEPGAASLYYQDVYSLYEPRYRPYDGAASAYAQNYRYPEPERPSSRASHSSERPPPRQGYPEGYYSSKSGWSSQSDYYASYYSSQYDYGDPGHWDRYHYSARVRDPRTYDRRYWCDAEYDAYRREHSAFGDRPEKRDNNWRYDPRFTGSFDDDPDPHRDPYGEEVDRRSVHSEHSARSLHSAHSLASRRSSLSSHSHQSQIYRSHNVAAGSYEAPLPPGSFHGDFAYGTYRSNFSSGPGFPEYGYPADTVWPAMEQVSSRPTSPEKFSVPHVCARFGPGGQLIKVIPNLPSEGQPALVEVHSMEALLQHTSEQEEMRAFPGPLAKDDTHKVDVINFAQNKAMKCLQNENLIDKESASLLWNFIVLLCRQNGTVVGTDIAELLLRDHRTVWLPGKSPNEANLIDFTNEAVEQVEEEESGEAQLSFLTGGPAAAASSLERETERFRELLLYGRKKDALESAMKNGLWGHALLLASKMDSRTHARVMTRFANSLPINDPLQTVYQLMSGRMPAASTCCGDEKWGDWRPHLAMVLSNLNNNMDVESRTMATMGDTLASRGLLDAAHFCYLMAQAGFGVYTKKTTKLVLIGSNHSLPFLKFATNEAIQRTEAYEYAQSLGAETCPLPSFQVFKFIYSCRLAEMGLATQAFHYCEAIAKSILTQPHLYSPVLISQLVQMASQLRLFDPQLKEKPEEESLAAPTWLVHLQQVERQIKEGAGVWHQDGALPQQCPGTPSSEMEQLDRPGLSQPGALGIANPLLAVPAPSPEHSSPSVRLLPSAPQTLPDGPLASPARVPMFPVPLPPGPLEPGPGCVTPGPALGFLEPSGPGLPPGVPPLQERRHLLQEARSPDPGIVPQEAPVGNSLSELSEENFDGKFANLTPSRTVPDSEAPPGWDRADSGPTQPPLSLSPAPETKRPGQAAKKETKEPKKGESWFFRWLPGKKKTEAYLPDDKNKSIVWDEKKNQWVNLNEPEEEKKAPPPPPTSMPKTVQAAPPALPGPPGAPVNMYSRRAAGTRARYVDVLNPSGTQRSEPALAPADFVAPLAPLPIPSNLFVPTPDAEEPQLPDGTGREGPAAARGLANPEPAPEPKVLSSAASLPGSELPSSRPEGSQGGELSRCSSMSSLSREVSQHFNQAPGDLPAAGGPPSGAMPFYNPAQLAQACATSGSSRLGRIGQRKHLVLN

SEQ ID NO: 11781 - protein, 2334 aa, Homo sapiens
MQPPPQTVPSGMAGPPPAGNPRSVFWASSPYRRRANNNAAVAPTTCPLQPVTDPFAFSRQALQSTPLGSSSKSSPPVLQGPAPAGFSQHPGLLVPHTHARDSSQGPCEPLPGPLTQPRAHASPFSGALTPSAPPGPEMNRSAEVGPSSEPEVQTLPYLPHYIPGVDPETSHGGHPHGNMPGLDRPLSRQNPHDGVVTPAASPSLPQPGLQMPGQWGPVQGGPQPSGQHRSPCPEGPVPSGVPCATSVPHFPTPSILHQGPGHEQHSPLVAPPAALPSDGRDEVSHLQSGSHLANNSDPESTFRQNPRIVNHWASPELRQNPGVKNEHRPASALVNPLARGDSPENRTHHPLGAGAGSGCAPLEADSGASGALAMFFQGGETENEENLSSEKAGLSGQADFDDFCSSPGLGRPPAPTHVGAGSLCQALLPGPSNEAAGDVWGDTASTGVPDASGSQYENVENLEFVQNQEVLPSEPLNLDPSSPSDQFRYGPLPGPAVPRHGAVCHTGAPDATLHTVHPDSVSSSYSSRSHGRLSGSARPQELVGTFIQQEVGKPEDEASGSFFKQIDSSPVGGETDETTVSQNYRGSVSQPSTPSPPKPTGIFQTSANSSFEPVKSHLVGVKPFEADRANVVGEVRETCVRQKQCRPAAALPDASPGNLEQPPDNMETLCAPQVCPLPLNSTTEAVHMLPHAGAPPLDTVYPAPEKRPSARTQGPVKCESPATTLWAQSELPDFGGNVLLAPAAPALYVCAKPQPPVVQPPEEAMSGQQSRNPSSAAPVQSRGGIGASENLENPPKMGEEEALQSQASSGYASLLSSPPTESLQNPPVLIAQPDHSYNLAQPINFSVSLSNSHEKNQSWREALVGDRPAVSSWALGGDSGENTSLSGIPTSSVLSLSLPSSVAQSNFPQGSGASEMVSNQPANLLVQPPSQPVPENLVPESQKDRKAGSALPGFANSPAGSTSVVLVPPAHGTLVPDGNKANHSSHQEDTYGALDFTLSRTLENPVNVYNPSHSDSLASQQSVASHPRQSGPGAPNLDRFYQQVTKDAQGQPGLERAQQELVPPQQQASPPQLPKAMFSELSNPESLPAQGQAQNSAQSPASLVLVDAGQQLPPRPPQSSSVSLVSSGSGQAAVPSEQPWPQPVPALAPGPPPQDLAAYYYYRPLYDAYQPQYSLPYPPEPGAASLYYQDVYSLYEPRYRPYDGAASAYAQNYRYPEPERPSSRASHSSERPPPRQGYPEGYYSSKSGWSSQSDYYASYYSSQYDYGDPGHWDRYHYSARVRDPRTYDRRYWCDAEYDAYRREHSAFGDRPEKRDNNWRYDPRFTGSFDDDPDPHRDPYGEEVDRRSVHSEHSARSLHSAHSLASRRSSLSSHSHQSQIYRSHNVAAGSYEAPLPPGSFHGDFAYGTYRSNFSSGPGFPEYGYPADTVWPAMEQVSSRPTSPEKFSVPHVCARFGPGGQLIKVIPNLPSEGQPALVEVHSMEALLQHTSEQEEMRAFPGPLAKDDTHKVDVINFAQNKAMKCLQNENLIDKESASLLWNFIVLLCRQNGTVVGTDIAELLLRDHRTVWLPGKSPNEANLIDFTNEAVEQVEEEESGEAQLSFLTGGPAAAASSLERETERFRELLLYGRKKDALESAMKNGLWGHALLLASKMDSRTHARVMTRFANSLPINDPLQTVYQLMSGRMPAASTCCGDEKWGDWRPHLAMVLSNLNNNMDVESRTMATMGDTLASRGLLDAAHFCYLMAQAGFGVYTKKTTKLVLIGSNHSLPFLKFATNEAIQRTEAYEYAQSLGAETCPLPSFQVFKFIYSCRLAEMGLATQAFHYCEAIAKSILTQPHLYSPVLISQLVQMASQLRLFDPQLKEKPEEESLAAPTWLVHLQQVERQIKEGAGVWHQDGALPQQCPGTPSSEMEQLDRPGLSQPGALGIANPLLAVPAPSPEHSSPSVRLLPSAPQTLPDGPLASPARVPMFPVPLPPGPLEPGPGCVTPGPALGFLEPSGPGLPPGVPPLQERRHLLQEARSPDPGIVPQEAPVGNSLSELSEENFDGKFANLTPSRTVPDSEAPPGWDRADSGPTQPPLSLSPAPETKRPGQAAKKETKEPKKGESWFFRWLPGKKKTEAYLPDDKNKSIVWDEKKNQWVNLNEPEEEKKAPPPPPTSMPKTVQAAPPALPGPPGAPVNMYSRRAAGTRARYVDVLNPSGTQRSEPALAPADFVAPLAPLPIPSNLFVPTPVSSVRPQGRSGRNDGLLALSSPDAEEPQLPDGTGREGPAAARGLANPEPAPEPKAPGDLPAAGGPPSGAMPFYNPAQLAQACATSGSSRLGRIGQRKHLVLN

SEQ ID NO: 11782 - protein, 751 aa, Homo sapiens
PAAAASSLERETERFRELLLYGRKKDALESAMKNGLWGHALLLASKMDSRTHARVMTRFANSLPINDPLQTVYQLMSGRMPAASTCCGDEKWGDWRPHLAMVLSNLNNNMDVESRTMATMGDTLASRGLLDAAHFCYLMAQAGFGVYTKKTTKLVLIGSNHSLPFLKFATNEAIQRTEAYEYAQSLGAETCPLPSFQVFKFIYSCRLAEMGLATQAFHYCEAIAKSILTQPHLYSPVLISQLVQMASQLRLFDPQLKEKPEEESLAAPTWLVHLQQVERQIKEGAGVWHQDGALPQQCPGTPSSEMEQLDRPGLSQPGALGIANPLLAVPAPSPEHSSPSVRLLPSAPQTLPDGPLASPARVPMFPVPLPPGPLEPGPGCVTPGPALGFLEPSGPGLPPGVPPLQERRHLLQEARSPDPGIVPQEAPVGNSLSELSEENFDGKFANLTPSRTVPDSEAPPGWDRADSGPTQPPLSLSPAPETKRPGQAAKKETKEPKKGESWFFRWLPGKKKTEAYLPDDKNKSIVWDEKKNQWVNLNEPEEEKKAPPPPPTSMPKTVQAAPPALPGPPGAPVNMYSRRAAGTRARYVDVLNPSGTQRSEPALAPADFVAPLAPLPIPSNLFVPTPDAEEPQLPDGTGREGPAAARGLANPEPAPEPKVLSSAASLPGSELPSSRPEGSQGGELSRCSSMSSLSREVSQHFNQAPGDLPAAGGPPSGAMPFYNPAQLAQACATSGSSRLGRIGQRKHLVLN

SEQ ID NO: 11783 - protein, 1060 aa, Homo sapiens
MELWAPQRLPQTRGKATAPSKDPDRGFRRDGHHRPVPHSWHNGERFHQWQDNRGSPQPQQEPRADHQQQPHYASRPGDWHQPVSGVDYYEGGYRNQLYSRPGYENSYQSYQSPTMREEYAYGSYYYHGHPQWLQEERVPRQRSPYIWHEDYREQKYLDEHHYENQHSPFGTNSETHFQSNSRNPCKDSPASNSGQEWPGELFPGSLLAEAQKNKPSLASESNLLQQRESGLSSSSYELSQYIRDAPERDDPPASAAWSPVQADVSSAGPKAPMKFYIPHVPVSFGPGGQLVHVGPSSPTDGQAALVELHSMEVILNDSEEQEEMRSFSGPLIREDVHKVDIMTFCQQKAAQSCKSETLGSRDSALLWQLLVLLCRQNGSMVGSDIAELLMQDCKKLEKYKRQPPVANLINLTDEDWPVLSSGTPNLLTGEIPPSVETPAQIVEKFTRLLYYGRKKEALEWAMKNHLWGHALFLSSKMDPQTYSWVMSGFTSTLALNDPLQTLFQLMSGRIPQAATCCGEKQWGDWRPHLAVILSNQAGDPELYQRAIVAIGDTLAGKGLVEAAHFCYLMAHVPFGHYTVKTDHLVLLGSSHSQEFLKFATTEAIQRTEIFEYCQMLGRPKSFIPSFQVYKLLYASRLADYGLVSQALHYCEAIGAAVLSQGESSHPVLLVELIKLAEKLKLSDPLVLERRSGDRDLEPDWLAQLRRQLEQKVAGDIGDPHPTRSDISGAGGTTTENTFYQDFSGCQGYSEAPGYRSALWLTPEQTCLLQPSPQQPFPLQPGSYPAGGGAGQTGTPRPFYSVPETHLPGTGSSVAVTEATGGTVWEEMLQTHLGPGENTVSQETSQPPDGQEVISKPQTPLAARPRSISESSASSAKEDEKESSDEADKNSPRNTAQRGKLGDGKEHTKSSGFGWFSWFRSKPTKNASPAGDEDSSDSPDSEETPRASSPHQAGLGLSLTPSPESPPLPDVSAFSRGRGGGEGRGSASSGGAAAGAGVGGLSGPESVSFELCSNPGVLLPPPALKGAVPLYNPSQVPQLPTATSLNRPNRLAQRRYPTQPC

SEQ ID NO: 11784 - protein, 625 aa, Homo sapiens
MELWAPQRLPQTRGKATAPSKDPDRGFRRDGHHRPVPHSWHNGERFHQWQDNRGSPQPQQEPRADHQQQPHYASRPGDWHQPVSGVDYYEGGYRNQLYSRPGYENSYQSYQSPTMREEYAYGSYYYHGHPQWLQEERVPRQRSPYIWHEDYREQKYLDEHHYENQHSPFGTNSETHFQSNSRNPCKDSPASNSGQEWPGELFPGSLLAEAQKNKPSLASESNLLQQRESGLSSSSYELSQYIRDAPERDDPPASAAWSPVQAEDVSSAGPKAPMKFYIPHVPVSFGPGGQLVHVGPSSPTDGQAALVELHSMEVILNDSEEQEEMRSFSGPLIREDVHKVDIMTFCQQKAAQSCKSETLGSRDSALLWQLLVLLCRQNGSMVGSDIAELLMQDCKKLEKYKRQPPVANLINLTDEDWPVLSSGTPNLLTGEIPPSVETPAQIVEKFTRLLYYGRKKEALEWAMKNHLWGHALFLSSKMDPQTYSWVMSGFTSTLALNDPLQTLFQLMSGRIPQAATCCGEKQWGDWRPHLAVILSNQAGDPELYQRAIVAIGDTLAGKGLVEAAHFCYLMAHVPFGHYTVKTDHLVLLGSSHRYATWEKGNSKDIFQGTVLALVGFYGSIFHFLM

SEQ ID NO: 11785 - protein, 316 aa, Homo sapiens
MELWAPQRLPQTRGKATAPSKDPDRGFRRDGHHRPVPHSWHNGERFHQWQDNRGSPQPQQEPRADHQQQPHYASRPGDWHQPVSGVDYYEGGYRNQLYSRPGYENSYQSYQSPTMREEYAYGSYYYHGHPQWLQEERVPRQRSPYIWHEDYREQKYLDEHHYENQHSPFGTNSETHFQSNSRNPCKDSPASNSGQEWPGELFPGSLLAEAQKNKPSLASESNLLQQRESGLSSSSYELSQYIRDAPERDDPPASAAWSPVQADVSSAGPKAPMKFYIPHVPVSFGPGGQLVHVGPSSPTDGQAALVELHSMEGRCT

SEQ ID NO: 11786 - protein, 175 aa, Homo sapiens
  VARIANT 1: note = misc_feature - Xaa can be any naturally occurring amino acid
XLGSRDSALLWQLLVLLCRQNGSMVGSDIAELLMQDCKKLEKYKRQPPVANLINLTDEDWPVLSSGTPNLLTGEIPPSVETPAQIVEKFTRLLYYGRKKCCGEKQWGDWRPHLAVILSNQAGDPELYQRAIVAIGDTLAGKGLVEAAHFCYLMAHVPFGHYTVKTDHLVLLGSSH

SEQ ID NO: 11787 - protein, 107 aa, Homo sapiens
MSVIFFACVVRVRDGLPLSASTDFYHTQDFLEWRRRLKSLALRLAQYPGRGSAEGCDFSIHFSSFGDVACMAICSCQCPAAMAFCFLETLWWEFTASYDTTCIGLAS

SEQ ID NO: 11788 - protein, 142 aa, Homo sapiens
MSVIFFACVVRVRDGLPLSASTDFYHTQDFLEWRRRLKSLALRLAQYPGRGSAEGCDFSIHFSSFGDVACMAICSCQCPAAMAFCFLETLWWEFTASYDTTCIGLASRPYAFLEFDSIIQKVKWHFNYVSSSQMECSLEKIQ

SEQ ID NO: 11789 - protein, 228 aa, Homo sapiens
MSVIFFACVVRVRDGLPLSASTDFYHTQDFLEWRRRLKSLALRLAQYPGRGSAEGCDFSIHFSSFGDVACMAICSCQCPAAMAFCFLETLWWEFTASYDTTCIGLASRPYAFLEFDSIIQKVKWHFNYVSSSQMECSLEKIQEELKLQPPAVLTLEDTDVANGVMNGHTPMHLEPAPNFRMEPVTALGILSLILNIMCAALNLIRGVHLAEHSLQDPRSWFCWLDQTS

SEQ ID NO: 11790 - protein, 236 aa, Homo sapiens
MSVIFFACVVRVRDGLPLSASTDFYHTQDFLEWRRRLKSLALRLAQYPGRGSAEGCDFSIHFSSFGDVACMAICSCQCPAAMAFCFLETLWWEFTASYDTTCIGLASRPYAFLEFDSIIQKVKWHFNYVSSSQMECSLEKIQEELKLQPPAVLTLEDTDVANGVMNGHTPMHLEPAPNFRMEPVTALGILSLILNIMCAALNLIRGVHLAEHSLQVAHEEIGNILAFLVPFVACIF

SEQ ID NO: 11791 - protein, 303 aa, Homo sapiens
MSVIFFACVVRVRDGLPLSASTDFYHTQDFLEWRRRLKSLALRLAQYPGRGSAEGCDFSIHFSSFGDVACMAICSCQCPAAMAFCFLETLWWEFTASYDTTCIGLASRPYAFLEFDSIIQKVKWHFNYVSSSQMECSLEKIQEELKLQPPAVLTLEDTDVANGVMNGHTPMHLEPAPNFRMEPVTALGILSLILNIMCAALNLIRGVHLAEHSLQVAHEEIGNILAFLVPFVACIFQCYLYLFYSPARTMKVVLMLLFICLGNMYLHGLRNLWQILFHIGVAFLSSYQILTRQLQEKQSDCGV

SEQ ID NO: 11792 - protein, 250 aa, Homo sapiens
MSVIFFACVVRVRDGLPLSASTDFYHTQDFLEWRRRLKSLALRLAQYPGRGSAEGCDFSIHFSSFGDVACMAICSCQCPAAMAFCFLETLWWEFTASYDTTCIGLASRPYAFLEFDSIIQKVKWHFNYVSSSQMECSLEKIQEELKLQPPAVLTLEDTDVANGVMNGHTPMHLEPAPNFRMEPVTALGILSLILNIMCAALNLIRGVHLAEHSLQVAHEEIGNILAFLVPFVACIFQDPRSWFCWLDQTS

SEQ ID NO: 11793 - protein, 250 aa, Homo sapiens; identical to SEQ ID NO: 11792

SEQ ID NO: 11794 - protein, 61 aa, Homo sapiens
MSVIFFACVVRVRDGLPLSASTDFYHTQDFLEWRRRLKSLALRLAQYPGRGSAEGCDFSIQ

SEQ ID NO: 11795 - protein, 72 aa, Homo sapiens
MSVIFFACVVRVRDGLPLSASTDFYHTQDFLEWRRRLKSLALRLAQYPGRGSAEGCDFSIQDKVLPCCPGWS

SEQ ID NO: 11796 - protein, 72 aa, Homo sapiens; identical to SEQ ID NO: 11795

SEQ ID NO: 11797 - protein, 143 aa, Homo sapiens
MSVIFFACVVRVRDGLPLSASTDFYHTQDFLEWRRRLKSLALRLAQYPGRGSAEGCDFSIQHFKGSGRKTVSGIGRTEETIYLQQTATGLFKAKQVQNSVFLLSGTWPAWLSAPASVQQPWPSASWRPCGGNSQLPMTLPALA

SEQ ID NO: 11798 - protein, 75 aa, Homo sapiens
MSVIFFACVVRVRDGLPLSASTDFYHTQDFLEWRRRLKSLALRLAQYPGRGSAEGCDFSIQLLDILKEAEERQSQ

SEQ ID NO: 11799 - protein, 225 aa, Homo sapiens
  VARIANT 1: note = misc_feature - Xaa can be any naturally occurring amino acid
XAAMAFCFLETLWWEFTASYDTTCIGLASRPYAFLEFDSIIQKVKWHFNYVSSSQMECSLEKIQEELKLQPPAVLTLEDTDVANGVMNGHTPMHLEPAPNFRMEPVTALGILSLILNIMCAALNLIRGVHLAEHSLQVAHEEIGNILAFLVPFVACIFQCYLYLFYSPARTMKVVLMLLFICLGNMYLHGLRNLWQILFHIGVAFLSSYQILTRQLQEKQSDCGV

SEQ ID NO: 11800 - protein, 286 aa, Homo sapiens
FGGKLVTFENVRMPSHQGAEQQQQQHHVFISQVVTEKEFLSRSDQLQQAVQSQGFINYCQKKIDASQTEFEKNVWSFLKVNFEDDSRGKYLELLGYRKEDLGKKALKDSDQVAQSDGEESPAAEEQLLGEHIKEEKEESEFLPSSGGTFNISVSGDIDGLITQALLTGNFESAVDLCLHDNRMADAIILAIAGGQELLARTQKKYFAKSQSKITRLITAVVMKNWKEIVESCDLKNWREALAAVLTYAKPDEFSALCDLLGTRLENEGDSLLQTQACLCYICAGNV

SEQ ID NO: 11801 - protein, 11 aa, Homo sapiens
MKLKEVDRTAM

SEQ ID NO: 11802 - protein, 27 aa, Homo sapiens
MKLKEVDRTAMQAWSPAQNHPIYLATG

SEQ ID NO: 11803 - protein, 65 aa, Homo sapiens
MKLKEVDRTAMQAWSPAQNHPIYLATGTSAQQLDATFSTNASLEIFELDLSDPSLDMKSCATFSS

SEQ ID NO: 11804 - protein, 66 aa, Homo sapiens
MKLKEVDRTAMQAWSPAQNHPIYLATGTSAQQLDATFSTNASLEIFELDLSDPSLDMKSCATFSSS

SEQ ID NO: 11805 - protein, 81 aa, Homo sapiens
MKLKEVDRTAMQAWSPAQNHPIYLATGTSAQQLDATFSTNASLEIFELDLSDPSLDMKSCATFSSSHRYHKLIWGPYKMDS

SEQ ID NO: 11806 - protein, 92 aa, Homo sapiens
MKLKEVDRTAMQAWSPAQNHPIYLATGTSAQQLDATFSTNASLEIFELDLSDPSLDMKSCATFSSSHRYHKLIWGPYKMDSKGDVSGVLIAD

SEQ ID NO: 11807 - protein, 165 aa, Homo sapiens
MKLKEVDRTAMQAWSPAQNHPIYLATGTSAQQLDATFSTNASLEIFELDLSDPSLDMKSCATFSSSHRYHKLIWGPYKMDSKGDVSGVLIAGGENGNIILYDPSKIIAGDKEVVIAQNDKHTGPVRALDVNIFQTNLVASGANESEIYIWDLNNFATPMTPGAKT

SEQ ID NO: 11808 - protein, 166 aa, Homo sapiens
MKLKEVDRTAMQAWSPAQNHPIYLATGTSAQQLDATFSTNASLEIFELDLSDPSLDMKSCATFSSSHRYHKLIWGPYKMDSKGDVSGVLIAGGENGNIILYDPSKIIAGDKEVVIAQNDKHTGPVRALDVNIFQTNLVASGANESEIYIWDLNNFATPMTPGAKTQ

SEQ ID NO: 11809 - protein, 1106 aa, Homo sapiens
MKLKEVDRTAMQAWSPAQNHPIYLATGTSAQQLDATFSTNASLEIFELDLSDPSLDMKSCATFSSSHRYHKLIWGPYKMDSKGDVSGVLIAGGENGNIILYDPSKIIAGDKEVVIAQNDKHTGPVRALDVNIFQTNLVASGANESEIYIWDLNNFATPMTPGAKTQPPEDISCIAWNRQVQHILASASPSGRATVWDLRKNEPIIKVSDHSNRMHCSGLAWHPDVATQMVLASEDDRLPVIQMWDLRFASSPLRVLENHARGILAIAWSMADPELLLSCGKDAKILCSNPNTGEVLYELPTNTQWCFDIQWCPRNPAVLSAASFDGRISVYSIMGGSTDGLRQKQVDKLSSSFGNLDPFGTGQPLPPLQIPQQTAQHSIVLPLKKPPKWIRRPVGASFSFGGKLVTFENVRMPSHQGAEQQQQQHHVFISQVVTEKEFLSRSDQLQQAVQSQGFINYCQKKIDASQTEFEKNVWSFLKVNFEDDSRGKYLELLGYRKEDLGKKIALALNKVDGANVALKDSDQVAQSDGEESPAAEEQLLGEHIKEEKEESEFLPSSGGTFNISVSGDIDGLITQALLTGNFESAVDLCLHDNRMADAIILAIAGGQELLARTQKKYFAKSQSKITRLITAVVMKNWKEIVESCDLKNWREALAAVLTYAKPDEFSALCDLLGTRLENEGDSLLQTQACLCYICAGNVEKLVACWTKAQDGSHPLSLQDLIEKVVILRKAVQLTQAMDTSTVGVLLAAKMSQYANLLAAQGSIAAALAFLPDNTNQPNIMQLRDRLCRAQGEPVAGHESPKIPYEKQQLPKGRPGPVAGHHQMPRVQTQQYYPHGENPPPPGFIMHGNVNPNAAGQLPTSPGHMHTQVPPYPQPQRPQNGWNDPPALNRVPKKKKMPENFMPPVPITSPIMNPLGDPQSQMLQQQPSAPVPLSSQSSFPQPHLPGGQPFHGVQQPLGQTGMPPSFSKPNIEGAPGAPIGNTFQHVQSLPTKKITKKPIPDEHLILKTTFEDLIQRCLSSATDPQTKRKLDDASKRLEFLYDKLREQTLSPTITSGLHNIARSIETRNYSEGLTMHTHIVSTSNFSETSAFMPVLKVVLTQANKLGV

SEQ ID NO: 11810 - protein, 1181 aa, Homo sapiens
MKLKEVDRTAMQAWSPAQNHPIYLATGTSAQQLDATFSTNASLEIFELDLSDPSLDMKSCATFSSSHRYHKLIWGPYKMDSKGDVSGVLIAGGENGNIILYDPSKIIAGDKEVVIAQNDKHTGPVRALDVNIFQTNLVASGANESEIYIWDLNNFATPMTPGAKTQPPEDISCIAWNRQVQHILASASPSGRATVWDLRKNEPIIKVSDHSNRMHCSGLAWHPDVATQMVLASEDDRLPVIQMWDLRFASSPLRVLENHARGILAIAWSMADPELLLSCGKDAKILCSNPNTGEVLYELPTNTQWCFDIQWCPRNPAVLSAASFDGRISVYSIMGGSTDGLRQKQVDKLSSSFGNLDPFGTGQPLPPLQIPQQTAQHSIVLPLKKPPKWIRRPVGASFSFGGKLVTFENVRMPSHQGAEQQQQQHHVFISQVVTEKEFLSRSDQLQQAVQSQGFINYCQKKIDASQTEFEKNVWSFLKVNFEDDSRGKYLELLGYRKEDLGKKHIKEEKEESEFLPSSGGTFNISVSGDIDGLITQALLTGNFESAVDLCLHDNRMADAIILAIAGGQELLARTQKKYFAKSQSKITRLITAVVMKNWKEIVESCDLKNWREALAAVLTYAKPDEFSALCDLLGTRLENEGDSLLQTQACLCYICAGNVEKLVACWTKAQDGSHPLSLQDLIEKVVILRKAVQLTQAMDTSTVGVLLAAKMSQYANLLAAQGSIAAALAFLPDNTNQPNIMQLRDRLCRAQGEPVAGHESPKIPYEKQQLPKGRPGPVAGHHQMPRVQTQQYYPHGENPPPPGFIMHGNVNPNAAGQLPTSPGHMHTQVPPYPQPQPYQPAQPYPFGTGGSAMYRPQQPVAPPTSNAYPNTPYISSASSYTGQSQLYAAQHQASSPTSSPATSFPPPPSSGASFQHGGPGAPPSSSAYALPPGTTGTLPAASELPASQRTGPQNGWNDPPALNRVPKKKKMPENFMPPVPITSPIMNPLGDPQSQMLQQQPSAPVPLSSQSSFPQPHLPGGQPFHGVQQPLGQTGMPPSFSKPNIEGAPGAPIGNTFQHVQSLPTKKITKKPIPDEHLILKTTFEDLIQRCLSSATDPQTKRKLDDASKRLEFLYDKLREQTLSPTITSGLHNIARSIETRNYSEGLTMHTHIVSTSNFSETSAFMPVLKVVLTQANKLGV

SEQ ID NO: 11811 - protein, 1220 aa, Homo sapiens
MKLKEVDRTAMQAWSPAQNHPIYLATGTSAQQLDATFSTNASLEIFELDLSDPSLDMKSCATFSSSHRYHKLIWGPYKMDSKGDVSGVLIAGGENGNIILYDPSKIIAGDKEVVIAQNDKHTGPVRALDVNIFQTNLVASGANESEIYIWDLNNFATPMTPGAKTQPPEDISCIAWNRQVQHILASASPSGRATVWDLRKNEPIIKVSDHSNRMHCSGLAWHPDVATQMVLASEDDRLPVIQMWDLRFASSPLRVLENHARGILAIAWSMADPELLLSCGKDAKILCSNPNTGEVLYELPTNTQWCFDIQWCPRNPAVLSAASFDGRISVYSIMGGSTDGLRQKQVDKLSSSFGNLDPFGTGQPLPPLQIPQQTAQHSIVLPLKKPPKWIRRPVGASFSFGGKLVTFENVRMPSHQGAEQQQQQHHVFISQVVTEKEFLSRSDQLQQAVQSQGFINYCQKKIDASQTEFEKNVWSFLKVNFEDDSRGKYLELLGYRKEDLGKKIALALNKVDGANVALKDSDQVAQSDGEESPAAEEQLLGEHIKEEKEESEFLPSSGGTFNISVSGDIDGLITQALLTGNFESAVDLCLHDNRMADAIILAIAGGQELLARTQKKYFAKSQSKITRLITAVVMKNWKEIVESCDLKNWREALAAVLTYAKPDEFSALCDLLGTRLENEGDSLLQTQACLCYICAGNVEKLVACWTKAQDGSHPLSLQDLIEKVVILRKAVQLTQAMDTSTVGVLLAAKMSQYANLLAAQGSIAAALAFLPDNTNQPNIMQLRDRLCRAQGEPVAGHESPKIPYEKQQLPKGRPGPVAGHHQMPRVQTQQYYPHGENPPPPGFIMHGNVNPNAAGQLPTSPGHMHTQVPPYPQPQPYQPAQPYPFGTGGSAMYRPQQPVAPPTSNAYPNTPYISSASSYTGQSQLYAAQHQASSPTSSPATSFPPPPSSGASFQHGGPGAPPSSSAYALPPGTTGTLPAASELPASQRTGPQNGWNDPPALNRVPKKKKMPENFMPPVPITSPIMNPLGDPQSQMLQQQPSAPVPLSSQSSFPQPHLPGGQPFHGVQQPLGQTGMPPSFSKPNIEGAPGAPIGNTFQHVQSLPTKKITKKPIPDEHLILKTTFEDLIQRCLSSATDPQTKRKLDDASKRLEFLYDKLREQTLSPTITSGLHNIARSIETRNYSEGLTMHTHIVSTSNFSETSAFMPVLKVVLTQANKLGV

SEQ ID NO: 11812 - protein, 1220 aa, Homo sapiens; identical to SEQ ID NO: 11811

SEQ ID NO: 11813 - protein, 1220 aa, Homo sapiens; identical to SEQ ID NO: 11811

SEQ ID NO: 11814 - protein, 1251 aa, Homo sapiens
MKLKEVDRTAMQAWSPAQNHPIYLATGTSAQQLDATFSTNASLEIFELDLSDPSLDMKSCATFSSSHRYHKLIWGPYKMDSKGDVSGVLIAGGENGNIILYDPSKIIAGDKEVVIAQNDKHTGPVRALDVNIFQTNLVASGANESEIYIWDLNNFATPMTPGAKTQPPEDISCIAWNRQVQHILASASPSGRATVWDLRKNEPIIKVSDHSNRMHCSGLAWHPDVATQMVLASEDDRLPVIQMWDLRFASSPLRVLENHARGILAIAWSMADPELLLSCGKDAKILCSNPNTGEVLYELPTNTQWCFDIQWCPRNPAVLSAASFDGRISVYSIMGGSTDGLRQKQVDKLSSSFGNLDPFGTGQPLPPLQIPQQTAQHSIVLPLKKPPKWIRRPVGASFSFGGKLVTFENVRMPSHQGAEQQQQQHHVFISQVVTEKEFLSRSDQLQQAVQSQGFINYCQKKIDASQTEFEKNVWSFLKVNFEDDSRGKYLELLGYRKEDLGKKIALALNKVDGANVALKDSDQVAQSDGEESPAAEEQLLGEHIKEEKEESEFLPSSGGTFNISVSGDIDGLITQALLTGNFESAVDLCLHDNRMADAIILAIAGGQELLARTQKKYFAKSQSKITRLITAVVMKNWKEIVESCDLKNWREALAAVLTYAKPDEFSALCDLLGTRLENEGDSLLQTQACLCYICAGNVEKLVACWTKAQDGSHPLSLQDLIEKVVILRKAVQLTQAMDTSTVGVLLAAKMSQYANLLAAQGSIAAALAFLPDNTNQPNIMQLRDRLCRAQGEPVAGHESPKIPYEKQQLPKGRPGPVAGHHQMPRVQTQQYYPHVRIAPTVTTWSNKTPTALPSHPPAASPSDTQGENPPPPGFIMHGNVNPNAAGQLPTSPGHMHTQVPPYPQPQPYQPAQPYPFGTGGSAMYRPQQPVAPPTSNAYPNTPYISSASSYTGQSQLYAAQHQASSPTSSPATSFPPPPSSGASFQHGGPGAPPSSSAYALPPGTTGTLPAASELPASQRTGPQNGWNDPPALNRVPKKKKMPENFMPPVPITSPIMNPLGDPQSQMLQQQPSAPVPLSSQSSFPQPHLPGGQPFHGVQQPLGQTGMPPSFSKPNIEGAPGAPIGNTFQHVQSLPTKKITKKPIPDEHLILKTTFEDLIQRCLSSATDPQTKRKLDDASKRLEFLYDKLREQTLSPTITSGLHNIARSIETRNYSEGLTMHTHIVSTSNFSETSAFMPVLKVVLTQANKLGV

SEQ ID NO: 11815 - protein, 1067 aa, Homo sapiens
MKLKEVDRTAMQAWSPAQNHPIYLATGTSAQQLDATFSTNASLEIFELDLSDPSLDMKSCATFSSSHRYHKLIWGPYKMDSKGDVSGVLIAGGENGNIILYDPSKIIAGDKEVVIAQNDKHTGPVRALDVNIFQTNLVASGANESEIYIWDLNNFATPMTPGAKTQPPEDISCIAWNRQVQHILASASPSGRATVWDLRKNEPIIKVSDHSNRMHCSGLAWHPDVATQMVLASEDDRLPVIQMWDLRFASSPLRVLENHARGILAIAWSMADPELLLSCGKDAKILCSNPNTGEVLYELPTNTQWCFDIQWCPRNPAVLSAASFDGRISVYSIMGGSTDGLRQKQVDKLSSSFGNLDPFGTGQPLPPLQIPQQTAQHSIVLPLKKPPKWIRRPVGASFSFGGKLVTFENVRMPSHQGAEQQQQQHHVFISQVVTEKEFLSRSDQLQQAVQSQGFINYCQKKIDASQTEFEKNVWSFLKVNFEDDSRGKYLELLGYRKEDLGKKHIKEEKEESEFLPSSGGTFNISVSGDIDGLITQALLTGNFESAVDLCLHDNRMADAIILAIAGGQELLARTQKKYFAKSQSKITRLITAVVMKNWKEIVESCDLKNWREALAAVLTYAKPDEFSALCDLLGTRLENEGDSLLQTQACLCYICAGNVEKLVACWTKAQDGSHPLSLQDLIEKVVILRKAVQLTQAMDTSTVGVLLAAKMSQYANLLAAQGSIAAALAFLPDNTNQPNIMQLRDRLCRAQGEPVAGHESPKIPYEKQQLPKGRPGPVAGHHQMPRVQTQQYYPHGENPPPPGFIMHGNVNPNAAGQLPTSPGHMHTQVPPYPQPQRPQNGWNDPPALNRVPKKKKMPENFMPPVPITSPIMNPLGDPQSQMLQQQPSAPVPLSSQSSFPQPHLPGGQPFHGVQQPLGQTGMPPSFSKPNIEGAPGAPIGNTFQHVQSLPTKKITKKPIPDEHLILKTTFEDLIQRCLSSATDPQTKRKLDDASKRLEFLYDKLREQTLSPTITSGLHNIARSIETRNYSEGLTMHTHIVSTSNFSETSAFMPVLKVVLTQANKLGV

SEQ ID NO: 11816 - protein, 1106 aa, Homo sapiens; identical to SEQ ID NO: 11809

SEQ ID NO: 11817 - protein, 1067 aa, Homo sapiens; identical to SEQ ID NO: 11815

SEQ ID NO: 11818 - protein, 1166 aa, Homo sapiens
MKLKEVDRTAMQAWSPAQNHPIYLATGTSAQQLDATFSTNASLEIFELDLSDPSLDMKSCATFSSSHRYHKLIWGPYKMDSKGDVSGVLIAGGENGNIILYDPSKIIAGDKEVVIAQNDKHTGPVRALDVNIFQTNLVASGANESEIYIWDLNNFATPMTPGAKTQPPEDISCIAWNRQVQHILASASPSGRATVWDLRKNEPIIKVSDHSNRMHCSGLAWHPDVATQMVLASEDDRLPVIQMWDLRFASSPLRVLENHARGILAIAWSMADPELLLSCGKDAKILCSNPNTGEVLYELPTNTQWCFDIQWCPRNPAVLSAASFDGRISVYSIMGGSTDGLRQKQVDKLSSSFGNLDPFGTGQPLPPLQIPQQTAQHSIVLPLKKPPKWIRRPVGASFSFGGKLVTFENVRMPSHQGAEQQQQQHHVFISQVVTEKEFLSRSDQLQQAVQSQGFINYCQKKIDASQTEFEKNVWSFLKVNFEDDSRGKYLELLGYRKEDLGKKHIKEEKEESEFLPSSGGTFNISVSGDIDGLITQALLTGNFESAVDLCLHDNRMADAIILAIAGGQELLARTQKKYFAKSQSKITRLITAVVMKNWKEIVESCDLKNWREALAAVLTYAKPDEFSALCDLLGTRLENEGDSLLQTQACLCYICAGNVEKLVACWTKAQDGSHPLSLQDLIEKVVILRKAVQLTQAMDTSTVGVLLAAKMSQYANLLAAQGSIAAALAFLPDNTNQPNIMQLRDRLCRAQGEPVAGHESPKIPYEKQQLPKGRPGPVAGHHQMPRVQTQQYYPHGENPPPPGFIMHGNVNPNAAGQLPTSPGHMHTQVPPYPQPQPYQPAQPYPFGTGGSAMYRPQQPVAPPTSNAYPNTPYISSASSYTGQSQLYAAQHQASSPTSSPATSFPPPPSSGASFQHGGPGAPPSSSAYALPPGTTGPQNGWNDPPALNRVPKKKKMPENFMPPVPITSPIMNPLGDPQSQMLQQQPSAPVPLSSQSSFPQPHLPGGQPFHGVQQPLGQTGMPPSFSKPNIEGAPGAPIGNTFQHVQSLPTKKITKKPIPDEHLILKTTFEDLIQRCLSSATDPQTKRKLDDASKRLEFLYDKLREQTLSPTITSGLHNIARSIETRNYSEGLTMHTHIVSTSNFSETSAFMPVLKVVLTQANKLGV

SEQ ID NO: 11819 - protein, 1205 aa, Homo sapiens
MKLKEVDRTAMQAWSPAQNHPIYLATGTSAQQLDATFSTNASLEIFELDLSDPSLDMKSCATFSSSHRYHKLIWGPYKMDSKGDVSGVLIAGGENGNIILYDPSKIIAGDKEVVIAQNDKHTGPVRALDVNIFQTNLVASGANESEIYIWDLNNFATPMTPGAKTQPPEDISCIAWNRQVQHILASASPSGRATVWDLRKNEPIIKVSDHSNRMHCSGLAWHPDVATQMVLASEDDRLPVIQMWDLRFASSPLRVLENHARGILAIAWSMADPELLLSCGKDAKILCSNPNTGEVLYELPTNTQWCFDIQWCPRNPAVLSAASFDGRISVYSIMGGSTDGLRQKQVDKLSSSFGNLDPFGTGQPLPPLQIPQQTAQHSIVLPLKKPPKWIRRPVGASFSFGGKLVTFENVRMPSHQGAEQQQQQHHVFISQVVTEKEFLSRSDQLQQAVQSQGFINYCQKKIDASQTEFEKNVWSFLKVNFEDDSRGKYLELLGYRKEDLGKKIALALNKVDGANVALKDSDQVAQSDGEESPAAEEQLLGEHIKEEKEESEFLPSSGGTFNISVSGDIDGLITQALLTGNFESAVDLCLHDNRMADAIILAIAGGQELLARTQKKYFAKSQSKITRLITAVVMKNWKEIVESCDLKNWREALAAVLTYAKPDEFSALCDLLGTRLENEGDSLLQTQACLCYICAGNVEKLVACWTKAQDGSHPLSLQDLIEKVVILRKAVQLTQAMDTSTVGVLLAAKMSQYANLLAAQGSIAAALAFLPDNTNQPNIMQLRDRLCRAQGEPVAGHESPKIPYEKQQLPKGRPGPVAGHHQMPRVQTQQYYPHGENPPPPGFIMHGNVNPNAAGQLPTSPGHMHTQVPPYPQPQPYQPAQPYPFGTGGSAMYRPQQPVAPPTSNAYPNTPYISSASSYTGQSQLYAAQHQASSPTSSPATSFPPPPSSGASFQHGGPGAPPSSSAYALPPGTTGPQNGWNDPPALNRVPKKKKMPENFMPPVPITSPIMNPLGDPQSQMLQQQPSAPVPLSSQSSFPQPHLPGGQPFHGVQQPLGQTGMPPSFSKPNIEGAPGAPIGNTFQHVQSLPTKKITKKPIPDEHLILKTTFEDLIQRCLSSATDPQTKRKLDDASKRLEFLYDKLREQTLSPTITSGLHNIARSIETRNYSEGLTMHTHIVSTSNFSETSAFMPVLKVVLTQANKLGV

SEQ ID NO: 11820 - protein, 877 aa, Homo sapiens
MKLKEVDRTAMQAWSPAQNHPIYLATGTSAQQLDATFSTNASLEIFELDLSDPSLDMKSCATFSSSHRYHKLIWGPYKMDSKGDVSGVLIAGGENGNIILYDPSKIIAGDKEVVIAQNDKHTGPVRALDVNIFQTNLVASGANESEIYIWDLNNFATPMTPGAKTQPPEDISCIAWNRQVQHILASASPSGRATVWDLRKNEPIIKVSDHSNRMHCSGLAWHPDVATQMVLASEDDRLPVIQMWDLRFASSPLRVLENHARGILAIAWSMADPELLLSCGKDAKILCSNPNTGEVLYELPTNTQWCFDIQWCPRNPAVLSAASFDGRISVYSIMGGSTDGLRQKQVDKLSSSFGNLDPFGTGQPLPPLQIPQQTAQHSIVLPLKKPPKWIRRPVGASFSFGGKLVTFENVRMPSHQGAEQQQQQHHVFISQVVTEKEFLSRSDQLQQAVQSQGFINYCQKKIDASQTEFEKNVWSFLKVNFEDDSRGKYLELLGYRKEDLGKKIALALNKVDGANVALKDSDQVAQSDGEESPAAEEQLLGEHIKEEKEESEFLPSSGGTFNISVSGDIDGLITQALLTGNFESAVDLCLHDNRMADAIILAIAGGQELLARTQKKYFAKSQSKITRLITAVVMKNWKEIVESCDLKNWREALAAVLTYAKPDEFSALCDLLGTRLENEGDSLLQTQACLCYICAGNVEKLVACWTKAQDGSHPLSLQDLIEKVVILRKAVQLTQAMDTSTVGVLLAAKMSQYANLLAAQGSIAAALAFLPDNTNQPNIMQLRDRLCRAQGEPVAGHESPKIPYEKQQLPKGRPGPVAGHHQMPRVQTQQYYPHGENPPPPGFIMHGNVNPNAAGQLPTSPGHMHTQVPPYPQPQRK

SEQ ID NO: 11821 - protein, 68 aa, Homo sapiens
MKLKEVDRTAMQAWSPAQNHPIYLATGTSAQQLDATFSTNASLEIFELDLSDPSLDMKSCATFSSSHS

SEQ ID NO: 11822 - protein, 1200 aa, Homo sapiens
MLGESDERCTNAGSGCRRSSPGTSAQQLDATFSTNASLEIFELDLSDPSLDMKSCATFSSSHRYHKLIWGPYKMDSKGDVSGVLIAGGENGNIILYDPSKIIAGDKEVVIAQNDKHTGPVRALDVNIFQTNLVASGANESEIYIWDLNNFATPMTPGAKTQPPEDISCIAWNRQVQHILASASPSGRATVWDLRKNEPIIKVSDHSNRMHCSGLAWHPDVATQMVLASEDDRLPVIQMWDLRFASSPLRVLENHARGILAIAWSMADPELLLSCGKDAKILCSNPNTGEVLYELPTNTQWCFDIQWCPRNPAVLSAASFDGRISVYSIMGGSTDGLRQKQVDKLSSSFGNLDPFGTGQPLPPLQIPQQTAQHSIVLPLKKPPKWIRRPVGASFSFGGKLVTFENVRMPSHQGAEQQQQQHHVFISQVVTEKEFLSRSDQLQQAVQSQGFINYCQKKIDASQTEFEKNVWSFLKVNFEDDSRGKYLELLGYRKEDLGKKIALALNKVDGANVALKDSDQVAQSDGEESPAAEEQLLGEHIKEEKEESEFLPSSGGTFNISVSGDIDGLITQALLTGNFESAVDLCLHDNRMADAIILAIAGGQELLARTQKKYFAKSQSKITRLITAVVMKNWKEIVESCDLKNWREALAAVLTYAKPDEFSALCDLLGTRLENEGDSLLQTQACLCYICAGNVEKLVACWTKAQDGSHPLSLQDLIEKVVILRKAVQLTQAMDTSTVGVLLAAKMSQYANLLAAQGSIAAALAFLPDNTNQPNIMQLRDRLCRAQGEPVAGHESPKIPYEKQQLPKGRPGPVAGHHQMPRVQTQQYYPHGENPPPPGFIMHGNVNPNAAGQLPTSPGHMHTQVPPYPQPQPYQPAQPYPFGTGGSAMYRPQQPVAPPTSNAYPNTPYISSASSYTGQSQLYAAQHQASSPTSSPATSFPPPPSSGASFQHGGPGAPPSSSAYALPPGTTGPQNGWNDPPALNRVPKKKKMPENFMPPVPITSPIMNPLGDPQSQMLQQQPSAPVPLSSQSSFPQPHLPGGQPFHGVQQPLGQTGMPPSFSKPNIEGAPGAPIGNTFQHVQSLPTKKITKKPIPDEHLILKTTFEDLIQRCLSSATDPQTKRKLDDASKRLEFLYDKLREQTLSPTITSGLHNIARSIETRNYSEGLTMHTHIVSTSNFSETSAFMPVLKVVLTQANKLGV

SEQ ID NO: 11823 - protein, 969 aa, Homo sapiens
MVKLVLLSIVLLKVTVPKLSNDLLQLDFMPIHRGILAIAWSMADPELLLSCGKDAKILCSNPNTGEVLYELPTNTQWCFDIQWCPRNPAVLSAASFDGRISVYSIMGGSTDGLRQKQVDKLSSSFGNLDPFGTGQPLPPLQIPQQTAQHSIVLPLKKPPKWIRRPVGASFSFGGKLVTFENVRMPSHQGAEQQQQQHHVFISQVVTEKEFLSRSDQLQQAVQSQGFINYCQKKIDASQTEFEKNVWSFLKVNFEDDSRGKYLELLGYRKEDLGKKHIKEEKEESEFLPSSGGTFNISVSGDIDGLITQALLTGNFESAVDLCLHDNRMADAIILAIAGGQELLARTQKKYFAKSQSKITRLITAVVMKNWKEIVESCDLKNWREALAAVLTYAKPDEFSALCDLLGTRLENEGDSLLQTQACLCYICAGNVEKLVACWTKAQDGSHPLSLQDLIEKVVILRKAVQLTQAMDTSTVGVLLAAKMSQYANLLAAQGSIAAALAFLPDNTNQPNIMQLRDRLCRAQGEPVAGHESPKIPYEKQQLPKGRPGPVAGHHQMPRVQTQQYYPHVRIAPTVTTWSNKTPTALPSHPPAASPSDTQGENPPPPGFIMHGNVNPNAAGQLPTSPGHMHTQVPPYPQPQPYQPAQPYPFGTGGSAMYRPQQPVAPPTSNAYPNTPYISSASSYTGQSQLYAAQHQASSPTSSPATSFPPPPSSGASFQHGGPGAPPSSSAYALPPGTTGPQNGWNDPPALNRVPKKKKMPENFMPPVPITSPIMNPLGDPQSQMLQQQPSAPVPLSSQSSFPQPHLPGGQPFHGVQQPLGQTGMPPSFSKPNIEGAPGAPIGNTFQHVQSLPTKKITKKPIPDEHLILKTTFEDLIQRCLSSATDPQTKRKLDDASKRLEFLYDKLREQTLSPTITSGLHNIARSIETRNYSEGLTMHTHIVSTSNFSETSAFMPVLKVVLTQANKLGV

SEQ ID NO: 11824 - protein, 235 aa, Homo sapiens
TQDPAAEGPRQQDEVKGSRSYSHAGMEPCPESPHLPSNRYHKLIWGPYKMDSKGDVSGVLIAGGENGNIILYDPSKIIAGDKEVVIAQNDKHTGPVRALDVNIFQTNLVASGANESEIYIWDLNNFATPMTPGAKTQPPEDISCIAWNRQVQHILASASPSGRATVWDLRKNEPIIKVSDHSNRMHCSGLAWHPDVATQMVLASEDDRLPVIQMWDLRFASSPLRVLENHARYRA

SEQ ID NO: 11825 - protein, 237 aa, Homo sapiens
  VARIANT 1: note = misc_feature - Xaa can be any naturally occurring amino acid
XAVQSQGFINYCQKKIDASQTEFEKNVWSFLKVNFEDDSRGKYLELLGYRKEDLGKKHIKEEKEESEFLPSSGGTFNISVSGDIDGLITQALLTGNFESAVDLCLHDNRMADAIILAIAGGQELLARTQKKYFAKSQSKITRLITAVVMKNWKEIVESCDLKNWREALAAVLTYAKPDEFSALCGNVEKLVACWTKAQDGSHPLSLQDLIEKVVILRKAVQLTQAMDTSTVGVLLAA

SEQ ID NO: 11826 - protein, 443 aa, Homo sapiens
  VARIANT 1: note = misc_feature - Xaa can be any naturally occurring amino acid
XFGTGQPLPPLQIPQQTAQHSIVLPLKKPPKWIRRPVGASFSFGGKLVTFENVRMPSHQGAEQQQQQHHVFISQVVTEKEFLSRSDQLQQAVQSQGFINYCQKKIDASQTEFEKNVWSFLKVNFEDDSRGKYLELLGYRKEDLGKKIALALNKVDGANVHIKEEKEESEFLPSSGGTFNISVSGDIDGLITQALLTGNFESAVDLCLHDNRMADAIILAIAGGQELLARTQKKYFAKSQSKITRLITAVVMKNWKEIVESCDLKNWREALAAVLTYAKPDEFSALCDLLGTRLENEGDSLLQTQACLCYICAGNVEKLVACWTKAQDGSHPLSLQDLIEKVVILRKAVQLTQAMDTSTVGVLLAAKMSQYANLLAAQGSIAAALAFLPDNTNQPNIMQLRDRLCRAQGEPVAGHESPKIPYEKQQLPKGRPGPVAGHHQMPRV

SEQ ID NO: 11827 - protein, 383 aa, Homo sapiens
  VARIANT 1: note = misc_feature - Xaa can be any naturally occurring amino acid
XNAAGQLPTSPGHMHTQVPPYPQPQPYQPAQPYPFGTGGSAMYRPQQPVAPPTSNAYPNTPYISSASSYTGQSQLYAAQHQASSPTSSPATSFPPPPSSGASFQHGGPGAPPSSSAYALPPGTTGTLPAASELPASQRTENQSIQDQAPMLEGPQNGWNDPPALNRVPKKKKMPENFMPPVPITSPIMNPLGDPQSQMLQQQPSAPVPLSSQSSFPQPHLPGGQPFHGVQQPLGQTGMPPSFSKPNIEGAPGAPIGNTFQHVQSLPTKKITKKPIPDEHLILKTTFEDLIQRCLSSATDPQTKRKLDDASKRLEFLYDKLREQTLSPTITSGLHNIARSIETRNYSEGLTMHTHIVSTSNFSETSAFMPVLKVVLTQANKLGV

SEQ ID NO: 11828 - protein, 181 aa, Homo sapiens
  VARIANT 1: note = misc_feature - Xaa can be any naturally occurring amino acid
XPVPITSPIMNPLGDPQSQMLQQQPSAPVPLSSQSSFPQPHLPGGQPFHGVQQPLGQTGMPPSFSKPNIEGAPGAPIGNTFQHVQSLPTKKITKKPIPDEHLILKTTFEDLIQRCLSSATDPLSPTITSGLHNIARSIETRNYSEGLTMHTHIVSTSNFSETSAFMPVLKVVLTQANKLGV

SEQ ID NO: 11829 - protein, 219 aa, Homo sapiens
  VARIANT 1: note = misc_feature - Xaa can be any naturally occurring amino acid
XQMPRVQTQQYYPHVRIAPTVTTWSNKTPTALPSHPPAASPSDTQGENPPPPGFIMHGNVNPNAAGQLPTSPGHMHTQVPPYPQPQRPQNGWNDPPALNRVPKKKKMPENFMPPVPITSPIMNPLGDPQSQMLQQQPSAPVPLSSQSSFPQPHLPGGQPFHGVQQPLGQTGMPPSFSKPNIEGAPGAPIGNTFQHVQSLPTKKITKKPIPDEHLILKTT

SEQ ID NO: 11830 - protein, 275 aa, Homo sapiens
GTISSEIKSARGSHHLSIYAENSLKSDGYHKRTDRKSRIIAKNVSTSKPEFEFTTLDFPELQGAENNMSEIQKQPKWGPVHSVSTDISLLREVVKPAAVLSKGEIVVKNNPNESVTANAATNSPSCTRADPKNVSIPSSEALSSDPSYNKEKHIIHPTQKSKASQGSDLEQNEASRKNKKKKEKSTSKYEVLTVQEPPRIEDAEEFPNLAVASERRDRIETPKFQSKQQPQDNFKNNVKKSQLPVQLDLGGMLTALEKKQHSQHAKQSSKPVVVS

SEQ ID NO: 11831 - protein, 786 aa, Homo sapiens
MAFGASTFPPQYLSSEITLHPYAYSPYTLDSTQNVYSVPGSQYLYNQPSCYRGFQTVKHRNENTCPLPQEMKALFKKKTYDEKKTYDQQKFDSERADGTISSEIKSARGSHHLSIYAENSLKSDGYHKRTDRKSRIIAKNVSTSKPEFEFTTLDFPELQGAENNMSEIQKQPKWGPVHSVSTDISLLREVVKPAAVLSKGEIVVKNNPNESVTANAATNSPSCTRELSWTPMGYVVRQTLSTELSAAPKNVTSMINLKTIASSADPKNVSIPSSEALSSDPSYNKEKHIIHPTQKSKASQGSDLEQNEASRKNKKKKEKSTSKYEVLTVQEPPRIEDAEEFPNLAVASERRDRIETPKFQSKQQPQDNFKNNVKKSQLPVQLDLGGMLTALEKKQHSQHAKQSSKPVVVSVGAVPVLSKECASGERGRRMSQMKTPHNPLDSSAPLMKKGKQREIPKAKKPTSLKKIILKERQERKQRLQENAVSPAFTSDDTQDGESGGDDQFPEQAELSGPEGMDELISTPSVEDKSEEPPGTELQRDTEASHLAPNHTTFPKIHSRRFRDYCSQMLSKEVDACVTDLLKELVRFQDRMYQKDPVKAKTKRRLVLGLREVLKHLKLKKLKCVIISPNCEKIQSKGGLDDTLHTIIDYACEQNIPFVFALNRKALGRSLNKAVPVSVVGIFSYDGAQDQFHKMVELTVAARQAYKTMLENVQQELVGEPRPQAPPSLPTQGPSCPAEDGPPALKEKEEPHYIEIWKKHLEAYSGCTLELEESLEASTSQMMNLNL

SEQ ID NO: 11832 - protein, 854 aa, Homo sapiens
MASEGPREPESEGIKLSADVKPFVPRFAGLNVAWLESSEACVFPSSAATYYPFVQEPPVTEQKIYTEDMAFGASTFPPQYLSSEITLHPYAYSPYTLDSTQNVYSVPGSQYLYNQPSCYRGFQTVKHRNENTCPLPQEMKALFKKKTYDEKKTYDQQKFDSERADGTISSEIKSARGSHHLSIYAENSLKSDGYHKRTDRKSRIIAKNVSTSKPEFEFTTLDFPELQGAENNMSEIQKQPKWGPVHSVSTDISLLREVVKPAAVLSKGEIVVKNNPNESVTANAATNSPSCTRELSWTPMGYVVRQTLSTELSAAPKNVTSMINLKTIASSADPKNVSIPSSEALSSDPSYNKEKHIIHPTQKSKASQGSDLEQNEASRKNKKKKEKSTSKYEVLTVQEPPRIEDAEEFPNLAVASERRDRIETPKFQSKQQPQDNFKNNVKKSQLPVQLDLGGMLTALEKKQHSQHAKQSSKPVVVSVGAVPVLSKECASGERGRRMSQMKTPHNPLDSSAPLMKKGKQREIPKAKKPTSLKKIILKERQERKQRLQENAVSPAFTSDDTQDGESGGDDQFPEQAELSGPEGMDELISTPSVEDKSEEPPGTELQRDTEASHLAPNHTTFPKIHSRRFRDYCSQMLSKEVDACVTDLLKELVRFQDRMYQKDPVKAKTKRRLVLGLREVLKHLKLKKLKCVIISPNCEKIQSKGGLDDTLHTIIDYACEQNIPFVFALNRKALGRSLNKAVPVSVVGIFSYDGAQDQFHKMVELTVAARQAYKTMLENVQQELVGEPRPQAPPSLPTQGPSCPAEDGPPALKEKEEPHYIEIWKKHLEAYSGCTLELEESLEASTSQMMNLNL

SEQ ID NO: 11833 - protein, 60 aa, Homo sapiens
MPLPILLHVQEQILKMLVYHLLKLYLRILPTTKKNTLFILPKSLKHHKVVTLNKMKPQER

SEQ ID NO: 11834 - protein, 781 aa, Homo sapiens
MVRVLRSMCLPQLCSHILSVCSGTTSDRNVYSVPGSQYLYNQPSCYRGFQTVKHRNENTCPLPQEMKALFKKKTYDEKKTYDQQKFDSERADGTISSEIKSARGSHHLSIYAENSLKSDGYHKRTDRKSRIIAKNVSTSKPEFEFTTLDFPELQGAENNMSEIQKQPKWGPVHSVSTDISLLREVVKPAAVLSKGEIVVKNNPNESVTANAATNSPSCTRELSWTPMGYVVRQTLSTELSAAPKNVTSMINLKTIASSADPKNVSIPSSEALSSDPSYNKEKHIIHPTQKSKASQGSDLEQNEASRKNKKKKEKSTSKYEVLTVQEPPRIEDAEEFPNLAVASERRDRIETPKFQSKQQPQDNFKNNVKKSQLPVQLDLGGMLTALEKKQHSQHAKQSSKPVVVSVGAVPVLSKECASGERGRRMSQMKTPHNPLDSSAPLMKKGKQREIPKAKKPTSLKKIILKERQERKQRLQENAVSPAFTSDDTQDGESGGDDQFPEQAELSGPEGMDELISTPSVEDKSEEPPGTELQRDTEASHLAPNHTTFPKIHSRRFRDYCSQMLSKEVDACVTDLLKELVRFQDRMYQKDPVKAKTKRRLVLGLREVLKHLKLKKLKCVIISPNCEKIQSKGGLDDTLHTIIDYACEQNIPFVFALNRKALGRSLNKAVPVSVVGIFSYDGAQDQFHKMVELTVAARQAYKTMLENVQQELVGEPRPQAPPSLPTQGPSCPAEDGPPALKEKEEPHYIEIWKKHLEAYSGCTLELEESLEASTSQMMNLNL

SEQ ID NO: 11835 - protein, 43 aa, Homo sapiens
MQTCPLAFPGHVSQALGTLLFLAASLSAQNEAACPRAGERHLQ

SEQ ID NO: 11836 - protein, 44 aa, Homo sapiens
MQTCPLAFPGHVSQALGTLLFLAASLSAQNEGWDSPICTEGVVS

SEQ ID NO: 11837 - protein, 85 aa, Homo sapiens
MQTCPLAFPGHVSQALGTLLFLAASLSAQNEGWDSPICTEGVVSVSWGENTVMSCNISNAFSHVNIKLRAHGQESAIFNEVAPGY

SEQ ID NO: 11838 - protein, 147 aa, Homo sapiens
MQTCPLAFPGHVSQALGTLLFLAASLSAQNEGWDSPICTEGVVSVSWGENTVMSCNISNAFSHVNIKLRAHGQESAIFNEVAPGYFSRDGWQLQVQGGVAQLVIKGARDSHAGLYMWHLVGHQRNNRQVTLEVSEPRGLKDRASAQL

SEQ ID NO: 11839 - protein, 170 aa, Homo sapiens
MQTCPLAFPGHVSQALGTLLFLAASLSAQNEGWDSPICTEGVVSVSWGENTVMSCNISNAFSHVNIKLRAHGQESAIFNEVAPGYFSRDGWQLQVQGGVAQLVIKGARDSHAGLYMWHLVGHQRNNRQVTLEVSEPRGLKDRASAQLLGPGTSRGAEPQSAPDTGFWPVP

SEQ ID NO: 11840 - protein, 149 aa, Homo sapiens
MQTCPLAFPGHVSQALGTLLFLAASLSAQNEGWDSPICTEGVVSVSWGENTVMSCNISNAFSHVNIKLRAHGQESAIFNEVAPGYFSRDGWQLQVQGGVAQLVIKGARDSHAGLYMWHLVGHQRNNRQVTLEVSGAAVPSNAGRRSSSS

SEQ ID NO: 11841 - protein, 178 aa, Homo sapiens
MQTCPLAFPGHVSQALGTLLFLAASLSAQNEGWDSPICTEGVVSVSWGENTVMSCNISNAFSHVNIKLRAHGQESAIFNEVAPGYFSRDGWQLQVQGGVAQLVIKGARDSHAGLYMWHLVGHQRNNRQVTLEVSGAEPQSAPDTGFWPVPAVVTAVFILLVALVMFAWYRCRCSQQRR

SEQ ID NO: 11842 - protein, 248 aa, Homo sapiens
MQTCPLAFPGHVSQALGTLLFLAASLSAQNEGWDSPICTEGVVSVSWGENTVMSCNISNAFSHVNIKLRAHGQESAIFNEVAPGYFSRDGWQLQVQGGVAQLVIKGARDSHAGLYMWHLVGHQRNNRQVTLEVSGAEPQSAPDTGFWPVPAVVTAVFILLVALVMFAWYRCRCSQQRREKKFFLLEPQMKVAALRAGAQQGLSRASAELWTPDSEPTPRPLALVFKPSPLGALELLSPQPLFPYAADP

SEQ ID NO: 11843 - protein, 794 aa, Homo sapiens
MRVRIGLTLLLCAVLLSLASASSDEEGSQDESLDSKTTLTSDESVKDHTTAGRVVAGQIFLDSEESELESSIQEEEDSLKSQEGESVTEDISFLESPNPENKDYEEPKKVRKPALTAIEGTAHGEPCHFPFLFLDKEYDECTSDGREDGRLWCATTYDYKADEKWGFCETEEEAAKRRQMQEAEMMYQTGMKILNGSNKKSQKREAYRYLQKAASMNHTKALERVSYALLFGDYLPQNIQAAREMFEKLTEEGSPKGQTALGFLYASGLGVNSSQAKALVYYTFGALGGNLIAHMVLGYRYWAGIGVLQSCESALTHYRLVANHVASDISLTGGSVVQRIRLPDEVENPGMNSGMLEEDLIQYYQFLAEKGDVQAQVGLGQLHLHGGRGVEQNHQRAFDYFNLAANAGNSHAMAFLGKMYSEGSDIVPQSNETALHYFKKAADMGNPVGQSGLGMAYLYGRGVQVNYDLALKYFQKAAEQGWVDGQLQLGSMYYNGIGVKRDYKQALKYFNLASQGGHILAFYNLAQMHASGTGVMRSCHTAVELFKNVCERGRWSERLMTAYNSYKDGDYNAAVIQYLLLAEQGYEVAQSNAAFILDQREASIVGENETYPRALLHWNRAASQGYTVARIKLGDYHFYGFGTDVDYETAFIHYRLASEQQHSAQAMFNLGYMHEKGLGIKQDIHLAKRFYDMAAEASPDAQVPVFLALCKLGVVYFLQYIRETNIRDMFTQLDMDQLLGPEWDLYLMTIIALLLGTVIAYRQRQHQDMPAPRPPGPRPAPPQQEGPPEQQPPQ

SEQ ID NO: 11844 - protein, 301 aa, Homo sapiens
MRVRIGLTLLLCAVLLSLASASSDEEGSQDESLDSKTTLTSDESVKDHTTAGRVVAGQIFLDSEESELESSIQEEEDSLKSQEGESVTEDISFLESPNPENKDYEEPKKVRKPALTAIEGTAHGEPCHFPFLFLDKEYDECTSDGREDGRLWCATTYDYKADEKWGFCETEEEAAKRRQMQEAEMMYQTGMKILNGSNKKSQKREAYRYLQKAASMNHTKALERVSYALLFGDYLPQNIQAAREMFEKLTEEGSPKGQTALGFLYASGLGVNSSQAKALVYYTFGALGGNLIAHMVLVSRL

SEQ ID NO: 11845 - protein, 163 aa, Homo sapiens
MRVRIGLTLLLCAVLLSLASASSDEEGSQDESLDSKTTLTSDESVKDHTTAGRVVAGQIFLDSEESELESSIQEEEDSLKSQEGESVTEDISFLESPNPENKDYEEPKKVRKPDKEYDECTSDGREDGRLWCATTYDYKADEKWGFCETEEEAAKRRQMQEAE

SEQ ID NO: 11846 - protein, 88 aa, Homo sapiens
FNLLQLDPDCRGCCQEEAQFETKKYSSIVSKQECHHSNCMQELFLKFVDENWEGSLKSKYVRGSDPVLKLLDDNGNIAEELSILKWNT

SEQ ID NO: 11847 - protein, 164 aa, Homo sapiens
MVAMAAGPSGCLVPAFGLRLLLATVLQAVSAFGAEFSSEACRELGFSSNLLCSSCDLLGQFNLLQLDPDCRGCCQEEAQFETKKLYAGAILEVCGKLGRFPQVQAFVRSDKPKLFRGLQIKYVRGSDPVLKLLDDNGNIAEELSILKWNTDSVEEFLSEKLERI

SEQ ID NO: 11848 - protein, 123 aa, Homo sapiens
MVAMAAGPSGCLVPAFGLRLLLATVLQAVSAFGAEFSSEACRELGFSSNLLCSSCDLLGQFNLLQLDPDCRGCCQEEAQFETKKLYAGAILEVCGKLGRFPQVQVCPWFRPCIKAFGRQWEHC

SEQ ID NO: 11849 - protein, 164 aa, Homo sapiens; identical to SEQ ID NO: 11847

SEQ ID NO: 11850 - protein, 123 aa, Homo sapiens; identical to SEQ ID NO: 11848

SEQ ID NO: 11851 - protein, 144 aa, Homo sapiens
MVAMAAGPSGCLVPAFGLRLLLATVLQAVSAFGAEFSSEACRELGFSSNLLCSSCDLLGQFNLLQLDPDCRGCCQEEAQFETKKYSSIVSKQECHHSNCMQELFLKFVDENWEGSLKSKLLLGVINPNCSEDCKSSMSVVQTLY

SEQ ID NO: 11852 - protein, 31 aa, Homo sapiens
  VARIANT 1: note = misc_feature - Xaa can be any naturally occurring amino acid
XGLRLLLATVLQAVSVDHLRSCHRESRSDCS

SEQ ID NO: 11853 - protein, 144 aa, Homo sapiens
MSLLLPPLALLLLLAALVAPATAATAYRPDWNRLSGLTRARVETCGGQLNRLKEVKAFVTQDIPFYHNLVMKHLPGADPELVLLGRRYEELERIPLSEMTREEINALVQELGFYRKAAPDAQVPPEYVWAPAKPPEETSDHADL

SEQ ID NO: 11854 - protein, 144 aa, Homo sapiens; identical to SEQ ID NO: 11853

SEQ ID NO: 11855 - protein, 144 aa, Homo sapiens; identical to SEQ ID NO: 11853

SEQ ID NO: 11856 - protein, 588 aa, Homo sapiens
MGRARPGQRGPPSPGPAAQPPAPPRRRARSLALLGALLAAAAAAAVRVCARHAEAQAAARQELALKTLGTDGLFLFSSLDTDGDMYISPEEFKPIAEKLTGSCSVTQTGVQWCSHSSLQPQLPWLNSSCLSLLRSTPAASCEEEELPPDPSEETLTIEARFQPLLPETMTKSKDGFLGVSRLALSGLRNWTAAASPSAVFATRHFQPFLPPPGQELGEPWWIIPSELSMFTGYLSNNRFYPPPPKGKEVIIHRLLSMFHPRPFVKTRFAPQGAVACLTAISDFYYTVMFRIHAEFQLSEPPDFPFWFSPAQFTGHIILSKDATHVRDFRLFVPNHRSLNVDMEWLYGASESSNMEVDIGYIPQMELEATGPSVPSVILDEDGSMIDSHLPSGEPLQFVFEEIKWQQELSWEEAARRLEVAMYPFKKVSYLPFTEAFDRAKAENKLVHSILLWGALDDQSCGSGRTLRETVLESSPILTLLNESFISTWSLVKELEELQNNQENSSHQKLAGLHLEKYSFPVEMMICLPNGTVVHHINANYFLDITSVKPEEIESNLFSFSSTFEDPSTATYMQFLKEGLRRGLPLLQP

SEQ ID NO: 11857 - protein, 555 aa, Homo sapiens
MGRARPGQRGPPSPGPAAQPPAPPRRRARSLALLGALLAAAAAAAVRVCARHAEAQAAARQELALKTLGTDGLFLFSSLDTDGDMYISPEEFKPIAEKLTGSTPAASCEEEELPPDPSEETLTIEARFQPLLPETMTKSKDGFLGVSRLALSGLRNWTAAASPSAVFATRHFQPFLPPPGQELGEPWWIIPSELSMFTGYLSNNRFYPPPPKGKEVIIHRLLSMFHPRPFVKTRFAPQGAVACLTAISDFYYTVMFRIHAEFQLSEPPDFPFWFSPAQFTGHIILSKDATHVRDFRLFVPNHRSLNVDMEWLYGASESSNMEVDIGYIPQMELEATGPSVPSVILDEDGSMIDSHLPSGEPLQFVFEEIKWQQELSWEEAARRLEVAMYPFKKVSYLPFTEAFDRAKAENKLVHSILLWGALDDQSCGSGRTLRETVLESSPILTLLNESFISTWSLVKELEELQNNQENSSHQKLAGLHLEKYSFPVEMMICLPNGTVVHHINANYFLDITSVKPEEIESNLFSFSSTFEDPSTATYMQFLKEGLRRGLPLLQP

SEQ ID NO: 11858 - protein, 556 aa, Homo sapiens
MGRARPGQRGPPSPGPAAQPPAPPRRRARSLALLGALLAAAAAAAVRVCARHAEAQAAARQELALKTLGTDGLFLFSSLDTDGDMYISPEEFKPIAEKLTGSTPAASCEEEELPPDPSEETLTIEARFQPLLPETMTKSKDGFLGVSRLALSGLRNWTAAASPSAVFATRHFQPFLPPPGQELGEPWWIIPSELSMFTGYLSNNRFYPPPPKGKEVIIHRLLSMFHPRPFVKTRFAPQGAVACLTAISDFYYTVMFRIHAEFQLSEPPDFPFWFSPAQFTGHIILSKDATHVRDFRLFVPNHRSLNVDMEWLYGASESSNMEVDIGYIPQMELEATGPSVPSVILDEDGSMIDSHLPSGEPLQFVFEEIKWQQELSWEEAARRLEVAMYPFKKVSYLPFTEAFDRAKAENKLVHSILLWGALDDQSCHCSGRTLRETVLESSPILTLLNESFISTWSLVKELEELQNNQENSSHQKLAGLHLEKYSFPVEMMICLPNGTVVHHINANYFLDITSVKPEEIESNLFSFSSTFEDPSTATYMQFLKEGLRRGLPLLQP

SEQ ID NO: 11859 - protein, 66 aa, Homo sapiens
MMICLPNGTVVHHINANYFLDITSVKPEEIESNLFSFSSTFEDPSTATYMQFLKEGLRRGLPLLQP

SEQ ID NO: 11860 - protein, 668 aa, Homo sapiens
MAVYRAALGASLAAARLLPLGRCSPSPAPRSTLSGAAMEPAPRWLAGLRFDNRALRALPVEAPPPGPEGAPSAPRPVPGACFTRVQPTPLRQPRLVALSEPALALLGLGAPPAREAEAEAALFFSGNALLPGAEPAAHCYCGHQFGQFAGQLGDGAAMYLGEVCTATGERWELQLKGAGPTPFSRQADGRKVLRSSIREFLCSEAMFHLGVPTTRAGACVTSESTVVRDVFYDGNPKYEQCTVVLRVASTFIRFGSFEIFKSADEHTGRAGPSVGRNDIRVQLLDYVISSFYPEIQAAHASDSVQRNAAFFREVTRRTARMVAEWQCVGFCHGVLNTDNMSILGLTIDYGPFGFLDRYDPDHVCNASDNTGRYAYSKQPEVCRWNLRKLAEALQPELPLELGEAILAEEFDAEFQRHYLQKMRRKLGLVQVELEEDGALVSKLLETMHLTGADFTNTFYLLSSFPVELESPGLAEFLARLMEQCASLEELRLAFRPQMDPRQLSMMLMLAQSNPQLFALMGTRAGIARELERVEQQSRLEQLSAAELQSRNQGHWADWLQAYRARLDKDLEGAGDAAAWQAEHVRVMHANNPKYVLRNYIAQNAIEAAERGDFSEVRRVLKLLETPYHCEAGAATDAEATEADGADGRQRSYSSKPPLWAAELCVTSS

SEQ ID NO: 11861 - protein, 668 aa, Homo sapiens; identical to SEQ ID NO: 11860

SEQ ID NO: 11862 - protein, 208 aa, Homo sapiens
MWRSLGLALALCLLPSGGTESQDQSSLCKQPPAWSIRDQDPMLNSNGSVTVVALLQASYLCILQASKLEDLRVKLKKEGYSNISYIVVNHQGISSRLKYTHLKNKVSEHIPVYQQEENQTDVWTLLNGSKDDFLIYDRCGRLVYHLGLPFSFLTFPYVEEAIKIAYCEKKCGNCSLTTLKDEDFCKRVSLATVDKTVETPSPHYHHEH

SEQ ID NO: 11863 - protein, 371 aa, Homo sapiens
MWRSLGLALALCLLPSGGTESQDQSSLCKQPPAWSIRDQDPMLNSNGSVTVVALLQASYLCILQASKLEDLRVKLKKEGYSNISYIVVNHQGISSRLKYTHLKNKVSEHIPVYQQEENQTDVWTLLNGSKDDFLIYDRCGRLVYHLGLPFSFLTFPYVEEAIKIAYCEKKCGNCSLTTLKDEDFCKRVSLATVDKTVETPSPHYHHEHHHNHGHQHLGSSELSENQQPGAPNAPTHPAPPGLHHHHKHKGQHRQGHPENRDMPASEDLQDLQKKLCRKRCINQLLCKLPTDSELAPRSCCHCRHLIFEKTGSAITQCKENLPSLCSQGLRAEENITESCQRLPPAAQISQQLIPTEASASRKNQAKKEPSN

SEQ ID NO: 11864 - protein, 371 aa, Homo sapiens; identical to SEQ ID NO: 11863

SEQ ID NO: 11865 - protein, 371 aa, Homo sapiens; identical to SEQ ID NO: 11863

SEQ ID NO: 11866 - protein, 308 aa, Homo sapiens
MWRSLGLALALCLLPSGGTESQDQSSLCKQPPAWSIRDQDPMLNSNGSVTVVALLQASYLCILQASKLEDLRVKLKKEGYSNISYIVVNHQGISSRLKYTHLKNKVSEHIPVYQQEENQTDVWTLLNGSKDDFLIYDRCGRLVYHLGLPFSFLTFPYVEEAIKIAYCEKKCGNCSLTTLKDEDFCKRVSLATVDKTVETPSPHYHHEHHHNHGHQHLGSSELSENQQPGAPNAPTHPAPPGLHHHHKHKGQHRQGHPENRDMPASEDLQDLQKKLCRKRCINQLLCKLPTDSELAPRSCCHCRHLIFE

SEQ ID NO: 11867 - protein, 170 aa, Homo sapiens
MWRSLGLALALCLLPSGGTESQDQSSLCKQPPAWSIRDQDPMLNSNGSVTVVALLQASYLCILQASKLSKMKTFVNVYLWLLWIKQLKLHRLITIMSIITIMDISTLAAVSFQRISNQEHQMLLLILLLQAFITTISTRVSIGRVTQRTEICQQVKIYKIYKRSSVERDV

SEQ ID NO: 11868 - protein, 19 aa, Homo sapiens
MGWLTRIVCLFWGVLLTAR

SEQ ID NO: 11869 - protein, 37 aa, Homo sapiens
MGWLTRIVCLFWGVLLTARANYQNGKNNVPRLKLSYK

SEQ ID NO: 11870 - protein, 149 aa, Homo sapiens
MGWLTRIVCLFWGVLLTARANYQNGKNNVPRLKLSYKEMLESNNVITFNGLANSSSYHTFLLDEERSRLYVGAKDHIFSFDLVNIKDFQKIVWPVSYTRRDECKWAGKDILKECANFIKVLKAYNQTHLYACGTGAFHPICTYIEIGHH

SEQ ID NO: 11871 - protein, 771 aa, Homo sapiens [sequence omitted]

SEQ ID NO: 11872 - protein, 771 aa, Homo sapiens [sequence omitted]

SEQ ID NO: 11873 - protein, 214 aa, Homo sapiens
MGRAGAAAVIPGLALLWAVGLGSAAPSPPRLRLSFQELQAWHGLQTFSLERTCCYQALLVDEERGRLFVGAENHVASLNLDNISKRAKKLAWPAPVEWREECNWAGKDIGTECMNFVKLLHAYNRTHLLACGTGAFHPTCAFVEVGHRAEEPVLRLDPGRIEDGKGKSPYDPRHRAASVLVGEELYSGVAADLMGRDFTIFRSLGQRPSLRTEP

SEQ ID NO: 11874 - protein, 748 aa, Homo sapiens
MGRAGAAAVIPGLALLWAVGLGSAAPSPPRLRLSFQELQAWHGLQTFSLERTCCYQALLVDEERGRLFVGAENHVASLNLDNISKRAKKLAWPAPVEWREECNWAGKDIGTECMNFVKLLHAYNRTHLLACGTGAFHPTCAFVEVGHRAEEPVLRLDPGRIEDGKGKSPYDPRHRAASVLVGEELYSGVAADLMGRDFTIFRSLGQRPSLRTEPHDSRWLNEPKFVKVFWIPESENPDDDKIYFFFRETAVEAAPALGRLSVSRVGQICRNDVGGQRSLVNKWTTFLKARLVCSVPGVEGDTHFDQLQDVFLLSSRDHRTPLLYAVFSTSSIFQGSAVCVYSMNDVRRAFLGPFAHKEGPMHQWVSYQGRVPYPRPGMCPSKTFGTFSSTKDFPDDVIQFARNHPLMYNSVLPTGGRPLFLQVGANYTFTQIAADRVAAADGHYDVLFIGTDVGTVLKVISVPKGSRPSAEGLLLEELHVFEDSAAVTSMQISSKRHQLYVASRSAVAQIALHRCAAHGRVCTECCLARDPYCAWDGVACTRFQPSAKRRFRRQDVRNGDPSTLCSGDSSRPALLEHKVFGVEGSSAFLECEPRSLQARVEWTFQRAGVTAHTQVLAEERTERTARGLLLRRLRRRDSGVYLCAAVEQGFTQPLRRLSLHVLSATQAERLARAEEAAPAAPPGPKLWYRDFLQLVEPGGGGSANSLRMCRPQPALQSLPLESRRKGRNRRTHAPEPRAERGPRSATHW

SEQ ID NO: 11875 - protein, 754 aa, Homo sapiens
MGRAGAAAVIPGLALLWAVGLGSAAPSPPRLRLSFQELQAWHGLQTFSLERTCCYQALLVDEERGRLFVGAENHVASLNLDNISKRAKKLAWPAPVEWREECNWAGKDIGTECMNFVKLLHAYNRTHLLACGTGAFHPTCAFVEVGHRAEEPVLRLDPGRIEDGKGKSPYDPRHRAASVLVGEELYSGVAADLMGRDFTIFRSLGQRPSLRTEPHDSRWLNEPKFVKVFWIPESENPDDDKIYFFFRETAVEAAPALGRLSVSRVGQICRNDVGGQRSLVNKWTTFLKARLVCSVPGVEGDTHFDQLRPFPAEDVFLLSSRDHRTPLLYAVFSTSSSIFQGSAVCVYSMNDVRRAFLGPFAHKEGPMHQWVSYQGRVPYPRPGMCPSKTFGTFSSTKDFPDDVIQFARNHPLMYNSVLPTGGRPLFLQVGANYTFTQIAADRVAAADGHYDVLFIGTDVGTVLKVISVPKGSRPSAEGLLLEELHVFEDSAAVTSMQISSKRHQLYVASRSAVAQIALHRCAAHGRVCTECCLARDPYCAWDGVACTRFQPSAKRRFRRQDVRNGDPSTLCSGDSSRPALLEHKVFGVEGSSAFLECEPRSLQARVEWTFQRAGVTAHTQVLAEERTERTARGLLLRRLRRRDSGVYLCAAVEQGFTQPLRRLSLHVLSATQAERLARAEEAAPAAPPGPKLWYRDFLQLVEPGGGGSANSLRMCRPQPALQSLPLESRRKGRNRRTHAPEPRAERGPRSATHW

SEQ ID NO: 11876 - protein, 749 aa, Homo sapiens
MGRAGAAAVIPGLALLWAVGLGSAAPSPPRLRLSFQELQAWHGLQTFSLERTCCYQALLVDEERGRLFVGAENHVASLNLDNISKRAKKLAWPAPVEWREECNWAGKDIGTECMNFVKLLHAYNRTHLLACGTGAFHPTCAFVEVGHRAEEPVLRLDPGRIEDGKGKSPYDPRHRAASVLVGEELYSGVAADLMGRDFTIFRSLGQRPSLRTEPHDSRWLNEPKFVKVFWIPESENPDDDKIYFFFRETAVEAAPALGRLSVSRVGQICRNDVGGQRSLVNKWTTFLKARLVCSVPGVEGDTHFDQLQDVFLLSSRDHRTPLLYAVFSTSSSIFQGSAVCVYSMNDVRRAFLGPFAHKEGPMHQWVSYQGRVPYPRPGMCPSKTFGTFSSTKDFPDDVIQFARNHPLMYNSVLPTGGRPLFLQVGANYTFTQIAADRVAAADGHYDVLFIGTDVGTVLKVISVPKGSRPSAEGLLLEELHVFEDSAAVTSMQISSKRHQLYVASRSAVAQIALHRCAAHGRVCTECCLARDPYCAWDGVACTRFQPSAKRRFRRQDVRNGDPSTLCSGDSSRPALLEHKVFGVEGSSAFLECEPRSLQARVEWTFQRAGVTAHTQVLAEERTERTARGLLLRRLRRRDSGVYLCAAVEQGFTQPLRRLSLHVLSATQAERLARAEEAAPAAPPGPKLWYRDFLQLVEPGGGGSANSLRMCRPQPALQSLPLESRRKGRNRRTHAPEPRAERGPRSATHW

SEQ ID NO: 11877 - protein, 749 aa, Homo sapiens; identical to SEQ ID NO: 11876

SEQ ID NO: 11878 - protein, 406 aa, Homo sapiens
MNDVRRAFLGPFAHKEGPMHQWVSYQGRVPYPRPGMCPSKTFGTFSSTKDFPDDVIQFARNHPLMYNSVLPTGGRPLFLQVGANYTFTQIAADRVAAADGHYDVLFIGTDVGTVLKVISVPKGSRPSAEGLLLEELHVFEDSAAVTSMQISSKRHQLYVASRSAVAQIALHRCAAHGRVCTECCLARDPYCAWDGVACTRFQPSAKRRFRRQDVRNGDPSTLCSGDSSRPALLEHKVFGVEGSSAFLECEPRSLQARVEWTFQRAGVTAHTQVLAEERTERTARGLLLRRLRRRDSGVYLCAAVEQGFTQPLRRLSLHVLSATQAERLARAEEAAPAAPPGPKLWYRDFLQLVEPGGGGSANSLRMCRPQPALQSLPLESRRKGRNRRTHAPEPRAERGPRSATHW

SEQ ID NO: 11879 - protein, 406 aa, Homo sapiens; identical to SEQ ID NO: 11878

SEQ ID NO: 11880 - protein, 751 aa, Homo sapiens
MAFRTICVLVGVFICSICVKGSSQPQARVYLTFDELRETKTSEYFSLSHHPLDYRILLMDEDQDRIYVGSKDHILSLNINNISQEALSVFWPASTIKVEECKMAGKDPTHGCGNFVRVIQTFNRTHLYVCGSGAFSPVCTYLNRGRRSEDQVFMIDSKCESGKGRCSFNPNVNTVSVMINEELFSGMYIDFMGTDAAIFRSLTKRNAVRTDQHNSKWLSEPMFVDAHVIPDGTDPNDAKVYFFFKEKLTDNNRSTKQIHSMIARICPNDTGGLRSLVNKWTTFLKARLVCSVTDEDGPETHFDELEDVFLLETDNPRTTLVYGIFTTSSSVFKGSAVCVYHLSDIQTVFNGPFAHKEGPNHQLISYQGRIPYPRPGTCPGGAFTPNMRTTKEFPDDVVTFIRNHPLMYNSIYPIHKRPLIVRIGTDYKYTKIAVDRVNAADGRYHVLFLGTDRGTVQKVVVLPTNNSVSGELILEELEVFKNHAPITTMKISSKKQQLYVSSNEGVSQVSLHRCHIYGTACADCCLARDPYCAWDGHSCSRFYPTGKRRSRRQDVRHGNPLTQCRGFNLKAYRNAAEIVQYGVKNNTTFLECAPKSPQASIKWLLQKDKDRRKEVKLNERIIATSQGLLIRSVQGSDQGLYHCIATENSFKQTIAKINFKVLDSEMVAVVTDKWSPWTWASSVRALPFHPKDIMGAFSHSEMQMINQYCKDTRQQHQQGDESQKMRGDYGKLKALINSRKSRNRRNQLPES

SEQ ID NO: 11881 - protein, 751 aa, Homo sapiens; identical to SEQ ID NO: 11880

SEQ ID NO: 11882 - protein, 63 aa, Homo sapiens
MAFRTICVLVGVFICSICVKGSSQPQARVYLTFDEPTLYNAVCYICGYKKKCGVNLVLSNHLL

SEQ ID NO: 11883 - protein, 63 aa, Homo sapiens; identical to SEQ ID NO: 11882

SEQ ID NO: 11884 - protein, 40 aa, Homo sapiens
MAFRTICVLVGVFICSICVKGSSQPQARVYLTFDGPSFHD

SEQ ID NO: 11885 - protein, 39 aa, Homo sapiens
MASAGHIITLLLWGYLLELWTGGHTADTTHPRLRLSHKE

SEQ ID NO: 11886 - protein, 775 aa, Homo sapiens
MASAGHIITLLLWGYLLELWTGGHTADTTHPRLRLSHKELLNLNRTSIFHSPFGFLDLHTMLLDEYQERLFVGGRDLVYSLSLERISDGYKEIHWPSTALKMEECIMKGKDAGECANYVRVLHHYNRTHLLTCGTGAFDPVCAFIRVGYHLEDPLFHLESPRSERGRGRCPFDPSSSFISTLIGSELFAGLYSDYWSRDAAIFRSMGRLAHIRTEHDDERLLKEPKFVGSYMIPDNEDRDDNKVYFFFTEKALEAENNAHAIYTRVGRLCVNDVGGQRILVNKWSTFLKARLVCSVPGMNGIDTYFDELEDVFLLPTRDHKNPVIFGLFNTTSNIFRGHAICVYHMSSIRAAFNGPYAHKEGPEYHWSVYEGKVPYPRPGSCASKVNGGRYGTTKDYPDDAIRFARSHPLMYQAIKPAHKKPILVKTDGKYNLKQIAVDRVEAEDGQYDVLFIGTDNGIVLKVITIYNQEMESMEEVILEELQIFKDPVPIISMEISSKRQQLYIGSASAVAQVRFHHCDMYGSACADCCLARDPYCAWDGISCSRYYPTGTHAKRRFRRQDVRHGNAAQQCFGQQFVGDALDKTEEHLAYGIENNSTLLECTPRSLQAKVIWFVQKGRETRKEEVKTDDRVVKMDLGLLFLRLHKSDAGTYFCQTVEHSFVHTVRKITLEVVEEEKVEDMFNKDDEEDRHHRMPCPAQSSISQGAKPWYKEFLQLIGYSNFQRVEEYCEKVWCTDRKRKKLKMSPSKWKYANPQEKKLRSKPEHYRLPRHTLDS

SEQ ID NO: 11887 - protein, 630 aa, Homo sapiens
MASAGHIITLLLWGYLLELWTGGHTADTTHPRLRLSHKELLNLNRTSIFHSPFGFLDLHTMLLDEYQERLFVGGRDLVYSLSLERISDGYKEIHWPSTALKMEECIMKGKDAGECANYVRVLHHYNRTHLLTCGTGAFDPVCAFIRVGYHLEDPLFHLESPRSERGRGRCPFDPSSSFISTLIGSELFAGLYSDYWSRDAAIFRSMGRLAHIRTEHDDERLLKEPKFVGSYMIPDNEDRDDNKVYFFFTEKALEAENNAHAIYTRVGRLCVNDVGGQRILVNKWSTFLKARLVCSVPGMNGIDTYFDELEDVFLLPTRDHKNPVIFGLFNTTSNIFRGHAICVYHMSSIRAAFNGPYAHKEGPEYHWSVYEGKVPYPRPGSCASKVNGGRYGTTKDYPDDAIRFARSHPLMYQAIKPAHKKPILVKTDGKYNLKQIAVDRVEAEDGQYDVLFIGTDNGIVLKVITIYNQEMESMEEVILEELQIFKDPVPIISMEISSKRQQLYIGSASAVAQVRFHHCDMYGSACADCCLARDPYCAWDGISCSRYYPTGTHAKRRFRRQDVRHGNAAQQCFGQQFVGDALDKTEEHLAYGIENNSTLLECTPRSLQAKVIWFVQKGRETRKEEVKAMS

SEQ ID NO: 11888 - protein, 775 aa, Homo sapiens; identical to SEQ ID NO: 11886

SEQ ID NO: 11889 - protein, 715 aa, Homo sapiens
MLLDEYQERLFVGGRDLVYSLSLERISDGYKEIHWPSTALKMEECIMKGKDAGECANYVRVLHHYNRTHLLTCGTGAFDPVCAFIRVGYHLEDPLFHLESPRSERGRGRCPFDPSSSFISTLIGSELFAGLYSDYWSRDAAIFRSMGRLAHIRTEHDDERLLKEPKFVGSYMIPDNEDRDDNKVYFFFTEKALEAENNAHAIYTRVGRLCVNDVGGQRILVNKWSTFLKARLVCSVPGMNGIDTYFDELEDVFLLPTRDHKNPVIFGLFNTTSNIFRGHAICVYHMSSIRAAFNGPYAHKEGPEYHWSVYEGKVPYPRPGSCASKVNGGRYGTTKDYPDDAIRFARSHPLMYQAIKPAHKKPILVKTDGKYNLKQIAVDRVEAEDGQYDVLFIGTDNGIVLKVITIYNQEMESMEEVILEELQIFKDPVPIISMEISSKRQQLYIGSASAVAQVRFHHCDMYGSACADCCLARDPYCAWDGISCSRYYPTGTHAKRRFRRQDVRHGNAAQQCFGQQFVGDALDKTEEHLAYGIENNSTLLECTPRSLQAKVIWFVQKGRETRKEEVKTDDRVVKMDLGLLFLRLHKSDAGTYFCQTVEHSFVHTVRKITLEVVEEEKVEDMFNKDDEEDRHHRMPCPAQSSISQGAKPWYKEFLQLIGYSNFQRVEEYCEKVWCTDRKRKKLKMSPSKWKYANPQEKKLRSKPEHYRLPRHTLDS

SEQ ID NO: 11890 - protein, 147 aa, Homo sapiens
GTAHFFNFLLNTTDYRILLKDEDHDRMYVGSKDYVLSLDLHDINREPLIIHWAASPQRIEECVLSGKDVNPSLWPQGECGNFVRLIQPWNRTHLYVCGTGAYNPMCTYVNRGRRAQDYIFYLEPERLESGKGKCPYDPKLDTASALI

SEQ ID NO: 11891 - protein, 785 aa, Homo sapiens
MLVAGLLLWASLLTGAWPSFPTQDHLPATPRVRLSFKELKATGTAHFFNFLLNTTDYRILLKDEDHDRMYVGSKDYVLSLDLHDINREPLIIHWAASPQRIEECVLSGKDVNGECGNFVRLIQPWNRTHLYVCGTGAYNPMCTYVNRGRRAQATPWTQTQAVRGRGSRATDGALRPMPTAPRQDYIFYLEPERLESGKGKCPYDPKLDTASALINEELYAGVYIDFMGTDAAIFRTLGKQTAMRTDQYNSRWLNDPSFIHAELIPDSAERNDDKLYFFFRERSAEAPQSPAVYARIGRICLNDDGGHCCLVNKWSTFLKARLVCSVPGEDGIETHFDELQDVFVQQTQDVRNPVIYAVFTSSGSVFRGSAVCVYSMADIRMVFNGPFAHKEGPNYQWMPFSGKMPYPRPGTCPGGTFTPSMKSTKDYPDEVINFMRSHPLMYQAVYPLQRRPLVVRTGAPYRLTTIAVDQVDAADGRYEVLFLGTDRGTVQKVIVLPKDDQELEELMLEEVEVFKDPAPVKTMTISSKRQQLYVASAVGVTHLSLHRCQAYGAACADCCLARDPYCAWDGQACSRYTASSKRRSRRQDVRHGNPIRQCRGFNSNANKNAVESVQYGVAGSAAFLECQPRSPQATVKWLFQRDPGDRRREIRAEDRFLRTEQGLLLRALQLSDRGLYSCTATENNFKHVVTRVQLHVLGRDAVHAALFPPLSMSAPPPPGAGPPTPPYQELAQLLAQPEVGLIHQYCQGYWRHVPPSPREAPGAPRSPEPQDQKKPRNRRHHPPDT

SEQ ID NO: 11892 - protein, 264 aa, Homo sapiens
MLVAGLLLWASLLTGAWPSFPTQDHLPATPRVRLSFKELKATGTAHFFNFLLNTTDYRILLKDEDHDRMYVGSKDYVLSLDLHDINREPLIIHWAASPQRIEECVLSGKDVNGECGNFVRLIQPWNRTHLYVCGTGAYNPMCTYVNRGRRAQDYIFYLEPERLESGKGKCPYDPKLDTASALINEELYAGVYIDFMGTDAAIFRTLGKQTAMRTDQYNSRWLNDPSFIHAELIPDSAERNDDKLYFFFRERSAEAPQSPAVYAR

SEQ ID NO: 11893 - protein, 754 aa, Homo sapiens
MLVAGLLLWASLLTGAWPSFPTQDHLPATPRVRLSFKELKATGTAHFFNFLLNTTDYRILLKDEDHDRMYVGSKDYVLSLDLHDINREPLIIHWAASPQRIEECVLSGKDVNGECGNFVRLIQPWNRTHLYVCGTGAYNPMCTYVNRGRRAQDYIFYLEPERLESGKGKCPYDPKLDTASALINEELYAGVYIDFMGTDAAIFRTLGKQTAMRTDQYNSRWLNDPSFIHAELIPDSAERNDDKLYFFFRERSAEAPQSPAVYARIGRICLNDDGGHCCLVNKWSTFLKARLVCSVPGEDGIETHFDELQDVFVQQTQDVRNPVIYAVFTSSGSVFRGSAVCVYSMADIRMVFNGPFAHKEGPNYQWMPFSGKMPYPRPGTCPGGTFTPSMKSTKDYPDEVINFMRSHPLMYQAVYPLQRRPLVVRTGAPYRLTTIAVDQVDAADGRYEVLFLGTDRGTVQKVIVLPKDDQELEELMLEEVEVFKDPAPVKTMTISSKRQQLYVASAVGVTHLSLHRCQAYGAACADCCLARDPYCAWDGQACSRYTASSKRRSRRQDVRHGNPIRQCRGFNSNANKNAVESVQYGVAGSAAFLECQPRSPQATVKWLFQRDPGDRRREIRAEDRFLRTEQGLLLRALQLSDRGLYSCTATENNFKHVVTRVQLHVLGRDAVHAALFPPLSMSAPPPPGAGPPTPPYQELAQLLAQPEVGLIHQYCQGYWRHVPPSPREAPGAPRSPEPQDQKKPRNRRHHPPDT

SEQ ID NO: 11894 - protein, 380 aa, Homo sapiens
MLVAGLLLWASLLTGAWPSFPTQDHLPATPRVRLSFKELKATGTAHFFNFLLNTTDYRILLKDEDHDRMYVGSKDYVLSLDLHDINREPLIIHWAASPQRIEECVLSGKDVNGECGNFVRLIQPWNRTHLYVCGTGAYNPMCTYVNRGRRAQDYIFYLEPERLESGKGKCPYDPKLDTASALINEELYAGVYIDFMGTDAAIFRTLGKQTAMRTDQYNSRWLNDPSFIHAELIPDSAERNDDKLYFFFRERSAEAPQSPAVYARIGRICLNDDGGHCCLVNKWSTFLKARLVCSVPGEDGIETHFDELQDVFVQQTQDVRNPVIYAVFTSSGSVFRGSAVCVYSMADIRMVFNGPFAHKEGPNYQWMPFSGKMPYPRPGT

SEQ ID NO: 11895 - protein, 92 aa, Homo sapiens
MLVAGLLLWASLLTGAWPSFPTQDHLPATPRVRLSFKELKATGTAHFFNFLLNTTDYRILLKDEDHDRMYVGSKDYVLSLDLHDINREPLIV

SEQ ID NO: 11896 - protein, 686 aa, Homo sapiens
MYVGSKDYVLSLDLHDINREPLIIHWAASPQRIEECVLSGKDVNGECGNFVRLIQPWNRTHLYVCGTGAYNPMCTYVNRGRRAQDYIFYLEPERLESGKGKCPYDPKLDTASALINEELYAGVYIDFMGTDAAIFRTLGKQTAMRTDQYNSRWLNDPSFIHAELIPDSAERNDDKLYFFFRERSAEAPQSPAVYARIGRICLNDDGGHCCLVNKWSTFLKARLVCSVPGEDGIETHFDELQDVFVQQTQDVRNPVIYAVFTSSGSVFRGSAVCVYSMADIRMVFNGPFAHKEGPNYQWMPFSGKMPYPRPGTCPGGTFTPSMKSTKDYPDEVINFMRSHPLMYQAVYPLQRRPLVVRTGAPYRLTTIAVDQVDAADGRYEVLFLGTDRGTVQKVIVLPKDDQELEELMLEEVEVFKDPAPVKTMTISSKRQQLYVASAVGVTHLSLHRCQAYGAACADCCLARDPYCAWDGQACSRYTASSKRRSRRQDVRHGNPIRQCRGFNSNANKNAVESVQYGVAGSAAFLECQPRSPQATVKWLFQRDPGDRRREIRAEDRFLRTEQGLLLRALQLSDRGLYSCTATENNFKHVVTRVQLHVLGRDAVHAALFPPLSMSAPPPPGAGPPTPPYQELAQLLAQPEVGLIHQYCQGYWRHVPPSPREAPGAPRSPEPQDQKKPRNRRHHPPDT

SEQ ID NO: 11897 - protein, 782 aa, Homo sapiens
MAPSAWAICWLLGGLLLHGGSSGPSPGPSVPRLRLSYRDLLSANRSAIFLGPQGSLNLQAMYLDEYRDRLFLGGLDALYSLRLDQAWPDPREVLWPPQPGQREECVRKGRDPLTECANFVRVLQPHNRTHLLACGTGAFQPTCALITVGHRGEHVLHLEPGSVESGRGRCPHEPSRPFASTFIDGELYTGLTADFLGREAMIFRSGGPRPALRSDSDQSLLHDPRFVMAARIPENSDQDNDKVYFFFSETVPSPDGGSNHVTVSRVGRVCVNDAGGQRVLVNKWSTFLKARLVCSVPGPGGAETHFDQLEDVFLLWPKAGKSLEVYALFSTVSAVFQGFAVCVYHMADIWEVFNGPFAHRDGPQHQWGPYGGKVPFPRPGVCPSKMTAQPGRPFGSTKDYPDEVLQFARAHPLMFWPVRPRHGRPVLVKTHLAQQLHQIVVDRVEAEDGTYDVIFLGTDSGSVLKVIALQAGGSAEPEEVVLEELQVFKVPTPITEMEISVKRQMLYVGSRLGVAQLRLHQCETYGTACAECCLARDPYCAWDGASCTHYRPSLGKRRFRRQDIRHGNPALQCLGQSQEEEAVGLVAATMVYGTEHNSTFLECLPKSPQAAVRWLLQRPGDEGPDQVKTDERVLHTERGLLFRRLSRFDAGTYTCTTLEHGFSQTVVRLALVVIVASQLDNLFPPEPKPEEPPARGGLASTPPKAWYKDILQLIGFANLPRVDEYCERVWCRGTTECSGCFRSRSRGKQARGKSWAGLELGKKMKSRVHAEHNRTPREVEAT

SEQ ID NO: 11898 - protein, 186 aa, Homo sapiens
MAPSAWAICWLLGGLLLHGGSSGPSPGPSVPRLRLSYRGAMVRKPSSTMWMETFSRYLLSANRSAIFLGPQGSLNLQAMYLDEYRDRLFLGGLDALYSLRLDQAWPDPREVLWPPQPGQREECVRKGRDPLTECANFVRVLQPHNRTHLLACGTGAFQPTCALITVGHRGEHVLHLEPGSVESGRG

SEQ ID NO: 11899 - protein, 99 aa, Homo sapiens
  VARIANT 1: note = misc_feature - Xaa can be any naturally occurring amino acid
XSSGPSPGPSVPRLRLSYRDRVRQLRAGATASQPDPPASLWHWGLPAHLCPHHSWPPWGACAPPGAWQCGKWPGAVPSRAQPSLCQHLHRRGAVHGSHC

SEQ ID NO: 11900 - protein, 100 aa, Homo sapiens
MALPALGLDPWSLLGLFLFQLLQLLLPTTTAGGGGQGPMPRVRYYAGDERRALSFFHQKGLQDFDTLLLSGDGNTLYVGAREAILALDIQDPGVPRLKNM

SEQ ID NO: 11901 - protein, 236 aa, Homo sapiens
MALPALGLDPWSLLGLFLFQLLQLLLPTTTAGGGGQGPMPRVRYYAGDERRALSFFHQKGLQDFDTLLLSGDGNTLYVGAREAILALDIQDPGVPRLKNMIPWPASDRKKSECAFKKKSNEELQDSYLLPISEDKVMEGKGQSPFDPAHKHTAVLVDGMLYSGTMNNFLGSEPILMRTLGSQPVLKTDNFLRWLHHDASFVAAIPSTQVVYFFFEETASEFDFFERLHTSRVARVC

SEQ ID NO: 11902 - protein, 761 aa, Homo sapiens
MALPALGLDPWSLLGLFLFQLLQLLLPTTTAGGGGQGPMPRVRYYAGDERRALSFFHQKGLQDFDTLLLSGDGNTLYVGAREAILALDIQDPGVPRLKNMIPWPASDRKKSECAFKKKSNETQCFNFIRVLVSYNVTHLYTCGTFAFSPACTFIELQDSYLLPISEDKVMEGKGQSPFDPAHKHTAVLVDGMLYSGTMNNFLGSEPILMRTLGSQPVLKTDNFLRWLHHDASFVAAIPSTQVVYFFFEETASEFDFFERLHTSRVARVCKNDVGGEKLLQKKWTTFLKAQLLCTQPGQLPFNVIRHAVLLPADSPTAPHIYAVFTSQWQVGGTRSSAVCAFSLLDIERVFKGKYKELNKETSRWTTYRGPETNPRPGSCSVGPSSDKALTFMKDHFLMDEQVVGTPLLVKSGVEYTRLAVETAQGLDGHSHLVMYLGTTTGSLHKAVVSGDSSAHLVEEIQLFPDPEPVRNLQLAPTQGAVFVGFSGGVWRVPRANCSVYESCVDCVLARDPHCAWDPESRTCCLLSAPNLNSWKQDMERGNPEWACASGPMSRSLRPQSRPQIIKEVLAVPNSILELPCPHLSALASYYWSHGPAAVPEASSTVYNGSLLLIVQDGVGGLYQCWATENGFSYPVISYWVDSQDQTLALDPELAGIPREHVKVPLTRVSGGAALAAQQSYWPHFVTVTVLFALVLSGALIILVASPLRALRARGKVQGCETLRPGEKAPLSREQHLQSPKECRTSASDVDADNNCLGTEVA

SEQ ID NO: 11903 - protein, 761 aa, Homo sapiens; identical to SEQ ID NO: 11902

SEQ ID NO: 11904 - protein, 761 aa, Homo sapiens; identical to SEQ ID NO: 11902

SEQ ID NO: 11905 - protein, 321 aa, Homo sapiens
MALPALGLDPWSLLGLFLFQLLQLLLPTTTAGGGGQGPMPRVRYYAGDERRALSFFHQKGLQDFDTLLLSGDGNTLYVGAREAILALDIQDPGVPRLKNMIPWPASDRKKSECAFKKKSNETQCFNFIRVLVSYNVTHLYTCGTFAFSPACTFIELQDSYLLPISEDKVMEGKGQSPFDPAHKHTAVLVDGMLYSGTMNNFLGSEPILMRTLGSQPVLKTDNFLRWLHHDASFVAAIPSTQVVYFFFEETASEFDFFERLHTSRVARVCKNDVGGEKLLQKKWTTFLKAQLLCTQPGQLPFNVIRHAVLLPADSPTAPHIY

SEQ ID NO: 11906 - protein, 629 aa, Homo sapiens
MIPWPASDRKKSECAFKKKSNEELQDSYLLPISEDKVMEGKGQSPFDPAHKHTAVLVDGMLYSGTMNNFLGSEPILMRTLGSQPVLKTDNFLRWLHHDASFVAAIPSTQVVYFFFEETASEFDFFERLHTSRVARVCKNDVGGEKLLQKKWTTFLKAQLLCTQPGQLPFNVIRHAVLLPADSPTAPHIYAVFTSQWQVGGTRSSAVCAFSLLDIERVFKGKYKELNKETSRWTTYRGPETNPRPGSCSVGPSSDKALTFMKDHFLMDEQVVGTPLLVKSGVEYTRLAVETAQGLDGHSHLVMYLGTTTGSLHKAVVSGDSSAHLVEEIQLFPDPEPVRNLQLAPTQGAVFVGFSGGVWRVPRANCSVYESCVDCVLARDPHCAWDPESRTCCLLSAPNLNSWKQDMERGNPEWACASGPMSRSLRPQSRPQIIKEVLAVPNSILELPCPHLSALASYYWSHGPAAVPEASSTVYNGSLLLIVQDGVGGLYQCWATENGFSYPVISYWVDSQDQTLALDPELAGIPREHVKVPLTRVSGGAALAAQQSYWPHFVTVTVLFALVLSGALIILVASPLRALRARGKVQGCETLRPGEKAPLSREQHLQSPKECRTSASDVDADNNCLGTEVA

SEQ ID NO: 11907 - protein, 220 aa, Homo sapiens
MIPWPASDRKKSECAFKKKSNETQCFNFIRVLVSYNVTHLYTCGTFAFSPACTFIELQDSYLLPISEDKVMEGKGQSPFDPAHKHTAVLVDGMLYSGTMNNFLGSEPILMRTLGSQPVLKTDNFLRWLHHDASFVAAIPSTQVVYFFFEETASEFDFFERLHTSRVARVCKNDVGGEKLLQKKWTTFLKAQLLCTQPGQLPFNVIRHAVLLPADSPTAPH

SEQ ID NO: 11908 - protein, 723 aa, Homo sapiens
MPRVRYYAGDERRALSFFHQKGLQDFDTLLLSGDGNTLYVGAREAILALDIQDPGVPRLKNMIPWPASDRKKSECAFKKKSNETQCFNFIRVLVSYNVTHLYTCGTFAFSPACTFIELQDSYLLPISEDKVMEGKGQSPFDPAHKHTAVLVDGMLYSGTMNNFLGSEPILMRTLGSQPVLKTDNFLRWLHHDASFVAAIPSTQVVYFFFEETASEFDFFERLHTSRVARVCKNDVGGEKLLQKKWTTFLKAQLLCTQPGQLPFNVIRHAVLLPADSPTAPHIYAVFTSQWQVGGTRSSAVCAFSLLDIERVFKGKYKELNKETSRWTTYRGPETNPRPGSCSVGPSSDKALTFMKDHFLMDEQVVGTPLLVKSGVEYTRLAVETAQGLDGHSHLVMYLGTTTGSLHKAVVSGDSSAHLVEEIQLFPDPEPVRNLQLAPTQGAVFVGFSGGVWRVPRANCSVYESCVDCVLARDPHCAWDPESRTCCLLSAPNLNSWKQDMERGNPEWACASGPMSRSLRPQSRPQIIKEVLAVPNSILELPCPHLSALASYYWSHGPAAVPEASSTVYNGSLLLIVQDGVGGLYQCWATENGFSYPVISYWVDSQDQTLALDPELAGIPREHVKVPLTRVSGGAALAAQQSYWPHFVTVTVLFALVLSGALIILVASPLRALRARGKVQGCETLRPGEKAPLSREQHLQSPKECRTSASDVDADNNCLGTEVA

SEQ ID NO: 11909 - protein, 51 aa, Homo sapiens
MAGPCTWVLERPSLHSVATSASCQAGSTRSCFGVQTQRRNSSAASRARTHR

SEQ ID NO: 11910 - protein, 115 aa, Homo sapiens
MAGPCTWVLERPSLHSVATSASCQAGSTRSCFGVQTQRRNSSAASRARTHSATVKTTSRSSCRSAAVTCSPVAQQPSAPCVPTSTWRTSPWQGTRRGMSSWKMARAVVPSTRISS

SEQ ID NO: 11911 - protein, 91 aa, Homo sapiens
MLRTAMGLRSWLAAPWGALPPRPPLLLLLLLLLLLQPPPPTWALSPRISLPLGSEERPFLRFEAEHISNYTALLLSRDGRTLYVGAREALF

SEQ ID NO: 11912 - protein, 114 aa, Homo sapiens
MLRTAMGLRSWLAAPWGALPPRPPLLLLLLLLLLLQPPPPTWALSPRISLPLGSEERPFLRFEAEHISNYTALLLSRDGRTLYVGAREALFALSSNLSFLPGGEYQELLWGADA

SEQ ID NO: 11913 - protein, 121 aa, Homo sapiens
MLRTAMGLRSWLAAPWGALPPRPPLLLLLLLLLLLQPPPPTWALSPRISLPLGSEERPFLRFEAEHISNYTALLLSRDGRTLYVGAREALFALSSNLSFLPGGEYQELLWGADAEKKQQCS

SEQ ID NO: 11914 - protein, 837 aa, Homo sapiens
MLRTAMGLRSWLAAPWGALPPRPPLLLLLLLLLLLQPPPPTWALSPRISLPLGSEERPFLRFEAEHISNYTALLLSRDGRTLYVGAREALFALSSNLSFLPGGEYQELLWGADAEKKQQCSFKGKDPQRDCQNYIKILLPLSGSHLFTCGTAAFSPMCTYINMENFTLARDEKGNVLLEDGKGRCPFDPNFKSTALVVDGELYTGTVSSFQGNDPAISRSQSLRPTKTESSLNWLQDPAFVASAYIPESLGSLQGDDDKIYFFFSETGQEFEFFENTIVSRIARICKGDEGGERVLQQRWTSFLKAQLLCSRPDDGFPFNVLQDVFTLSPSPQDWRDTLFYGVFTSQWHRGTTEGSAVCVFTMKDVQRVFSGLYKEVNRETQQWYTVTHPVPTPRPGACITNSARERKINSSLQLPDRVLNFLKDHFLMDGQVRSRMLLLQPQARYQRVAVHRVPGLHHTYDVLFLGTGDGRLHKAVSVGPRVHIIEELQIFSSGQPVQNLLLDTHRGLLYAASHSGVVQVPMANCSLYRSCGDCLLARDPYCAWSGSSCKHVSLYQPQLATRPWIQDIEGASAKDLCSASSVVSPSFVPTGEKPCEQVQFQPNTVNTLACPLLSNLATRLWLRNGAPVNASASCHVLPTGDLLLVGTQQLGEFQCWSLEEGFQQLVASYCPEVVEDGVADQTDEGGSVPVIISTSRVSAPAGGKASWGADRSYWKEFLVMCTLFVLAVLLPVLFLLYRHRNSMKVFLKQGECASVHPKTCPVVLPPETRPLNGLGPPSTPLDHRGYQSLSDSPPGSRVFTESEKRPLSIQDSFVEVSPVCPRPRVRLGSEIRDSVV

SEQ ID NO: 11915 - protein, 837 aa, Homo sapiens; identical to SEQ ID NO: 11914

SEQ ID NO: 11916 - protein, 63 aa, Homo sapiens
MLRTAMGLRSWLAAPWGALPPRPPLLLLLLLLLLLQPPPPTWALSPRISLPLGWGYVKTLHRL

SEQ ID NO: 11917 - protein, 461 aa, Homo sapiens
  VARIANT 1: note = misc_feature - Xaa can be any naturally occurring amino acid
XARICKGDEGGERVLQQRWTSFLKAQLLCSRPDDGFPFNVLQDVFTLSPSPQDWRDTLFYGVFTSQWHRGTTEGSAVCVFTMKDVQRVFSGLYKEVNRETQQWYTVTHPVPTPRPGACITNSARERKINSSLQLPDRVLNFLKDHFLMDGQVRSRMLLLQPQARYQRVAVHRVPGLHHTYDVLFLGTGDGRLHKAVSVGPRVHIIEELQIFSSGQPVQNLLLDTHRGLLYAASHSGVVQVPMANCSLYRSCGDCLLARDPYCAWSGSSCKHVSLYQPQLATRPWIQDIEGASAKDLCSASSVVSPSFVPTGEKPCEQVQFQPNTVNTLACPLLSNLATRLWLRNGAPVNASASCHVLPTGDLLLVGTQQLGEFQCWSLEEGFQQLVASYCPEVVEDGVADQTDEGGSVPVIISTSRVSAPAGGKASWGADRSWARTQLLDLSSLYQAVATREDSASSGEIS

SEQ ID NO: 11918 - protein, 120 aa, Homo sapiens
  VARIANT 1: note = misc_feature - Xaa can be any naturally occurring amino acid
XHIIEELQIFSSGQPVQNLLLDTHRGLLYAASHSGVVQVPMANCSLYRSCGDCLLARDPYCAWSGSSCKHVSLYQPQLATRILSGPQAVDPGHRGSQRQGPLQRVFGCVPVFCTNRGEAM

SEQ ID NO: 11919 - protein, 253 aa, Homo sapiens
  VARIANT 1: note = misc_feature - Xaa can be any naturally occurring amino acid
XRSRMLLLQPQARYQRVAVHRVPGLHHTYDVLFLGTGDGRLHKAVSVGPRVHIIEELQIFSSGQPVQNLLLDTHRVSRPTRNPGRGLLYAASHSGVVQVPMANCSLYRSCGDCLLARDPYCAWSGSSCKHVSLYQPQLATRPWIQDIEGASAKDLCSASSVVSPSFVPTGEKPCEQVQFQPNTVNTLACPLLSNLATRLWLRNGAPVNASASCHVLPTGDLLLVGTQQLGEFQCWSLEEGFQQLVASYCPEVV

SEQ ID NO: 11920 - protein, 140 aa, Homo sapiens
MAPHWAVWLLAARLWGLGIGAEVWWNLVPRKTVSSGELATVVRRFSQTGIQDFLTLTLTEPTGLLYVGAREALFAFSMEALELQGAISWEAPVEKKTECIQKGKNNQTECFNFIRFLQPYNASHLYVCGTYAFQPKCTYV

SEQ ID NO: 11921 - protein, 201 aa, Homo sapiens
MAPHWAVWLLAARLWGLGIGAEVWWNLVPRKTVSSGELATVVRRFSQTGIQDFLTLTLTEPTGLLYVGAREALFAFSMEALELQGAISWEAPVEKKTECIQKGKNNQTECFNFIRFLQPYNASHLYVCGTYAFQPKCTYVNMLTFTLEHGEFEDGKGKCPYDPAKGHAGLLVDGELYSATLNNFLGTEPIILRNMGPHHSM

SEQ ID NO: 11922 - protein, 833 aa, Homo sapiens
MAPHWAVWLLAARLWGLGIGAEVWWNLVPRKTVSSGELATVVRRFSQTGIQDFLTLTLTEPTGLLYVGAREALFAFSMEALELQGAISWEAPVEKKTECIQKGKNNQTECFNFIRFLQPYNASHLYVCGTYAFQPKCTYVNMLTFTLEHGEFEDGKGKCPYDPAKGHAGLLVDGELYSATLNNFLGTEPIILRNMGPHHSMKTEYLAFWLNEPHFVGSAYVPESVGSFTGDDDKVYFFFRERAVESDCYAEQVVARVARVCKGDMGGARTLQRKWTTFLKARLACSAPNWQLYFNQLQAMHTLQDTSWHNTTFFGVFQAQWGDMYLSAICEYQLEEIQRVFEGPYKEYHEEAQKWDRYTDPVPSPRPGSCINNWHRRHGYTSSLELPDNILNFVKKHPLMEEQVGPRWSRPLLVKKGTNFTHLVADRVTGLDGATYTVLFIGTGDGWLLKAVSLGPWVHLIEELQLFDQEPMRSLVLSQSKKLLFAGSRSQLVQLPVADCMKYRSCADCVLARDPYCAWSVNTSRCVAVGGHSGSLLIQHVMTSDTSGICNLRGSKKVRPTPKNITVVAGTDLVLPCHLSSNLAHARWTFGGRDLPAEQPGSFLYDARLQALVVMAAQPRHAGAYHCFSEEQGARLAAEGYLVAVVAGPSVTLEARAPLENLGLVWLAVVALGAVCLVLLLLVLSLRRRLREELEKGAKATERTLVYPLELPKEPTSPPFRPCPEPDEKLWDPVGYYYSDGSLKIVPGHARCQPGGGPPSPPPGIPGQPLPSPTRLHLGGGRNSNANGYVRLQLGGEDRGGLGHPLPELADELRRKLQQRQPLPDSNPEESSV

SEQ ID NO: 11923 - protein, 59 aa, Homo sapiens
MRMCTPIRGLLMALAVMFGTAMAFAPIPRITWEHREVHLVQFHEPDIYNYSALLLSEDK

SEQ ID NO: 11924 - protein, 66 aa, Homo sapiens
MRMCTPIRGLLMALAVMFGTAMAFAPIPRITWEHREVHLVQFHEPDIYNYSALLLSEDKDTLYIGA

SEQ ID NO: 11925 - protein, 76 aa, Homo sapiens
MRMCTPIRGLLMALAVMFGTAMAFAPIPRITWEHREVHLVQFHEPDIYNYSALLLSEDKDTLYIGAREAVFAVNAL

SEQ ID NO: 11926 - protein, 146 aa, Homo sapiens
MRMCTPIRGLLMALAVMFGTAMAFAPIPRITWEHREVHLVQFHEPDIYNYSALLLSEDKDTLYIGAREAVFAVNALNISEKQHEVYWKVSEDKKAKCAEKGKSKQTECLNYIRVLQPLSATSLYVCGTNAFQPACDHLNLTSFKFL

SEQ ID NO: 11927 - protein, 862 aa, Homo sapiens
MRMCTPIRGLLMALAVMFGTAMAFAPIPRITWEHREVHLVQFHEPDIYNYSALLLSEDKDTLYIGAREAVFAVNALNISEKQHEVYWKVSEDKKAKCAEKGKSKQTECLNYIRVLQPLSATSLYVCGTNAFQPACDHLNLTSFKFLGKNEDGKGRCPFDPAHSYTSVMVDGELYSGTSYNFLGSEPIISRNSSHSPLRTEYAIPWLNEPSFVFADVIRKSPDSPDGEDDRVYFFFTEVSVEYEFVFRVLIPRIARVCKGDQGGLRTLQKKWTSFLKARLICSRPDSGLVFNVLRDVFVLRSPGLKVPVFYALFTPQLNNVGLSAVCAYNLSTAEEVFSHGKYMQSTTVEQSHTKWVRYNGPVPKPRPGACIDSEARAANYTSSLNLPDKTLQFVKDHPLMDDSVTPIDNRPRLIKKDVNYTQIVVDRTQALDGTVYDVMFVSTDRGALHKAISLEHAVHIIEETQLFQDFEPVQTLLLSSKKGNRFVYAGSNSGVVQAPLAFCGKHGTCEDCVLARDPYCAWSPPTATCVALHQTESPSRGLIQEMSGDASVCPDKSKGSYRQHFFKHGGTAELKCSQKSNLARVFWKFQNGVLKAESPKYGLMGRKNLLIFNLSEGDSGVYQCLSEERVKNKTVFQVVAKHVLEVKVVPKPVVAPTLSVVQTEGSRIATKVLVASTQGSSPPTPAVQATSSGAITLPPKPAPTGTSCEPKIVINTVPQLHSEKTMYLKSSDNRLLMSLFLFFFVLFLCLFFYNCYKGYLPRQCLKFRSALLIGKKKPKSDFCDREQSLKETLVEPGSFSQQNGEHPKPALDTGYETEQDTITSKVPTDREDSQRIDDLSARDKPFDVKCELKFADSDADGD

SEQ ID NO: 11928 - protein, 738 aa, Homo sapiens
MRMCTPIRGLLMALAVMFGTAMAFAPIPRITWEHREVHLVQFHEPDIYNYSALLLSEDKDTLYIGAREAVFAVNALNISEKQHEVYWKVSEDKKAKCAEKGKSKQTECLNYIRVLQPLSATSLYVCGTNAFQPACDHLNLTSFKFLGKNEDGKGRCPFDPAHSYTSVMVDGELYSGTSYNFLGSEPIISRNSSHSPLRTEYAIPWLNEPSFVFADVIRKSPDSPDGEDDRVYFFFTEVSVEYEFVFRVLIPRIARVCKGDQGGLRTLQKKWTSFLKARLICSRPDSGLVFNVLRDVFVLRSPGLKVPVFYALFTPQLNNVGLSAVCAYNLSTAEEVFSHGKYMQSTTVEQSHTKWVRYNGPVPKPRPGACIDSEARAANYTSSLNLPDKTLQFVKDHPLMDDSVTPIDNRPRLIKKDVNYTQIVVDRTQALDGTVYDVMFVSTDRGALHKAISLEHAVHIIEETQLFQDFEPVQTLLLSSKKGNRFVYAGSNSGVVQAPLAFCGKHGTCEDCVLARDPYCAWSPPTATCVALHQTESPSRGLIQEMSGDASVCPASSPKPLPPPGSSSLSCLGHVGDRRLSSPWTPWPASGAGPDSSSRVSLLPPFLSDQAQHVHALGNFYLFCQATGPADIRFVWEKNGRALETCVPVQTHALPDGRAHALSWLQDAIRESAEYRCSVLSSAGNKTSKVQVAVMRPEVTHQERWTRELSAWRAVAGEHDRMMQSWRKAWESCSKDTL

SEQ ID NO: 11929 - protein, 738 aa, Homo sapiens; identical to SEQ ID NO: 11928

SEQ ID NO: 11930 - protein, 862 aa, Homo sapiens; identical to SEQ ID NO: 11927

SEQ ID NO: 11931 - protein, 862 aa, Homo sapiens; identical to SEQ ID NO: 11927

SEQ ID NO: 11932 - protein, 548 aa, Homo sapiens
MRMCTPIRGLLMALAVMFGTAMAFAPIPRITWEHREVHLVQFHEPDIYNYSALLLSEDKDTLYIGAREAVFAVNALNISEKQHEVYWKVSEDKKAKCAEKGKSKQTECLNYIRVLQPLSATSLYVCGTNAFQPACDHLNLTSFKFLGKNEDGKGRCPFDPAHSYTSVMVDGELYSGTSYNFLGSEPIISRNSSHSPLRTEYAIPWLNEPSFVFADVIRKSPDSPDGEDDRVYFFFTEVSVEYEFVFRVLIPRIARVCKGDQGGLRTLQKKWTSFLKARLICSRPDSGLVFNVLRDVFVLRSPGLKVPVFYALFTPQLNNVGLSAVCAYNLSTAEEVFSHGKYMQSTTVEQSHTKWVRYNGPVPKPRPGACIDSEARAANYTSSLNLPDKTLQFVKDHPLMDDSVTPIDNRPRLIKKDVNYTQIVVDRTQALDGTVYDVMFVSTDRGALHKAISLEHAVHIIEETQLFQDFEPVQTLLLSSKKVLQTFALSGRRMGELWRPVSLCRPMHCPMAGPMHSAGCRTPSGKALSIAALSSPQQGTRLRRCRLL

SEQ ID NO: 11933 - protein, 738 aa, Homo sapiens; identical to SEQ ID NO: 11928

SEQ ID NO: 11934 - protein, 862 aa, Homo sapiens; identical to SEQ ID NO: 11927

SEQ ID NO: 11935 - protein, 548 aa, Homo sapiens; identical to SEQ ID NO: 11932

SEQ ID NO: 11936 - protein, 123 aa, Homo sapiens
MWTQRWKRSVSPGPADIRFVWEKNGRALETCVPVQTHALPDGRAHALSWLQDAIRESAEYRCSVLSSAGNKTSKVQVAVMRPEVTHQERWTRELSAWRAVAGEHDRMMQSWRKAWESCSKDTL

SEQ ID NO: 11937 - protein, 49 aa, Homo sapiens
MPASAARPRPGPGQPTASPFPLLLLAVLSGPVSGRVPRSVPRTSLPISD

SEQ ID NO: 11938 - protein, 770 aa, Homo sapiens
MPASAARPRPGPGQPTASPFPLLLLAVLSGPVSGRVPRSVPRTSLPISEADSCLTRFAVPHTYNYSVLLVDPASHTLYVGARDTIFALSLPFSGERPRRIDWMVPEAHRQNCRKKGKKEDECHNFVQILAIANASHLLTCGTFAFDPKCGVIDVSRFQQVERLESGRGKCPFEPAQRSAAVMAGGVLYAATVKNYLGTEPIITRAVGRAEDWIRTDTLPSWLNAPAFVAAVALSPAEWGDEDGDDEIYFFFTETSRAFDSYERIKVPRVARVCAGDLGGRKTLQQRWTTFLKADLLCPGPEHGRASSVLQDVAVLRPELGAGTPIFYGIFSSQWEGATISAVCAFRPQDIRTVLNGPFRELKHDCNRGLPVVDNDVPQPRPGECITNNMKLRHFGSSLSLPDRVLTFIRDHPLMDRPVFPADGHPLLVTTDTAYLRVVAHRVTSLSGKEYDVLYLGTEDGHLHRAVRIGAQLSVLEDLALFPEPQPVENMKLYHSWLLVGSRTEVTQVNTTNCGRLQSCSECILAQDPVCAWSFRLDECVAHAGEHRGLVQDIESADVSSLCPKEPGERPVVFEVPVATAAHVVLPCSPSSAWASCVWHQPSGVTALTPRRDGLEVVVTPGAMGAYACECQEGGAAHVVAAYSLVWGSQRDAPSRAHTVGAGLAGFFLGILAASLTLILIGRRQQRRRQRELLARDKVGLDLGAPPSGTTSYSQDPPSPSPEDERLPLALAKRGSGFGGFSPPFLLDPCPSPAHIRLTGAPLATCDETSI

SEQ ID NO: 11939 - protein, 160 aa, Homo sapiens
MPASAARPRPGPGQPTASPFPLLLLAVLSGPVSGRVPRSVPRTSLPISEADSCLTRFAVPHTYNYSVLLVDPASHTLYVGARDTIFALSLPFSGERPRRIDWMVPEAHRQNCRKKGKKEDECHNFVQILAIANASHLLTCGTFAFDPKCGVIGGSSMLPL

SEQ ID NO: 11940 - protein, 165 aa, Homo sapiens
MPASAARPRPGPGQPTASPFPLLLLAVLSGPVSGRVPRSVPRTSLPISEADSCLTRFAVPHTYNYSVLLVDPASHTLYVGARDTIFALSLPFSGERPRRIDWMVPEAHRQNCRKKGKKEDVSRFQQVERLESGRGKCPFEPAQRSAAVMAGGVLYAATVKNYLGT

SEQ ID NO: 11941 - protein, 737 aa, Homo sapiens
MPASAARPRPGPGQPTASPFPLLLLAVLSGPVSGRVPRSVPRTSLPISEADSCLTRFAVPHTYNYSVLLVDPASHTLYVGARDTIFALSLPFSGERPRRIDWMVPEAHRQNCRKKGKKEDVSRFQQVERLESGRGKCPFEPAQRSAAVMAGGVLYAATVKNYLGTEPIITRAVGRAEDWIRTDTLPSWLNAPAFVAAVALSPAEWGDEDGDDEIYFFFTETSRAFDSYERIKVPRVARVCAGDLGGRKTLQQRWTTFLKADLLCPGPEHGRASSVLQDVAVLRPELGAGTPIFYGIFSSQWEGATISAVCAFRPQDIRTVLNGPFRELKHDCNRGLPVVDNDVPQPRPGECITNNMKLRHFGSSLSLPDRVLTFIRDHPLMDRPVFPADGHPLLVTTDTAYLRVVAHRVTSLSGKEYDVLYLGTEDGHLHRAVRIGAQLSVLEDLALFPEPQPVENMKLYHSWLLVGSRTEVTQVNTTNCGRLQSCSECILAQDPVCAWSFRLDECVAHAGEHRGLVQDIESADVSSLCPKEPGERPVVFEVPVATAAHVVLPCSPSSAWASCVWHQPSGVTALTPRRDGLEVVVTPGAMGAYACECQEGGAAHVVAAYSLVWGSQRDAPSRAHTVGAGLAGFFLGILAASLTLILIGRRQQRRRQRELLARDKVGLDLGAPPSGTTSYSQDPPSPSPEDERLPLALAKRGSGFGGFSPPFLLDPCPSPAHIRLTGAPLATCDETSI

SEQ ID NO: 11942 - protein, 178 aa, Homo sapiens
MPASAARPRPGPGQPTASPFPLLLLAVLSGPVSGRVPRSVPRTSLPISEADSCLTRFAVPHTYNYSVLLVDPASHTLYVGARDTIFALSLPFSGERPRRIDWMVPEAHRQNCRKKGKKEGDLGGRKTLQQRWTTFLKADLLCPGPEHGRASSVLQDVAVLRPELGAGTPIFYGIFSSQ

SEQ ID NO: 11943 - protein, 615 aa, Homo sapiens
MPASAARPRPGPGQPTASPFPLLLLAVLSGPVSGRVPRSVPRTSLPISEADSCLTRFAVPHTYNYSVLLVDPASHTLYVGARDTIFALSLPFSGERPRRIDWMVPEAHRQNCRKKGKKEGDLGGRKTLQQRWTTFLKADLLCPGPEHGRASSVLQDVAVLRPELGAGTPIFYGIFSSQWEGATISAVCAFRPQDIRTVLNGPFRELKHDCNRGLPVVDNDVPQPRPGECITNNMKLRHFGSSLSLPDRVLTFIRDHPLMDRPVFPADGHPLLVTTDTAYLRVVAHRVTSLSGKEYDVLYLGTEDGHLHRAVRIGAQLSVLEDLALFPEPQPVENMKLYHSWLLVGSRTEVTQVNTTNCGRLQSCSECILAQDPVCAWSFRLDECVAHAGEHRGLVQDIESADVSSLCPKEPGERPVVFEVPVATAAHVVLPCSPSSAWASCVWHQPSGVTALTPRRDGLEVVVTPGAMGAYACECQEGGAAHVVAAYSLVWGSQRDAPSRAHTVGAGLAGFFLGILAASLTLILIGRRQQRRRQRELLARDKVGLDLGAPPSGTTSYSQDPPSPSPEDERLPLALAKRGSGFGGFSPPFLLDPCPSPAHIRLTGAPLATCDETSI

SEQ ID NO: 11944 - protein, 127 aa, Homo sapiens
MPASAARPRPGPGQPTASPFPLLLLAVLSGPVSGRVPRSVPRTSLPISEADSCLTRFAVPHTYNYSVLLVDPASHTLYVGARDTIFALSLPFSGERPRRIDWMVPEAHRQNCRKKGKKEGGSSMLPL

SEQ ID NO: 11945 - protein, 68 aa, Homo sapiens
MPASAARPRPGPGQPTASPFPLLLLAVLSGPVSGRVPRSVPRTSLPISVFRRKNRGGGYDPLKRCGRS

SEQ ID NO: 11946 - protein, 127 aa, Homo sapiens
MGSMSPPSAWPCVLDGPETRQDLCQPPKPCVHSHAHMEECLSAGLQCPHPHLLLVHSCFIPASGLGVPSQLPHPIWSSSPAPCGDLFVKSLGTGQPGEVRLHHSPPLPSCVALVNQPPHSPWSFSRV

SEQ ID NO: 11947 - protein, 170 aa, Homo sapiens
MWGRLWPLLLSILTATAVPGPSLRRPSRELDATPRMTIPYEELSGTRHFKGQAQNYSTLLLEEASARLLVGARGALFSLSANDIGDGAHKEIHWEASPEMQSKCHQKGKNNQTECFNHVRFLQRLNSTHLYACGTHAFQPLCAAIDAEAFTLPTSFEEGKEKCPYDPARG

SEQ ID NO: 11948 - protein, 843 aa, Homo sapiens
MWGRLWPLLLSILTATAVPGPSLRRPSRELDATPRMTIPYEELSGTRHFKGQAQNYSTLLLEEASARLLVGARGALFSLSANDIGDGAHKEIHWEASPEMQSKCHQKGKNNQTECFNHVRFLQRLNSTHLYACGTHAFQPLCAAIDAEAFTLPTSFEEGKEKCPYDPARGFTGLIIDGGLYTATRYEFRSIPDIRRSRHPHSLRTEETPMHWLNDAEFVFSVLVRESKASAVGDDDKVYYFFTERATEEGSGSFTQSRSSHRVARVARVCKGDLGGKKILQKKWTSFLKARLICHIPLYETLRGVCSLDAETSSRTHFYAAFTLSTQWKTLEASAICRYDLAEIQAVFAGPYMEYQDGSRRWGRYEGGVPEPRPGSCITDSLRSQGYNSSQDLPSLVLDFVKLHPLMARPVVPTRGRPLLLKRNIRYTHLTGTPVTTPAGPTYDLLFLGTADGWIHKAVVLGSGMHIIEETQVFRESQSVENLVISLLQHSLYVGAPSGVIQLPLSSCSRYRSCYDCILARDPYCGWDPGTHACAAATTIANRSQGSRTALIQDIERGNRGCESSRDTGPPPPLKTRSVLRGDDVLLPCDQPSNLARALWLLNGSMGLSDGQGGYRVGVDGLLVTDAQPEHSGNYGCYAEENGLRTLLASYSLTVRPATPAPAPKAPATPGAQLAPDVRLLYVLAIAALGGLCLILASSLLYVACLREGRRGRRRKYSLGRASRAGGSAVQLQTVSGQCPGEEDEGDDEGAGGLEGSCLQIIPGEGAPAPPPPPPPPPPAELTNGLVALPSRLRRMNGNSYVLLRQSNNGVPAGPCSFAEELSRILEKRKHTQLVEQLDESSV

SEQ ID NO: 11949 - protein, 838 aa, Homo sapiens
MWGRLWPLLLSILTATAVPGPSLRRPSRELDATPRMTIPYEELSGTRHFKGQAQNYSTLLLEEASARLLVGARGALFSLSANDIGDGAHKEIHWEASPEMQSKCHQKGKNNQTECFNHVRFLQRLNSTHLYACGTHAFQPLCAAIDAEAFTLPTSFEEGKEKCPYDPARGFTGLIIDGGLYTATRYEFRSIPDIRRSRHPHSLRTEETPMHWLNDAEFVFSVLVRESKASAVGDDDKVYYFFTERATEEGSGSFTQSRSSHRVARVARVCKGDLGGKKILQKKWTSFLKARLICHIPLYETLRGVCSLDAETSSRTHFYAAFTLSTQWKTLEASAICRYDLAEIQAVFAGPYMEYQDGSRRWGRYEGGVPEPRPGSCITDSLRSQGYNSSQDLPSLVLDFVKLHPLMARPVVPTRGRPLLLKRNIRYTHLTGTPVTTPAGPTYDLLFLGTADGWIHKAVVLGSGMHIIEETQVFRESQSVENLVISLLQHSLYVGAPSGVIQLPLSSCSRYRSCYDCILARDPYCGWDPGTHACAAATTIANRTALIQDIERGNRGCESSRDTGPPPPLKTRSVLRGDDVLLPCDQPSNLARALWLLNGSMGLSDGQGGYRVGVDGLLVTDAQPEHSGNYGCYAEENGLRTLLASYSLTVRPATPAPAPKAPATPGAQLAPDVRLLYVLAIAALGGLCLILASSLLYVACLREGRRGRRRKYSLGRASRAGGSAVQLQTVSGQCPGEEDEGDDEGAGGLEGSCLQIIPGEGAPAPPPPPPPPPPAELTNGLVALPSRLRRMNGNSYVLLRQSNNGVPAGPCSFAEELSRILEKRKHTQLVEQLDESSV

SEQ ID NO: 11950 - protein, 702 aa, Homo sapiens
MWGRLWPLLLSILTATAVPGPSLRRPSRELDATPRMTIPYEELSGTRHFKGQAQNYSTLLLEEASARLLVGARGALFSLSANDIGDGAHKEIHWEASPEMQSKCHQKGKNNQTECFNHVRFLQRLNSTHLYACGTHAFQPLCAAIDAEAFTLPTSFEEGKEKCPYDPARGFTGLIIDGGLYTATRYEFRSIPDIRRSRHPHSLRTEETPMHWLNDAEFVFSVLVRESKASAVGDDDKVYYFFTERATEEGSGSFTQSRSSHRVARVARVCKGDLGGKKILQKKWTSFLKARLICHIPLYETLRGVCSLDAETSSRTHFYAAFTLSTQWKTLEASAICRYDLAEIQAVFAGPYMEYQDGSRRWGRYEGGVPEPRPGSCITDSLRSQGYNSSQDLPSLVLDFVKLHPLMARPVVPTRGRPLLLKRNIRYTHLTGTPVTTPAGPTYDLLFLGTADGWIHKAVVLGSGMHIIEETQVFRESQSVENLVISLLQHSLYVGAPSGVIQLPLSSCSRYRSCYDCILARDPYCGWDPGTHACAAATTIANRSQGSRTALIQDIERGNRGCESSRDTGRALQVHMGSMSPPSAWPCVLDGPETRQDLCQPPKPCVHSHAHMEECLSAGLQCPHPHLLLVHSCFIPASGLGVPSQLPHPIWSSSPAPCGDLFVKSLGTGQPGEVRLHHSPPLPSCVALVNQPPHSPWSFSRV

SEQ ID NO: 11951 - protein, 522 aa, Homo sapiens
MWGRLWPLLLSILTATAVPGPSLRRPSRELDATPRMTIPYEELSGTRHFKGQAQNYSTLLLEEASARLLVGARGALFSLSANDIGDGAHKEIHWEASPEMQSKCHQKGKNNQTECFNHVRFLQRLNSTHLYACGTHAFQPLCAAIDAEAFTLPTSFEEGKEKCPYDPARGFTGLIIDGGLYTATRYEFRSIPDIRRSRHPHSLRTEETPMHWLNDAEFVFSVLVRESKASAVGDDDKVYYFFTERATEEGSGSFTQSRSSHRVARVARVCKGDLGGKKILQKKWTSFLKARLICHIPLYETLRGVCSLDAETSSRTHFYAAFTLSTQWKTLEASAICRYDLAEIQAVFAGPYMEYQDGSRRWGRYEGGVPEPRPGSCITDSLRSQGYNSSQDLPSLVLDFVKLHPLMARPVVPTRGRPLLLKRNIRYTHLTGTPVTTPAGPTYDLLFLGTADGWIHKAVVLGSGMHIIEETQVFRESQSVENLVISLLQHSLYVGAPSGVIQLPLSSCSRYRSCYDCILARD

SEQ ID NO: 11952 - protein, 838 aa, Homo sapiens; identical to SEQ ID NO: 11949

SEQ ID NO: 11953 - protein, 132 aa, Homo sapiens
  VARIANT 1: note = misc_feature - Xaa can be any naturally occurring amino acid
XREGRRGRRRKYSLGRASRAGGSAVQLQTVSGRALQVHMGSMSPPSAWPCVLDGPETRQDLCQPPKPCVHSHAHMEECLSAGLQCPHPHLLLVHSCFIPASGLGVPSQLPHPIWSSSPAPCGDLFVKSLGTG

SEQ ID NO: 11954 - protein, 254 aa, Homo sapiens
MKGTCVIAWLFSSLGLWRLAHPEAQGTTQCQRTEHPVISYKEIGPWLREFRAKNAVDFSQLTFDPGQKELVVGARNYLFRLQLEDLSLIQAVEWECDEATKKACYSKGKSKEECQNYIRVLLVGGDRLFTCGTNAFTPVCTNRSLSNLTEIHDQISGMARCPYSPQHNSTALLTAGGELYAATAMDFPGRDPAIYRSLGILPPLRTAQYNSKWLNEPNFVSSYDIGNFTYFFFRENAVEHDCGKTVFSRAARVC

SEQ ID NO: 11955 - protein, 1074 aa, Homo sapiens
MKGTCVIAWLFSSLGLWRLAHPEAQGTTQCQRTEHPVISYKEIGPWLREFRAKNAVDFSQLTFDPGQKELVVGARNYLFRLQLEDLSLIQAVEWECDEATKKACYSKGKSKEECQNYIRVLLVGGDRLFTCGTNAFTPVCTNRSLSNLTEIHDQISGMARCPYSPQHNSTALLTAGGELYAATAMDFPGRDPAIYRSLGILPPLRTAQYNSKWLNEPNFVSSYDIGNFTYFFFRENAVEHDCGKTVFSRAARVCKNDIGGRFLLEDTWTTFMKARLNCSRPGEVPFYYNELQSTFFLPELDLIYGIFTTNVNSIAASAVCVFNLSAIAQAFSGPFKYQENSRSAWLPYPNPNPHFQCGTVDQGLYVNLTERNLQDAQKFILMHEVVQPVTTVPSFMEDNSRFSHVAVDVVQGREALVHIIYLATDYGTIKKVRVPLNQTSSSCLLEEIELFPERRREPIRSLQILHSQSVLFVGLREHVVKIPLKRCQFYRTRSTCIGAQDPYCGWDVVMKKCTSLEESLSMTQWEQSISACPTRNLTVDGHFGVWSPWTPCTHTDGSAVGSCLCRTRSCDSPAPQCGGWQCEGPGMEIANCSRNGGWTPWTSWSPCSTTCGIGFQVRQRSCSNPTPRHGGRVCVGQNREERYCNEHLLCPPHMFWTGWGPWERCTAQCGGGIQARRRICENGPDCAGCNVEYQSCNTNPCPELKKTTPWTPWTPVNISDNGGHYEQRFRYTCKARLADPNLLEVGRQRIEMRYCSSDGTSGCSTDGLSGDFLRAGRYSAHTVNGAWSAWTSWSQCSRDCSRGIRNRKRVCNNPEPKYGGMPCLGPSLEYQECNILPCPVDGVWSCWSPWTKCSATCGGGHYMRTRSCSNPAPAYGGDICLGLHTEEALCNTQPCPESWSEWSDWSECEASGVQVRARQCILLFPMGSQCSGNTTESRPCVFDSNFIPEVSVARSSSVEEKRCGEFNMFHMIAVGLSSSILGCLLTLLVYTYCQRYQQQSHDATVIHPVSPAPLNTSITNHINKLDKYDSVEAIKAFNKNNLILEERNKYFNPHLTGKTYSNAYFTDLNNYDEY

SEQ ID NO: 11956 - protein, 409 aa, Homo sapiens
MKNASPETREGVIRESYLKGHDQLVPVTLLAIAVILAFVMGAVFSGITVYCVCDHRRKDVAVVQRKEKELTHSRRGSMSSVTKLSGLFGDTQSKDPKPEAILTPLMHNGKLATPGNTAKMLIKADQHHLDLTALPTPESTPTLQQKRKPSRGSREWERNQNLINACTKDMPPMGSPVIPTDLPLRASPSHIPSVVVLPITQQGYQHEYVDQPKMSEVAQMALEDQAATLEYKTIKEHLSSKSPNHGVNLVENLDSLPPKVPQREASLGPPGASLSQTGLSKRLEMHHSSSYGVDYKRSYPTNSLTRSHQATTLKRNNTNSSNSSHLSRNQSFGRGDNPPPAPQRVDSIQVHSSQPSGQAVTVSRQPSLNAYNSLTRSGLKRTPSLKPDVPPKPSFAPLSTSMKPNDACT

SEQ ID NO: 11957 - protein, 457 aa, Homo sapiens
MKTGHSSSLLPSTTTSDSTAQEGYESRGGMLDWKHLLDSPDSTDPLGAVSSHNHQDKKGVIRESYLKGHDQLVPVTLLAIAVILAFVMGAVFSGITVYCVCDHRRKDVAVVQRKEKELTHSRRGSMSSVTKLSGLFGDTQSKDPKPEAILTPLMHNGKLATPGNTAKMLIKADQHHLDLTALPTPESTPTLQQKRKPSRGSREWERNQNLINACTKDMPPMGSPVIPTDLPLRASPSHIPSVVVLPITQQGYQHEYVDQPKMSEVAQMALEDQAATLEYKTIKEHLSSKSPNHGVNLVENLDSLPPKVPQREASLGPPGASLSQTGLSKRLEMHHSSSYGVDYKRSYPTNSLTRSHQATTLKRNNTNSSNSSHLSRNQSFGRGDNPPPAPQRVDSIQVHSSQPSGQAVTVSRQPSLNAYNSLTRSGLKRTPSLKPDVPPKPSFAPLSTSMKPNDACT

SEQ ID NO: 11958 - protein, 114 aa, Homo sapiens
MRSEALLLYFTLLHFAGAGFPEDSEPISISHGNYTKQYPVFVGHKPGRNTTQRHRLDIQMIMIMNGTLYIAARDHIYTVDIDTSHTEEIYCSKKLTWKSRQADVDTCRMKGKHK

SEQ ID NO: 11959 - protein, 159 aa, Homo sapiens
MRSEALLLYFTLLHFAGAGFPEDSEPISISHGNYTKQYPVFVGHKPGRNTTQRHRLDIQMIMIMNGTLYIAARDHIYTVDIDTSHTEEIYCSKKLTWKSRQADVDTCRMKGKHKDECHNFIKVLLKKNDDALFVCGTNAFNPSCRNYKMDTLEPFGDEF

SEQ ID NO: 11960 - protein, 1047 aa, Homo sapiens
MRSEALLLYFTLLHFAGAGFPEDSEPISISHGNYTKQYPVFVGHKPGRNTTQRHRLDIQMIMIMNGTLYIAARDHIYTVDIDTSHTEEIYCSKKLTWKSRQADVDTCRMKGKHKDECHNFIKVLLKKNDDALFVCGTNAFNPSCRNYKMDTLEPFGDEFSGMARCPYDAKHANVALFADGKLYSATVTDFLAIDAVIYRSLGESPTLRTVKHDSKWLKEPYFVQAVDYGDYIYFFFREIAVEYNTMGKVVFPRVAQVCKNDMGGSQRVLEKQWTSFLKARLNCSVPGDSHFYFNILQAVTDVIRINGRDVVLATFSTPYNSIPGSAVCAYDMLDIASVFTGRFKEQKSPDSTWTPVPDERVPKPRPGCCAGSSSLERYATSNEFPDDTLNFIKTHPLMDEAVPSIFNRPWFLRTMVRYRLTKIAVDTAAGPYQNHTVVFLGSEKGIILKFLARIGNSGFLNDSLFLEEMSVYNSEKCSYDGVEDKRIMGMQLDRASSSLYVAFSTCVIKVPLGRCERHGKCKKTCIASRDPYCGWIKEGGACSHLSPNSRLTFEQDIERGNTDGLGDCHNSFVALNDISTPLPDNEMSYNTVYGHSSSLLPSTTTSDSTAQEGYESRGGMLDWKHLLDSPDSTDPLGAVSSHNHQDKKGVIRESYLKGHDQLVPVTLLAIAVILAFVMGAVFSGITVYCVCDHRRKDVAVVQRKEKELTHSRRGSMSSVTKLSGLFGDTQSKDPKPEAILTPLMHNGKLATPGNTAKMLIKADQHHLDLTALPTPESTPTLQQKRKPSRGSREWERNQNLINACTKDMPPMGSPVIPTDLPLRASPSHIPSVVVLPITQQGYQHEYVDQPKMSEVAQMALEDQAATLEYKTIKEHLSSKSPNHGVNLVENLDSLPPKVPQREASLGPPGASLSQTGLSKRLEMHHSSSYGVDYKRSYPTNSLTRSHQATTLKRNNTNSSNSSHLSRNQSFGRGDNPPPAPQRVDSIQVHSSQPSGQAVTVSRQPSLNAYNSLTRSGLKRTPSLKPDVPPKPSFAPLSTSMKPNDACT

SEQ ID NO: 11961 - protein, 1030 aa, Homo sapiens
MRSEALLLYFTLLHFAGAGFPEDSEPISISHGNYTKQYPVFVGHKPGRNTTQRHRLDIQMIMIMNGTLYIAARDHIYTVDIDTSHTEEIYCSKKLTWKSRQADVDTCRMKGKHKDECHNFIKVLLKKNDDALFVCGTNAFNPSCRNYKMDTLEPFGDEFSGMARCPYDAKHANVALFADGKLYSATVTDFLAIDAVIYRSLGESPTLRTVKHDSKWLKEPYFVQAVDYGDYIYFFFREIAVEYNTMGKVVFPRVAQVCKNDMGGSQRVLEKQWTSFLKARLNCSVPGDSHFYFNILQAVTDVIRINGRDVVLATFSTPYNSIPGSAVCAYDMLDIASVFTGRFKEQKSPDSTWTPVPDERVPKPRPGCCAGSSSLERYATSNEFPDDTLNFIKTHPLMDEAVPSIFNRPWFLRTMVRYRLTKIAVDTAAGPYQNHTVVFLGSEKGIILKFLARIGNSGFLNDSLFLEEMSVYNSEKCSYDGVEDKRIMGMQLDRASSSLYVAFSTCVIKVPLGRCERHGKCKKTCIASRDPYCGWIKEGGACSHLSPNSRLTFEQDIERGNTDGLGDCHNSFVALNGHSSSLLPSTTTSDSTAQEGYESRGGMLDWKHLLDSPDSTDPLGAVSSHNHQDKKGVIRESYLKGHDQLVPVTLLAIAVILAFVMGAVFSGITVYCVCDHRRKDVAVVQRKEKELTHSRRGSMSSVTKLSGLFGDTQSKDPKPEAILTPLMHNGKLATPGNTAKMLIKADQHHLDLTALPTPESTPTLQQKRKPSRGSREWERNQNLINACTKDMPPMGSPVIPTDLPLRASPSHIPSVVVLPITQQGYQHEYVDQPKMSEVAQMALEDQAATLEYKTIKEHLSSKSPNHGVNLVENLDSLPPKVPQREASLGPPGASLSQTGLSKRLEMHHSSSYGVDYKRSYPTNSLTRSHQATTLKRNNTNSSNSSHLSRNQSFGRGDNPPPAPQRVDSIQVHSSQPSGQAVTVSRQPSLNAYNSLTRSGLKRTPSLKPDVPPKPSFAPLSTSMKPNDACT

SEQ ID NO: 11962 - protein, 1030 aa, Homo sapiens; identical to SEQ ID NO: 11961

SEQ ID NO: 11963 - protein, 545 aa, Homo sapiens
  VARIANT 1: note = misc_feature - Xaa can be any naturally occurring amino acid
XYQNHTVVFLGSEKGIILKFLARIGNSGFLNDSLFLEEMSVYNSEKCSYDGVEDKRIMGMQLDRASSSLYVAFSTCVIKVPLGRCERHGKCKKTCIASRDPYCGWIKEGGACSHLSPNSRLTFEQDIERGNTDGLGDCHNSFVALNGVIRESYLKGHDQLVPVTLLAIAVILAFVMGAVFSGITVYCVCDHRRKDVAVVQRKEKELTHSRRGSMSSVTKLSGLFGDTQSKDPKPEAILTPLMHNGKLATPGNTAKMLIKADQHHLDLTALPTPESTPTLQQKRKPSRGSREWERNQNLINACTKDMPPMGSPVIPTDLPLRASPSHIPSVVVLPITQQGYQHEYVDQPKMSEVAQMALEDQAATLEYKTIKEHLSSKSPNHGVNLVENLDSLPPKVPQREASLGPPGASLSQTGLSKRLEMHHSSSYGVDYKRSYPTNSLTRSHQATTLKRNNTNSSNSSHLSRNQSFGRGDNPPPAPQRVDSIQVHSSQPSGQAVTVSRQPSLNAYNSLTRSGLKRTPSLKPDVPPKPSFAPLSTSMKPNDACT

SEQ ID NO: 11964 - protein, 930 aa, Homo sapiens
MPRAPHFMPLLLLLLLLSLPHTQAAFPQDPLPLLISDLQGTSPLSWFRGLEDDAVAAELGLDFQRFLTLNRTLLVAARDHVFSFDLQAEEEGEGLVPNKYLTWRSQDVENCAVRGKLTDECYNYIRVLVPWDSQTLLACGTNSFSPVCRSYGITSLQQEGEELSGQARCPFDATQSNVAIFAEGSLYSATAADFQASDAVVYRSLGPQPPLRSAKYDSKWLREPHFVQALEHGDHVYFFFREVSVEDARLGRVQFSRVARVCKRDMGGSPRALDRHWTSFLKLRLNCSVPGDSTFYFDVLQALTGPVNLHGRSALFGVFTTQTNSIPGSAVCAFYLDEIERGFEGKFKEQRSLDGAWTPVSEDRVPSPRPGSCAGVGGAALFSSSRDLPDDVLTFIKAHPLLDPAVPPVTHQPLLTLTSRALLTQVAVDGMAGPHSNITVMFLGSNDGTVLKVLTPGGRSGGPEPILLEEIDAYSPARCSGKRTAQTARRIIGLELDTEGHRLFVAFSGCIVYLPLSRCARHGACQRSCLASQDPYCGWHSSRGCVDIRGSGGTDVDQAGNQESMEHGDCQDGATGSQSGPGDSAYGVRRDLPPASASRSVPIPLLLASVAAAFALGASVSGLLVSCACRRAHRRRGKDIETPGLPRPLSLRSLARLHGGGPEPPPPSKDGDAVQTPQLYTTFLPPPEGVPPPELACLPTPESTPELPVKHLRAAGDPWEWNQNRNNAKEGPGRSRGGHAAGGPAPRVLVRPPPPGCPGQAVEVTTLEELLRYLHGPQPPRKGAEPPAPLTSRALPPEPAPALLGGPSPRPHECASPLRLDVPPEGRCASAPARPALSAPAPRLGVGGGRRLPFSGHRAPPALLTRVPSGGPSRYSGGPGKHLLYLGRPEGYRGRALKRVDVEKPQLSLKPPLVGPSSRQAVPNGGRFNF

SEQ ID NO: 11965 - protein, 930 aa, Homo sapiens; identical to SEQ ID NO: 11964

SEQ ID NO: 11966 - protein, 962 aa, Homo sapiens
MPRAPHFMPLLLLLLLLSLPHTQAAFPQDPLPLLISDLQGTSPLSWFRGLEDDAVAAELGLDFQRFLTLNRTLLVAARDHVFSFDLQAEEEGEGLVPNKYLTWRSQDVENCAVRGKLTDECYNYIRVLVPWDSQTLLACGTNSFSPVCRSYGITSLQQEGEELSGQARCPFDATQSNVAIFAEGSLYSATAADFQASDAVVYRSLGPQPPLRSAKYDSKWLREPHFVQALEHGDHVYFFFREVSVEDARLGRVQFSRVARVCKRDMGGSPRALDRHWTSFLKLRLNCSVPGDSTFYFDVLQALTGPVNLHGRSALFGVFTTQTNSIPGSAVCAFYLDEIERGFEGKFKEQRSLDGAWTPVSEDRVPSPRPGSCAGVGGAALFSSSRDLPDDVLTFIKAHPLLDPAVPPVTHQPLLTLTSRALLTQVAVDGMAGPHSNITVMFLGSNDGTVLKVLTPGGRSGGPEPILLEEIDAYSPARCSGKRTAQTARRIIGLELDTEGHRLFVAFSGCIVYLPLSRCARHGACQRSCLASQDPYCGWHSSRGCVDIRGSGGTDVDQAGNQESMEHGDCQDGATGSQSGPGDSAYVLPGPGPSPGTPSPPSDAHPRPQSSTLGVHTRGVRRDLPPASASRSVPIPLLLASVAAAFALGASVSGLLVSCACRRAHRRRGKDIETPGLPRPLSLRSLARLHGGGPEPPPPSKDGDAVQTPQLYTTFLPPPEGVPPPELACLPTPESTPELPVKHLRAAGDPWEWNQNRNNAKEGPGRSRGGHAAGGPAPRVLVRPPPPGCPGQAVEVTTLEELLRYLHGPQPPRKGAEPPAPLTSRALPPEPAPALLGGPSPRPHECASPLRLDVPPEGRCASAPARPALSAPAPRLGVGGGRRLPFSGHRAPPALLTRVPSGGPSRYSGGPGKHLLYLGRPEGYRGRALKRVDVEKPQLSLKPPLVGPSSRQAVPNGGRFNF

SEQ ID NO: 11967 - protein, 537 aa, Homo sapiens [sequence omitted]

SEQ ID NO: 11968 - protein, 537 aa, Homo sapiens
MPRAPHFMPLLLLLLLLSLPHTQAAFPQDPLPLLISDLQGTSPLSWFRGLEDDAVAAELGLDFQRFLTLNRTLLVAARDHVFSFDLQAEEEGEGLVPNKYLTWRSQDVENCAVRGKLTDECYNYIRVLVPWDSQTLLACGTNSFSPVCRSYGITSLQQEGEELSGQARCPFDATQSNVAIFAEGSLYSATAADFQASDAVVYRSLGPQPPLRSAKYDSKWLREPHFVQALEHGDHVYFFFREVSVEDARLGRVQFSRVARVCKRDMGGSPRALDRHWTSFLKLRLNCSVPGDSTFYFDVLQALTGPVNLHGRSALFGVFTTQTNSIPGSAVCAFYLDEIERGFEGKFKEQRSLDGAWTPVSEDRVPSPRPGSCPAHSSPLGRSLQVLRGSREAPPVPGPARGLPGPRPEKGGRREAPVVPEASPRRALLPPGRPERRPFQLLKGAAHGLQRGERPSPLGHELDALQDVSPPPRPAPPAFPTRRVSRGPFSPRVYLLTVFPPVLDRRVGGEKPVSSVSQHFRGSWRTPTPRSLPAKLP

SEQ ID NO: 11969 - protein, 922 aa, Homo sapiens
MPRAPHFMPLLLLLLLLSLPHTQAAFPQDPLPLLISDLQGTSPLSWFRGLEDDAVAAELGLDFQRFLTLNRTLLVAARDHVFSFDLQAEEEGEGLVPNKYLTWRSQDVENCAVRGKLTDECYNYIRVLVPWDSQTLLACGTNSFSPVCRSYGITSLQQEGEELSGQARCPFDATQSNVAIFAEPHFVQALEHGDHVYFFFREVSVEDARLGRVQFSRVARVCKRDMGGSPRALDRHWTSFLKLRLNCSVPGDSTFYFDVLQALTGPVNLHGRSALFGVFTTQTNSIPGSAVCAFYLDEIERGFEGKFKEQRSLDGAWTPVSEDRVPSPRPGSCAGVGGAALFSSSRDLPDDVLTFIKAHPLLDPAVPPVTHQPLLTLTSRALLTQVAVDGMAGPHSNITVMFLGSNDGTVLKVLTPGGRSGGPEPILLEEIDAYSPARCSGKRTAQTARRIIGLELDTEGHRLFVAFSGCIVYLPLSRCARHGACQRSCLASQDPYCGWHSSRGCVDIRGSGGTDVDQAGNQESMEHGDCQDGATGSQSGPGDSAYVLPGPGPSPGTPSPPSDAHPRPQSSTLGVHTRGVRRDLPPASASRSVPIPLLLASVAAAFALGASVSGLLVSCACRRAHRRRGKDIETPGLPRPLSLRSLARLHGGGPEPPPPSKDGDAVQTPQLYTTFLPPPEGVPPPELACLPTPESTPELPVKHLRAAGDPWEWNQNRNNAKEGPGRSRGGHAAGGPAPRVLVRPPPPGCPGQAVEVTTLEELLRYLHGPQPPRKGAEPPAPLTSRALPPEPAPALLGGPSPRPHECASPLRLDVPPEGRCASAPARPALSAPAPRLGVGGGRRLPFSGHRAPPALLTRVPSGGPSRYSGGPGKHLLYLGRPEGYRGRALKRVDVEKPQLSLKPPLVGPSSRQAVPNGGRFNF

SEQ ID NO: 11970 - protein, 22 aa, Homo sapiens
MRVFLLCAYILLLMVSQLRAVS

SEQ ID NO: 11971 - protein, 148 aa, Homo sapiens
MRVFLLCAYILLLMVSQLRAVSFPEDDEPLNTVDYHYSRQYPVFRGRPSGNESQHRLDFQLMLKIRDTLYIAGRDQVYTVNLNEMPKTEVIPNKKLTWRSRQQDRENCAMKGKHKDECHNFIKVFVPRNDEMVFVCGTNAFNPMCRYY

SEQ ID NO: 11972 - protein, 219 aa, Homo sapiens
MRVFLLCAYILLLMVSQLRAVSFPEDDEPLNTVDYHYSRQYPVFRGRPSGNESQHRLDFQLMLKIRDTLYIAGRDQVYTVNLNEMPKTEVIPNKKLTWRSRQQDRENCAMKGKHKDECHNFIKVFVPRNDEMVFVCGTNAFNPMCRYYRLSTLEYDGEEISGLARCPFDARQTNVALFADGKLYSATVADFLASDAVIYRSMGDGSALRTIKYDSKWIK

SEQ ID NO: 11973 - protein, 1073 aa, Homo sapiens
MRVFLLCAYILLLMVSQLRAVSFPEDDEPLNTVDYHYSRQYPVFRGRPSGNESQHRLDFQLMLKIRDTLYIAGRDQVYTVNLNEMPKTEVIPNKKLTWRSRQQDRENCAMKGKHKDECHNFIKVFVPRNDEMVFVCGTNAFNPMCRYYRLSTLEYDGEEISGLARCPFDARQTNVALFADGKLYSATVADFLASDAVIYRSMGDGSALRTIKYDSKWIKEPHFLHAIEYGNYVYFFFREIAVEHNNLGKAVYSRVARICKNDMGGSQRVLEKHWTSFLKARLNCSVPGDSFFYFDVLQSITDIIQINGIPTVVGVFTTQLNSIPGSAVCAFSMDDIEKVFKGRFKEQKTPDSVWTAVPEDKVPKPRPGCCAKHGLAEAYKTSIDFPDETLSFIKSHPLMDSAVPPIADEPWFTKTRVRYRLTAISVDHSAGPYQNYTVIFVGSEAGMVLKVLAKTSPFSLNDSVLLEEIEAYNHAKCSAENEEDKKVISLQLDKDHHALYVAFSSCIIRIPLSRCERYGSCKKSCIASRDPYCGWLSQGSCGRVTPGMLAEGYEQDTEFGNTAHLGDCHEILPTSTTPDYKIFGGPTSDMEVSSSSVTTMASIPEITPKVIDTWRPKLTSSRKFVVQDDPNTSDFTDPLSGIPKGVRWEVQSGESNQMVHMNVLITCVFAAFVLGAFIAGVAVYCYRDMFVRKNRKIHKDAESAQSCTDSSGSFAKLNGLFDSPVKEYQQNIDSPKLYSNLLTSRKELPPNGDTKSMVMDHRGQPPELAALPTPESTPVLHQKTLQAMKSHSEKAHGHGASRKETPQFFPSSPPPHSPLSHGHIPSAIVLPNATHDYNTSFSNSNAHKAEKKLQNIDHPLTKSSSKRDHRRSVDSRNTLNDLLKHLNDPNSNPKAIMGDIQMAHQNLMLDPMGSMSEVPPKVPNREASLYSPPSTLPRNSPTKRVDVPTTPGVPMTSLERQRGYHKNSSQRHSISAMPKNLNSPNGVLLSRQPSMNRGGYMPTPTGAKVDYIQGTPVSVHLQPSLSRQSSYTSNGTLPRTGLKRTPSLKPDVPPKPSFVPQTPSVRPLNKYTY

SEQ ID NO: 11974 - protein, 597 aa, Homo sapiens
MRVFLLCAYILLLMVSQLRAVSFPEDDEPLNTVDYHYSRQYPVFRGRPSGNESQHRLDFQLMLKIRDTLYIAGRDQVYTVNLNEMPKTEVIPNKKLTWRSRQQDRENCAMKGKHKDECHNFIKVFVPRNDEMVFVCGTNAFNPMCRYYRLSTLEYDGEEISGLARCPFDARQTNVALFADGKLYSATVADFLASDAVIYRSMGDGSALRTIKYDSKWIKEPHFLHAIEYGNYVYFFFREIAVEHNNLGKAVYSRVARICKNDMGGSQRVLEKHWTSFLKARLNCSVPGDSFFYFDVLQSITDIIQINGIPTVVGVFTTQLNSIPGSAVCAFSMDDIEKVFKGRFKEQKTPDSVWTAVPEDKVPKPRPGCCAKHGLAEAYKTSIDFPDETLSFIKSHPLMDSAVPPIADEPWFTKTRVRYRLTAISVDHSAGPYQNYTVIFVGSEAGMVLKVLAKTSPFSLNDSVLLEEIEAYNHAKCSAENEEDKKVISLQLDKDHHALYVAFSSCIIRIPLSRCERYGSCKKSCIASRDPYCGWLSQGSCGRVTPGMLAEGYEQDTEFGNTAHLGDCHDMEVSSSSVTTMVYDGKSSLESPTRWST

SEQ ID NO: 11975 - protein, 1011 aa, Homo sapiens
MRVFLLCAYILLLMVSQLRAVSFPEDDEPLNTVDYHYSRQYPVFRGRPSGNESQHRLDFQLMLKIRDTLYIAGRDQVYTVNLNEMPKTEVIPNKKLTWRSRQQDRENCAMKGKHKDECHNFIKVFVPRNDEMVFVCGTNAFNPMCRYYRLSTLEYDGEEISGLARCPFDARQTNVALFADGKLYSATVADFLASDAVIYRSMGDGSALRTIKYDSKWIKEPHFLHAIEYGNYVYFFFREIAVEHNNLGKAVYSRVARICKNDMGGSQRVLEKHWTSFLKARLNCSVPGDSFFYFDVLQSITDIIQINGIPTVVGVFTTQLNSIPGSAVCAFSMDDIEKVFKGRFKEQKTPDSVWTAVPEDKVPKPRPGCCAKHGLAEAYKTSIDFPDETLSFIKSHPLMDSAVPPIADEPWFTKTRVRYRLTAISVDHSAGPYQNYTVIFVGSEAGMVLKVLAKTSPFSLNDSVLLEEIEAYNHAKCSAENEEDKKVISLQLDKDHHALYVAFSSCIIRIPLSRCERYGSCKKSCIASRDPYCGWLSQGSCGRVTPGMLLLTEDFFAFHNHSAEGYEQDTEFGNTAHLGDCHGVRWEVQSGESNQMVHMNVLITCVFAAFVLGAFIAGVAVYCYRDMFVRKNRKIHKDAESAQSCTDSSGSFAKLNGLFDSPVKEYQQNIDSPKLYSNLLTSRKELPPNGDTKSMVMDHRGQPPELAALPTPESTPVLHQKTLQAMKSHSEKAHGHGASRKETPQFFPSSPPPHSPLSHGHIPSAIVLPNATHDYNTSFSNSNAHKAEKKLQNIDHPLTKSSSKRDHRRSVDSRNTLNDLLKHLNDPNSNPKAIMGDIQMAHQNLMLDPMGSMSEVPPKVPNREASLYSPPSTLPRNSPTKRVDVPTTPGVPMTSLERQRGYHKNSSQRHSISAMPKNLNSPNGVLLSRQPSMNRGGYMPTPTGAKVDYIQGTPVSVHLQPSLSRQSSYTSNGTLPRTGLKRTPSLKPDVPPKPSFVPQTPSVRPLNKYTY

SEQ ID NO: 11976 - protein, 1017 aa, Homo sapiens
MRVFLLCAYILLLMVSQLRAVSFPEDDEPLNTVDYHYSRQYPVFRGRPSGNESQHRLDFQLMLKIRDTLYIAGRDQVYTVNLNEMPKTEVIPNKKLTWRSRQQDRENCAMKGKHKDECHNFIKVFVPRNDEMVFVCGTNAFNPMCRYYRLSTLEYDGEEISGLARCPFDARQTNVALFADGKLYSATVADFLASDAVIYRSMGDGSALRTIKYDSKWIKEPHFLHAIEYGNYVYFFFREIAVEHNNLGKAVYSRVARICKNDMGGSQRVLEKHWTSFLKARLNCSVPGDSFFYFDVLQSITDIIQINGIPTVVGVFTTQLNSIPGSAVCAFSMDDIEKVFKGRFKEQKTPDSVWTAVPEDKVPKPRPGCCAKHGLAEAYKTSIDFPDETLSFIKSHPLMDSAVPPIADEPWFTKTRVRYRLTAISVDHSAGPYQNYTVIFVGSEAGMVLKVLAKTSPFSLNDSVLLEEIEAYNHAKCSAENEEDKKVISLQLDKDHHALYVAFSSCIIRIPLSRCERYGSCKKSCIASRDPYCGWLSQGSCGRVTPGMLAEGYEQDTEFGNTAHLGDCHEILPTSTTPDYKIFGGPTSGVRWEVQSGESNQMVHMNVLITCVFAAFVLGAFIAGVAVYCYRDMFVRKNRKIHKDAESAQSCTDSSGSFAKLNGLFDSPVKEYQQNIDSPKLYSNLLTSRKELPPNGDTKSMVMDHRGQPPELAALPTPESTPVLHQKTLQAMKSHSEKAHGHGASRKETPQFFPSSPPPHSPLSHGHIPSAIVLPNATHDYNTSFSNSNAHKAEKKLQNIDHPLTKSSSKRDHRRSVDSRNTLNDLLKHLNDPNSNPKAIMGDIQMAHQNLMLDPMGSMSEVPPKVPNREASLYSPPSTLPRNSPTKRVDVPTTPGVPMTSLERQRGYHKNSSQRHSISAMPKNLNSPNGVLLSRQPSMNRGGYMPTPTGAKVDYIQGTPVSVHLQPSLSRQSSYTSNGTLPRTGLKRTPSLKPDVPPKPSFVPQTPSVRPLNKYTY

SEQ ID NO: 11977 - protein, 476 aa, Homo sapiens
MRVFLLCAYILLLMVSQLRAVSFPEDDEPLNTVDYHYSRQYPVFRGRPSGNESQHRLDFQLMLKIRDTLYIAGRDQVYTVNLNEMPKTEVIPNKKLTWRSRQQDRENCAMKGKHKDECHNFIKVFVPRNDEMVFVCGTNAFNPMCRYYRLSTLEYDGEEISGLARCPFDARQTNVALFADGKLYSATVADFLASDAVIYRSMGDGSALRTIKYDSKWIKEPHFLHAIEYGNYVYFFFREIAVEHNNLGKAVYSRVARICKNDMGGSQRVLEKHWTSFLKARLNCSVPGDSFFYFDVLQSITDIIQINGIPTVVGVFTTQLNSIPGSAVCAFSMDDIEKVFKGRFKEQKTPDSVWTAVPEDKVPKPRPGCCAKHGLAEAYKTSIDFPDETLSFIKSHPLMDSAVPPIADEPWFTKTRVRYRLTAISVDHSAGPYQNYTVIFVGSEAGMVLKVLAKTSPFSLNDSVLLEEIEAYNHAK

SEQ ID NO: 11978 - protein, 998 aa, Homo sapiens
MRVFLLCAYILLLMVSQLRAVSFPEDDEPLNTVDYHYSRQYPVFRGRPSGNESQHRLDFQLMLKIRDTLYIAGRDQVYTVNLNEMPKTEVIPNKKLTWRSRQQDRENCAMKGKHKDECHNFIKVFVPRNDEMVFVCGTNAFNPMCRYYRLSTLEYDGEEISGLARCPFDARQTNVALFADGKLYSATVADFLASDAVIYRSMGDGSALRTIKYDSKWIKEPHFLHAIEYGNYVYFFFREIAVEHNNLGKAVYSRVARICKNDMGGSQRVLEKHWTSFLKARLNCSVPGDSFFYFDVLQSITDIIQINGIPTVVGVFTTQLNSIPGSAVCAFSMDDIEKVFKGRFKEQKTPDSVWTAVPEDKVPKPRPGCCAKHGLAEAYKTSIDFPDETLSFIKSHPLMDSAVPPIADEPWFTKTRVRYRLTAISVDHSAGPYQNYTVIFVGSEAGMVLKVLAKTSPFSLNDSVLLEEIEAYNHAKCSAENEEDKKVISLQLDKDHHALYVAFSSCIIRIPLSRCERYGSCKKSCIASRDPYCGWLSQGSCGRVTPGMLAEGYEQDTEFGNTAHLGDCHGVRWEVQSGESNQMVHMNVLITCVFAAFVLGAFIAGVAVYCYRDMFVRKNRKIHKDAESAQSCTDSSGSFAKLNGLFDSPVKEYQQNIDSPKLYSNLLTSRKELPPNGDTKSMVMDHRGQPPELAALPTPESTPVLHQKTLQAMKSHSEKAHGHGASRKETPQFFPSSPPPHSPLSHGHIPSAIVLPNATHDYNTSFSNSNAHKAEKKLQNIDHPLTKSSSKRDHRRSVDSRNTLNDLLKHLNDPNSNPKAIMGDIQMAHQNLMLDPMGSMSEVPPKVPNREASLYSPPSTLPRNSPTKRVDVPTTPGVPMTSLERQRGYHKNSSQRHSISAMPKNLNSPNGVLLSRQPSMNRGGYMPTPTGAKVDYIQGTPVSVHLQPSLSRQSSYTSNGTLPRTGLKRTPSLKPDVPPKPSFVPQTPSVRPLNKYTY

SEQ ID NO: 11979 - protein, 1073 aa, Homo sapiens; identical to SEQ ID NO: 11973

SEQ ID NO: 11980 - protein, 597 aa, Homo sapiens; identical to SEQ ID NO: 11974

SEQ ID NO: 11981 - protein, 1011 aa, Homo sapiens; identical to SEQ ID NO: 11975

SEQ ID NO: 11982 - protein, 54 aa, Homo sapiens
  VARIANT 1: note = misc_feature - Xaa can be any naturally occurring amino acid
XLLTEDFFAFHNHSAEGYEQDTEFGNTAHLGDCHEILPTSTTPDYKIFGGPTSG

SEQ ID NO: 11983 - protein, 198 aa, Homo sapiens
  VARIANT 1: note = misc_feature - Xaa can be any naturally occurring amino acid
XLTEDFFAFHNHSAEGYEQDTEFGNTAHLGDCHEILPTSTTPDYKIFGGPTSDMEVSSSSVTTMASIPEITPKVIDTWRPKLTSSRKFVVQDDPNTSDFTDPLSGIPKGVRWEVQSGESNQMVHMNVLITCVFAAFVLGAFIAGVAVYCYRDMFVRKNRKIHKDAESAQSCTDSSGSFAKLNGLFDSPVKEYQQNIDS

SEQ ID NO: 11984 - protein, 462 aa, Homo sapiens
MKPNIIFVLSLLLILEKQAAVMGQKGGSKGRLPSEFSQFPHGQKGQHYSGQKGKQQTESKGSFSIQYTYHVDANDHDQSRKSQQYDLNALHKTTKSQRHLGGSQQLLHNKQEGRDHDKSKGHFHRVVIHHKGGKAHRGTQNPSQDQGNSPSGKGISSQYSNTEERLWVHGLSKEQTSVSGAQKGRKQGGSQSSYVLQTEELVANKQQRETKNSHQNKGHYQNVVEVREEHSSKVQTSLCPAHQDKLQHGSKDIFSTQDELLVYNKNQHQTKNLNQDQQHGRKANKISYQSSSTEERRLHYGENGVQKDVSQSSIYSQTEEKAQGKSQKQITIPSQEQEHSQKANKISYQSSSTEERRLHYGENGVQKDVSQRSIYSQTEKLVAGKSQIQAPNPKQEPWHGENAKGESGQSTNREQDLLSHEQKGRHQHGSHGGLDIVIIEQEDDSDRHLAQHLNNDRNPLFT

SEQ ID NO: 11985 - protein, 582 aa, Homo sapiens
MKSIILFVLSLLLILEKQAAVMGQKGGSKGQLPSGSSQFPHGQKGQHYFGQKDQQHTKSKGSFSIQHTYHVDINDHDWTRKSQQYDLNALHKATKSKQHLGGSQQLLNYKQEGRDHDKSKGHFHMIVIHHKGGQAHHGTQNPSQDQGNSPSGKGLSSQCSNTEKRLWVHGLSKEQASASGAQKGRTQGGSQSSYVLQTEELVVNKQQRETKNSHQNKGHYQNVVDVREEHSSKLQTSLHPAHQDRLQHGPKDIFTTQDELLVYNKNQHQTKNLSQDQEHGRKAHKISYPSSRTEERQLHHGEKSVQKDVSKGSISIQTEEKIHGKSQNQVTIHSQDQEHGHKENKISYQSSSTEERHLNCGEKGIQKGVSKGSISIQTEEQIHGKSQNQVRIPSQAQEYGHKENKISYQSSSTEERRLNSGEKDVQKGVSKGSISIQTEEKIHGKSQNQVTIPSQDQEHGHKENKMSYQSSSTEERRLNYGGKSTQKDVSQSSISFQIEKLVEGKSQIQTPNPNQDQWSGQNAKGKSGQSADSKQDLLSHEQKGRYKQESSESHNIVITEHEVAQDDHLTQQYNEDRNPIST

SEQ ID NO: 11986 - protein, 57 aa, Homo sapiens
MADTPRDAGLKQAPASRNEKAPVDFGYVGIDSILEQMRRKAMKQGFEFNIMVVERLG

SEQ ID NO: 11987 - protein, 104 aa, Homo sapiens
MADTPRDAGLKQAPASRNEKAPVDFGYVGIDSILEQMRRKAMKQGFEFNIMVVGQSGLGKSTLINTLFKSKISRKSVQPTSEERIPKTIEIKSITHDIEEKGVR

SEQ ID NO: 11988 - protein, 108 aa, Homo sapiens
MADTPRDAGLKQAPASRNEKAPVDFGYVGIDSILEQMRRKAMKQGFEFNIMVVGQSGLGKSTLINTLFKSKISRKSVQPTSEERIPKTIEIKSITHDIEEKGVRMKLT

SEQ ID NO: 11989 - protein, 116 aa, Homo sapiens
MADTPRDAGLKQAPASRNEKAPVDFGYVGIDSILEQMRRKAMKQGFEFNIMVVGQSGLGKSTLINTLFKSKISRKSVQPTSEERIPKTIEIKSITHDIEEKGVRMKLTVIDTPGFG

SEQ ID NO: 11990 - protein, 127 aa, Homo sapiens
MADTPRDAGLKQAPASRNEKAPVDFGYVGIDSILEQMRRKAMKQGFEFNIMVVGQSGLGKSTLINTLFKSKISRKSVQPTSEERIPKTIEIKSITHDIEEKGVRMKLTVIDTPGFGDHINNENCWQP

SEQ ID NO: 11991 - protein, 135 aa, Homo sapiens
MADTPRDAGLKQAPASRNEKAPVDFGYVGIDSILEQMRRKAMKQGFEFNIMVVGQSGLGKSTLINTLFKSKISRKSVQPTSEERIPKTIEIKSITHDIEEKGVRMKLTVIDTPGFGDHINNENCWQPIMKFINDQ

SEQ ID NO: 11992 - protein, 144 aa, Homo sapiens
MADTPRDAGLKQAPASRNEKAPVDFGYVGIDSILEQMRRKAMKQGFEFNIMVVGQSGLGKSTLINTLFKSKISRKSVQPTSEERIPKTIEIKSITHDIEEKGVRMKLTVIDTPGFGDHINNENCWQPIMKFINDQYEKYLQEEV

SEQ ID NO: 11993 - protein, 151 aa, Homo sapiens
MADTPRDAGLKQAPASRNEKAPVDFGYVGIDSILEQMRRKAMKQGFEFNIMVVGQSGLGKSTLINTLFKSKISRKSVQPTSEERIPKTIEIKSITHDIEEKGVRMKLTVIDTPGFGDHINNENCWQPIMKFINDQYEKYLQEEVNINRKKR

SEQ ID NO: 11994 - protein, 157 aa, Homo sapiens
MADTPRDAGLKQAPASRNEKAPVDFGYVGIDSILEQMRRKAMKQGFEFNIMVVGQSGLGKSTLINTLFKSKISRKSVQPTSEERIPKTIEIKSITHDIEEKGVRMKLTVIDTPGFGDHINNENCWQPIMKFINDQYEKYLQEEVNINRKKRIPDTRV

SEQ ID NO: 11995 - protein, 165 aa, Homo sapiens
MADTPRDAGLKQAPASRNEKAPVDFGYVGIDSILEQMRRKAMKQGFEFNIMVVGQSGLGKSTLINTLFKSKISRKSVQPTSEERIPKTIEIKSITHDIEEKGVRMKLTVIDTPGFGDHINNENCWQPIMKFINDQYEKYLQEEVNINRKKRIPDTRVHCCLYFIP

SEQ ID NO: 11996 - protein, 195 aa, Homo sapiens
MADTPRDAGLKQAPASRNEKAPVDFGYVGIDSILEQMRRKAMKQGFEFNIMVVGQSGLGKSTLINTLFKSKISRKSVQPTSEERIPKTIEIKSITHDIEEKGVRMKLTVIDTPGFGDHINNENCWQPIMKFINDQYEKYLQEEVNINRKKRIPDTRVHCCLYFIPATGHSLRPLDIEFMKRLSKVVNIVPVIAKA

SEQ ID NO: 11997 - protein, 209 aa, Homo sapiens
MADTPRDAGLKQAPASRNEKAPVDFGYVGIDSILEQMRRKAMKQGFEFNIMVVGQSGLGKSTLINTLFKSKISRKSVQPTSEERIPKTIEIKSITHDIEEKGVRMKLTVIDTPGFGDHINNENCWQPIMKFINDQYEKYLQEEVNINRKKRIPDTRVHCCLYFIPATGHSLRPLDIEFMKRLSKVVNIVPVIAKADTLTLEERVHFKQR

SEQ ID NO: 11998 - protein, 209 aa, Homo sapiens; identical to SEQ ID NO: 11997

SEQ ID NO: 11999 - protein, 335 aa, Homo sapiens
MADTPRDAGLKQAPASRNEKAPVDFGYVGIDSILEQMRRKAMKQGFEFNIMVVGQSGLGKSTLINTLFKSKISRKSVQPTSEERIPKTIEIKSITHDIEEKGVRMKLTVIDTPGFGDHINNENCWQPIMKFINDQYEKYLQEEVNINRKKRIPDTRVHCCLYFIPATGHSLRPLDIEFMKRLSKVVNIVPVIAKADTLTLEERVHFKQRITADLLSNGIDVYPQKEFDEDSEDRLVNEKFREMIPFAVVGSDHEYQVNGKRILGRKTKWGTIEVENTTHCEFAYLRDLLIRTHMQNIKDITSSIHFEAYRVKRLNEGSSAMANGMEEKEPEAPEM

SEQ ID NO: 12000 - protein, 335 aa, Homo sapiens; identical to SEQ ID NO: 11999

SEQ ID NO: 12001 - protein, 335 aa, Homo sapiens; identical to SEQ ID NO: 11999

SEQ ID NO: 12002 - protein, 362 aa, Homo sapiens
MAGAGCTGTWSWLWGTATEAAPSCVGDMADTPRDAGLKQAPASRNEKAPVDFGYVGIDSILEQMRRKAMKQGFEFNIMVVGQSGLGKSTLINTLFKSKISRKSVQPTSEERIPKTIEIKSITHDIEEKGVRMKLTVIDTPGFGDHINNENCWQPIMKFINDQYEKYLQEEVNINRKKRIPDTRVHCCLYFIPATGHSLRPLDIEFMKRLSKVVNIVPVIAKADTLTLEERVHFKQRITADLLSNGIDVYPQKEFDEDSEDRLVNEKFREMIPFAVVGSDHEYQVNGKRILGRKTKWGTIEVENTTHCEFAYLRDLLIRTHMQNIKDITSSIHFEAYRVKRLNEGSSAMANGMEEKEPEAPEM

SEQ ID NO: 12003 - protein, 35 aa, Homo sapiens
MEPPASKVPEVPTAPATDAAPKRVEIQMPKPAEAP

SEQ ID NO: 12004 - protein, 422 aa, Homo sapiens
MEPPASKVPEVPTAPATDAAPKRVEIQMPKPAEAPTAPSPAQTLENSEPAPVSQLQSRLEPKPQPPVAEATPRSQEATEAAPSCVGDMADTPRDAGLKQAPASRNEKAPVDFGYVGIDSILEQMRRKAMKQGFEFNIMVVGQSGLGKSTLINTLFKSKISRKSVQPTSEERIPKTIEIKSITHDIEEKGVRMKLTVIDTPGFGDHINNENCWQPIMKFINDQYEKYLQEEVNINRKKRIPDTRVHCCLYFIPATGHSLRPLDIEFMKRLSKVVNIVPVIAKADTLTLEERVHFKQRITADLLSNGIDVYPQKEFDEDSEDRLVNEKFREMIPFAVVGSDHEYQVNGKRILGRKTKWGTIEVENTTHCEFAYLRDLLIRTHMQNIKDITSSIHFEAYRVKRLNEGSSAMANGMEEKEPEAPEM

SEQ ID NO: 12005 - protein, 422 aa, Homo sapiens; identical to SEQ ID NO: 12004

SEQ ID NO: 12006 - protein, 422 aa, Homo sapiens; identical to SEQ ID NO: 12004

SEQ ID NO: 12007 - protein, 422 aa, Homo sapiens; identical to SEQ ID NO: 12004

SEQ ID NO: 12008 - protein, 568 aa, Homo sapiens
MERDRISALKRSFEVEEVETPNSTPPRRVQTPLLRATVASSTQKFQDLGVKNSEPSARHVDSLSQRSPKASLRRVELSGPKAAEPVSRRTELSIDISSKQVENAGAIGPSRFGLKRAEVLGHKTPEPAPRRTEITIVKPQESAHRRMEPPASKVPEVPTAPATDAAPKRVEIQMPKPAEAPTAPSPAQTLENSEPAPVSQLQSRLEPKPQPPVAEATPRSQEATEAAPSCVGDMADTPRDAGLKQAPASRNEKAPVDFGYVGIDSILEQMRRKAMKQGFEFNIMVVGQSGLGKSTLINTLFKSKISRKSVQPTSEERIPKTIEIKSITHDIEEKGVRMKLTVIDTPGFGDHINNENCWQPIMKFINDQYEKYLQEEVNINRKKRIPDTRVHCCLYFIPATGHSLRPLDIEFMKRLSKVVNIVPVIAKADTLTLEERVHFKQRITADLLSNGIDVYPQKEFDEDSEDRLVNEKFREMIPFAVVGSDHEYQVNGKRILGRKTKWGTIEVENTTHCEFAYLRDLLIRTHMQNIKDITSSIHFEAYRVKRLNEGSSAMANGMEEKEPEAPEM

SEQ ID NO: 12009 - protein, 568 aa, Homo sapiens; identical to SEQ ID NO: 12008

SEQ ID NO: 12010 - protein, 159 aa, Homo sapiens
MGSFRTSKMPKPAEAPTAPSPAQTLENSEPAPVSQLQSRLEPKPQPPVAEATPRSQEATEAAPSCVGDMADTPRDAGLKQAPASRNEKAPVDFGYVGIDSILEQMRRKAMKQGFEFNIMVVGQSGLGKSTLINTLFKSKISRKSVQPTSEERIPKTIEI

SEQ ID NO: 12011 - protein, 474 aa, Homo sapiens
MGSSFWEGLQVAVGLPQGCWPQGLDSGEPAEGGQLEAAPVCIVTRQSKETAGPTLGRGGWRQGSLRRGKGTSCRCRQLSPGHGPGRLTGCGECHRLPCRGLVSGFTGLRGQEEDDLAFCLATIGSDRQATEAAPSCVGDMADTPRDAGLKQAPASRNEKAPVDFGYVGIDSILEQMRRKAMKQGFEFNIMVVGQSGLGKSTLINTLFKSKISRKSVQPTSEERIPKTIEIKSITHDIEEKGVRMKLTVIDTPGFGDHINNENCWQPIMKFINDQYEKYLQEEVNINRKKRIPDTRVHCCLYFIPATGHSLRPLDIEFMKRLSKVVNIVPVIAKADTLTLEERVHFKQRITADLLSNGIDVYPQKEFDEDSEDRLVNEKFREMIPFAVVGSDHEYQVNGKRILGRKTKWGTIEVENTTHCEFAYLRDLLIRTHMQNIKDITSSIHFEAYRVKRLNEGSSAMANGMEEKEPEAPEM

SEQ ID NO: 12012 - protein, 23 aa, Homo sapiens
MHLAAEHCVCDSPPSSWNHPPQV

SEQ ID NO: 12013 - protein, 125 aa, Homo sapiens
MIICPTRPFTALKRSFEVEEVETPNSTPPRRVQTPLLRATVASSTQKFQDLGVKNSEPSARHVDSLSQRSPKASLRRVELSGPKAAEPVSRRTELSIDISSKQVENAGAIGPSRFGLKRAEVLGH

SEQ ID NO: 12014 - protein, 90 aa, Homo sapiens
MKDFGSRQEFDSVENAGAIGPSRFGLKRAEVLGHKTPEPAPRRTEITIVKPQESAHRRMEPPASKPEVGAAHLRGAHPQDHRDQVHHARY

SEQ ID NO: 12015 - protein, 134 aa, Homo sapiens
MKDFGSRQEFDSVENAGAIGPSRFGLKRAEVLGHKTPEPAPRRTEITIVKPQESAHRRMEPPASKVPEVPTAPATDAAPKRVEIQMPKPAEAPTAPSPAQTLENSEPAPVSQLQSRLEPKPQPPVAEATPRSQE

SEQ ID NO: 12016 - protein, 567 aa, Homo sapiens
MKKSYSALKRSFEVEEVETPNSTPPRRVQTPLLRATVASSTQKFQDLGVKNSEPSARHVDSLSQRSPKASLRRVELSGPKAAEPVSRRTELSIDISSKQVENAGAIGPSRFGLKRAEVLGHKTPEPAPRRTEITIVKPQESAHRRMEPPASKVPEVPTAPATDAAPKRVEIQMPKPAEAPTAPSPAQTLENSEPAPVSQLQSRLEPKPQPPVAEATPRSQEATEAAPSCVGDMADTPRDAGLKQAPASRNEKAPVDFGYVGIDSILEQMRRKAMKQGFEFNIMVVGQSGLGKSTLINTLFKSKISRKSVQPTSEERIPKTIEIKSITHDIEEKGVRMKLTVIDTPGFGDHINNENCWQPIMKFINDQYEKYLQEEVNINRKKRIPDTRVHCCLYFIPATGHSLRPLDIEFMKRLSKVVNIVPVIAKADTLTLEERVHFKQRITADLLSNGIDVYPQKEFDEDSEDRLVNEKFREMIPFAVVGSDHEYQVNGKRILGRKTKWGTIEVENTTHCEFAYLRDLLIRTHMQNIKDITSSIHFEAYRVKRLNEGSSAMANGMEEKEPEAPEM

SEQ ID NO: 12017 - protein, 44 aa, Homo sapiens
MKKSYSDLLLDPCISNLASLHCARFSGARHRRICSCLVIFDSAR

SEQ ID NO: 12018 - protein, 586 aa, Homo sapiens
MKKSYSGGTRTSSGRLRRLGDSSGPALKRSFEVEEVETPNSTPPRRVQTPLLRATVASSTQKFQDLGVKNSEPSARHVDSLSQRSPKASLRRVELSGPKAAEPVSRRTELSIDISSKQVENAGAIGPSRFGLKRAEVLGHKTPEPAPRRTEITIVKPQESAHRRMEPPASKVPEVPTAPATDAAPKRVEIQMPKPAEAPTAPSPAQTLENSEPAPVSQLQSRLEPKPQPPVAEATPRSQEATEAAPSCVGDMADTPRDAGLKQAPASRNEKAPVDFGYVGIDSILEQMRRKAMKQGFEFNIMVVGQSGLGKSTLINTLFKSKISRKSVQPTSEERIPKTIEIKSITHDIEEKGVRMKLTVIDTPGFGDHINNENCWQPIMKFINDQYEKYLQEEVNINRKKRIPDTRVHCCLYFIPATGHSLRPLDIEFMKRLSKVVNIVPVIAKADTLTLEERVHFKQRITADLLSNGIDVYPQKEFDEDSEDRLVNEKFREMIPFAVVGSDHEYQVNGKRILGRKTKWGTIEVENTTHCEFAYLRDLLIRTHMQNIKDITSSIHFEAYRVKRLNEGSSAMANGMEEKEPEAPEM

SEQ ID NO: 12019 - protein, 151 aa, Homo sapiens
MLWPEEEPWGGRCACVTEACPADAGPLTSRRGSLKRSFEVEEVETPNSTPPRRVQTPLLRATVASSTQKFQDLGVKNSEPSARHVDSLSQRSPKASLRRVELSGPKAAEPVSRRTELSIDISSKQVENAGAIGPSRFGLKRAEVLGHKTPE

SEQ ID NO: 12020 - protein, 189 aa, Homo sapiens
MPKPAEAPTAPSPAQTLENSEPAPVSQLQSRLEPKPQPPVAEATPRSQEATEAAPSCVGDMADTPRDAGLKQAPASRNEKAPVDFGYVGIDSILEQMRRKAMKQGFEFNIMVVGESSPCMPLNQCRKPASAPRAAHKPLGLVFPSVKWGSNPDLKDGLPVTLRVHACAWEEPTASSGSSEGPVLHIQGP

SEQ ID NO: 12021 - protein, 579 aa, Homo sapiens
MSDPAVNAQLDGIISDFEALKRSFEVEEVETPNSTPPRRVQTPLLRATVASSTQKFQDLGVKNSEPSARHVDSLSQRSPKASLRRVELSGPKAAEPVSRRTELSIDISSKQVENAGAIGPSRFGLKRAEVLGHKTPEPAPRRTEITIVKPQESAHRRMEPPASKVPEVPTAPATDAAPKRVEIQMPKPAEAPTAPSPAQTLENSEPAPVSQLQSRLEPKPQPPVAEATPRSQEATEAAPSCVGDMADTPRDAGLKQAPASRNEKAPVDFGYVGIDSILEQMRRKAMKQGFEFNIMVVGQSGLGKSTLINTLFKSKISRKSVQPTSEERIPKTIEIKSITHDIEEKGVRMKLTVIDTPGFGDHINNENCWQPIMKFINDQYEKYLQEEVNINRKKRIPDTRVHCCLYFIPATGHSLRPLDIEFMKRLSKVVNIVPVIAKADTLTLEERVHFKQRITADLLSNGIDVYPQKEFDEDSEDRLVNEKFREMIPFAVVGSDHEYQVNGKRILGRKTKWGTIEVENTTHCEFAYLRDLLIRTHMQNIKDITSSIHFEAYRVKRLNEGSSAMANGMEEKEPEAPEM

SEQ ID NO: 12022 - protein, 152 aa, Homo sapiens
MTSMSAGTINTLKRSFEVEEVETPNSTPPRRVQTPLLRATVASSTQKFQDLGVKNSEPSARHVDSLSQRSPKASLRRVELSGPKAAEPVSRRTELSIDISSKQVENAGAIGPSRFGLKRAEVLGHKTPEPAPRRTEITIVKPQESAHRRMEP

SEQ ID NO: 12023 - protein, 105 aa, Homo sapiens
MLSLGTKADTHDEILEGLNFNLTEIPEAQIHEGFQELLRTLNQPDSQLQLTTGNGLFLSEGLKLVDKFLEDVKKLYHSEAFTVNFGDTEEAKKQINDYVEKGTQG

SEQ ID NO: 12024 - protein, 22 aa, Homo sapiens
MPSSVSWGILLLAGLCCLVPVS

SEQ ID NO: 12025 - protein, 92 aa, Homo sapiens
MPSSVSWGILLLAGLCCLVPVSLAEDPQGDAAQKTDTSHHDQDHPTFNKITPNLAEFAFSLYRQLAHQSNSTNIFFSPVSIATAFAMLSLGT

SEQ ID NO: 12026 - protein, 117 aa, Homo sapiens
MPSSVSWGILLLAGLCCLVPVSLAEDPQGDAAQKTDTSHHDQDHPTFNKITPNLAEFAFSLYRQLAHQSNSTNIFFSPVSIATAFAMLSLGTKADTHDEILEGLNFNLTEIPEAQIH

SEQ ID NO: 12027 - protein, 144 aa, Homo sapiens
MPSSVSWGILLLAGLCCLVPVSLAEDPQGDAAQKTDTSHHDQDHPTFNKITPNLAEFAFSLYRQLAHQSNSTNIFFSPVSIATAFAMLSLGTKADTHDEILEGLNFNLTEIPEAQIHEGFQELLRTLNQPDSQLQLTTGNGLFL

SEQ ID NO: 12028 - protein, 156 aa, Homo sapiens
MPSSVSWGILLLAGLCCLVPVSLAEDPQGDAAQKTDTSHHDQDHPTFNKITPNLAEFAFSLYRQLAHQSNSTNIFFSPVSIATAFAMLSLGTKADTHDEILEGLNFNLTEIPEAQIHEGFQELLRTLNQPDSQLQLTTGNGLFLSEGLKLVDKFLE

SEQ ID NO: 12029 - protein, 418 aa, Homo sapiens
MPSSVSWGILLLAGLCCLVPVSLAEDPQGDAAQKTDTSHHDQDHPTFNKITPNLAEFAFSLYRQLAHQSNSTNIFFSPVSIATAFAMLSLGTKADTHDEILEGLNFNLTEIPEAQIHEGFQELLRTLNQPDSQLQLTTGNGLFLSEGLKLVDKFLEDVKKLYHSEAFTVNFGDTEEAKKQINDYVEKGTQGKIVDLVKELDRDTVFALVNYIFFKGKWERPFEVKDTEEEDFHVDQVTTVKVPMMKRLGMFNIQHCKKLSSWVLLMKYLGNATAIFFLPDEGKLQHLENELTHDIITKFLENEDRRSASLHLPKLSITGTYDLKSVLGQLGITKVFSNGADLSGVTEEAPLKLSKAVHKAVLTIDEKGTEAAGAMFLEAIPMSIPPEVKFNKPFVFLMIEQNTKSPLFMGKVVNPTQK

SEQ ID NO: 12030 - protein, 418 aa, Homo sapiens; identical to SEQ ID NO: 12029

SEQ ID NO: 12031 - protein, 359 aa, Homo sapiens
MPSSVSWGILLLAGLCCLVPVSLAEDPQGDAAQKTDTSHHDQDHPTFNKITPNLAEFAFSLYRQLAHQSNSTNIFFSPVSIATAFAMLSLGTKADTHDEILEGLNFNLTEIPEAQIHEGFQELLRTLNQPDSQLQLTTGNGLFLSEGLKLVDKFLEDVKKLYHSEAFTVNFGDTEEAKKQINDYVEKGTQGKIVDLVKELDRDTVFALVNYIFFKGKWERPFEVKDTEEEDFHVDQVTTVKVPMMKRLGMFNIQHCKKLSSWVLLMKYLGNATAIFFLPDEGKLQHLENELTHDIITKFLENEDRRSASLHLPKLSITGTYDLKSVLGQLGITKVFSNGADLSGVTEEAPLKLSKVRSP

SEQ ID NO: 12032 - protein, 418 aa, Homo sapiens; identical to SEQ ID NO: 12029

SEQ ID NO: 12033 - protein, 418 aa, Homo sapiens; identical to SEQ ID NO: 12029

SEQ ID NO: 12034 - protein, 418 aa, Homo sapiens; identical to SEQ ID NO: 12029

SEQ ID NO: 12035 - protein, 418 aa, Homo sapiens; identical to SEQ ID NO: 12029

SEQ ID NO: 12036 - protein, 418 aa, Homo sapiens; identical to SEQ ID NO: 12029

SEQ ID NO: 12037 - protein, 418 aa, Homo sapiens; identical to SEQ ID NO: 12029

SEQ ID NO: 12038 - protein, 306 aa, Homo sapiens
MPSSVSWGILLLAGLCCLVPVSLAEDPQGDAAQKTDTSHHDQDHPTFNKITPNLAEFAFSLYRQLAHQSNSTNIFFSPVSIATAFAMLSLGTKADTHDEILEGLNFNLTEIPEAQIHEGFQELLRTLNQPDSQLQLTTGNGLFLSEGLKLVDKFLEDVKKLYHSEAFTVNFGDTEEAKKQINDYVEKGTQGKIVDLVKELDRDTVFALVNYIFFKGKWERPFEVKDTEEEDFHVDQVTTVKVPMMKRLGMFNIQHCKKLSSWVLLMKYLGNATAIFFLPDEGKLQHLENELTHDIITKFLENEDRR

SEQ ID NO: 12039 - protein, 418 aa, Homo sapiens; identical to SEQ ID NO: 12029

SEQ ID NO: 12040 - protein, 444 aa, Homo sapiens
MKVVPSLLLSVLLAQVWLVPGLAPSPQSPETPAPQNQTSRVVQAPKEEEEDEQEASEEKASEEEKAWLMASRQQLAKETSNFGFSLLRKISMRHDGNMVFSPFGMSLAMTGLMLGATGPTETQIKRGLHLQALKPTKPGLLPSLFKGLRETLSRNLELGLTQGSFAFIHKDFDVKETFFNLSKRYFDTECVPMNFRNASQAKRLMNHYINKETRGKIPKLFDEINPETKLILVDYILFKGKWLTPFDPVFTEVDTFHLDKYKTIKVPMMYGAGKFASTFDKNFRCHVLKLPYQGNATMLVVLMEKMGDHLALEDYLTTDLVETWLRNMKTRNMEVFFPKFKLDQKYEMHELLRQMGIRRIFSPFADLSELSATGRNLQVSRVLQRTVIEVDERGTEAVAGILSEITAYSMPPVIKVDRPFHFMIYEETSGMLLFLGRVVNPTLL

SEQ ID NO: 12041 - protein, 444 aa, Homo sapiens; identical to SEQ ID NO: 12040

SEQ ID NO: 12042 - protein, 444 aa, Homo sapiens; identical to SEQ ID NO: 12040

SEQ ID NO: 12043 - protein, 484 aa, Homo sapiens
MSRSTQELLGYHCRLQDKLQEQEGSLAAEGRHSLASAADHMKVVPSLLLSVLLAQVWLVPGLAPSPQSPETPAPQNQTSRVVQAPKEEEEDEQEASEEKASEEEKAWLMASRQQLAKETSNFGFSLLRKISMRHDGNMVFSPFGMSLAMTGLMLGATGPTETQIKRGLHLQALKPTKPGLLPSLFKGLRETLSRNLELGLTQGSFAFIHKDFDVKETFFNLSKRYFDTECVPMNFRNASQAKRLMNHYINKETRGKIPKLFDEINPETKLILVDYILFKGKWLTPFDPVFTEVDTFHLDKYKTIKVPMMYGAGKFASTFDKNFRCHVLKLPYQGNATMLVVLMEKMGDHLALEDYLTTDLVETWLRNMKTRNMEVFFPKFKLDQKYEMHELLRQMGIRRIFSPFADLSELSATGRNLQVSRVLQRTVIEVDERGTEAVAGILSEITAYSMPPVIKVDRPFHFMIYEETSGMLLFLGRVVNPTLL

SEQ ID NO: 12044 - protein, 422 aa, Homo sapiens
MGPAWLWLLGTGILASVHCQPLLAHGDKSLQGPQPPRHQLSEPAPAYHRITPTITNFALRLYKELAADAPGNIFFSPVSISTTLALLSLGAQANTSALILEGLGFNLTETPEADIHQGFRSLLHTLALPSPKLELKVGNSLFLDKRLKPRQHYLDSIKELYGAFAFSANFTDSVTTGRQINDYLRRQTYGQVVDCLPEFSQDTFMVLANYIFFKAKWKHPFSRYQTQKQESFFVDERTSLQVPMMHQKEMHRFLYDQDLACTVLQIEYRGNALALLVLPDPGKMKQVEAALQPQTLRKWGQLLLPSLLDLHLPRFSISGTYNLEDILPQIGLTNILNLEADFSGVTGQLNKTISKVSHKAMVDMSEKGTEAGAASGLLSQPPSLNTMSDPHAHFNRPFLLLLWEVTTQSLLFLGKVVNPVAG

SEQ ID NO: 12045 - protein, 414 aa, Homo sapiens
MNPTLGLAIFLAVLLTVKGLLKPSFSPRNYKALSEVQGWKQRMAAKELARQNMDLGFKLLKKLAFYNPGRNIFLSPLSISTAFSMLCLGAQDSTLDEIKQGFNFRKMPEKDLHEGFHYIIHELTQKTQDLKLSIGNTLFIDQRLQPQRKFLEDAKNFYSAETILTNFQNLEMAQKQINDFISQKTHGKINNLIENIDPGTVMLLANYIFFRARWKHEFDPNVTKEEDFFLEKNSSVKVPMMFRSGIYQVGYDDKLSCTILEIPYQKNITAIFILPDEGKLKHLEKGLQVDTFSRWKTLLSRRVVDVSVPRLHMTGTFDLKKTLSYIGVSKIFEEHGDLTKIAPHRSLKVGEAVHKAELKMDERGTEGAAGTGAQTLPMETPLVVKIDKPYLLLIYSEKIPSVLFLGKIVNPIGK

SEQ ID NO: 12046 - protein, 414 aa, Homo sapiens; identical to SEQ ID NO: 12045

SEQ ID NO: 12047 - protein, 423 aa, Homo sapiens
MERMLPLLALGLLAAGFCPAVLCHPNSPLDEENLTQENQDRGTHVDLGLASANVDFAFSLYKQLVLKAPDKNVIFSPLSISTALAFLSLGAHNTTLTEILKGLKFNLTETSEAEIHQSFQHLLRTLNQSSDELQLSMGNAMFVKEQLSLLDRFTEDAKRLYGSEAFATDFQDSAAAKKLINDYVKNGTRGKITDLIKDLDSQTMMVLVNYIFFKAKWEMPFDPQDTHQSRFYLSKKKWVMVPMMSLHHLTIPYFRDEELSCTVVELKYTGNASALFILPDQDKMEEVEAMLLPETLKRWRDSLEFREIGELYLPKFSISRDYNLNDILLQLGIEEAFTSKADLSGITGARNLAVSQVVHKAVLDVFEEGTEASAATAVKITLLSALVETRTIVRFNRPFLMIIVPTDTQNIFFMSKVTNPKQA

SEQ ID NO: 12048 - protein, 423 aa, Homo sapiens; identical to SEQ ID NO: 12047

SEQ ID NO: 12049 - protein, 423 aa, Homo sapiens; identical to SEQ ID NO: 12047

SEQ ID NO: 12050 - protein, 305 aa, Homo sapiens
MERMLPLLALGLLAAGFCPAVLCHPNSPLDEENLTQENQDRGTHVDLGLASANVDFAFSLYKQLVLKAPDKNVIFSPLSISTALAFLSLGAHNTTLTEILKGLKFNLTETSEAEIHQSFQHLLRTLNQSSDELQLSMGNAMFVKEQLSLLDRFTEDAKRLYGSEAFATDFQDSAAAKKLINDYVKNGTRGKITDLIKDLDSQTMMVLVNYIFFKAKWEMPFDPQDTHQSRFYLSKKKWVMVPMMSLHHLTIPYFRDEELSCTVVELKYTGNASALFILPDQDKMEEVEAMLLPETLKRWRDSLEF

SEQ ID NO: 12051 - protein, 216 aa, Homo sapiens
MERMLPLLALGLLAAGFCPAVLCHPNSPLDEENLTQENQDRGTHVDLGLASANVDFAFSLYKQLVLKAPDKNVIFSPLSISTALAFLSLGAHNTTLTEILKGLKFNLTETSEAEIHQSFQHLLRTLNQSSDELQLSMGNAMFVKEQLSLLDRFTEDAKRLYGSEAFATDFQDSAAAKKLINDYVKNGTRGKITDLIKDLDSQTMMVLVNYIFFKER

SEQ ID NO: 12052 - protein, 205 aa, Homo sapiens
MPFDPQDTHQSRFYLSKKKWVMVPMMSLHHLTIPYFRDEELSCTVVELKYTGNASALFILPDQDKMEEVEAMLLPETLKRWRDSLEFREIGELYLPKFSISRDYNLNDILLQLGIEEAFTSKADLSGITGARNLAVSQVVHKAVLDVFEEGTEASAATAVKITLLSALVETRTIVRFNRPFLMIIVPTDTQNIFFMSKVTNPKQA

SEQ ID NO: 12053 - protein, 46 aa, Homo sapiens
  VARIANT 1: note = misc_feature - Xaa can be any naturally occurring amino acid
XTVVELKYTGNASALFILPDQDKMEEVEAMLLPETLKRWRDSLEFR

SEQ ID NO: 12054 - protein, 427 aa, Homo sapiens
MHLIDYLLLLLVGLLALSHGQLHVEHDGESCSNSSHQQILETGEGSPSLKIAPANADFAFRFYYLIASETPGKNIFFSPLSISAAYAMLSLGACSHSRSQILEGLGFNLTELSESDVHRGFQHLLHTLNLPGHGLETRVGSALFLSHNLKFLAKFLNDTMAVYEAKLFHTNFYDTVGTIQLINDHVKKETRGKIVDLVSELKKDVLMVLVNYIYFKALWEKPFISSRTTPKDFYVDENTTVRVPMMLQDQEHHWYLHDRYLPCSVLRMDYKGDATVFFILPNQGKMREIEEVLTPEMLMRWNNLLRKRNFYKKLELHLPKFSISGSYVLDQILPRLGFTDLFSKWADLSGITKQQKLEASKSFHKATLDVDEAGTEAAAATSFAIKFFSAQTNRHILRFNRPFLVVIFSTSTQSVLFLGKVVDPTKP

SEQ ID NO: 12055 - protein, 427 aa, Homo sapiens; identical to SEQ ID NO: 12054

SEQ ID NO: 12056 - protein, 427 aa, Homo sapiens; identical to SEQ ID NO: 12054

SEQ ID NO: 12057 - protein, 24 aa, Homo sapiens
MQLFLLLCLVLLSPQGASLHRHHP

SEQ ID NO: 12058 - protein, 86 aa, Homo sapiens
MQLFLLLCLVLLSPQGASLHRHHPREMKKRVEDLHVGATVAPSSRRDFTFDLYRALASAAPSQSIFFSPVSISMSLAMLSLGAGSS

SEQ ID NO: 12059 - protein, 90 aa, Homo sapiens
MQLFLLLCLVLLSPQGASLHRHHPREMKKRVEDLHVGATVAPSSRRDFTFDLYRALASAAPSQSIFFSPVSISMSLAMLSLGAGSSTKMQ

SEQ ID NO: 12060 - protein, 144 aa, Homo sapiens
MQLFLLLCLVLLSPQGASLHRHHPREMKKRVEDLHVGATVAPSSRRDFTFDLYRALASAAPSQSIFFSPVSISMSLAMLSLGAGSSTKMQILEGLGLNLQKSSEKELHRGFQQLLQELNQPRDGFQLSLGNALFTDLVVDLQDT

SEQ ID NO: 12061 - protein, 157 aa, Homo sapiens
MQLFLLLCLVLLSPQGASLHRHHPREMKKRVEDLHVGATVAPSSRRDFTFDLYRALASAAPSQSIFFSPVSISMSLAMLSLGAGSSTKMQILEGLGLNLQKSSEKELHRGFQQLLQELNQPRDGFQLSLGNALFTDLVVDLQDTFVSAMKTLYLADT

SEQ ID NO: 12062 - protein, 172 aa, Homo sapiens
MQLFLLLCLVLLSPQGASLHRHHPREMKKRVEDLHVGATVAPSSRRDFTFDLYRALASAAPSQSIFFSPVSISMSLAMLSLGAGSSTKMQILEGLGLNLQKSSEKELHRGFQQLLQELNQPRDGFQLSLGNALFTDLVVDLQDTFVSAMKTLYLADTFPTNFRDSAGAMKQI

SEQ ID NO: 12063 - protein, 231 aa, Homo sapiens
MQLFLLLCLVLLSPQGASLHRHHPREMKKRVEDLHVGATVAPSSRRDFTFDLYRALASAAPSQSIFFSPVSISMSLAMLSLGAGSSTKMQILEGLGLNLQKSSEKELHRGFQQLLQELNQPRDGFQLSLGNALFTDLVVDLQDTFVSAMKTLYLADTFPTNFRDSAGAMKQINDYVAKQTKGKIVDLLKNLDSNAVVIMVNYIFFKAKWETSFNHKGTQEQDFYVTSETVV

SEQ ID NO: 12064 - protein, 406 aa, Homo sapiens
MQLFLLLCLVLLSPQGASLHRHHPREMKKRVEDLHVGATVAPSSRRDFTFDLYRALASAAPSQSIFFSPVSISMSLAMLSLGAGSSTKMQILEGLGLNLQKSSEKELHRGFQQLLQELNQPRDGFQLSLGNALFTDLVVDLQDTFVSAMKTLYLADTFPTNFRDSAGAMKQINDYVAKQTKGKIVDLLKNLDSNAVVIMVNYIFFKAKWETSFNHKGTQEQDFYVTSETVVRVPMMSREDQYHYLLDRNLSCRVVGVPYQGNATALFILPSEGKMQQVENGLSEKTLRKWLKMFKKRQLELYLPKFSIEGSYQLEKVLPSLGISNVFTSHADLSGISNHSNIQVSEMVHKAVVEVDESGTRAAAATGTIFTFRSARLNSQRLVFNRPFLMFIVDNNILFLGKVNRP

SEQ ID NO: 12065 - protein, 406 aa, Homo sapiens; identical to SEQ ID NO: 12064

SEQ ID NO: 12066 - protein, 406 aa, Homo sapiens; identical to SEQ ID NO: 12064

SEQ ID NO: 12067 - protein, 406 aa, Homo sapiens; identical to SEQ ID NO: 12064

SEQ ID NO: 12068 - protein, 301 aa, Homo sapiens
MQLFLLLCLVLLSPQGASLHRHHPREMKKRVEDLHVGATVAPSSRRDFTFDLYRALASAAPSQSIFFSPVSISMSLAMLSLGAGSSTKMQILEGLGLNLQKSSEKELHRGFQQLLQELNQPRDGFQLSLGNALFTDLVVDLQDTFVSAMKTLYLADTFPTNFRDSAGAMKQINDYVAKQTKGKIVDLLKNLDSNAVVIMVNYIFFKAKWETSFNHKGTQEQDFYVTSETVVRVPMMSREDQYHYLLDRNLSCRVVGVPYQGNATALFILPSEGKMQQVENGLSEKTLRKWLKMFKKRYFQT

SEQ ID NO: 12069 - protein, 136 aa, Homo sapiens
MPLLLYTCLLWLPTSGLWTVQAMDPNAAYVNMSNHHRGLASANVDFAFSLYKHLVALSPKKNIFISPVSISMALAMLSLGTCGHTRAQLLQGLGFNLTERSETEIHQGFQHLHQLFAKSDTSLEMTMGNALFLDGS

SEQ ID NO: 12070 - protein, 278 aa, Homo sapiens
MPLLLYTCLLWLPTSGLWTVQAMDPNAAYVNMSNHHRGLASANVDFAFSLYKHLVALSPKKNIFISPVSISMALAMLSLGTCGHTRAQLLQGLGFNLTERSETEIHQGFQHLHQLFAKSDTSLEMTMGNALFLDGSLELLESFSADIKHYYESEVLAMNFQDWATASRQINSYVKNKTQGKIVDLFSGLDSPAILVLVNYIFFKGIPTHPHLKAHPLWPGITAAKIQGTLLGKVFDSVKHIHIWESPSSPQSCWAHGHSPLTWQAPGRRTSMWTRQLW

SEQ ID NO: 12071 - protein, 405 aa, Homo sapiens
MPLLLYTCLLWLPTSGLWTVQAMDPNAAYVNMSNHHRGLASANVDFAFSLYKHLVALSPKKNIFISPVSISMALAMLSLGTCGHTRAQLLQGLGFNLTERSETEIHQGFQHLHQLFAKSDTSLEMTMGNALFLDGSLELLESFSADIKHYYESEVLAMNFQDWATASRQINSYVKNKTQGKIVDLFSGLDSPAILVLVNYIFFKGTWTQPFDLASTREENFYVDETTVVKVPMMLQSSTISYLHDSELPCQLVQMNYVGNGTVFFILPDKGKMNTVIAALSRDTINRWSAGLTSSQVDLYIPKVTISGVYDLGDVLEEMGIADLFTNQANFSRITQDAQLKSSKVVHKAVLQLNEEGVDTAGSTGVTLNLTSKPIILRFNQPFIIMIFDHFTWSSLFLARVMNPV

SEQ ID NO: 12072 - protein, 415 aa, Homo sapiens
MSPFLYLVLLVLGLHATIHCASPEGKVTACHSSQPNATLYKMSSINADFAFNLYRRFTVETPDKNIFFSPVSISAALVMLSFGACCSTQTEIVETLGFNLTDTPMVEIQHGFQHLICSLNFPKKELELQIGNALFIGKHLKPLAKFLNDVKTLYETEVFSTDFSNISAAKQEINSHVEMQTKGKVVGLIQDLKPNTIMVLVNYIHFKAQWANPFDPSKTEDSSSFLIDKTTTVQVPMMHQMEQYYHLVDMELNCTVLQMDYSKNALALFVLPKEGQMESVEAAMSSKTLKKWNRLLQKGWVDLFVPKFSISATYDLGATLLKMGIQHAYSENADFSGLTEDNGLKLSNAAHKAVLHIGEKGTEAAAVPEVELSDQPENTFLHPIIQIDRSFMLLILERSTRSILFLGKVVNPTEA

SEQ ID NO: 12073 - protein, 415 aa, Homo sapiens; identical to SEQ ID NO: 12072

SEQ ID NO: 12074 - protein, 417 aa, Homo sapiens
MASYLYGVLFAVGLCAPIYCVSPANAPSAYPRPSSTKSTPASQVYSLNTDFAFRLYRRLVLETPSQNIFFSPVSVSTSLAMLSLGAHSVTKTQILQGLGFNLTHTPESAIHQGFQHLVHSLTVPSKDLTLKMGSALFVKKELQLQANFLGNVKRLYEAEVFSTDFSNPSIAQARINSHVKKKTQGKVVDIIQGLDLLTAMVLVNHIFFKAKWEKPFHPEYTRKNFPFLVGEQVTVHVPMMHQKEQFAFGVDTELNCFVLQMDYKGDAVAFFVLPSKGKMRQLEQALSARTLRKWSHSLQKRWIEVFIPRFSISASYNLETILPKMGIQNVFDKNADFSGIAKRDSLQVSKATHKAVLDVSEEGTEATAATTTKFIVRSKDGPSYFTVSFNRTFLMMITNKATDGILFLGKVENPTKS

SEQ ID NO: 12075 - protein, 286 aa, Homo sapiens
MGSALFVKKELQLQANFLGNVKRLYEAEVFSTDFSNPSIAQARINSHVKKKTQGKVVDIIQGLDLLTAMVLVNHIFFKAKWEKPFHPEYTRKNFPFLVGEQVTVHVPMMHQKEQFAFGVDTELNCFVLQMDYKGDAVAFFVLPSKGKMRQLEQALSARTLRKWSHSLQKRWIEVFIPRFSISASYNLETILPKMGIQNVFDKNADFSGIAKRDSLQVSKATHKAVLDVSEEGTEATAATTTKFIVRSKDGPSYFTVSFNRTFLMMITNKATDGILFLGKVENPTKS

SEQ ID NO: 12076 - protein, 337 aa, Homo sapiens
MLSLGAHSVTKTQILQGLGFNLTHTPESAIHQGFQHLVHSLTVPSKDLTLKMGSALFVKKELQLQANFLGNVKRLYEAEVFSTDFSNPSIAQARINSHVKKKTQGKVVDIIQGLDLLTAMVLVNHIFFKAKWEKPFHPEYTRKNFPFLVGEQVTVHVPMMHQKEQFAFGVDTELNCFVLQMDYKGDAVAFFVLPSKGKMRQLEQALSARTLRKWSHSLQKRWIEVFIPRFSISASYNLETILPKMGIQNVFDKNADFSGIAKRDSLQVSKATHKAVLDVSEEGTEATAATTTKFIVRSKDGPSYFTVSFNRTFLMMITNKATDGILFLGKVENPTKS

SEQ ID NO: 12077 - protein, 335 aa, Homo sapiens
MQGQGRRRGTCKDIFCSKMASYLYGVLFAVGLCAPIYCVSPANAPSAYPRPSSTKSTPASQVYSLNTDFAFRLYRRLVLETPSQNIFFSPARINSHVKKKTQGKVVDIIQGLDLLTAMVLVNHIFFKAKWEKPFHPEYTRKNFPFLVGEQVTVHVPMMHQKEQFAFGVDTELNCFVLQMDYKGDAVAFFVLPSKGKMRQLEQALSARTLRKWSHSLQKRWIEVFIPRFSISASYNLETILPKMGIQNVFDKNADFSGIAKRDSLQVSKATHKAVLDVSEEGTEATAATTTKFIVRSKDGPSYFTVSFNRTFLMMITNKATDGILFLGKVENPTKS

SEQ ID NO: 12078 - protein, 435 aa, Homo sapiens
MQGQGRRRGTCKDIFCSKMASYLYGVLFAVGLCAPIYCVSPANAPSAYPRPSSTKSTPASQVYSLNTDFAFRLYRRLVLETPSQNIFFSPVSVSTSLAMLSLGAHSVTKTQILQGLGFNLTHTPESAIHQGFQHLVHSLTVPSKDLTLKMGSALFVKKELQLQANFLGNVKRLYEAEVFSTDFSNPSIAQARINSHVKKKTQGKVVDIIQGLDLLTAMVLVNHIFFKAKWEKPFHPEYTRKNFPFLVGEQVTVHVPMMHQKEQFAFGVDTELNCFVLQMDYKGDAVAFFVLPSKGKMRQLEQALSARTLRKWSHSLQKRWIEVFIPRFSISASYNLETILPKMGIQNVFDKNADFSGIAKRDSLQVSKATHKAVLDVSEEGTEATAATTTKFIVRSKDGPSYFTVSFNRTFLMMITNKATDGILFLGKVENPTKS

SEQ ID NO: 12079 - protein, 201 aa, Homo sapiens
MRSAGGRGEIKVRRELQPSKQVSGLTNHARTGQEKRNLQRHILFQNGILPLWSTLCCWPLCSNLLCVPGQCPQCIPPPFLHKEHPCLTGVFPQHRLCLPPIPQAGFGDPESEHLLLPCECLHFPGHALPWGPLSHQDPDSPGPGLQPHTHTRVCHPPGLPAPGSLTDCSQQRPDLEDGKCPLRQEGAAAAGKFLGQCQEAV

SEQ ID NO: 12080 - protein, 334 aa, Homo sapiens
MRSAGGRGEIKVRRELQPSKQVSGLTNHARTGQEKRNLQRLVLETPSQNIFFSPVSVSTSLAMLSLGAHSVTKTQILQGLGFNLTHTPESAIHQGFQHLVHSLTVPSKDLTLKMGSALFVKKELQLQANFLGNVKRLYEAEVFSTDFSNPSIAQARINSHVKKKTQGKVVDIIQGLDLLTAMVLVNHIFFKAKWEKPFHPEYTRKNFPFLVGEQVTVHVPMMHQKEQFAFGVDTELNCFVLQMDYKGDAVAFFVLPSKGKMRQLEQALSARTLRKWSHSLQKRWIEVFIPRFSISASYNLETILPKMGIQNVFDKNADFSGIAKRDSLQVSKVS

SEQ ID NO: 12081 - protein, 113 aa, Homo sapiens
MEDLCVANTLFALNLFKHLAKASPTQNLFLSPWSISSTMAMVYMGSRGSTEDQMAKVLQFNEVGANAVTPMTPENFTSCGFMQQIQKGSYPDAILQAQAADKIHSSFRSLSSA

SEQ ID NO: 12082 - protein, 132 aa, Homo sapiens
MEDLCVANTLFALNLFKHLAKASPTQNLFLSPWSISSTMAMVYMGSRGSTEDQMAKVLQFNEVGANAVTPMTPENFTSCGFMQQIQKGSYPDAILQAQAADKIHSSFRSLSSAINASTGNYLLESVNKLFGE

SEQ ID NO: 12083 - protein, 161 aa, Homo sapiens
MEDLCVANTLFALNLFKHLAKASPTQNLFLSPWSISSTMAMVYMGSRGSTEDQMAKVLQFNEVGANAVTPMTPENFTSCGFMQQIQKGSYPDAILQAQAADKIHSSFRSLSSAINASTGNYLLESVNKLFGEKSASFREEYIRLCQKYYSSEPQAVDFLEC

SEQ ID NO: 12084 - protein, 415 aa, Homo sapiens
MEDLCVANTLFALNLFKHLAKASPTQNLFLSPWSISSTMAMVYMGSRGSTEDQMAKVLQFNEVGANAVTPMTPENFTSCGFMQQIQKGSYPDAILQAQAADKIHSSFRSLSSAINASTGNYLLESVNKLFGEKSASFREEYIRLCQKYYSSEPQAVDFLECAEEARKKINSWVKTQTKGKIPNLLPEGSVDGDTRMVLVNAVYFKGKWKTPFEKKLNGLYPFRVNSAQRTPVQMMYLREKLNIGYIEDLKAQILELPYAGDVSMFLLLPDEIADVSTGLELLESEITYDKLNKWTSKDKMAEDEVEVYIPQFKLEEHYELRSILRSMGMEDAFNKGRANFSGMSERNDLFLSEVFHQAMVDVNEEGTEAAAGTGGVMTGRTGHGGPQFVADHPFLFLIMHKITNCILFFGRFSSP

SEQ ID NO: 12085 - protein, 415 aa, Homo sapiens; identical to SEQ ID NO: 12084

SEQ ID NO: 12086 - protein, 259 aa, Homo sapiens
MYSNVIGTVTSGKRKVYLLSLLLIGFWDCVTCHGSPVDICTAKPRDIPMNPMCIYRSPEKKATEDEGSEQKIPEATNRRVWELSKANSRFATTFYQHLADSKNDNDNIFLSPLSISTAFAMTKLGACNDTLQQLMEVFKFDTISEKTSDQIHFFFAKLNCRLYRKANKSSKLVSANRLFGDKSLTFNDLYVSDAFHKAFLEVNEEGSEAAASTAVVIAGRSLNPNRVTFKANRPFLVFIREVPLNTIIFMGRVANPCVK

SEQ ID NO: 12087 - protein, 464 aa, Homo sapiens
MYSNVIGTVTSGKRKVYLLSLLLIGFWDCVTCHGSPVDICTAKPRDIPMNPMCIYRSPEKKATEDEGSEQKIPEATNRRVWELSKANSRFATTFYQHLADSKNDNDNIFLSPLSISTAFAMTKLGACNDTLQQLMEVFKFDTISEKTSDQIHFFFAKLNCRLYRKANKSSKLVSANRLFGDKSLTFNETYQDISELVYGAKLQPLDFKENAEQSRAAINKWVSNKTEGRITDVIPSEAINELTVLVLVNTIYFKGLWKSKFSPENTRKELFYKADGESCSASMMYQEGKFRYRRVAEGTQVLELPFKGDDITMVLILPKPEKSLAKVEKELTPEVLQEWLDELEEMMLVVHMPRFRIEDGFSLKEQLQDMGLVDLFSPEKSKLPGIVAEGRDDLYVSDAFHKAFLEVNEEGSEAAASTAVVIAGRSLNPNRVTFKANRPFLVFIREVPLNTIIFMGRVANPCVK

SEQ ID NO: 12088 - protein, 499 aa, Homo sapiens
MKHSLNALLIFLIITSAWGGSKGPLDQLEKGGETAQSADPQWEQLNNKNLSMPLLPADFHKENTVTNDWIPEGEEDDDYLDLEKIFSEDDDYIDIVDSLSVSPTDSDVSAGNILQLFHGKSRIQRLNILNAKFAFNLYRVLKDQVNTFDNIFIAPVGISTAMGMISLGLKGETHEQVHSILHFKDFVNASSKYEITTIHNLFRKLTHRLFRRNFGYTLRSVNDLYIQKQFPILLDFKTKVREYYFAEAQIADFSDPAFISKTNNHIMKLTKGLIKDALENIDPATQMMILNCIYFKGSWVNKFPVEMTHNHNFRLNEREVVKVSMMQTKGNFLAANDQELDCDILQLEYVGGISMLIVVPHKMSGMKTLEAQLTPRVVERWQKSMTNRTREVLLPKFKLEKNYNLVESLKLMGIRMLFDKNGNMAGISDQRIAIDLFKHQGTITVNEEGTQATTVTTVGFMPLSTQVRFTVDRPFLFLIYEHRTSCLLFMGRVANPSRS

SEQ ID NO: 12089 - protein, 499 aa, Homo sapiens; identical to SEQ ID NO: 12088

SEQ ID NO: 12090 - protein, 402 aa, Homo sapiens [sequence omitted]

SEQ ID NO: 12091 - protein, 42 aa, Homo sapiens
MNWHLPLFLLASVTLPSICSHFNPLSLEELGSNTGIQVFNQI

SEQ ID NO: 12092 - protein, 87 aa, Homo sapiens
MNWHLPLFLLASVTLPSICSHFNPLSLEELGSNTGIQVFNQIVKSRPHDNIVISPHGIASVLGMLQLGADGRTKKQLAMVMRYGVNG

SEQ ID NO: 12093 - protein, 398 aa, Homo sapiens
MNWHLPLFLLASVTLPSICSHFNPLSLEELGSNTGIQVFNQIVKSRPHDNIVISPHGIASVLGMLQLGADGRTKKQLAMVMRYGVNGVGKILKKINKAIVSKKNKDIVTVANAVFVKNASEIEVPFVTRNKDVFQCEVRNVNFEDPASACDSINAWVKNETRDMIDNLLSPDLIDGVLTRLVLVNAVYFKGLWKSRFQPENTKKRTFVAADGKSYQVPMLAQLSVFRCGSTSAPNDLWYNFIELPYHGESISMLIALPTESSTPLSAIIPHISTKTIDSWMSIMVPKRVQVILPKFTAVAQTDLKEPLKVLGITDMFDSSKANFAKITTGSENLHVSHILQKAKIEVSEDGTKASAATTAILIARSSPPWFIVDRPFLFFIRHNPTGAVLFMGQINKP

SEQ ID NO: 12094 - protein, 397 aa, Homo sapiens
MNWHLPLFLLASVTLPSICSHFNPLSLEELGSNTGIQVFNQIVKSRPHDNIVISPHGIASVLGMLQLGADGRTKKQLAMVMRYGVNGVGKILKKINKAIVSKKNKDIVTVANAVFVKNASEIEVPFVTRNKDVFQCEVRNVNFEDPASACDSINAWVKNETRDMIDNLLSPDLIDGVLTRLVLVNAVYFKGLWKSRFQPENTKKRTFVAADGKSYQVPMLAQLSVFRCGSTSAPNDLWYNFIELPYHGESISMLIALPTESSTPLSAIIPHISTKTIDSWMSIMVPKRVQVILPKFTAVAQTDLKEPLKVLGITDMFDSSKANFAKITRSENLHVSHILQKAKIEVSEDGTKASAATTAILIARSSPPWFIVDRPFLFFIRHNPTGAVLFMGQINKP

SEQ ID NO: 12095 - protein, 397 aa, Homo sapiens; identical to SEQ ID NO: 12094

SEQ ID NO: 12096 - protein, 276 aa, Homo sapiens
MNWHLPLFLLASVTLPSICSHFNPLSLEELGSNTGIQVFNQIVKSRPHDNIVISPHGIASVLGMLQLGADGRTKKQLAMVMRYGVNGVGKILKKINKAIVSKKNKDIVTVANAVFVKNASEIEVPFVTRNKDVFQCEVRNVNFEDPASACDSINAWVKNETRDMIDNLLSPDLIDGVLTRLVLVNAVYFKGLWKSRFQPENTKKRTFVAADGKSYQVPMLAQLSVFRCGSTSAPNDLWYNFIELPYHGESISMLIALPTESSTPLSAIIPHISTKT

SEQ ID NO: 12097 - protein, 409 aa, Homo sapiens
MSDCRSSLVEGTMNWHLPLFLLASVTLPSICSHFNPLSLEELGSNTGIQVFNQIVKSRPHDNIVISPHGIASVLGMLQLGADGRTKKQLAMVMRYGVNGVGKILKKINKAIVSKKNKDIVTVANAVFVKNASEIEVPFVTRNKDVFQCEVRNVNFEDPASACDSINAWVKNETRDMIDNLLSPDLIDGVLTRLVLVNAVYFKGLWKSRFQPENTKKRTFVAADGKSYQVPMLAQLSVFRCGSTSAPNDLWYNFIELPYHGESISMLIALPTESSTPLSAIIPHISTKTIDSWMSIMVPKRVQVILPKFTAVAQTDLKEPLKVLGITDMFDSSKANFAKITRSENLHVSHILQKAKIEVSEDGTKASAATTAILIARSSPPWFIVDRPFLFFIRHNPTGAVLFMGQINKP

SEQ ID NO: 12098 - protein, 48 aa, Homo sapiens
MPPFLITLFLFHSCCLRANGHLREGMTLLKTEFALHLYQSVAACRNET

SEQ ID NO: 12099 - protein, 404 aa, Homo sapiens
MPPFLITLFLFHSCCLRANGHLREGMTLLKTEFALHLYQSVAACRNETNFVISPAGVSLPLEILQFGAEGSTGQQLADALGYTVHDKRVKDFLHAVYATLPTSSQGTEMELACSLFVQVGTPLSPCFVEHVSWWANSSLEPADLSEPNSTAIQTSEGASRETAGGGPSEGPGGWPWEQVSAAFAQLVLVSTMSFQGTWRKRFSSTDTQILPFTCAYGLVLQVPMMHQTTEVNYGQFQDTAGHQVGVLELPYLGSAVSLFLVLPRDKDTPLSHIEPHLTASTIHLWTTSLRRARMDVFLPRFRIQNQFNLKSILNSWGVTDLFDPLKANLKGISGQDGFYVSEAIHKAKIEVLEEGTKASGATALLLLKRSRIPIFKADRPFIYFLREPNTGFVFSIGRVSNPLD

SEQ ID NO: 12100 - protein, 424 aa, Homo sapiens
MPPFLITLFLFHSCCLRANGHLREGMTLLKTEFALHLYQSVAACRNETNFVISPAGVSLPLEILQFGAEGSTGQQLADALGYTVHDKRVKDFLHAVYATLPTSSQGTEMELACSLFVQVGTPLSPCFVEHVSWWANSSLEPADLSEPNSTAIQTSEGASRETAGGGPSEGPGGWPWEQVSAAFAQLVLVSTMSFQGTWRKRFSSTDTQILPFTCAYGLVLQVPMMHQTTEVNYGQFQDTAGHQVGVLELPYLGSAVSLFLVLPRDKDTPLSHIEPHLTASTIHLWTTSLRRARMDVFLPRFRIQNQFNLKSILNSWGVTDLFDPLKANLKGISGQDGFYVSEAIHKAKIEVLEEGTKASGATALLLLKRSRIPIFKADRPFIYFLREPNTGITVFFDRIQIIYQCLSSNKGSFVHYPLKNKHSF

SEQ ID NO: 12101 - protein, 404 aa, Homo sapiens; identical to SEQ ID NO: 12099

SEQ ID NO: 12102 - protein, 91 aa, Homo sapiens
MKGKLARSTKEIPDEISILLLGVAHFKGQWVTKFDSRKTSLEDFYLDEERTVRVPMMSDPKAVLRYGLDSDLSCKIAQLPLTGSMSIIFFL

SEQ ID NO: 12103 - protein, 99 aa, Homo sapiens
MKGKLARSTKEIPDEISILLLGVAHFKGQWVTKFDSRKTSLEDFYLDEERTVRVPMMSDPKAVLRYGLDSDLSCKIAQLPLTGSMSIIFFLPLKVTQNL

SEQ ID NO: 12104 - protein, 128 aa, Homo sapiens
MQALVLLLCIGALLGHSSCQNPASPPEEEEDPFFKVPVNKLAAAVSNFGYDLYRVRSSTSPTTNVLLSPLSVATALSALSLGAEQRTESIIHRALYYDLISSPDIHGTYKELLDTVTAPQKNLKSASR

SEQ ID NO: 12105 - protein, 87 aa, Homo sapiens
MQALVLLLCIGALLGHSSCQNPASPPEEGSPDPDSTGALVEEEDPFFKVPVNKLAAAVSNFGYDLYRVRSSTSPTTNVLLSPLSVAT

SEQ ID NO: 12106 - protein, 111 aa, Homo sapiens
MQALVLLLCIGALLGHSSCQNPASPPEEGSPDPDSTGALVEEEDPFFKVPVNKLAAAVSNFGYDLYRVRSSTSPTTNVLLSPLSVATALSALSLGAEQRTESIIHRALYYD

SEQ ID NO: 12107 - protein, 132 aa, Homo sapiens
MQALVLLLCIGALLGHSSCQNPASPPEEGSPDPDSTGALVEEEDPFFKVPVNKLAAAVSNFGYDLYRVRSSTSPTTNVLLSPLSVATALSALSLGAEQRTESIIHRALYYDLISSPDIHGTYKELLDTVTAP

SEQ ID NO: 12108 - protein, 418 aa, Homo sapiens
MQALVLLLCIGALLGHSSCQNPASPPEEGSPDPDSTGALVEEEDPFFKVPVNKLAAAVSNFGYDLYRVRSSTSPTTNVLLSPLSVATALSALSLGAEQRTESIIHRALYYDLISSPDIHGTYKELLDTVTAPQKNLKSASRIVFEKKLRIKSSFVAPLEKSYGTRPRVLTGNPRLDLQEINNWVQAQMKGKLARSTKEIPDEISILLLGVAHFKGQWVTKFDSRKTSLEDFYLDEERTVRVPMMSDPKAVLRYGLDSDLSCKIAQLPLTGSMSIIFFLPLKVTQNLTLIEESLTSEFIHDIDRELKTVQAVLTVPKLKLSYEGEVTKSLQEMKLQSLFDSPDFSKITGKPIKLTQVEHRAGFEWNEDGAGTTPSPGLQPAHLTFPLDYHLNQPFIFVLRDTDTGALLFIGKILDPRGP

SEQ ID NO: 12109 - protein, 114 aa, Homo sapiens
MQALVLLLCIGALLGHSSCQNPASPPEEGSPDPDSTGALVEEEDPFFKVPVNKLAAAVSNFGYDLYRVRSSTSPTTNVLLSPLSVATALSALSLGLMPLTYFRKISKDENSLAT

SEQ ID NO: 12110 - protein, 138 aa, Homo sapiens
MRSAFSFSVWRTSRWVTKFDSRKTSLEDFYLDEERTVRVPMMSDPKAVLRYGLDSDLSCKIAQLPLTGSMSIIFFLPLKVTQNLTLIEESLTSEFIHDIDRELKTVQAVLTVPKLKLSYEGEVTKSLQEMKLQSLFDS

SEQ ID NO: 12111 - protein, 491 aa, Homo sapiens
MALLWGLLVLSWSCLQGPCSVFSPVSAMEPLGRQLTSGPNQEQVSPLTLLKLGNQEPGGQTALKSPPGVCSRDPTPEQTHRLARAMMAFTADLFSLVAQTSTCPNLILSPLSVALALSHLALGAQNHTLQRLQQVLHAGSGPCLPHLLSRLCQDLGPGAFRLAARMYLQKGFPIKEDFLEQSEQLFGAKPVSLTGKQEDDLANINQWVKEATEGKIQEFLSGLPEDTVLLLLNAIHFQGFWRNKFDPSLTQRDSFHLDEQFTVPVEMMQARTYPLRWFLLEQPEIQVAHFPFKNNMSFVVLVPTHFEWNVSQVLANLSWDTLHPPLVWERPTKVRLPKLYLKHQMDLVATLSQLGLQELFQAPDLRGISEQSLVVSGVQHQSTLELSEVGVEAAAATSIAMSRMSLSSFSVNRPFLFFIFEDTTGLPLFVGSVRNPNPSAPRELKEQQDSPGNKDFLQSLKGFPRGDKLFGPDLKLVPPMEEDYPQFGSPK

SEQ ID NO: 12112 - protein, 491 aa, Homo sapiens; identical to SEQ ID NO: 12111

SEQ ID NO: 12113 - protein, 255 aa, Homo sapiens
MALLWGLLVLSWSCLQGPCSVFSPVSAMEPLGRQLTSGPNQEQVSPLTLLKLGNQEPGGQTALKSPPGVCSRDPTPEQTHRLARAMMAFTADLFSLVAQTSTCPNLILSPLSVALALSHLALGAQNHTLQRLQQVLHAGSGPCLPHLLSRLCQDLGPGAFRLAARMYLQKGFPIKEDFLEQSEQLFGAKPVSLTGKQEDDLANINQWVKEATEGKIQEFLSGLPEDTVLLLLNAIHFQGFWRNKFDPSLTQRDSF

SEQ ID NO: 12114 - protein, 264 aa, Homo sapiens
MALLWGLLVLSWSCLQGPCSVFSPVSAMEPLGRQLTSGPNQEQVSPLTLLKLGNQEPGGQTALKSPPGVCSRDPTPEQTHRLARAMMAFTADLFSLVAQTSTCPNLILSPLSVALALSHLALGFWRNKFDPSLTQRDSFHLDEQFTVPVEMMQARTYPLRWFLLEQPEIQVAHFPFKNNMSFVVLVPTHFEWNVSQVLANLSWDTLHPPLVWERPTKVRLPKLYLKHQMDLVATLSQLGLQELFQAPDLRGISEQSLVVSGVQH

SEQ ID NO: 12115 - protein, 427 aa, Homo sapiens
MALLWGLLVLSWSCLQGPCSVFSPVSAMEPLGRQLTSGPNQEQVSPLTLLKLGNQVQPGAQNHTLQRLQQVLHAGSGPCLPHLLSRLCQDLGPGAFRLAARMYLQKGFPIKEDFLEQSEQLFGAKPVSLTGKQEDDLANINQWVKEATEGKIQEFLSGLPEDTVLLLLNAIHFQGFWRNKFDPSLTQRDSFHLDEQFTVPVEMMQARTYPLRWFLLEQPEIQVAHFPFKNNMSFVVLVPTHFEWNVSQVLANLSWDTLHPPLVWERPTKVRLPKLYLKHQMDLVATLSQLGLQELFQAPDLRGISEQSLVVSGVQHQSTLELSEVGVEAAAATSIAMSRMSLSSFSVNRPFLFFIFEDTTGLPLFVGSVRNPNPSAPRELKEQQDSPGNKDFLQSLKGFPRGDKLFGPDLKLVPPMEEDYPQFGSPK

SEQ ID NO: 12116 - protein, 86 aa, Homo sapiens
AKWKTTFDPKKTRMEPFHFKNSVIKVPMMNSKKYPVAHFIDQTLKAKPWPRQTLYILGWKQDSQVSSCISTILNGKMWGSCSSPTI

SEQ ID NO: 12117 - protein, 133 aa, Homo sapiens [sequence omitted]

SEQ ID NO: 12118 - protein, 160 aa, Homo sapiens
MASRLTLLTLLLLLLAGDRASSNPNATSSSSQDPESLQDRGEGKVATTVISKMLFVEPILEVSSLPTTNSTTNSATKITANTTDEPTTQPTTEPTTQPTIQPTQPTTQLPTDSPTQPTTGSFCPGPVTLCSDLESHSTEAVLGDALVDFSLKLYHAFSAM

SEQ ID NO: 12119 - protein, 500 aa, Homo sapiens
MASRLTLLTLLLLLLAGDRASSNPNATSSSSQDPESLQDRGEGKVATTVISKMLFVEPILEVSSLPTTNSTTNSATKITANTTDEPTTQPTTEPTTQPTIQPTQPTTQLPTDSPTQPTTGSFCPGPVTLCSDLESHSTEAVLGDALVDFSLKLYHAFSAMKKVETNMAFSPFSIASLLTQVLLGAGENTKTNLESILSYPKDFTCVHQALKGFTTKGVTSVSQIFHSPDLAIRDTFVNASRTLYSSSPRVLSNNSDANLELINTWVAKNTNNKISRLLDSLPSDTRLVLLNAIYLSAKWKTTFDPKKTRMEPFHFKNSVIKVPMMNSKKYPVAHFIDQTLKAKVGQLQLSHNLSLVILVPQNLKHRLEDMEQALSPSVFKAIMEKLEMSKFQPTLLTLPRIKVTTSQDMLSIMEKLEFFDFSYDLNLCGLTEDPDLQVSAMQHQTVLELTETGVEAAAASAISVARTLLVFEVQQPFLFVLWDQQHKFPVFMGRVYDPRA

SEQ ID NO: 12120 - protein, 463 aa, Homo sapiens
MASRLTLLTLLLLLLAGDRASSNPNATSSSSQDPESLQDRGEGKVATTVISKMLFVEPILEVSSLPTTNSTTNSATKITANTTDEPTTQPTTEPTTQPTIQPTQPTTQLPTDSPTQPTTGSFCPGPVTLCSDLESHSTEAVLGDALVDFSLKLYHAFSAMKKVETNMAFSPFSIASLLTQVLLGAGENTKTNLESILSYPKDFTCVHQALKGFTTKGVTSVSQIFHSPDLAIRDTFVNASRTLYSSSPRVLSNNSDANLELINTWVAKNTNNKISRLLDSLPSDTRLVLLNAIYLSAKWKTTFDPKKTRMEPFHFKNSVIKVPMMNSKKYPVAHFIDQTLKAKAIMEKLEMSKFQPTLLTLPRIKVTTSQDMLSIMEKLEFFDFSYDLNLCGLTEDPDLQVSAMQHQTVLELTETGVEAAAASAISVARTLLVFEVQQPFLFVLWDQQHKFPVFMGRVYDPRA

SEQ ID NO: 12121 - protein, 505 aa, Homo sapiens
MASRLTLLTLLLLLLAGFLEPQDRASSNPNATSSSSQDPESLQDRGEGKVATTVISKMLFVEPILEVSSLPTTNSTTNSATKITANTTDEPTTQPTTEPTTQPTIQPTQPTTQLPTDSPTQPTTGSFCPGPVTLCSDLESHSTEAVLGDALVDFSLKLYHAFSAMKKVETNMAFSPFSIASLLTQVLLGAGENTKTNLESILSYPKDFTCVHQALKGFTTKGVTSVSQIFHSPDLAIRDTFVNASRTLYSSSPRVLSNNSDANLELINTWVAKNTNNKISRLLDSLPSDTRLVLLNAIYLSAKWKTTFDPKKTRMEPFHFKNSVIKVPMMNSKKYPVAHFIDQTLKAKVGQLQLSHNLSLVILVPQNLKHRLEDMEQALSPSVFKAIMEKLEMSKFQPTLLTLPRIKVTTSQDMLSIMEKLEFFDFSYDLNLCGLTEDPDLQVSAMQHQTVLELTETGVEAAAASAISVARTLLVFEVQQPFLFVLWDQQHKFPVFMGRVYDPRA

SEQ ID NO: 12122 - protein, 43 aa, Homo sapiens
MASRLTLLTLLLLLLAGGLGRTPKQTWRASSLTPRTSPVSTRP

SEQ ID NO: 12123 - protein, 43 aa, Homo sapiens; identical to SEQ ID NO: 12122

SEQ ID NO: 12124 - protein, 122 aa, Homo sapiens
MGAGPGRGGGPWAPRVGAGSEAGWLRRSADVAAQMASRLTLLTLLLLLLAGDRASSNPNATSSSSQDPESLQDRGEGKVATTVISKMLFVEPILEVSSLPTTNSTTNSATKITANTTDEPTT

SEQ ID NO: 12125 - protein, 543 aa, Homo sapiens
MGAGPGRGGGPWAPRVGAGSEAGWLRRSADVAAQMASRLTLLTLLLLLLAGDRASSNPNATSSSSQDPESLQDRGEGKVATTVISKMLFVEPILEVSSLPTTNSTTNSATKITANTTDEPTTQPTTEPTTQPTIQPTQPTTQLPTDSPTQPTTGSFCPGPVTLCSDLESHSTEAVLGDALVDFSLKLYHAFSAMKKVETNMAFSPFSIASLLTQVLLGAGENTKTNLESILSYPKDFTCVHQALKGFTTKGVTSVSQIFHSPDLAIRDTFVNASRTLYSSSPRVLSNNSDANLELINTWVAKNTNNKISRLLDSLPSDTRLVLLNAIYLSEQPSHLFPLAKWKTTFDPKKTRMEPFHFKNSVIKVPMMNSKKYPVAHFIDQTLKAKVGQLQLSHNLSLVILVPQNLKHRLEDMEQALSPSVFKAIMEKLEMSKFQPTLLTLPRIKVTTSQDMLSIMEKLEFFDFSYDLNLCGLTEDPDLQVSAMQHQTVLELTETGVEAAAASAISVARTLLVFEVQQPFLFVLWDQQHKFPVFMGRVYDPRA

SEQ ID NO: 12126 - protein, 448 aa, Homo sapiens
MLFVEPILEVSSLPTTNSTTNSATKITANTTDEPTTQPTTEPTTQPTIQPTQPTTQLPTDSPTQPTTGSFCPGPVTLCSDLESHSTEAVLGDALVDFSLKLYHAFSAMKKVETNMAFSPFSIASLLTQVLLGAGENTKTNLESILSYPKDFTCVHQALKGFTTKGVTSVSQIFHSPDLAIRDTFVNASRTLYSSSPRVLSNNSDANLELINTWVAKNTNNKISRLLDSLPSDTRLVLLNAIYLSAKWKTTFDPKKTRMEPFHFKNSVIKVPMMNSKKYPVAHFIDQTLKAKVGQLQLSHNLSLVILVPQNLKHRLEDMEQALSPSVFKAIMEKLEMSKFQPTLLTLPRIKVTTSQDMLSIMEKLEFFDFSYDLNLCGLTEDPDLQVSAMQHQTVLELTETGVEAAAASAISVARTLLVFEVQQPFLFVLWDQQHKFPVFMGRVYDPRA

SEQ ID NO: 12127 - protein, 150 aa, Homo sapiens
MRSLLLLSAFCLLEAALAAEVKKPAAAAAPGTAEKLSPKAATLAERSAGLAFSLYQAMAKDQAVENILVSPVVVASSLGLVSLGGKATTASQAKAVLSAEQLRDEEVHAGLGELLRSLSNSTARNVTWKLGSRLYGPSSVSFADDFVRSS

SEQ ID NO: 12128 - protein, 165 aa, Homo sapiens
MRSLLLLSAFCLLEAALAAEVKKPAAAAAPGTAEKLSPKAATLAERSAGLAFSLYQAMAKDQAVENILVSPVVVASSLGLVSLGGKATTASQAKAVLSAEQLRDEEVHAGLGELLRSLSNSTARNVTWKLGSRLYGPSSVSFADDFVRSSKQHYNCEHSKINFRD

SEQ ID NO: 12129 - protein, 167 aa, Homo sapiens
MRSLLLLSAFCLLEAALAAEVKKPAAAAAPGTAEKLSPKAATLAERSAGLAFSLYQAMAKDQAVENILVSPVVVASSLGLVSLGGKATTASQAKAVLSAEQLRDEEVHAGLGELLRSLSNSTARNVTWKLGSRLYGPSSVSFADDFVRSSKQHYNCEHSKINFRDKR

SEQ ID NO: 12130 - protein, 203 aa, Homo sapiens
MRSLLLLSAFCLLEAALAAEVKKPAAAAAPGTAEKLSPKAATLAERSAGLAFSLYQAMAKDQAVENILVSPVVVASSLGLVSLGGKATTASQAKAVLSAEQLRDEEVHAGLGELLRSLSNSTARNVTWKLGSRLYGPSSVSFADDFVRSSKQHYNCEHSKINFRDKRSALQSINEWAAQTTDGKLPEVTKDVERTDGALLVNA

SEQ ID NO: 12131 - protein, 247 aa, Homo sapiens
MRSLLLLSAFCLLEAALAAEVKKPAAAAAPGTAEKLSPKAATLAERSAGLAFSLYQAMAKDQAVENILVSPVVVASSLGLVSLGGKATTASQAKAVLSAEQLRDEEVHAGLGELLRSLSNSTARNVTWKLGSRLYGPSSVSFADDFVRSSKQHYNCEHSKINFRDKRSALQSINEWAAQTTDGKLPEVTKDVERTDGALLVNAMFFKPHWDEKFHHKMVDNRGFMVTRSYTVGVMMMHRTGLYNYYD

SEQ ID NO: 12132 - protein, 249 aa, Homo sapiens
MRSLLLLSAFCLLEAALAAEVKKPAAAAAPGTAEKLSPKAATLAERSAGLAFSLYQAMAKDQAVENILVSPVVVASSLGLVSLGGKATTASQAKAVLSAEQLRDEEVHAGLGELLRSLSNSTARNVTWKLGSRLYGPSSVSFADDFVRSSKQHYNCEHSKINFRDKRSALQSINEWAAQTTDGKLPEVTKDVERTDGALLVNAMFFKPHWDEKFHHKMVDNRGFMVTRSYTVGVMMMHRTGLYNYYDDE

SEQ ID NO: 12133 - protein, 418 aa, Homo sapiens
MRSLLLLSAFCLLEAALAAEVKKPAAAAAPGTAEKLSPKAATLAERSAGLAFSLYQAMAKDQAVENILVSPVVVASSLGLVSLGGKATTASQAKAVLSAEQLRDEEVHAGLGELLRSLSNSTARNVTWKLGSRLYGPSSVSFADDFVRSSKQHYNCEHSKINFRDKRSALQSINEWAAQTTDGKLPEVTKDVERTDGALLVNAMFFKPHWDEKFHHKMVDNRGFMVTRSYTVGVMMMHRTGLYNYYDDEKEKLQIVEMPLAHKLSSLIILMPHHVEPLERLEKLLTKEQLKIWMGKMQKKAVAISLPKGVVEVTHDLQKHLAGLGLTEAIDKNKADLSRMSGKKDLYLASVFHATAFELDTDGNPFDQDIYGREELRSPKLFYADHPFIFLVRDTQSGSLLFIGRLVRPKGDKMRDEL

SEQ ID NO: 12134 - protein, 418 aa, Homo sapiens; identical to SEQ ID NO: 12133

SEQ ID NO: 12135 - protein, 295 aa, Homo sapiens
MRSLLLLSAFCLLEAALAAEVKKPAAAAAPGTAEKLSPKAATLAERSAGLAFSLYQAMAKDQAVENILVSPVVVASSLGLVSLGGKATTASQAKAVLSAEQLRDEEVHAGLGELLRSLSNSTARNVTWKLGSRLYGPSSVSFADDFVRSSKQHYNCEHSKINFRDKRSALQSINEWAAQTTDGKLPEVTKDVERTDGALLVNAMFFKPHWDEKFHHKMVDNRGFMVTRSYTVGVMMMHRTGLYNYYDDEKEKLQIVEMPLAHKLSSLIILMPHHVEPLERLEKLLTKEQLKIWMG

SEQ ID NO: 12136 - protein, 418 aa, Homo sapiens; identical to SEQ ID NO: 12133

SEQ ID NO: 12137 - protein, 324 aa, Homo sapiens
MRSLLLLSAFCLLEAALAAEVKKPAAAAAPGTAEKLSPKAATLAERSAGLAFSLYQAMAKDQAVENILVSPVVVASSLGLVSLGGKATTASQAKAVLSAEQLRDEEVHAGLGELLRSLSNSTARNVTWKLGSRLYGPSSVSFADDFVRSSKQHYNCEHSKINFRDKRSALQSINEWAAQTTDGKLPEVTKDVERTDGALLVNAMFFKPHWDEKFHHKMVDNRGFMVTRSYTVGVMMMHRTGLYNYYDDEKEKLQIVEMPLAHKLSSLIILMPHHVEPLERLEKLLTKEQLKIWMGKMQKKAVAISLPKGVVEVTHDLQVRGGPA

SEQ ID NO: 12138 - protein, 142 aa, Homo sapiens
MRSLLLLSAFCLLEAALAAEVKKPAAAAAPGTAEKLSPKATTASQAKAVLSAEQLRDEEVHAGLGELLRSLSNSTARNVTWKLGSRLYGPSSVSFADDFVRSSKQHYNCEHSKINFRDKRSALQSINEWAAQTTDGKLPEVT

SEQ ID NO: 12139 - protein, 86 aa, Homo sapiens [sequence omitted]

SEQ ID NO: 12140 - protein, 201 aa, Homo sapiens
MVDNRGFMVTRSYTVGVMMMHRTGLYNYYDDEKEKLQIVEMPLAHKLSSLIILMPHHVEPLERLEKLLTKEQLKIWMGKMQKKAVAISLPKGVVEVTHDLQKHLAGLGLTEAIDKNKADLSRMSGKKDLYLASVFHATAFELDTDGNPFDQDIYGREELRSPKLFYADHPFIFLVRDTQSGSLLFIGRLVRPKGDKMRDEL

SEQ ID NO: 12141 - protein, 56 aa, Homo sapiens
  VARIANT 1: note = misc_feature - Xaa can be any naturally occurring amino acid
XNPFDQDIYGREELRSPKLFYADHPFIFLVRDTQSGSLLFIGRLVRPKGDKMRDEL

SEQ ID NO: 12142 - protein, 160 aa, Homo sapiens
MAFLGLFSLLVLQSMATGATFPEEAIADLSVNMYNRLRATGEDENILFSPLSIALAMGMMELGAQGSTQKEIRHSMGYDSLKNGEEFSFLKEFSNMVTAKESQYVMKIANSLFVQNGFHVNEEFLQMMKKYFNAAVNHVDFSQNVAVANYINKWVENNTN

SEQ ID NO: 12143 - protein, 245 aa, Homo sapiens
MAFLGLFSLLVLQSMATGATFPEEAIADLSVNMYNRLRATGEDENILFSPLSIALAMGMMELGAQGSTQKEIRHSMGYDSLKNGEEFSFLKEFSNMVTAKESQYVMKIANSLFVQNGFHVNEEFLQMMKKYFNAAVNHVDFSQNVAVANYINKWVENNTNNLVKDLVSPRDFDAATYLALINAVYFKGNWKSQFRPENTRTFSFTKDDESEVQIPMMYQQGEFYYGEFSDGSNEAGGIYQVLEIP

SEQ ID NO: 12144 - protein, 410 aa, Homo sapiens
MAFLGLFSLLVLQSMATGATFPEEAIADLSVNMYNRLRATGEDENILFSPLSIALAMGMMELGAQGSTQKEIRHSMGYDSLKNGEEFSFLKEFSNMVTAKESQYVMKIANSLFVQNGFHVNEEFLQMMKKYFNAAVNHVDFSQNVAVANYINKWVENNTNNLVKDLVSPRDFDAATYLALINAVYFKGNWKSQFRPENTRTFSFTKDDESEVQIPMMYQQGEFYYGEFSDGSNEAGGIYQVLEIPYEGDEISMMLVLSRQEVPLATLEPLVKAQLVEEWANSVKKQKVEVYLPRFTVEQEIDLKDVLKALGITEIFIKDANLTGLSDNKEIFLSKAIHKSFLEVNEEGSEAAAVSGMIAISRMAVLYPQVIVDHPFFFLIRNRRTGTILFMGRVMHPETMNTSGHDFEEL

SEQ ID NO: 12145 - protein, 410 aa, Homo sapiens; identical to SEQ ID NO: 12144

SEQ ID NO: 12146 - protein, 119 aa, Homo sapiens
  VARIANT 1: note = misc_feature - Xaa can be any naturally occurring amino acid
XSRFTVEQEIDLKDVLKALGITEIFIKDANLTGLSDNKEIFLSKAIHKSFLEVNEEGSEAAAVSGMIAISRMAVLYPQVIVDHPFFFLIRNRRTGTILFMGRVMHPETMNTSGHDFEEL

SEQ ID NO: 12147 - protein, 157 aa, Homo sapiens
MDTIFLWSLLLLFFGSQASRCSAQKNTEFAVDLYQEVSLSHKDNIIFSPLGITLVLEMVQLGAKGKAQQQIRQTLKQQETSAEKKQEFTFNLANALYLQEGFTVKEQYLHGNKEFFQSAIKLVDFQDAKACAEMISTWVERKTDGKIKDMFSGEEFG

SEQ ID NO: 12148 - protein, 206 aa, Homo sapiens
MDTIFLWSLLLLFFGSQASRCSAQKNTEFAVDLYQEVSLSHKDNIIFSPLGITLVLEMVQLGAKGKAQQQIRQTLKQQETSAGEEFFVLKSFFSAISEKKQEFTFNLANALYLQEGFTVKEQYLHGNKEFFQSAIKLVDFQDAKACAEMISTWVERKTDGKIKDMFSGEEFGPLTRLVLVNAIYFKGDWKQKFRKEDTQLINFTKK

SEQ ID NO: 12149 - protein, 405 aa, Homo sapiens
MDTIFLWSLLLLFFGSQASRCSAQKNTEFAVDLYQEVSLSHKDNIIFSPLGITLVLEMVQLGAKGKAQQQIRQTLKQQETSAGEEFFVLKSFFSAISEKKQEFTFNLANALYLQEGFTVKEQYLHGNKEFFQSAIKLVDFQDAKACAEMISTWVERKTDGKIKDMFSGEEFGPLTRLVLVNAIYFKGDWKQKFRKEDTQLINFTKKNGSTVKIPMMKALLRTKYGYFSESSLNYQVLELSYKGDEFSLIIILPAEGMDIEEVEKLITAQQILKWLSEMQEEEVEISLPRFKVEQKVDFKDVLYSLNITEIFSGGCDLSGITDSSEVYVSQVTQKVFFEINEDGSEAATSTGIHIPVIMSLAQSQFIANHPFLFIMKHNPTESILFMGRVTNPDTQEIKGRDLDSL

SEQ ID NO: 12150 - protein, 405 aa, Homo sapiens; identical to SEQ ID NO: 12149

SEQ ID NO: 12151 - protein, 405 aa, Homo sapiens; identical to SEQ ID NO: 12149

SEQ ID NO: 12152 - protein, 405 aa, Homo sapiens; identical to SEQ ID NO: 12149

SEQ ID NO: 12153 - protein, 415 aa, Homo sapiens
MIQNLMREVKMDTIFLWSLLLLFFGSQASRCSAQKNTEFAVDLYQEVSLSHKDNIIFSPLGITLVLEMVQLGAKGKAQQQIRQTLKQQETSAGEEFFVLKSFFSAISEKKQEFTFNLANALYLQEGFTVKEQYLHGNKEFFQSAIKLVDFQDAKACAEMISTWVERKTDGKIKDMFSGEEFGPLTRLVLVNAIYFKGDWKQKFRKEDTQLINFTKKNGSTVKIPMMKALLRTKYGYFSESSLNYQVLELSYKGDEFSLIIILPAEGMDIEEVEKLITAQQILKWLSEMQEEEVEISLPRFKVEQKVDFKDVLYSLNITEIFSGGCDLSGITDSSEVYVSQVTQKVFFEINEDGSEAATSTGIHIPVIMSLAQSQFIANHPFLFIMKHNPTESILFMGRVTNPDTQEIKGRDLDSL

SEQ ID NO: 12154 - protein, 853 aa, Homo sapiens
MGTPRAQHPPPPQLLFLILLSCPWIQGLPLKEEEILPEPGSETPTVASEALAELLHGALLRRGPEMGYLPGPPLGPEGGEEETTTTIITTTTVTTTVTSPVLCNNNISEGEGYVESPDLGSPVSRTLGLLDCTYSIHVYPGYGIEIQVQTLNLSQEEELLVLAGGGSPGLAPRLLANSSMLGEGQVLRSPTNRLLLHFQSPRVPRGGGFRIHYQAYLLSCGFPPRPAHGDVSVTDLHPGGTATFHCDSGYQLQGEETLICLNGTRPSWNGETPSCMASCGGTIHNATLGRIVSPEPGGAVGPNLTCRWVIEAAEGRRLHLHFERVSLDEDNDRLMVRSGGSPLSPVIYDSDMDDVPERGLISDAQSLYVELLSETPANPLLLSLRFEAFEEDRCFAPFLAHGNVTTTDPEYRPGALATFSCLPGYALEPPGPPNAIECVDPTEPHWNDTEPACKAMCGGELSEPAGVVLSPDWPQSYSPGQDCVWGVHVQEEKRILLQVEILNVREGDMLTLFDGDGPSARVLAQLRGPQPRRRLLSSGPDLTLQFQAPPGPPNPGLGQGFVLHFKEVPRNDTCPELPPPEWGWRTASHGDLIRGTVLTYQCEPGYELLGSDILTCQWDLSWSAAPPACQKIMTCADPGEIANGHRTASDAGFPVGSHVQYRCLPGYSLEGAAMLTCYSRDTGTPKWSDRVPKCALKYEPCLNPGVPENGYQTLYKHHYQAGESLRFFCYEGFELIGEVTITCVPGHPSQWTSQPPLCKVAYEELLDNRKLEVTQTTDPSRQLEGGNLALAILLPLGLVIVLGSGVYIYYTKLQGKSLFGFSGSHSYSPITVESDFSNPLYEAGDTREYEVSI

SEQ ID NO: 12155 - protein, 809 aa, Homo sapiens
MGTPRAQHPPPPQLLFLILLSCPWIQGLPLKEEEILPEPGSETPTVASEALAELLHGALLRRGPEMGYLPGSDRDPTLATPPAGQTLAVPSLPRATEPGTGPLTTAVTPNGVRGAGPTAPELLTPPPGTTAPPPPSPASPGPPLGPEGGEEETTTTIITTTTVTTTVTSPAYLLSCGFPPRPAHGDVSVTDLHPGGTATFHCDSGYQLQGEETLICLNGTRPSWNGETPSCMASCGGTIHNATLGRIVSPEPGGAVGPNLTCRWVIEAAEGRRLHLHFERVSLDEDNDRLMVRSGGSPLSPVIYDSDMDDVPERGLISDAQSLYVELLSETPANPLLLSLRFEAFEEDRCFAPFLAHGNVTTTDPEYRPGALATFSCLPGYALEPPGPPNAIECVDPTEPHWNDTEPACKAMCGGELSEPAGVVLSPDWPQSYSPGQDCVWGVHVQEEKRILLQVEILNVREGDMLTLFDGDGPSARVLAQLRGPQPRRRLLSSGPDLTLQFQAPPGPPNPGLGQGFVLHFKEVPRNDTCPELPPPEWGWRTASHGDLIRGTVLTYQCEPGYELLGSDILTCQWDLSWSAAPPACQKIMTCADPGEIANGHRTASDAGFPVGSHVQYRCLPGYSLEGAAMLTCYSRDTGTPKWSDRVPKCALKYEPCLNPGVPENGYQTLYKHHYQAGESLRFFCYEGFELIGEVTITCVPGHPSQWTSQPPLCKVAYEELLDNRKLEVTQTTDPSRQLEGGNLALAILLPLGLVIVLGSGVYIYYTKLQGKSLFGFSGSHSYSPITVESDFSNPLYEAGDTREYEVSI

SEQ ID NO: 12156 - protein, 910 aa, Homo sapiens
MGTPRAQHPPPPQLLFLILLSCPWIQGLPLKEEEILPEPGSETPTVASEALAELLHGALLRRGPEMGYLPGSDRDPTLATPPAGQTLAVPSLPRATEPGTGPLTTAVTPNGVRGAGPTAPELLTPPPGTTAPPPPSPASPGPPLGPEGGEEETTTTIITTTTVTTTVTSPVLCNNNISEGEGYVESPDLGSPVSRTLGLLDCTYSIHVYPGYGIEIQVQTLNLSQEEELLVLAGGGSPGLAPRLLANSSMLGEGQVLRSPTNRLLLHFQSPRVPRGGGFRIHYQAYLLSCGFPPRPAHGDVSVTDLHPGGTATFHCDSGYQLQGEETLICLNGTRPSWNGETPSCMASCGGTIHNATLGRIVSPEPGGAVGPNLTCRWVIEAAEGRRLHLHFERVSLDEDNDRLMVRSGGSPLSPVIYDSDMDDVPERGLISDAQSLYVELLSETPANPLLLSLRFEAFEEDRCFAPFLAHGNVTTTDPEYRPGALATFSCLPGYALEPPGPPNAIECVDPTEPHWNDTEPACKAMCGGELSEPAGVVLSPDWPQSYSPGQDCVWGVHVQEEKRILLQVEILNVREGDMLTLFDGDGPSARVLAQLRGPQPRRRLLSSGPDLTLQFQAPPGPPNPGLGQGFVLHFKEVPRNDTCPELPPPEWGWRTASHGDLIRGTVLTYQCEPGYELLGSDILTCQWDLSWSAAPPACQKIMTCADPGEIANGHRTASDAGFPVGSHVQYRCLPGYSLEGAAMLTCYSRDTGTPKWSDRVPKCALKYEPCLNPGVPENGYQTLYKHHYQAGESLRFFCYEGFELIGEVTITCVPGHPSQWTSQPPLCKVTQTTDPSRQLEGGNLALAILLPLGLVIVLGSGVYIYYTKLQGKSLFGFSGSHSYSPITVESDFSNPLYEAGDTREYEVSI

SEQ ID NO: 12157 - protein, 923 aa, Homo sapiens
MGTPRAQHPPPPQLLFLILLSCPWIQGLPLKEEEILPEPGSETPTVASEALAELLHGALLRRGPEMGYLPGSDRDPTLATPPAGQTLAVPSLPRATEPGTGPLTTAVTPNGVRGAGPTAPELLTPPPGTTAPPPPSPASPGPPLGPEGGEEETTTTIITTTTVTTTVTSPVLCNNNISEGEGYVESPDLGSPVSRTLGLLDCTYSIHVYPGYGIEIQVQTLNLSQEEELLVLAGGGSPGLAPRLLANSSMLGEGQVLRSPTNRLLLHFQSPRVPRGGGFRIHYQAYLLSCGFPPRPAHGDVSVTDLHPGGTATFHCDSGYQLQGEETLICLNGTRPSWNGETPSCMASCGGTIHNATLGRIVSPEPGGAVGPNLTCRWVIEAAEGRRLHLHFERVSLDEDNDRLMVRSGGSPLSPVIYDSDMDDVPERGLISDAQSLYVELLSETPANPLLLSLRFEAFEEDRCFAPFLAHGNVTTTDPEYRPGALATFSCLPGYALEPPGPPNAIECVDPTEPHWNDTEPACKAMCGGELSEPAGVVLSPDWPQSYSPGQDCVWGVHVQEEKRILLQVEILNVREGDMLTLFDGDGPSARVLAQLRGPQPRRRLLSSGPDLTLQFQAPPGPPNPGLGQGFVLHFKEVPRNDTCPELPPPEWGWRTASHGDLIRGTVLTYQCEPGYELLGSDILTCQWDLSWSAAPPACQKIMTCADPGEIANGHRTASDAGFPVGSHVQYRCLPGYSLEGAAMLTCYSRDTGTPKWSDRVPKCALKYEPCLNPGVPENGYQTLYKHHYQAGESLRFFCYEGFELIGEVTITCVPGHPSQWTSQPPLCKVAYEELLDNRKLEVTQTTDPSRQLEGGNLALAILLPLGLVIVLGSGVYIYYTKLQGKSLFGFSGSHSYSPITVESDFSNPLYEAGDTREYEVSI

SEQ ID NO: 12158 - protein, 81 aa, Homo sapiens
MGTPRAQHPPPPQLLFLILLSCPWIQGSDRDPTLATPPAGQTLAVPSLPRATEPGTGPLTTAVTPNGVRGAGPTAPELLTP

SEQ ID NO: 12159 - protein, 879 aa, Homo sapiens
MGTPRAQHPPPPQLLFLILLSCPWIQGSDRDPTLATPPAGQTLAVPSLPRATEPGTGPLTTAVTPNGVRGAGPTAPELLTPPPGTTAPPPPSPASPGPPLGPEGGEEETTTTIITTTTVTTTVTSPVLCNNNISEGEGYVESPDLGSPVSRTLGLLDCTYSIHVYPGYGIEIQVQTLNLSQEEELLVLAGGGSPGLAPRLLANSSMLGEGQVLRSPTNRLLLHFQSPRVPRGGGFRIHYQAYLLSCGFPPRPAHGDVSVTDLHPGGTATFHCDSGYQLQGEETLICLNGTRPSWNGETPSCMASCGGTIHNATLGRIVSPEPGGAVGPNLTCRWVIEAAEGRRLHLHFERVSLDEDNDRLMVRSGGSPLSPVIYDSDMDDVPERGLISDAQSLYVELLSETPANPLLLSLRFEAFEEDRCFAPFLAHGNVTTTDPEYRPGALATFSCLPGYALEPPGPPNAIECVDPTEPHWNDTEPACKAMCGGELSEPAGVVLSPDWPQSYSPGQDCVWGVHVQEEKRILLQVEILNVREGDMLTLFDGDGPSARVLAQLRGPQPRRRLLSSGPDLTLQFQAPPGPPNPGLGQGFVLHFKEVPRNDTCPELPPPEWGWRTASHGDLIRGTVLTYQCEPGYELLGSDILTCQWDLSWSAAPPACQKIMTCADPGEIANGHRTASDAGFPVGSHVQYRCLPGYSLEGAAMLTCYSRDTGTPKWSDRVPKCALKYEPCLNPGVPENGYQTLYKHHYQAGESLRFFCYEGFELIGEVTITCVPGHPSQWTSQPPLCKVAYEELLDNRKLEVTQTTDPSRQLEGGNLALAILLPLGLVIVLGSGVYIYYTKLQGKSLFGFSGSHSYSPITVESDFSNPLYEAGDTREYEVSI

SEQ ID NO: 12160 - protein, 303 aa, Homo sapiens
  VARIANT 1: note = misc_feature - Xaa can be any naturally occurring amino acid
XCLNGTRPSWNGETPSCMASCGGTIHNATLGRIVSPEPGGAVGPNLTCRWVIEAAEGRRLHLHFERVSLDEDNDRLMVRSGGSPLSPVIYDSDMDDVPERGLISDAQSLYVELLSETPANPLLLSLRFEAMCGGELSEPAGVVLSPDWPQSYSPGQDCVWGVHVQEEKRILLQVEILNVREGDMLTLFDGDGPSARVLAQLRGPQPRRRLLSSGPDLTLQFQAPPGPPNPGLGQGFVLHFKEVPRNDTCPELPPPEWGWRTASHGDLIRGTVLTYQCEPGYELLGSDILTCQWDLSWSAAPPA

SEQ ID NO: 12161 - protein, 314 aa, Homo sapiens
MGIGRSEGGRRGAALGVLLALGAALLAVGSASEYDYVSFQSDIGPYQSGRFYTKPPQCVDIPADLRLCHNVGYKKMVLPNLLEHETMAEVKQQASSWVPLLNKNCHAGTQVFLCSLFAPVCLDRPIYPCRWLCEAVRDSCEPVMQFFGFYWPEMLKCDKFPEGDVCIAMTPPNATEASKPQGTTVCPPCDNELKSEAIIEHLCASEFALRMKIKEVKKENGDKKIVPKKKKPLKLGPIKKKDLKKLVLYLKNGADCPCHQLDNLSHHFLIMGRKVKSQYLLTAIHKWDKKNKEFKNFMKKMKNHECPTFQSVFK

SEQ ID NO: 12162 - protein, 178 aa, Homo sapiens
MGWGNPIIAVFRTPFAPWLQFHWSAPFSAWLGTVLTHLHSSQQRSGTTVCPPCDNELKSEAIIEHLCASEFALRMKIKEVKKENGDKKIVPKKKKPLKLGPIKKKDLKKLVLYLKNGADCPCHQLDNLSHHFLIMGRKVKSQYLLTAIHKWDKKNKEFKNFMKKMKNHECPTFQSVFK

SEQ ID NO: 12163 - protein, 295 aa, Homo sapiens
MLQGPGSLLLLFLASHCCLGSARGLFLFGQPDFSYKRSNCKPIPANLQLCHGIEYQNMRLPNLLGHETMKEVLEQAGAWIPLVMKQCHPDTKKFLCSLFAPVCLDDLDETIQPCHSLCVQVKDRCAPVMSAFGFPWPDMLECDRFPQDNDLCIPLASSDHLLPATEEAPKVCEACKNKNDDDNDIMETLCKNDFALKIKVKEITYINRDTKIILETKSKTIYKLNGVSERDLKKSVLWLKDSLQCTCEEMNDINAPYLVMGQKQGGELVITSVKRWQKGQREFKRISRSIRKLQC

SEQ ID NO: 12164 - protein, 346 aa, Homo sapiens
MFLSILVALCLWLHLALGVRGAPCEAVRIPMCRHMPWNITRMPNHLHHSTQENAILAIEQYEELVDVNCSAVLRFFLCAMYAPICTLEFLHDPIKPCKSVCQRARDDCEPLMKMYNHSWPESLACDELPVYDRGVCISPEAIVTDLPEDVKWIDITPDMMVQERPLDVDCKRLSPDRCKCKKVKPTLATYLSKNYSYVIHAKIKAVQRSGCNEVTTVVDVKEIFKSSSPIPRTQVPLITNSSCQCPHILPHQDVLIMCYEWRSRMMLLENCLVEKWRDQLSKRSIQWEERLQEQRRTVQDKKKTAGRTSRSNPPKPKGKPPAPKPASPKKNIKTRSAQKRTNPKRV

SEQ ID NO: 12165 - protein, 137 aa, Homo sapiens
MQLEQSIIPDIPAKDVKWIDITPDMMVQERPLDVDCKRLSPDRCKCKKVKPTLATYLSKNYSYVIHAKIKAVQRSGCNEVTTVVDVKEIFKSSSPIPRTQVPLITNSSCQCPHILPHQDVLIMCYEWRSRMMLLENC

SEQ ID NO: 12166 - protein, 317 aa, Homo sapiens
MRAAAAGGGVRTAALALLLGALHWAPARCEEYDYYGWQAEPLHGRSYSKPPQCLDIPADLPLCHTVGYKRMRLPNLLEHESLAEVKQQASSWLPLLAKRCHSDTQVFLCSLFAPVCLDRPIYPCRSLCEAVRAGCAPLMEAYGFPWPEMLHCHKFPLDNDLCIAVQFGHLPATAPPVTKICAQCEMEHSADGLMEQMCSSDFVVKMRIKEIKIENGDRKLIGAQKKKKLLKPGPLKRKDTKRLVLHMKNGAGCPCPQLDSLAGSFLVMGRKVDGQLLLMAVYRWDKKNKEMKFAVKFMFSYPCSLYYPFFYGAAEPH

SEQ ID NO: 12167 - protein, 78 aa, Homo sapiens
MGSGLPLVLLLTLLGSSHGTGPGMTLQLKLKESFLTNSSYESSFLELLEKLCLLLHLPSGTSVTLHHARSQHHVVCNT

SEQ ID NO: 12168 - protein, 55 aa, Homo sapiens
MTLQLKLKESFLTNSSYESSFLELLEKLCLLLHLPSGTSVTLHHARSQHHVVCNT

SEQ ID NO: 12169 - protein, 263 aa, Homo sapiens
MRPCQVPGAATGPRAMWLCPLALNLILMAASGAVCEVKDVCVGSPGIPGTPGSHGLPGRDGRDGLKGDPGPPGPMGPPGEMPCPPGNDGLPGAPGIPGECGEKGEPGERGPPGLPAHLDEELQATLHDFRHQILQTRGALSLQGSIMTVGEKVFSSNGQSITFDAIQEACARAGGRIAVPRNPEENEAIASFVKKYNTYAYVGLTEGPSPGDFRYSDGTPVNYTNWYRGEPAGRGKEQCVEMYTDGQWNDRNCLYSRLTICEF

SEQ ID NO: 12170 - protein, 158 aa, Homo sapiens
MWLCPLALNLILMAASGAVCEVKDVCVGSPGIPGTPGSHGLPGRDGRDGLKGDPGPPGPMGPPGEMPCPPGNDGLPGAPGIPGECGEKGEPGERGPPGLPAHLDEELQATLHDFRHQILQTRGALSLQGSIMTVGEKVFSSNGQSITFDAIQEACARA

SEQ ID NO: 12171 - protein, 158 aa, Homo sapiens; identical to SEQ ID NO: 12170

SEQ ID NO: 12172 - protein, 248 aa, Homo sapiens
MWLCPLALNLILMAASGAVCEVKDVCVGSPGIPGTPGSHGLPGRDGRDGLKGDPGPPGPMGPPGEMPCPPGNDGLPGAPGIPGECGEKGEPGERGPPGLPAHLDEELQATLHDFRHQILQTRGALSLQGSIMTVGEKVFSSNGQSITFDAIQEACARAGGRIAVPRNPEENEAIASFVKKYNTYAYVGLTEGPSPGDFRYSDGTPVNYTNWYRGEPAGRGKEQCVEMYTDGQWNDRNCLYSRLTICEF

SEQ ID NO: 12173 - protein, 248 aa, Homo sapiens; identical to SEQ ID NO: 12172

SEQ ID NO: 12174 - protein, 38 aa, Homo sapiens
MRPCQVPGAATGPRAMWLCPLALTLILMAASGAACEVK

SEQ ID NO: 12175 - protein, 98 aa, Homo sapiens
MWLCPLALTLILMAASGAACEVKDVCVGSPGIPGTPGSHGLPGRDGRDGVKGDPGPPGPMGPPGETPCPPGNNGLPGAPGVPGERGEKGEAGERGPPG

SEQ ID NO: 12176 - protein, 158 aa, Homo sapiens
MWLCPLALTLILMAASGAACEVKDVCVGSPGIPGTPGSHGLPGRDGRDGVKGDPGPPGPMGPPGETPCPPGNNGLPGAPGVPGERGEKGEAGERGPPGLPAHLDEELQATLHDFRHQILQTRGALSLQGSIMTVGEKVFSSNGQSITFDAIQEACARA

SEQ ID NO: 12177 - protein, 248 aa, Homo sapiens
MWLCPLALTLILMAASGAACEVKDVCVGSPGIPGTPGSHGLPGRDGRDGVKGDPGPPGPMGPPGETPCPPGNNGLPGAPGVPGERGEKGEAGERGPPGLPAHLDEELQATLHDFRHQILQTRGALSLQGSIMTVGEKVFSSNGQSITFDAIQEACARAGGRIAVPRNPEENEAIASFVKKYNTYAYVGLTEGPSPGDFRYSDGTPVNYTNWYRGEPAGRGKEQCVEMYTDGQWNDRNCLYSRLTICEF

SEQ ID NO: 12178 - protein, 248 aa, Homo sapiens; identical to SEQ ID NO: 12177

SEQ ID NO: 12179 - protein, 381 aa, Homo sapiens
MAESHLLQWLLLLLPTLCGPGTAAWTTSSLACAQGPEFWCQSLEQALQCRALGHCLQEVWGHVGADDLCQECEDIVHILNKMAKEAIFQDTMRKFLEQECNVLPLKLLMPQCNQVLDDYFPLVIDYFQNQTDSNGICMHLGLCKSRQPEPEQEPGMSDPLPKPLRDPLPDPLLDKLVLPVLPGALQARPGPHTQDLSEQQFPIPLPYCWLCRALIKRIQAMIPKGALAVAVAQVCRVVPLVAGGICQCLAERYSVILLDTLLGRMLPQLVCRLVLRCSMDDSAGPRSPTGEWLPRDSECHLCMSVTTQAGNSSEQAIPQAMLQACVGSWLDREKCKQFVEQHTPQLLTLVPRGWDAHTTCQALGVCGTMSSPLQCIHSPDL

SEQ ID NO: 12180 - protein, 381 aa, Homo sapiens; identical to SEQ ID NO: 12179

SEQ ID NO: 12181 - protein, 393 aa, Homo sapiens
MHQAGYPGCRGAMAESHLLQWLLLLLPTLCGPGTAAWTTSSLACAQGPEFWCQSLEQALQCRALGHCLQEVWGHVGADDLCQECEDIVHILNKMAKEAIFQDTMRKFLEQECNVLPLKLLMPQCNQVLDDYFPLVIDYFQNQTDSNGICMHLGLCKSRQPEPEQEPGMSDPLPKPLRDPLPDPLLDKLVLPVLPGALQARPGPHTQDLSEQQFPIPLPYCWLCRALIKRIQAMIPKGALAVAVAQVCRVVPLVAGGICQCLAERYSVILLDTLLGRMLPQLVCRLVLRCSMDDSAGPRSPTGEWLPRDSECHLCMSVTTQAGNSSEQAIPQAMLQACVGSWLDREKCKQFVEQHTPQLLTLVPRGWDAHTTCQALGVCGTMSSPLQCIHSPDL

SEQ ID NO: 12182 - protein, 92 aa, Homo sapiens
  VARIANT 1: note = misc_feature - Xaa can be any naturally occurring amino acid
XEWLPRDSECHLCMSVTTQAGNSSEQAIPQAMLQACVGSWLDREKCKQFVEQHTPQLLTLVPRGWDAHTTCQALGVCGTMSSPLQCIHSPDL

SEQ ID NO: 12183 - protein, 374 aa, Homo sapiens
  VARIANT 1: note = misc_feature - Xaa can be any naturally occurring amino acid
XHLLQWLLLLLPTLCGPGTAAWTTSSLACAQGPEFWCQSLEQALQCRALGHCLQEVWGHVGADDLCQECEDIVHILNKMAKEAIFQDTMRKFLEQECNVLPLKLLMPQCNQVLDDYFPLVIDYFQNQTDSNGICMHLGLCKSRQPEPEQEPGMSDPLPKPLRDPLPDPLLDKLVLPVLPGALQARPGPHTQDLSEQQFPIPLPYCWLCRALIKRIQAMIPKGALAVAVAQVCRVVPLVAGGICQCLAERYSVILLDTLLGRMLPQLVCRLVLRCSMDDSAGPREWLPRDSECHLCMSVTTQAGNSSEQAIPQAMLQACVGSWLDREKCKQFVEQHTPQLLTLVPRGWDAHTTCQALGVCGTMSSPLQCIHSPDL

SEQ ID NO: 12184 - protein, 218 aa, Homo sapiens
MFLSTSKHGRQEAMLLFLLSALVLLTQPLGYLEAEMKTYSHRTMPSACTLVMCSSVESGLPGRDGRDGREGPRGEKGDPGLPGAAGQAGMPGQAGPVGPKGDNGSVGEPGPKGDTGPSGPPGPPGVPGPAGREGPLGKQGNIGPQGKPGPKGEAGPKGEVGAPGMQGSAGARGLAGPKGERGVPGERGVPGNTGAAGSAGAMGPQGSPGARGPPGLKG

SEQ ID NO: 12185 - protein, 375 aa, Homo sapiens
MLLFLLSALVLLTQPLGYLEAEMKTYSHRTMPSACTLVMCSSVESGLPGRDGRDGREGPRGEKGDPGLPGAAGQAGMPGQAGPVGPKGDNGSVGEPGPKGDTGPSGPPGPPGVPGPAGREGPLGKQGNIGPQGKPGPKGEAGPKGEVGAPGMQGSAGARGLAGPKGERGVPGERGVPGNTGAAGSAGAMGPQGSPGARGPPGLKGDKGIPGDKGAKGESGLPDVASLRQQVEALQGQVQHLQAAFSQYKKVELFPNGQSVGEKIFKTAGFVKPFTEAQLLCTQAGGQLASPRSAAENAALQQLVVAKNEAAFLSMTDSKTEGKFTYPTGESLVYSNWAPGEPNDDGGSEDCVEIFTNGKWNDRACGEKRLVVCEF

SEQ ID NO: 12186 - protein, 88 aa, Homo sapiens
MADTATTASAAAASAASASSDAPPFQLGKPRFQQTSFYGRFRHFLDIIDPRTLFVTEMESCTVPQAHCNPCLLGSETSQRGCAAAGGL

SEQ ID NO: 12187 - protein, 340 aa, Homo sapiens
MADTATTASAAAASAASASSDAPPFQLGKPRFQQTSFYGRFRHFLDIIDPRTLFVTERRLREAVQLLEDYKHGTLRPGVTNEQLWSAQKIKQAILHPDTNEKIFMPFRMSGYIPFGTPIVVGLLLPNQTLASTVFWQWLNQSHNACVNYANRNATKPSPASKFIQGYLGAVISAVSIAVGLNVLVQKANKFTPATRLLIQRFVPFPAVASANICNVVLMRYGELEEGIDVLDSDGNLVGSSKIAARHALLETALTRVVLPMPILVLPPIVMSMLEKTALLQARPRLLLPVQSLVCLAAFGLALPLAISLFPQMSEIETSQLEPEIAQATSSRTVVYNKGL

SEQ ID NO: 12188 - protein, 253 aa, Homo sapiens
MADTATTASAAAASAASASSDAPPFQLGKPRFQQTSFYGRFRHFLDIIDPRTLFVTERRLREAVQLLEDYKHGTLRPGVTNEQLWSAQKIKQAILHPDTNEKIFMPFRMSGYIPFGTPIVVGLLLPNQTLASTVFWQWLNQSHNACVNYANRNATKPSPASKFIQGYLGAVISAVSIAVGLNVLVQKANKFTPATRLLIQRFVPFPAVGRLSCRHAPGCSSLCKASCAWQPSAWPCRWPSASSRKCQRLKHPN

SEQ ID NO: 12189 - protein, 156 aa, Homo sapiens
MADTATTASAAAASAASASSDAPPFQLGKPRFQQTSFYGRFRHFLDIIDPRTLFVTERRLREAVQLLEDYKHGTLRPGVTNEQLWSAQKIKQVIFLLGRQFRSSLAQPDTGIHCLLWLNQSHNACVNYANRNATKPSPASKFIQGYLGAVISAVSI

SEQ ID NO: 12190 - protein, 252 aa, Homo sapiens
  VARIANT 1: note = misc_feature - Xaa can be any naturally occurring amino acid
XAASAASASSDAPPFQLGKPRFQQTSFYGRFRHFLDIIDPRTLFVTERRLREAVQLLEDYKHGTLRPGVTNEQLWSAQKIKQAILHPDTNEKIFMPFRMSGYIPFGTPIVVGLLLPNQTLASTVFWQWLNQSHNACVNYANRNATKPSPASKFIQGYLGAVISAVSIAVGLNVLVQKANKFTPATRLLIQRFVPFPAVGPAGDGADASGPAHAHPGATPDRHVHAGEIETSQLEPEIAQATSSRTVVYNKGL

SEQ ID NO: 12191 - protein, 196 aa, Homo sapiens
LRHSSGLLSSWVTAYNRDSFDTTRQRLVLEIGDPEGPLLPYQAEFLVRSHDAEEVLPSTPASRFLSALGGLWEPGELQLLNVTSALDRGGRVPLPIEGRKEGLKRDLATSDIQMVHHCTIHGNTEELRQMAASREVPRPLSTLPMFNVHTVVPGPALTSSSLLCPHHEWHIPPADSSSWPSWNPGSKQAGRGGGVG

SEQ ID NO: 12192 - protein, 65 aa, Homo sapiens
MAETLFWTPLLVGKLGPCSAGRPRMRGQDLGVFSWQGWGTPRPSRPRYTHLWAVSLCTPWTMRRF

SEQ ID NO: 12193 - protein, 263 aa, Homo sapiens
MAETLFWTPLLVVLLAGLGDTEAQQTTLHPLVGRVFVHTLDHETFLSLPEHVAVPPAVHITYHAHLQGHPDLPRWLRYTQRSPHHPGFLYGSATPEDRGLQVIEVTAYNRDSFDTTRQRLVLEIGDPEGPLLPYQAEFLVRSHDAEEVLPSTPASRFLSALGGLWEPGELQLLNVTSALDRGGRVPLPIEGRKEGLKRDLATSDIQMVHHCTIHGNTEELRQMAASREVPRPLSTLPMFNVHTGERLPPRVDSAQVPLILDQH

SEQ ID NO: 12194 - protein, 298 aa, Homo sapiens
MAETLFWTPLLVVLLAGLGDTEAQQTTLHPLVGRVFVHTLDHETFLSLPEHVAVPPAVHITYHAHLQGHPDLPRWLRYTQRSPHHPGFLYGSATPEDRGLQVIEVTAYNRDSFDTTRQRLVLEIGDPEGPLLPYQAEFLVRSHDAEEVLPSTPASRFLSALGGLWEPGELQLLNVTSALDRGGRVPLPIEGRKEGVYIKVGSASPFSTCLKMVASPDSHARCAQGQPPLLSCYDTLAPHFRVDWCNVTLAEERPGYLRHPDGPPLHHPREHRGAAADGGQPRGAPATLHPAHVQCAHR

SEQ ID NO: 12195 - protein, 387 aa, Homo sapiens
MAETLFWTPLLVVLLAGLGDTEAQQTTLHPLVGRVFVHTLDHETFLSLPEHVAVPPAVHITYHAHLQGHPDLPRWLRYTQRSPHHPGFLYGSATPEDRGLQVIEVTAYNRDSFDTTRQRLVLEIGDPEGPLLPYQAEFLVRSHDAEEVLPSTPASRFLSALGGLWEPGELQLLNVTSALDRGGRVPLPIEGRKEGVYIKVGSASPFSTCLKMVASPDSHARCAQGQPPLLSCYDTLAPHFRVDWCNVTLVDKSVPEPADEVPTPGDGILEHDPFFCPPTEAPDRDFLVDALVTLLVPLLVALLLTLLLAYVMCCRREGRLKRDLATSDIQMVHHCTIHGNTEELRQMAASREVPRPLSTLPMFNVHTGERLPPRVDSAQVPLILDQH

SEQ ID NO: 12196 - protein, 61 aa, Homo sapiens
MAETLFWTPLLVVLLAGLGDTEAQQTTLHPLVGRVFVHTLDHETFLSLPEHVGHSLQSGQL

SEQ ID NO: 12197 - protein, 58 aa, Homo sapiens
  VARIANT 1: note = misc_feature - Xaa can be any naturally occurring amino acid
XCPTRCPHHLPRPPPGTPRPAPVAPLHPAQPPPPWLPLRLCHPRRSWAPGHSLQSGQL

SEQ ID NO: 12198 - protein, 160 aa, Homo sapiens
  VARIANT 1: note = misc_feature - Xaa can be any naturally occurring amino acid
XLDRGGRVPLPIEGRKEGVYIKVDKSVPEPADEVPTPGDGILEHDPFFCPPTEAPDRDFLVDALVTLLVPLLVALLLTLLLAYVMCCRREGRLKRDLATSDIQMVHHCTIHGNTEELRQMAASREVPRPLSTLPMFNVHTGERLPPRVDSAQVPLILDQH

SEQ ID NO: 12199 - protein, 108 aa, Homo sapiens
MSCPVPACCALLLVLGLCRARPRNALLLLADDGGFESGAYNNSAIATPHLDALARRSLLFRNAFTSVSSCSPSRASLLTGLPQAFLPLRRLPRPPPLWALPAPVRNLL

SEQ ID NO: 12200 - protein, 227 aa, Homo sapiens
MSCPVPACCALLLVLGLCRARPRNALLLLADDGGFESGAYNNSAIATPHLDALARRSLLFRNAFTSVSSCSPSRASLLTGLPQASSGRSTWGRRPCTRLTLRTRRRMAPSSRWGGTSLELSCSSGNSCRLRMTGLSSSTSPSTTPTAVGTPSPSTEPSVRSLATERAAWVVSQTGPPRPTTHWTCWCLTSSPTPRQPEPTWPLSTPPSAAWTKELDWCSRSCVTPVS

SEQ ID NO: 12201 - protein, 502 aa, Homo sapiens
MSCPVPACCALLLVLGLCRARPRNALLLLADDGGFESGAYNNSAIATPHLDALARRSLLFRNAFTSVSSCSPSRASLLTGLPQHQNGMYGLHQDVHHFNSFDKVRSLPLLLSQAGVRTGIIGKKHVGPETVYPFDFAYTEENGSVLQVGRNITRIKLLVRKFLQTQDDRPFFLYVAFHDPHRCGHSQPQYGTFCEKFGNGESGMGRIPDWTPQAYDPLDVLVPYFVPNTPAARADLAAQYTTVGRMDQGVGLVLQELRDAGVLNDTLVIFTSDNGIPFPSGRTNLYWPGTAEPLLVSSPEHPKRWGQVSEAYVSLLDLTPTILDWFSIPYPSYAIFGSKTIHLTGRSLLPALEAEPLWATVFGSQSHHEVTMSYPMRSVQHRHFRLVHNLNFKMPFPIDQDFYVSPTFQDLLNRTTAGQPTGWYKDLRHYYYRARWELYDRSRDPHETQNLATDPRFAQLLEMLRDQLAKWQWETHDPWVCAPDGVLEEKLSPQCQPLHNEL

SEQ ID NO: 12202 - protein, 188 aa, Homo sapiens [sequence omitted]

SEQ ID NO: 12203 - protein, 274 aa, Homo sapiens
MSCPVPACCALLLVLGLCRARPRNALLLLADRALSVSHLTQRMTEALRVARTTTAPSPPRTWTPWPAAASSFAMPSPRSAAALPAAPASSLACPSIRMGCTGCTRTCTTSTPSTRCGACRCCSAKLVCAQASSGRSTWGRRPCTRLTLRTRRRMAPSSRWGGTSLELSCSSGNSCRLRMTGLSSSTSPSTTPTAVGTPSPSTEPSVRSLATERAAWVVSQTGPPRPTTHWTCWCLTSSPTPRQPEPTWPLSTPPSAAWTKELDWCSRSCVTPVS

SEQ ID NO: 12204 - protein, 110 aa, Homo sapiens
MYGLHQDVHHFNSFDKVRSLPLLLSQAGVRTGIIGKKHVGPETVYPFDFAYTEENGSVLQVGRNITRIKLLVRKFLQTQDDRPFFLYVAFHDPHRCGHSQPQYGTFCEKF

SEQ ID NO: 12205 - protein, 67 aa, Homo sapiens
VIFTSDNGIPFPSGRTNLYWPGTAEPLLVSSPEHPKRWGQVSEAYVSLLEEKNEAQRGEVSCSGLHS

SEQ ID NO: 12206 - protein, 106 aa, Homo sapiens
  VARIANT 1: note = misc_feature - Xaa can be any naturally occurring amino acid
XARPRNALLLLADDGGFESGAYNNSAIATPHLDALARRSLLFRNAFTSVSSCSPSRASLLTGLPQHQNGMYGLHQDVHHFNSFDKVRSLPLLLSQAGVRTGGAEHH

SEQ ID NO: 12207 - protein, 194 aa, Homo sapiens
  VARIANT 1: note = misc_feature - Xaa can be any naturally occurring amino acid
XFDFAYTEENGSVLQVGRNITRIKLLVRKFLQTQDDRPFFLYVAFHDPHRCGHSQPQYGTFCEKFGNGESGMGRIPDWTPQAYDPLDVLVPYFVPNTPAARADLAAQYTTVGRMDQGVGLVLQELRDAGVLNDTLVIFTSDNGIPFPSGRTNLYWPGTAEPLLVSSPEHPKRWGQVSEAYVSLLVTRLLLPTVK

SEQ ID NO: 12208 - protein, 882 aa, Homo sapiens
MLLGASWLCASKAAAAAAQSEGDEDRPGERRRRRAAATAAGAGEDMDESSLLDLLECSVCLERLDTTAKVLPCQHTFCRRCLESIVCSRHELRCPECRILVGCGVDELPANILLVRLLDGIRQRPRAGTSPGGSPPARPIPGQSAAPTLAGGGGGAAGSTPGSPVFLSAAAGSTAGSLRELATSRTAPAAKNPCLLPYGKALYSYEGKEPGDLKFNKGDIIVLRRKVDEQWYHGELHGTQGFLPASYIQCIQPLPHAPPQGKALYDFEMKDKDQDKDCLTFTKDEILTVLRRVDENWAEGMLGDKIGIFPLLYVELNDSAKQLIEMDKPCPAAASSCNASLPSDSGAVASVAPSPTLSSSGAVSAFQRRVDGKKNTKKRHSFTALSVTHRSSQAASHRHSMEISAPVLISSSDPRAAARIGDLAHLSCAAPTQDVSSSAGSTPTAVPRAASVSGEQGTPPKVQLPLNVYLALYAYKPQKSDELELHKGEMYRVLEKCQDGWFKGASLRTGVSGVFPGNYVTPVSRVPAGGAGPPRNNVVGGSPLAKGITTTMHPGSGSLSSLATATRPALPITTPQAHAQHPTASPPTGSCLRHSAQPTASQARSTISTAAHSAAQAQDRPTATVSPLRTQNSPSRLPATSLRPHSVVSPQHSHQPPVQMCPRPAIPLTSAASAITPPNVSAANLNGEAGGGPIGVLSTSSPTNTGCKLDEKKSEKKEKKSGLLKLLAGASTKKKSRSPPSVSPTHDPQVAVDALLQGAVGPEVSSLSIHGRAGSCPIESEMQGAMGMEPLHRKAGSLDLNFTSPSRQAPLSMAAIRPEPKLLPRERYRVVVSYPPQSEAEIELKEGDIVFVHKKREDGWYKGTLQRNGRTGLFPGSFVESF

SEQ ID NO: 12209 - protein, 181 aa, Homo sapiens
MESRGPLATSRLLLLLLLLLLRHTRQGWALRPVLPTQSAHDPPAVHLSNGPGQEPIAVMTFDLTKITKTSSSFEVRTWDPEGVIFYGDTNPKDDWFMLGLRDGRPEIQLHNHWAQLTVGAAPETGLWAPDQQTPSHHEDCAWGAALPRFQPSVAAGSCPGWLPAPGFLAGQTGRDLSICPH

SEQ ID NO: 12210 - protein, 384 aa, Homo sapiens
MESRGPLATSRLLLLLLLLLLRHTRQGWALRPVLPTQSAHDPPAVHLSNGPGQEPIAVMTFDLTKITKTSSSFEVRTWDPEGVIFYGDTNPKDDWFMLGLRDGRPEIQLHNHWAQLTVGAGPRLDDGRWHQVEVKMEGDSVLLEVDGEEVLRLRQVSGPLTSKRHPIMRIALGGLLFPASNLRLPAEISASAPTSLRSCDVESNPGIFLPPGTQAEFNLRDIPQPHAEPWAFSLDLGLKQAAGSGHLLALGTPENPSWLSLHLQDQKVVLSSGSGPGLDLPLVLGLPLQLKLSMSRVVLSQGSKMKALALPPLGLAPLLNLWAKPQGRLFLGALPGEDSSTSFCLNGLWAQGQRLDVDQALNRSHEIWTHSCPQSPGNGTDASH

SEQ ID NO: 12211 - protein, 402 aa, Homo sapiens
MESRGPLATSRLLLLLLLLLLRHTRQGWALRPVLPTQSAHDPPAVHLSNGPGQEPIAVMTFDLTKITKTSSSFEVRTWDPEGVIFYGDTNPKDDWFMLGLRDGRPEIQLHNHWAQLTVGAGPRLDDGRWHQVEVKMEGDSVLLEVDGEEVLRLRQVSGPLTSKRHPIMRIALGGLLFPASNLRLPLVPALDGCLRRDSWLDKQAEISASAPTSLRSCDVESNPGIFLPPGTQAEFNLRDIPQPHAEPWAFSLDLGLKQAAGSGHLLALGTPENPSWLSLHLQDQKVVLSSGSGPGLDLPLVLGLPLQLKLSMSRVVLSQGSKMKALALPPLGLAPLLNLWAKPQGRLFLGALPGEDSSTSFCLNGLWAQGQRLDVDQALNRSHEIWTHSCPQSPGNGTDASH

SEQ ID NO: 12212 - protein, 293 aa, Homo sapiens
MESRGPLATSRLLLLLLLLLLRHTRQGWALRPVLPTQSAHDPPAVHLSNGPGQEPIAVMTFDLTKITKTSSSFEVRTWDPEGVIFYGDTNPKDDWFMLGLRDGRPEIQLHNHWAQLTVGAGPRLDDGRWHQVEVKMEGDSVLLEVDGEEVLRLRQVSGPLTSKRHPIMRIALGGLLFPASNLRLPLVPALDGCLRRDSWLDKQAEISASAPTSLRSCDVESNPGIFLPPGTQAEFNLRDIPQPHAEPWAFSLDLGLKQAAGSGHLLALGTPENPSWLSLHLQDQEKTLPPLFA

SEQ ID NO: 12213 - protein, 287 aa, Homo sapiens
MESRGPLATSRLLLLLLLLLLRHTRQGWALRPVLPTQSAHDPPAVHLSNGPGQEPIAVMTFDLTKITKTSSSFEVRTWDPEGVIFYGDTNPKDDWFMLGLRDGRPEIQLHNHWAQLTVGAGPRLDDGRWHQVEVKMEGDSVLLEVDGEEVLRLRQVSGPLTSKRHPIMRIALGGLLFPASNLRLPLVPALDGCLRRDSWLDKQAEISASAPTSLRSCDVESNPGIFLPPGTQAEFNLRGEDSSTSFCLNGLWAQGQRLDVDQALNRSHEIWTHSCPQSPGNGTDASH

SEQ ID NO: 12214 - protein, 57 aa, Homo sapiens
MESRGPLATSRLLLLLLLLLLRHTRQGWALRPVLPTQVQERDRALSSCSLPFSPLAL

SEQ ID NO: 12215 - protein, 82 aa, Homo sapiens
MTFDLTKITKTSSSFEVRTWDPEGVIFYGDTNPKDDWFMLGLRDGRPEIQLHNHWAQLTVGAGPRLDDGRWHQEKTLPPLFA

SEQ ID NO: 12216 - protein, 181 aa, Homo sapiens
MTFDLTKITKTSSSFEVRTWDPEGVIFYGDTNPKDDWFMLGLRDGRPEIQLHNHWAQLTVGAGPRLDDGRWHQLVPALDGCLRRDSWLDKQAEISASAPTSLRSCDVESNPGIFLPPGTQAEFNLRDIPQPHAEPWAFSLDLGLKQAAGSGHLLALGTPENPSWLSLHLQDQEKTLPPLFA

SEQ ID NO: 12217 - protein, 290 aa, Homo sapiens
MTFDLTKITKTSSSFEVRTWDPEGVIFYGDTNPKDDWFMLGLRDGRPEIQLHNHWAQLTVGAGPRLDDGRWHQLVPALDGCLRRDSWLDKQAEISASAPTSLRSCDVESNPGIFLPPGTQAEFNLRDIPQPHAEPWAFSLDLGLKQAAGSGHLLALGTPENPSWLSLHLQDQKVVLSSGSGPGLDLPLVLGLPLQLKLSMSRVVLSQGSKMKALALPPLGLAPLLNLWAKPQGRLFLGALPGEDSSTSFCLNGLWAQGQRLDVDQALNRSHEIWTHSCPQSPGNGTDASH

SEQ ID NO: 12218 - protein, 175 aa, Homo sapiens
MTFDLTKITKTSSSFEVRTWDPEGVIFYGDTNPKDDWFMLGLRDGRPEIQLHNHWAQLTVGAGPRLDDGRWHQLVPALDGCLRRDSWLDKQAEISASAPTSLRSCDVESNPGIFLPPGTQAEFNLRGEDSSTSFCLNGLWAQGQRLDVDQALNRSHEIWTHSCPQSPGNGTDASH

SEQ ID NO: 12219 - protein, 93 aa, Homo sapiens
MTFDLTKITKTSSSFEVRTWDPEGVIFYGDTNPKDDWFMLGLRDGRPEIQLHNHWAQLTVGAGPRLDDGRWHQVEVKMEGDSVLLEVDGEEVL

SEQ ID NO: 12220 - protein, 235 aa, Homo sapiens
MTFDLTKITKTSSSFEVRTWDPEGVIFYGDTNPKDDWFMLGLRDGRPEIQLHNHWAQLTVGAGPRLDDGRWHQVEVKMEGDSVLLEVDGEEVLRLRQVSGPLTSKRHPIMRIALGGLLFPASNLRLPLVPALDGCLRRDSWLDKQAEISASAPTSLRSCDVESNPGIFLPPGTQAEFNLRDIPQPHAEPWAFSLDLGLKQAAGSGHLLALGTPENPSWLSLHLQDQEKTLPPLFA

SEQ ID NO: 12221 - protein, 344 aa, Homo sapiens
MTFDLTKITKTSSSFEVRTWDPEGVIFYGDTNPKDDWFMLGLRDGRPEIQLHNHWAQLTVGAGPRLDDGRWHQVEVKMEGDSVLLEVDGEEVLRLRQVSGPLTSKRHPIMRIALGGLLFPASNLRLPLVPALDGCLRRDSWLDKQAEISASAPTSLRSCDVESNPGIFLPPGTQAEFNLRDIPQPHAEPWAFSLDLGLKQAAGSGHLLALGTPENPSWLSLHLQDQKVVLSSGSGPGLDLPLVLGLPLQLKLSMSRVVLSQGSKMKALALPPLGLAPLLNLWAKPQGRLFLGALPGEDSSTSFCLNGLWAQGQRLDVDQALNRSHEIWTHSCPQSPGNGTDASH

SEQ ID NO: 12222 - protein, 344 aa, Homo sapiens; identical to SEQ ID NO: 12221

SEQ ID NO: 12223 - protein, 229 aa, Homo sapiens
MTFDLTKITKTSSSFEVRTWDPEGVIFYGDTNPKDDWFMLGLRDGRPEIQLHNHWAQLTVGAGPRLDDGRWHQVEVKMEGDSVLLEVDGEEVLRLRQVSGPLTSKRHPIMRIALGGLLFPASNLRLPLVPALDGCLRRDSWLDKQAEISASAPTSLRSCDVESNPGIFLPPGTQAEFNLRGEDSSTSFCLNGLWAQGQRLDVDQALNRSHEIWTHSCPQSPGNGTDASH

SEQ ID NO: 12224 - protein, 113 aa, Homo sapiens
WALRPVLPTQSAHDPPAVHLSNGPGQEPIAVMTFDLTKITKTSSSFEVRTWDPEGVIFYGDTNPKDDWFMLGLRDGRPEIQLHNHWAQLTVGAGPRLDDGRWHQEKTLPPLFA

SEQ ID NO: 12225 - protein, 212 aa, Homo sapiens
WALRPVLPTQSAHDPPAVHLSNGPGQEPIAVMTFDLTKITKTSSSFEVRTWDPEGVIFYGDTNPKDDWFMLGLRDGRPEIQLHNHWAQLTVGAGPRLDDGRWHQLVPALDGCLRRDSWLDKQAEISASAPTSLRSCDVESNPGIFLPPGTQAEFNLRDIPQPHAEPWAFSLDLGLKQAAGSGHLLALGTPENPSWLSLHLQDQEKTLPPLFA

SEQ ID NO: 12226 - protein, 206 aa, Homo sapiens
WALRPVLPTQSAHDPPAVHLSNGPGQEPIAVMTFDLTKITKTSSSFEVRTWDPEGVIFYGDTNPKDDWFMLGLRDGRPEIQLHNHWAQLTVGAGPRLDDGRWHQLVPALDGCLRRDSWLDKQAEISASAPTSLRSCDVESNPGIFLPPGTQAEFNLRGEDSSTSFCLNGLWAQGQRLDVDQALNRSHEIWTHSCPQSPGNGTDASH

SEQ ID NO: 12227 - protein, 260 aa, Homo sapiens
WALRPVLPTQSAHDPPAVHLSNGPGQEPIAVMTFDLTKITKTSSSFEVRTWDPEGVIFYGDTNPKDDWFMLGLRDGRPEIQLHNHWAQLTVGAGPRLDDGRWHQVEVKMEGDSVLLEVDGEEVLRLRQVSGPLTSKRHPIMRIALGGLLFPASNLRLPLVPALDGCLRRDSWLDKQAEISASAPTSLRSCDVESNPGIFLPPGTQAEFNLRGEDSSTSFCLNGLWAQGQRLDVDQALNRSHEIWTHSCPQSPGNGTDASH

SEQ ID NO: 12228 - protein, 495 aa, Homo sapiens
MQWSPTPGASACLGWASSLACSTAPTLLGRAGRGPLMAAKWFKEFPLNLKTVSERAKPGGGGGKLRKNSEAGGAGPGPGKGRKNSAAELGSGRAGVGPKDSRLSRDSLQGLIQAAAGKGRKNSRATEEEPHRGATKSSGCSTYINRLIKVDTQEKNGKSNYPSSSSSSSSSSSSASSSPSSLGPELDKGKIIKQQETVIILEDYADPYDAKRTKGQRDAERVGENDGYMEPYDAQQMITEIRRRGSKDPLVKALQLLDSPCEPADGGLKSETLAKRRSSKDLLGKPPQLYDTPYEPAEGGPRAEGKARPPDSRLPENDERPAAEYEQPWEWKKEQIVRALSVQFEGAERPSFREETVRQHHRQKSWTQKILKPALSDHSEGEKVDPGLPLEKQPWYHGAISRAEAESRLQPCKEAGYLVRNSESGNSRYSIALKTSQGCVHIIVAQTKDNKYTLNQTSAVFDSIPEVVHYYSNEKLPFKGAEHMTLLYPVHSKLH

SEQ ID NO: 12229 - protein, 132 aa, Homo sapiens
  VARIANT 1: note = misc_feature - Xaa can be any naturally occurring amino acid
XEGKARPPDSRLPENDERPAAEYEQPWEWKKEQIVRALSVQFEGAERPSFREETVRQHHRQKSWTQKILKPALSDHSEGEKVDPGLPLEKQPWYHGAISRAEAESRLQPCKEAGYLVRNSESGNSRYSIALK

SEQ ID NO: 12230 - protein, 41 aa, Homo sapiens
  VARIANT 1: note = misc_feature - Xaa can be any naturally occurring amino acid
XSRAEAESRLQPCKEAGYLVRNSESGNSRYSIALKNHHLLS

SEQ ID NO: 12231 - protein, 462 aa, Homo sapiens
MLLLARCLLLVLVSSLLVCSGLACGPGRGFGKRRHPKKLTPLAYKQFIPNVAEKTLGASGRYEGKISRNSERFKELTPNYNPDIIFKDEENTGADRLMTQRCKDKLNALAISVMNQWPGVKLRVTEGWDEDGHHSEESLHYEGRAVDITTSDRDRSKYGMLARLAVEAGFDWVYYESKAHIHCSVKAENSVAAKSGGCFPGSATVHLEQGGTKLVKDLSPGDRVLAADDQGRLLYSDFLTFLDRDDGAKKVFYVIETREPRERLLLTAAHLLFVAPHNDSATGEPEASSGSGPPSGGALGPRALFASRVRPGQRVYVVAERDGDRRLLPAAVHSVTLSEEAAGAYAPLTAQGTILINRVLASCYAVIEEHSWAHRAFAPFRLAHALLAALAPARTDRGGDSGGGDRGGGGGRVALTAPGAADAPGAGATAGIHWYSQLLYQIGTWLLDSEALHPLGMAVKSS

SEQ ID NO: 12232 - protein, 126 aa, Homo sapiens
MLSLFPSPGPGSSRCKDKLNALAISVMNQWPGVKLRVTEGWDEDGHHSEESLHYEGRAVDITTSDRDRSKYGMLARLAVEAGFDWVYYESKAHIHCSVKAGGQQVPGWCLQSRRKCDGFCSFDSSV

SEQ ID NO: 12233 - protein, 169 aa, Homo sapiens
MLSLFPSPGPGSSRCKDKLNALAISVMNQWPGVKLRVTEGWDEDGHHSEESLHYEGRAVDITTSDRDRSKYGMLARLAVEAGFDWVYYESKAHIHCSVKAGKERKPLLRDTRYRASRGCSPAPPGRGADFSFRVDGAKSLCKMYAWWLLPASLMTKCISIPVKTCITMY

SEQ ID NO: 12234 - protein, 123 aa, Homo sapiens
MLSLFPSPGPGSSRCKDKLNALAISVMNQWPGVKLRVTEGWDEDGHHSEESLHYEGRAVDITTSDRDRSKYGMLARLAVEAGFDWVYYESKAHIHCSVKAVQSDFKSVESEPEAPGTAAPLAV

SEQ ID NO: 12235 - protein, 262 aa, Homo sapiens
KFPLRMKDNDLLVSELYRDPAEDGVTALSVYLTPKTSDSGNWIEIAYGTSSGGVRVIVQHPETVGSGPQLFQTFTVHRSPVTKIMLSEKHLISVCADNNHVRTWSVTRFRGMISTQPGSTPLASFKILALESADGHGGCSAGNDIGGLTEQELMEQLEHCELAPPAPSAPSWGCLPSPSPRISLTSLHSASSNTSLSGHRGSPSPPQAEARRRGGGSFVERCQELVRSGPDLRRPPTPAPWPSSGLGTPLTPPKMKLNETSF

SEQ ID NO: 12236 - protein, 141 aa, Homo sapiens
MAAAATAAEGVPSRGPPGEVIHLNVGGKRFSTSRQTLTWIPDSFFSSLLSGRISTLKDETGAIFIDRDPTVFAPILNFLRTKELDPRGVHGSSLLHEAQFYGLTPLVLLLQFVACSFERSWIDLLVETSSSMVTCRHQCSQ

SEQ ID NO: 12237 - protein, 707 aa, Homo sapiens
MAAAATAAEGVPSRGPPGEVIHLNVGGKRFSTSRQTLTWIPDSFFSSLLSGRISTLKDETGAIFIDRDPTVFAPILNFLRTKELDPRGVHGSSLLHEAQFYGLTPLVRRLQLREELDRSSCGNVLFNGYLPPPVFPVKRRNRHSLVGPQQLGGRPAPVRRSNTMPPNLGNAGLLGRMLDEKTPPSPSGQPEEPGMVRLVCGHHNWIAVAYTQFLVCYRLKEASGWQLVFSSPRLDWPIERLALTARVHGGALGEHDKMVAAATGSEILLWALQAEGGGSEIGVFHLGVPVEALFFVGNQLIATSHTGRIGVWNAVTKHWQVQEVQPITSYDAAGSFLLLGCNNGSIYYVDVQKFPLRMKDNDLLVSELYRDPAEDGVTALSVYLTPKTSDSGNWIEIAYGTSSGGVRVIVQHPETVGSGPQLFQTFTVHRSPVTKIMLSEKHLISVCADNNHVRTWSVTRFRGMISTQPGSTPLASFKILALESADGHGGCSAGNDIGPYGERDDQQVFIQKVVPSASQLFVRLSSTGQRVCSVRSVDGSPTTAFTVLECEGSRRLGSRPRRYLLTGQANGSLAMWDLTTAMDGLGQAPAGGLTEQELMEQLEHCELAPPAPSAPSWGCLPSPSPRISLTSLHSASSNTSLSGHRGSPSPPQAEARRRGGGSFVERCQELVRSGPDLRRPPTPAPWPSSGLGTPLTPPKMKLNETSF

SEQ ID NO: 12238 - protein, 682 aa, Homo sapiens
MAAAATAAEGVPSRGPPGEVIHLNVGGKRFSTSRQTLTWIPDSFFSSLLSGRISTLKDETGAIFIDRDPTVFAPILNFLRTKELDPRGVHGSSLLHEAQFYGLTPLVRRLQLREELDRSSCGNVLFNGYLPPPVFPVKRRNRHSLVGPQQLGGRPAPVRRSNTMPPNLGNAGLLGRMLDEKTPPSPSGQPEEPGMVRLVCGHHNWIAVAYTQFLVCYRLKEASGWQLVFSSPRLDWPIERLALTARVHGGALGEHDKMVAAATGSEILLWALQAEGGGSEIGRIGVWNAVTKHWQVQEVQPITSYDAAGSFLLLGCNNGSIYYVDVQKFPLRMKDNDLLVSELYRDPAEDGVTALSVYLTPKTSDSGNWIEIAYGTSSGGVRVIVQHPETVGSGPQLFQTFTVHRSPVTKIMLSEKHLISVCADNNHVRTWSVTRFRGMISTQPGSTPLASFKILALESADGHGGCSAGNDIGPYGERDDQQVFIQKVVPSASQLFVRLSSTGQRVCSVRSVDGSPTTAFTVLECEGSRRLGSRPRRYLLTGQANGSLAMWDLTTAMDGLGQAPAGGLTEQELMEQLEHCELAPPAPSAPSWGCLPSPSPRISLTSLHSASSNTSLSGHRGSPSPPQAEARRRGGGSFVERCQELVRSGPDLRRPPTPAPWPSSGLGTPLTPPKMKLNETSF

SEQ ID NO: 12239 - protein, 102 aa, Homo sapiens
MAAAATAAEGVPSRGPPGEVIHLNVGGKRFSTSRQTLTWIPDSFFSSLLSGRISTLKDETGAIFIDRDPTVFAPILNFLRTKELDPRLAWKKGRESLTVFSP

SEQ ID NO: 12240 - protein, 88 aa, Homo sapiens
MAAAATAAEGVPSRGPPGEVIHLNVGGKRFSTSRQTLTWIPDSFFSSLLSGRISTLKDETGAIFIDRDPTVFAPILNFLRTKELDPRP

SEQ ID NO: 12241 - protein, 37 aa, Homo sapiens
MRPEQSSSTGTLQSSPPSSTSCAPKSWIPAFSVHPHT

SEQ ID NO: 12242 - protein, 131 aa, Homo sapiens
MRPEQSSSTGTLQSSPPSSTSCAPKSWIPVRRLQLREELDRSSCGNVLFNGYLPPPVFPVKRRNRHSLVGPQQLGGRPAPVRRSNTMPPNLGNAGLLGRMLDEKTPPSPSGQPEEPGMVRLVCGHHNWIAV

SEQ ID NO: 12243 - protein, 277 aa, Homo sapiens
RSPVTKIMLSEKHLISVCADNNHVRTWSVTRFRGMISTQPGSTPLASFKILALESADGHGGCSAGNDIGPYGERDDQQVFIQKVVPSASQLFVRLSSTGQRVCSVRSVDGSPTTAFTVLECEGSRRLGSRPRRYLLTGQANGSLAMWDLTTAMDGLGQAPGGLTEQELMEQLEHCELAPPAPSAPSWGCLPSPSPRISLTSLHSASSNTSLSGHRGSPSPPQAEARRRGGGSFVERCQELVRSGPDLRRPPTPAPWPSSGLGTPLTPPKMKLNETSF

SEQ ID NO: 12244 - protein, 610 aa, Homo sapiens
  VARIANT 1: note = misc_feature - Xaa can be any naturally occurring amino acid
XAAEGVPSRGPPGEVIHLNVGGKRFSTSRQTLTWIPDSFFSSLLSGRISTLKDETGAIFIDRDPTVFAPILNFLRTKELDPRGVHGSSLLHEAQFYGLTPLVRRLQLREELDRSSCGNVLFNGYLPPPVFPVKRRNRHSLVGPQQLGGRPAPVRRSNTMPPNLGNAGLLGRMLDEKTPPSPSGQPEEPGMVRLVCGHHNWIAVAYTQFLVCYRLKEASGWQLVFSSPRLDWPIERLALTARVHGGALGEHDKMVAAATGSEILLWALQAEGGGSEIGVFHLGVPVEALFFVGNQLIATSHTGRIGVWNAVTKHWQVQEVQPITSYDAAGSFLLLGCNNGSIYYVDVQKFPLRMKDNDLLVSELYRDPAEDGVTALSVYLTPKTSDSGNWIEIAYGTSSGGVRVIVQHPETVGSGPQLFQTFTVHRSPVTKIMLSEKHLISVCADNNHVRTWSVTRFRGMISTQPGSTPLASFKILALESADGHGGCSAGNDIAGGLTEQELMEQLEHCELAPPAPSAPSWGCLPSPSPRISLTSLHSASSNTSLSGHRGSPSPPQAEARRRGGGSFVERCQELVRSGPDLRRPPTPAPWPSSGLGTPLTPPKMKLNETSF

SEQ ID NO: 12245 - protein, 175 aa, Homo sapiens
  VARIANT 1: note = misc_feature - Xaa can be any naturally occurring amino acid
XDSGNWIEIAYGTSSGGVRVIVQHPETVGSGPQLFQTFTVHRSPVTKIMLSEKHLISAGGLTEQELMEQLEHCELAPPAPSAPSWGCLPSPSPRISLTSLHSASSNTSLSGHRGSPSPPQAEARRRGGGSFVERCQELVRSGPDLRRPPTPAPWPSSGLGTPLTPPKMKLNETSF

SEQ ID NO: 12246 - protein, 250 aa, Homo sapiens
  VARIANT 1: note = misc_feature - Xaa can be any naturally occurring amino acid
XELYRDPAEDGVTALSVYLTPKTSDSGNWIEIAYGTSSGGVRVIVQHPETVGSGPQLFQTFTVHRSPVTKIMLSEKHLISVCADNNHVRTWSVTRFRGMISTQPGSTPLASFKILALESADGHGGCSAGNDIAGGLTEQELMEQLEHCELAPPAPSAPSWGCLPSPSPRISLTSLHSASSNTSLSGHRGSPSPPQAEARRRGGGSFVERCQELVRSGPDLRRPPTPAPWPSSGLGTPLTPPKMKLNETSF

SEQ ID NO: 12247 - protein, 129 aa, Homo sapiens
  VARIANT 1: note = misc_feature - Xaa can be any naturally occurring amino acid
XGSGPQLFQTFTVHRSPVTKIMLSEKHLISVCADNNHVRTWSVTRFRGMISTQPGSTPLASFKILALESADGHGGCSAGNDIGPYGERDDQQVFIQKVVPSASQLFVRLSSTGQRWPDGARADGTAGTL

SEQ ID NO: 12248 - protein, 299 aa, Homo sapiens
  VARIANT 1: note = misc_feature - Xaa can be any naturally occurring amino acid
XGSIYYVDVQKFPLRMKDNDLLVSELYRDPAEDGVTALSVYLTPKTICADNNHVRTWSVTRFRGMISTQPGSTPLASFKILALESADGHGGCSAGNDIGPYGERDDQQVFIQKVVPSASQLFVRLSSTGQRVCSVRSVDGSPTTAFTVLECEGSRRLGSRPRRYLLTGQANGSLAMWDLTTAMDGLGQAPAGGLTEQELMEQLEHCELAPPAPSAPSWGCLPSPSPRISLTSLHSASSNTSLSGHRGSPSPPQAEARRRGGGSFVERCQELVRSGPDLRRPPTPAPWPSSGLGTPLTPP

SEQ ID NO: 12249 - protein, 164 aa, Homo sapiens
  VARIANT 1: note = misc_feature - Xaa can be any naturally occurring amino acid
XQMGMAAAVLAMTLAPTVSGTTSKCSSRRWCPVPASSSCVSHLLGSAGGLTEQELMEQLEHCELAPPAPSAPSWGCLPSPSPRISLTSLHSASSNTSLSGHRGSPSPPQAEARRRGGGSFVERCQELVRSGPDLRRPPTPAPWPSSGLGTPLTPPKMKLNETSF

SEQ ID NO: 12250 - protein, 143 aa, Homo sapiens
  VARIANT 1: note = misc_feature - Xaa can be any naturally occurring amino acid
XTSKCSSRRWCPVPASSSCVSHLLGSGGLTEQELMEQLEHCELAPPAPSAPSWGCLPSPSPRISLTSLHSASSNTSLSGHRGSPSPPQAEARRRGGGSFVERCQELVRSGPDLRRPPTPAPWPSSGLGTPLTPPKMKLNETSF

SEQ ID NO: 12251 - protein, 523 aa, Homo sapiens
MVAPGLVLGLVLPLILWADRSAGIGFRFASYINNDMVLQKEPAGAVIWGFGTPGATVTVTLRQGQETIMKKVTSVKAHSDTWMVVLDPMKPGGPFEVMAQQTLEKINFTLRVHDVLFGDVWLCSGQSNMQMTVLQIFNATRELSNTAAYQSVRILSVSPIQAEQELEDLVAVDLQWSKPTSENLGHGYFKYMSAVCWLFGRHLYDTLQYPIGLIASSWGGTPIEAWSSGRSLKACGVPKQGSIPYDSVTGPSKHSVLWNAMIHPLCNMTLKGVVWYQGESNINYNTDLYNCTFPALIEDWRETFHRGSQGQTERFFPFGLVQLSSDLSKKSSDDGFPQIRWHQTADFGYVPNPKMPNTFMAVAMDLCDRDSPFGSIHPRDKQTVAYRLHLGARALAYGEKNLTFEGPLPEKIELLAHKGLLNLTYYQQIQVQKKDNKIFEISCCSDHRCKWLPASMNTVSTQSLTLAIDSCHGTVVALRYAWTTWPCEYKQCPLYHPSSALPAPPFIAFITDQGPGHQSNVAK

SEQ ID NO: 12252 - protein, 488 aa, Homo sapiens
MVLQKEPAGAVIWGFGTPGATVTVTLRQGQETIMKKVTSVKAHSDTWMVVLDPMKPGGPFEVMAQQTLEKINFTLRVHDVLFGDVWLCSGQSNMQMTVLQIFNATRELSNTAAYQSVRILSVSPIQAEQELEDLVAVDLQWSKPTSENLGHGYFKYMSAVCWLFGRHLYDTLQYPIGLIASSWGGTPIEAWSSGRSLKACGVPKQGSIPYDSVTGPSKHSVLWNAMIHPLCNMTLKGVVWYQGESNINYNTDLYNCTFPALIEDWRETFHRGSQGQTERFFPFGLVQLSSDLSKKSSDDGFPQIRWHQTADFGYVPNPKMPNTFMAVAMDLCDRDSPFGSIHPRDKQTVAYRLHLGARALAYGEKNLTFEGPLPEKIELLAHKGLLNLTYYQQIQVQKKDNKIFEISCCSDHRCKWLPASMNTVSTQSLTLAIDSCHGTVVALRYAWTTWPCEYKQCPLYHPSSALPAPPFIAFITDQGPGHQSNVAK

SEQ ID NO: 12253 - protein, 488 aa, Homo sapiens; identical to SEQ ID NO: 12252

SEQ ID NO: 12254 - protein, 133 aa, Homo sapiens
GIFRRILHVLYTDCIRQCSGPLYVDRMVLLVMGNVINWSLAAYGLIMRPNDFASYLLAIGICNLLLYFAFYIIMKKTPAESREHNRDCILLDFFDDHDIWHFLSSIAMFGSFLVLLTLDDDLDTVQRDKIYVF

SEQ ID NO: 12255 - protein, 170 aa, Homo sapiens
MDDFVLRTGEQFSFNTTAAQPQYFKYEFPEGVDSVIVKVTSNKAFPCSVISIQDVLCPVYDLDNNVAFIGMYQTMTKKAAITVQRKDFPSNSFYVVVVVKTEDQACGGSLPFYPFAEDEPVDQGHRQKTLSVLVSQAVTSEAYVSGMLFCLGIFLSFYLLTVLLACWENW

SEQ ID NO: 12256 - protein, 110 aa, Homo sapiens
MFALGLPFLVLLVASVESHLGVLGPKNVSQKDAEFERTYVDEVNSELVNIYTFNHTVTRNRTEGVRVSVNVLNKQKGAPLLFVVRQKEAVVSFQVPLILRGMFQRKYLYQ

SEQ ID NO: 12257 - protein, 855 aa, Homo sapiens
MFALGLPFLVLLVASVESHLGVLGPKNVSQKDAEFERTYVDEVNSELVNIYTFNHTVTRNRTEGVRVSVNVLNKQKGAPLLFVVRQKEAVVSFQVPLILRGMFQRKYLYQKVERTLCQPPTKNESEIQFFYVDVSTLSPVNTTYQLRVSRMDDFVLRTGEQFSFNTTAAQPQYFKYEFPEGVDSVIVKVTSNKAFPCSVISIQDVLCPVYDLDNNVAFIGMYQTMTKKAAITVQRKDFPSNSFYVVVVVKTEDQACGGSLPFYPFAEDEPVDQGHRQKTLSVLVSQAVTSEAYVSGMLFCLGIFLSFYLLTVLLACWENWRQKKKTLLVAIDRACPESGHPRVLADSFPGSSPYEGYNYGSFENVSGSTDGLVDSAGTGDLSYGYQGHDQFKRRLPSGQMRQLCIAMGRSFEPVGTRPRVDSMSSVEEDDYDTLTDIDSDKNVIRTKQYLYVADLARKDKRVLRKKYQIYFWNIATIAVFYALPVVQLVITYQTVVNVTGNQDICYYNFLCAHPLGNLSAFNNILSNLGYILLGLLFLLIILQREINHNRALLRNDLCALECGIPKHFGLFYAMGTALMMEGLLSACYHVCPNYTNFQFDTSFMYMIAGLCMLKLYQKRHPDINASAYSAYACLAIVIFFSVLGVVFGKGNTAFWIVFSIIHIIATLLLSTQLYYMGRWKLDSGIFRRILHVLYTDCIRQCSGPLYVDRMVLLVMGNVINWSLAAYGLIMRPNDFASYLLAIGICNLLLYFAFYIIMKLRSGERIKLIPLLCIVCTSVVWGFALFFFFQGLSTWQKTPAESREHNRDCILLDFFDDHDIWHFLSSIAMFGSFLVSGPPGRAGWVREGSSCLLLCG

SEQ ID NO: 12258 - protein, 832 aa, Homo sapiens
MFALGLPFLVLLVASVESHLGVLGPKNVSQKDAEFERTYVDEVNSELVNIYTFNHTVTRNRTEGVRVSVNVLNKQKGAPLLFVVRQKEAVVSFQVPLILRGMFQRKYLYQKVERTLCQPPTKNESEIQFFYVDVSTLSPVNTTYQLRVSRMDDFVLRTGEQFSFNTTAAQPQYFKYEFPEGVDSVIVKVTSNKAFPCSVISIQDVLCPVYDLDNNVAFIGMYQTMTKKAAITVQRKDFPSNSFYVVVVVKTEDQACGGSLPFYPFAEDEPVDQGHRQKTLSVLVSQAVTSEAYVSGMLFCLGIFLSFYLLTVLLACWENWRQKKKTLLVAIDRACPESGHPRVLADSFPGSSPYEGYNYGSFENVSGSTDGLVDSAGTGDLSYGYQGRSFEPVGTRPRVDSMSSVEEDDYDTLTDIDSDKNVIRTKQYLYVADLARKDKRVLRKKYQIYFWNIATIAVFYALPVVQLVITYQTVVNVTGNQDICYYNFLCAHPLGNLSAFNNILSNLGYILLGLLFLLIILQREINHNRALLRNDLCALECGIPKHFGLFYAMGTALMMEGLLSACYHVCPNYTNFQFDTSFMYMIAGLCMLKLYQKRHPDINASAYSAYACLAIVIFFSVLGVVFGKGNTAFWIVFSIIHIIATLLLSTQLYYMGRWKLDSGIFRRILHVLYTDCIRQCSGPLYVDRMVLLVMGNVINWSLAAYGLIMRPNDFASYLLAIGICNLLLYFAFYIIMKLRSGERIKLIPLLCIVCTSVVWGFALFFFFQGLSTWQKTPAESREHNRDCILLDFFDDHDIWHFLSSIAMFGSFLVLLTLDDDLDTVQRDKIYVF

SEQ ID NO: 12259 - protein, 829 aa, Homo sapiens
MFALGLPFLVLLVASVESHLGVLGPKNVSQKDAEFERTYVDEVNSELVNIYTFNHTVTRNRTEGVRVSVNVLNKQKGAPLLFVVRQKEAVVSFQVPLILRGMFQRKYLYQKVERTLCQPPTKNESEIQFFYVDVSTLSPVNTTYQLRVSRMDDFVLRTGEQFSFNTTAAQPQYFKYEFPEGVDSVIVKVTSNKAFPCSVISIQDVLCPVYDLDNNVAFIGMYQTMTKKAAITVQRKDFPSNSFYVVVVVKTEDQACGGSLPFYPFAEDEPVDQGHRQKTLSVLVSQAVTSEAYVSGMLFCLGIFLSFYLLTVLLACWENWRQKKKTLLVAIDRACPESASLLGHPRVLADSFPGSSPYEGYNYGSFENVSGSTDGLVDSAGTGDLSYGYQGTRPRVDSMSSVEEDDYDTLTDIDSDKNVIRTKQYLYVADLARKDKRVLRKKYQIYFWNIATIAVFYALPVVQLVITYQTVVNVTGNQDICYYNFLCAHPLGNLSAFNNILSNLGYILLGLLFLLIILQREINHNRALLRNDLCALECGIPKHFGLFYAMGTALMMEGLLSACYHVCPNYTNFQFDTSFMYMIAGLCMLKLYQKRHPDINASAYSAYACLAIVIFFSVLGVVFGKGNTAFWIVFSIIHIIATLLLSTQLYYMGRWKLDSGIFRRILHVLYTDCIRQCSGPLYVDRMVLLVMGNVINWSLAAYGLIMRPNDFASYLLAIGICNLLLYFAFYIIMKLRSGERIKLIPLLCIVCTSVVWGFALFFFFQGLSTWQKTPAESREHNRDCILLDFFDDHDIWHFLSSIAMFGSFLVLLTLDDDLDTVQRDKIYVF

SEQ ID NO: 12260 - protein, 832 aa, Homo sapiens; identical to SEQ ID NO: 12258

SEQ ID NO: 12261 - protein, 855 aa, Homo sapiens; identical to SEQ ID NO: 12257

SEQ ID NO: 12262 - protein, 98 aa, Homo sapiens
MFQRKYLYQKVERTLCQPPTKNESEIQFFYVDVSTLSPVNTTYQLRVSRMDDFVLRTGEQFSFNTTAAQPQYFKYEFPEGVDSVIVKVTSNKAFPCSV

SEQ ID NO: 12263 - protein, 124 aa, Homo sapiens
MRPNDFASYLLAIGICNLLLYFAFYIIMKLRSGERIKLIPLLCIVCTSVVWGFALFFFFQGLSTWQKTPAESREHNRDCILLDFFDDHDIWHFLSSIAMFGSFLVLLTLDDDLDTVQRDKIYVF

SEQ ID NO: 12264 - protein, 602 aa, Homo sapiens
MLLPLLLSSLLGGSQAMDGRFWIRVQESVMVPEGLCISVPCSFSYPRQDWTGSTPAYGYWFKAVTETTKGAPVATNHQSREVEMSTRGRFQLTGDPAKGNCSLVIRDAQMQDESQYFFRVERGSYVRYNFMNDGFFLKVTALTQKPDVYIPETLEPGQPVTVICVFNWAFEECPPPSFSWTGAALSSQGTKPTTSHFSVLSFTPRPQDHNTDLTCHVDFSRKGVSAQRTVRLRVAYAPRDLVISISRDNTPALEPQPQGNVPYLEAQKGQFLRLLCAADSQPPATLSWVLQNRVLSSSHPWGPRPLGLELPGVKAGDSGRYTCRAENRLGSQQRALDLSVQYPPENLRVMVSQANRTVLENLGNGTSLPVLEGQSLCLVCVTHSSPPARLSWTQRGQVLSPSQPSDPGVLELPRVQVEHEGEFTCHARHPLGSQHVSLSLSVHYKKGLISTAFSNGAFLGIGITALLFLCLALIIMKILPKRRTQTETPRPRFSRHSTILDYINVVPTAGPLAQKRNQKATPNSPRTPLPPGAPSPESKKNQKKQYQLPSFPEPKSSTQAPESQESQEELHYATLNFPGVRPRPEARMPKGTQADYAEVKFQ

SEQ ID NO: 12265 - protein, 697 aa, Homo sapiens
MLLPLLLSSLLGGSQAMDGRFWIRVQESVMVPEGLCISVPCSFSYPRQDWTGSTPAYGYWFKAVTETTKGAPVATNHQSREVEMSTRGRFQLTGDPAKGNCSLVIRDAQMQDESQYFFRVERGSYVRYNFMNDGFFLKVTALTQKPDVYIPETLEPGQPVTVICVFNWAFEECPPPSFSWTGAALSSQGTKPTTSHFSVLSFTPRPQDHNTDLTCHVDFSRKGVSAQRTVRLRVAYAPRDLVISISRDNTPALEPQPQGNVPYLEAQKGQFLRLLCAADSQPPATLSWVLQNRVLSSSHPWGPRPLGLELPGVKAGDSGRYTCRAENRLGSQQRALDLSVQYPPENLRVMVSQANRTVLENLGNGTSLPVLEGQSLCLVCVTHSSPPARLSWTQRGQVLSPSQPSDPGVLELPRVQVEHEGEFTCHARHPLGSQHVSLSLSVHYSPKLLGPSCSWEAEGLHCSCSSQASPAPSLRWWLGEELLEGNSSQDSFEVTPSSAGPWANSSLSLHGGLSSGLRLRCEAWNVHGAQSGSILQLPDKKGLISTAFSNGAFLGIGITALLFLCLALIIMKILPKRRTQTETPRPRFSRHSTILDYINVVPTAGPLAQKRNQKATPNSPRTPLPPGAPSPESKKNQKKQYQLPSFPEPKSSTQAPESQESQEELHYATLNFPGVRPRPEARMPKGTQADYAEVKFQ

SEQ ID NO: 12266 - protein, 512 aa, Homo sapiens
MLLPLLLSSLLGGSQAMDGRFWIRVQESVMVPEGLCISVPCSFSYPRQDWTGSTPAYGYWFKAVTETTKGAPVATNHQSREVEMSTRGRFQLTGDPAKGNCSLVIRDAQMQDESQYFFRVERGSYVRYNFMNDGFFLKVTALTQKPDVYIPETLEPGQPVTVICVFNWAFEECPPPSFSWTGAALSSQGTKPTTSHFSVLSFTPRPQDHNTDLTCHVDFSRKGVSAQRTVRLRVAYAPRDLVISISRDNTPDPPENLRVMVSQANRTVLENLGNGTSLPVLEGQSLCLVCVTHSSPPARLSWTQRGQVLSPSQPSDPGVLELPRVQVEHEGEFTCHARHPLGSQHVSLSLSVHYKKGLISTAFSNGAFLGIGITALLFLCLALIIMKILPKRRTQTETPRPRFSRHSTILDYINVVPTAGPLAQKRNQKATPNSPRTPLPPGAPSPESKKNQKKQYQLPSFPEPKSSTQAPESQESQEELHYATLNFPGVRPRPEARMPKGTQADYAEVKFQ

SEQ ID NO: 12267 - protein, 554 aa, Homo sapiens
MLLPLLLSSLLGGSQAMDGRFWIRVQESVMVPEGLCISVPCSFSYPRQDWTGSTPAYGYWFKAVTETTKGAPVATNHQSREVEMSTRGRFQLTGDPAKGNCSLVIRDAQMQDESQYFFRVERGSYVRYNFMNDGFFLKVTGTKPTTSHFSVLSFTPRPQDHNTDLTCHVDFSRKGVSAQRTVRLRVAYAPRDLVISISRDNTPALEPQPQGNVPYLEAQKGQFLRLLCAADSQPPATLSWVLQNRVLSSSHPWGPRPLGLELPGVKAGDSGRYTCRAENRLGSQQRALDLSVQYPPENLRVMVSQANRTVLENLGNGTSLPVLEGQSLCLVCVTHSSPPARLSWTQRGQVLSPSQPSDPGVLELPRVQVEHEGEFTCHARHPLGSQHVSLSLSVHYKKGLISTAFSNGAFLGIGITALLFLCLALIIMKILPKRRTQTETPRPRFSRHSTILDYINVVPTAGPLAQKRNQKATPNSPRTPLPPGAPSPESKKNQKKQYQLPSFPEPKSSTQAPESQESQEELHYATLNFPGVRPRPEARMPKGTQADYAEVKFQ

SEQ ID NO: 12268 - protein, 639 aa, Homo sapiens
MLLPLLLSSLLGGSQAMDGRFWIRVQESVMVPEGLCISVPCSFSYPRQDWTGSTPAYGYWFKAVTETTKGAPVATNHQSREVEMSTRGRFQLTGDPAKGNCSLVIRDAQMQDESQYFFRVERGSYVRYNFMNDGFFLKVTVLSFTPRPQDHNTDLTCHVDFSRKGVSAQRTVRLRVAYAPRDLVISISRDNTPALEPQPQGNVPYLEAQKGQFLRLLCAADSQPPATLSWVLQNRVLSSSHPWGPRPLGLELPGVKAGDSGRYTCRAENRLGSQQRALDLSVQYPPENLRVMVSQANRTVLENLGNGTSLPVLEGQSLCLVCVTHSSPPARLSWTQRGQVLSPSQPSDPGVLELPRVQVEHEGEFTCHARHPLGSQHVSLSLSVHYSPKLLGPSCSWEAEGLHCSCSSQASPAPSLRWWLGEELLEGNSSQDSFEVTPSSAGPWANSSLSLHGGLSSGLRLRCEAWNVHGAQSGSILQLPDKKGLISTAFSNGAFLGIGITALLFLCLALIIMKILPKRRTQTETPRPRFSRHSTILDYINVVPTAGPLAQKRNQKATPNSPRTPLPPGAPSPESKKNQKKQYQLPSFPEPKSSTQAPESQESQEELHYATLNFPGVRPRPEARMPKGTQADYAEVKFQ

SEQ ID NO: 12269 - protein, 544 aa, Homo sapiens
MLLPLLLSSLLGGSQAMDGRFWIRVQESVMVPEGLCISVPCSFSYPRQDWTGSTPAYGYWFKAVTETTKGAPVATNHQSREVEMSTRGRFQLTGDPAKGNCSLVIRDAQMQDESQYFFRVERGSYVRYNFMNDGFFLKVTVLSFTPRPQDHNTDLTCHVDFSRKGVSAQRTVRLRVAYAPRDLVISISRDNTPALEPQPQGNVPYLEAQKGQFLRLLCAADSQPPATLSWVLQNRVLSSSHPWGPRPLGLELPGVKAGDSGRYTCRAENRLGSQQRALDLSVQYPPENLRVMVSQANRTVLENLGNGTSLPVLEGQSLCLVCVTHSSPPARLSWTQRGQVLSPSQPSDPGVLELPRVQVEHEGEFTCHARHPLGSQHVSLSLSVHYKKGLISTAFSNGAFLGIGITALLFLCLALIIMKILPKRRTQTETPRPRFSRHSTILDYINVVPTAGPLAQKRNQKATPNSPRTPLPPGAPSPESKKNQKKQYQLPSFPEPKSSTQAPESQESQEELHYATLNFPGVRPRPEARMPKGTQADYAEVKFQ

SEQ ID NO: 12270 - protein, 454 aa, Homo sapiens
MLLPLLLSSLLGGSQAMDGRFWIRVQESVMVPEGLCISVPCSFSYPRQDWTGSTPAYGYWFKAVTETTKGAPVATNHQSREVEMSTRGRFQLTGDPAKGNCSLVIRDAQMQDESQYFFRVERGSYVRYNFMNDGFFLKVTVLSFTPRPQDHNTDLTCHVDFSRKGVSAQRTVRLRVAYAPRDLVISISRDNTPDPPENLRVMVSQANRTVLENLGNGTSLPVLEGQSLCLVCVTHSSPPARLSWTQRGQVLSPSQPSDPGVLELPRVQVEHEGEFTCHARHPLGSQHVSLSLSVHYKKGLISTAFSNGAFLGIGITALLFLCLALIIMKILPKRRTQTETPRPRFSRHSTILDYINVVPTAGPLAQKRNQKATPNSPRTPLPPGAPSPESKKNQKKQYQLPSFPEPKSSTQAPESQESQEELHYATLNFPGVRPRPEARMPKGTQADYAEVKFQ

SEQ ID NO: 12271 - protein, 155 aa, Homo sapiens
MLLPLLLSSLLGVLSFTPRPQDHNTDLTCHVDFSRKGVSAQRTVRLRVAYAPRDLVISISRDNTPALEPQPQGNVPYLEAQKGQFLRLLCAADSQPPATLSWVLQNRVLSSSHPWGPRPLGLELPGVKAGDSGRYTCRAENRLGSQQRALDLSVQ

SEQ ID NO: 12272 - protein, 186 aa, Homo sapiens
MRRCYCHCCCPRCWADWTGSTPAYGYWFKAVTETTKGAPVATNHQSREVEMSTRGRFQLTGDPAKGNCSLVIRDAQMQDESQYFFRVERGSYVRYNFMNDGFFLKVTALTQKPDVYIPETLEPGQPVTVICVFNWAFEECPPPSFSWTGAALSSQGTKPTTSHFSVLSFTPRPQDHNTDLTCHVDF

SEQ ID NO: 12273 - protein, 401 aa, Homo sapiens
MQGAQEASASEMLPLLLPLLWAASYYGYGYWFLEGADVPVATNDPDEEVQEETRGRFHLLWDPRRKNCSLSIRDARRRDNAAYFFRLKSKWMKYGYTSSKLSVRVMALTHRPNISIPGTLESGHPSNLTCSVPWVCEQGTPPIFSWMSAAPTSLGPRTTQSSVLTITPRPQDHSTNLTCQVTFPGAGVTMERTIQLNVSSFKILQNTSSLPVLEGQALRLLCDADGNPPAHLSWFQGFPALNATPISNTGVLELPQVGSAEEGDFTCRAQHPLGSLQISLSLFVHWKPEGRAGGVLGAVWGASITTLVFLCVCFIFRVKTRRKKAAQPVQNTDDVNPVMVSGSRGHQHQFQTGIVSDHPAEAGPISEDEQELHYAVLHFHKVQPQEPKVTDTEYSEIKIHK

SEQ ID NO: 12274 - protein, 437 aa, Homo sapiens
MQGAQEASASEMLPLLLPLLWAGALAQERRFQLEGPESLTVQEGLCVLVPCRLPTTLPASYYGYGYWFLEGADVPVATNDPDEEVQEETRGRFHLLWDPRRKNCSLSIRDARRRDNAAYFFRLKSKWMKYGYTSSKLSVRVMALTHRPNISIPGTLESGHPSNLTCSVPWVCEQGTPPIFSWMSAAPTSLGPRTTQSSVLTITPRPQDHSTNLTCQVTFPGAGVTMERTIQLNVSSFKILQNTSSLPVLEGQALRLLCDADGNPPAHLSWFQGFPALNATPISNTGVLELPQVGSAEEGDFTCRAQHPLGSLQISLSLFVHWKPEGRAGGVLGAVWGASITTLVFLCVCFIFRVKTRRKKAAQPVQNTDDVNPVMVSGSRGHQHQFQTGIVSDHPAEAGPISEDEQELHYAVLHFHKVQPQEPKVTDTEYSEIKIHK

SEQ ID NO: 12275 - protein, 389 aa, Homo sapiens
MQGAQEASASEMLPLLLPLLWAGALAQERRFQLEGPESLTVQEGLCVLVPCRLPTTLPASYYGYGYWFLEGADVPVATNDPDEEVQEETRGRFHLLWDPRRKNCSLSIRDARRRDNAAYFFRLKSKWMKYGYTSSKLSVRVMALTHRPNISIPGTLESGHPSNLTCSVPWVCEQGTPPIFSWMSAAPTSLGPRTTQSSVLTITPRPQDHSTNLTCQVTFPGAGVTMERTIQLNVSWMLRRPPLSTPDAPQKVAISIFQGNSAAFKILQNTSSLPVLEGQALRLLCDADGNPPAHLSWFQGFPALNATPISNTGVLELPQVGSAEEGDFTCRAQHPLGSLQISLSLFVHWKPEGRAGGVLGAVWGASITTLVFLCVCFIFRVISTSSRQA

SEQ ID NO: 12276 - protein, 353 aa, Homo sapiens
MQGAQEASASEMLPLLLPLLWAGALAQERRFQLEGPESLTVQEGLCVLVPCRLPTTLPASYYGYGYWFLEGADVPVATNDPDEEVQEETRGRFHLLWDPRRKNCSLSIRDARRRDNAAYFFRLKSKWMKYGYTSSKLSVRVMALTHRPNISIPGTLESGHPSNLTCSVPWVCEQGTPPIFSWMSAAPTSLGPRTTQSSVLTITPRPQDHSTNLTCQVTFPGAGVTMERTIQLNVSYAPQKVAISIFQGNSAAFKILQNTSSLPVLEGQALRLLCDADGNPPAHLSWFQGFPALNATPISNTGVLELPQVGSAEEGDFTCRAQHPLGSLQISLSLFVHWSSAPVPDRHSFRPPC

SEQ ID NO: 12277 - protein, 453 aa, Homo sapiens
MQGAQEASASEMLPLLLPLLWAGALAQERRFQLEGPESLTVQEGLCVLVPCRLPTTLPASYYGYGYWFLEGADVPVATNDPDEEVQEETRGRFHLLWDPRRKNCSLSIRDARRRDNAAYFFRLKSKWMKYGYTSSKLSVRVMALTHRPNISIPGTLESGHPSNLTCSVPWVCEQGTPPIFSWMSAAPTSLGPRTTQSSVLTITPRPQDHSTNLTCQVTFPGAGVTMERTIQLNVSYAPQKVAISIFQGNSAAFKILQNTSSLPVLEGQALRLLCDADGNPPAHLSWFQGFPALNATPISNTGVLELPQVGSAEEGDFTCRAQHPLGSLQISLSLFVHWKPEGRAGGVLGAVWGASITTLVFLCVCFIFRVKTRRKKAAQPVQNTDDVNPVMVSGSRGHQHQFQTGIVSDHPAEAGPISEDEQELHYAVLHFHKVQPQEPKVTDTEYSEIKIHK

SEQ ID NO: 12278 - protein, 342 aa, Homo sapiens
MQGAQEASASEMLPLLLPLLWAGALAQERRFQLEGPESLTVQEGLCVLVPCRLPTTLPASYYGYGYWFLEGADVPVATNDPDEEVQEETRGRFHLLWDPRRKNCSLSIRDARRRDNAAYFFRLKSKWMKYGYTSSKLSVRVMGTLESGHPSNLTCSVPWVCEQGTPPIFSWMSAAPTSLGPRTTQSSVLTITPRPQDHSTNLTCQVTFPGAGVTMERTIQLNVSYAPQKVAISIFQGNSAAFKILQNTSSLPVLEGQALRLLCDADGNPPAHLSWFQGFPALNATPISNTGVLELPQVGSAEEGDFTCRAQHPLGSLQISLSLFVHWSSAPVPDRHSFRPPC

SEQ ID NO: 12279 - protein, 467 aa, Homo sapiens
MLLLLLLPLLWGRERVEGQKSNRKDYSLTMQSSVTVQEGMCVHVRCSFSYPVDSQTDSDPVHGYWFRAGNDISWKAPVATNNPAWAVQEETRDRFHLLGDPQTKNCTLSIRDARMSDAGRYFFRMEKGNIKWNYKYDQLSVNVTALTHRPNILIPGTLESGCFQNLTCSVPWACEQGTPPMISWMGTSVSPLHPSTTRSSVLTLIPQPQHHGTSLTCQVTLPGAGVTTNRTIQLNVSYPPQNLTVTVFQGEGTASTALGNSSSLSVLEGQSLRLVCAVDSNPPARLSWTWRSLTLYPSQPSNPLVLELQVHLGDEGEFTCRAQNSLGSQHVSLNLSLQQEYTGKMRPVSGVLLGAVGGAGATALVFLSFCVIFIVVRSCRKKSARPAADVGDIGMKDANTIRGSASQGNLTESWADDNPRHHGLAAHSSGEEREIQYAPLSFHKGEPQDLSGQEATNNEYSEIKIPK

SEQ ID NO: 12280 - protein, 185 aa, Homo sapiens
MLLLLLLPLLWGRERVEGQKSNRKDYSLTMQSSVTVQEGMCVHVRCSFSYPVDSQTDSDPVHGYWFRAGNDISWKAPVATNNPAWAVQEETRDRFHLLGDPQTKNCTLSIRDARMSDAGRYFFRMEKGNIKWNYKYDQLSVNVTAPAPRHQPHLSGDLAWGRRDHEQDHPTQCVLSPCLSVPDPP

SEQ ID NO: 12281 - protein, 374 aa, Homo sapiens
MLLLLLLPLLWGRERVEGQKSNRKDYSLTMQSSVTVQEGMCVHVRCSFSYPVDSQTDSDPVHGYWFRAGNDISWKAPVATNNPAWAVQEETRDRFHLLGDPQTKNCTLSIRDARMSDAGRYFFRMEKGNIKWNYKYDQLSVNVTDPPQNLTVTVFQGEGTASTALGNSSSLSVLEGQSLRLVCAVDSNPPARLSWTWRSLTLYPSQPSNPLVLELQVHLGDEGEFTCRAQNSLGSQHVSLNLSLQQEYTGKMRPVSGVLLGAVGGAGATALVFLSFCVIFIVVRSCRKKSARPAADVGDIGMKDANTIRGSASQGNLTESWADDNPRHHGLAAHSSGEEREIQYAPLSFHKGEPQDLSGQEATNNEYSEIKIPK

SEQ ID NO: 12282 - protein, 145 aa, Homo sapiens
MLLLLLLPLLWGRERVEGQKSNRKDYSLTMQSSVTVQEGMCVHVRCSFSYPVDSQTDSDPVHGYWFRAGNDISWKAPVATNNPAWAVQEETRDRFHLLGDPQTKNCTLSIRDARMSDAGRYFFRMEKGNIKWNYKYDQLSVNVTE

SEQ ID NO: 12283 - protein, 145 aa, Homo sapiens
MLLLLLLPLLWGRERVEGQKSNRKDYSLTMQSSVTVQEGMCVHVRCSFSYPVDSQTDSDPVHGYWFRAGNDISWKAPVATNNPAWAVQEETRDRFHLLGDPQTKNCTLSIRDARMSDAGRYFFRMEKGNIKWNYKYDQLSVNVTG

SEQ ID NO: 12284 - protein, 13 aa, Homo sapiens
MLPLLQLGGKDNS

SEQ ID NO: 12285 - protein, 103 aa, Homo sapiens
MLPLLQLGKSSLAAQAFVKGLIQGAIYAGIVIALLFLCLLPLIVKHIRKKQAKKAAAIRAKKSSKVRASQELEMSLKPEEPGKPVVATFSESRILEKQDKRAS

SEQ ID NO: 12286 - protein, 84 aa, Homo sapiens
MLPLLQLVPAKLLNSSCSLEKTLQCSCSFHGIPTPSVQWWMGGVPVGVDGMDGSLQVTSTMLGPWANSTISLTEEPEMGMRLLC

SEQ ID NO: 12287 - protein, 140 aa, Homo sapiens
MLPLLQLVPAKLLNSSCSLEKTLQCSCSFHGIPTPSVQWWMGGVPVGVDGMDGSLQVTSTMLGPWANSTISLTEEPEMGMRLLCEGKNQNGTHALSILLMSRKSSLAAQAFVKGLIQGAIYAGIVIALLFLCLLPLIVKH

SEQ ID NO: 12288 - protein, 197 aa, Homo sapiens
MLPLLQLVPAKLLNSSCSLEKTLQCSCSFHGIPTPSVQWWMGGVPVGVDGMDGSLQVTSTMLGPWANSTISLTEEPEMGMRLLCEGKNQNGTHALSILLMSRKSSLAAQAFVKGLIQGAIYAGIVIALLFLCLLPLIVKHIRKKQAKKAAAIRAKKSSKVRASQELEMSLKPEEPGKPVVATFSESRILEKQDKRAS

SEQ ID NO: 12289 - protein, 197 aa, Homo sapiens; identical to SEQ ID NO: 12288

SEQ ID NO: 12290 - protein, 134 aa, Homo sapiens
MGAMCLLHASLSEYVLLFGTALGSRGHSGRYWAEISDTIISGTFHQWREGTTKSEVFYPGETVVHGPGEATAVEWGPNTWMVEYGRGVIPSTLAFALADTVFSTQDFLTLFYTLRSYARGLRLELTTYLFGQDP

SEQ ID NO: 12291 - protein, 106 aa, Homo sapiens
MQWAVGRRWAWAALLLAVAAVLTQVVWLWLGTQSFVFQREEIAQLARQYAGLDHELAFSRLIVELRRLHPGHVLPDEELQWVFVNAGGWMGAMCLLHASLSEALLG

SEQ ID NO: 12292 - protein, 192 aa, Homo sapiens
MQWAVGRRWAWAALLLAVAAVLTQVVWLWLGTQSFVFQREEIAQLARQYAGLDHELAFSRLIVELRRLHPGHVLPDEELQWVFVNAGGWMGAMCLLHASLSEYVLLFGTALGSRGHSGETVVHGPGEATAVEWGPNTWMVEYGRGVIPSTLAFALADTVFSTQDFLTLFYTLRSYARGLRLELTTYLFGQDP

SEQ ID NO: 12293 - protein, 223 aa, Homo sapiens
MQWAVGRRWAWAALLLAVAAVLTQVVWLWLGTQSFVFQREEIAQLARQYAGLDHELAFSRLIVELRRLHPGHVLPDEELQWVFVNAGGWMGAMCLLHASLSEYVLLFGTALGSRGHSGRYWAEISDTIISGTFHQWREGTTKSEVFYPGETVVHGPGEATAVEWGPNTWMVEYGRGVIPSTLAFALADTVFSTQDFLTLFYTLRSYARGLRLELTTYLFGQDP

SEQ ID NO: 12294 - protein, 83 aa, Homo sapiens
LKSALAKFKEGAEMESSKEDKMDNAQDLLSFGGLQVVINGLNSTEPLVKEYAAFVLGAAFSSNPKVQVEAIEGGALQKLLVIL

SEQ ID NO: 12295 - protein, 95 aa, Homo sapiens
MAPQSLPSSRMAPLGMLLGLLMAACFTFCLSHQNLKEFALTNPEKSSTKETERKETKAEEELDAEVLEVFHPTHEWQALQPGQAVPAGSHVRLNL

SEQ ID NO: 12296 - protein, 123 aa, Homo sapiens
MAPQSLPSSRMAPLGMLLGLLMAACFTFCLSHQNLKEFALTNPEKSSTKETERKETKAEEELDAEVLEVFHPTHEWQALQPGQAVPAGSHVRLNLQTGEREAKLQYEDKFRNNLKGKRLDINT

SEQ ID NO: 12297 - protein, 163 aa, Homo sapiens
MAPQSLPSSRMAPLGMLLGLLMAACFTFCLSHQNLKEFALTNPEKSSTKETERKETKAEEELDAEVLEVFHPTHEWQALQPGQAVPAGSHVRLNLQTGEREAKLQYEDKFRNNLKGKRLDINTNTYTSQDLKSALAKFKEGAEMESSKEDKARQAEVKRLFRP

SEQ ID NO: 12298 - protein, 461 aa, Homo sapiens
MAPQSLPSSRMAPLGMLLGLLMAACFTFCLSHQNLKEFALTNPEKSSTKETERKETKAEEELDAEVLEVFHPTHEWQALQPGQAVPAGSHVRLNLQTGEREAKLQYEDKFRNNLKGKRLDINTNTYTSQDLKSALAKFKEGAEMESSKEDKARQAEVKRLFRPIEELKKDFDELNVVIETDMQIMVRLINKFNSSSSSLEEKIAALFDLEYYVHQMDNAQDLLSFGGLQVVINGLNSTEPLVKEYAAFVLGAAFSSNPKVQVEAIEGGALQKLLVILATEQPLTAKKKVLFALCSLLRHFPYAQRQFLKLGGLQVLRTLVQEKGTEVLAVRVVTLLYDLVTEKMFAEEEAELTQEMSPEKLQQYRQVHLLPGLWEQGWCEITAHLLALPEHDAREKVLQTLGVLLTTCRDRYRQDPQLGRTLASLQAEYQVLASLELQDGEDEGYFQELLGSVNSLLKELR

SEQ ID NO: 12299 - protein, 461 aa, Homo sapiens; identical to SEQ ID NO: 12298

SEQ ID NO: 12300 - protein, 468 aa, Homo sapiens
MNSGTSLTMAPQSLPSSRMAPLGMLLGLLMAACFTFCLSHQNLEFALTNPEKSSTKETERKETKAEEELDAEVLEVFHPTHEWQALQPGQAVPAGSHVRLNLQTGEREAKLQYEDKFRNNLKGKRLDINTNTYTSQDLKSALAKFKEGAEMESSKEDKARQAEVKRLFRPIEELKKDFDELNVVIETDMQIMVRLINKFNSSSSSLEEKIAALFDLEYYVHQMDNAQDLLSFGGLQVVINGLNSTEPLVKEYAAFVLGAAFSSNPKVQVEAIEGGALQKLLVILATEQPLTAKKKVLFALCSLLRHFPYAQRQFLKLGGLQVLRTLVQEKGTEVLAVRVVTLLYDLVTEKMFAEEEAELTQEMSPEKLQQYRQVHLLPGLWEQGWCEITAHLLALPEHDAREKVLQTLGVLLTTCRDRYRQDPQLGRTLASLQAEYQVLASLELQDGEDEGYFQELLGSVNSLLKELR

SEQ ID NO: 12301 - protein, 123 aa, Homo sapiens
MQEMSDMSLTMAPQSLPSSRMAPLGMLLGLLMAACFTFCLSHQNLKEFALTNPEKSSTKETERKETKAEEELDAEVLEVFHPTHEWQALQPGQAVPAGSHVRLNLQTGEREAKLQYEDKFRNN

SEQ ID NO: 12302 - protein, 125 aa, Homo sapiens
MQEMSDMSLTMAPQSLPSSRMAPLGMLLGLLMAACFTFCLSHQNLKEFALTNPEKSSTKETERKETKAEEELDAEVLEVFHPTHEWQALQPGQAVPAGSHVRLNLQTGEREAKLQYEDKFRNNLK

SEQ ID NO: 12303 - protein, 182 aa, Homo sapiens
GNELSDFQTNVDPAGDSVSYSIHSTARVVLTRGDVHSQVICEIAHITLQGDPLRGTANLSEAIRVPPTLEVTQQPMRAENQANVTCQVSNFYPRGLQLTWLENGNVSRTETASTLIENKDGTYNWMSWLLVNTCAHRDDVVLTCQVEHDGQQAVSKSYALEISAHQKEHGSDITHGAVTSHF

SEQ ID NO: 12304 - protein, 77 aa, Homo sapiens
HRDDVKLTCQVEHDGQPAVSKSHDLKVSAHPKEQGSNTAPGPALASAAPLLIAFLLGPKVLLVVGVSVIYVYWKQKA

SEQ ID NO: 12305 - protein, 77 aa, Homo sapiens; identical to SEQ ID NO: 12304

SEQ ID NO: 12306 - protein, 77 aa, Homo sapiens; identical to SEQ ID NO: 12304

SEQ ID NO: 12307 - protein, 236 aa, Homo sapiens
HTVSFTCESHGFSPRDITLKWFKNGNELSDFQTNVDPAGDSVSYSIHSTAKVVLTREDVHSQVICEVAHVTLQGDPLRGTANLSETIRVPPTLEVTQQPVRAENQVNVTCQVRKFYPQRLQLTWLENGNVSRTETASTLTENKDGTYNWMSWLLVNVSAHRDDVKLTCQVEHDGQPAVSKSHDLKVSAHPKEQGSNTAPGPALASAAPLLIAFLLGPKVLLVVGVSVIYVYWKQKA

SEQ ID NO: 12308 - protein, 398 aa, Homo sapiens
MPVPASWPHLPSPFLLMTLLLGRLTGVAGEDELQVIQPEKSVSVAAGESATLRCAMTSLIPVGPIMWFRGAGAGRELIYNQKEGHFPRVTTVSELTKRNNLDFSISISNITPADAGTYYCVKFRKGSPDDVEFKSGAGTELSVRAKPSAPVVSGPAVRATPEHTVSFTCESHGFSPRDITLKWFKNGNELSDFQTNVDPAGDSVSYSIHSTARVVLTRGDVHSQVICEIAHITLQGDPLRGTANLSEAIRVPPTLEVTQQPMRAENQANVTCQVSNFYPRGLQLTWLENGNVSRTETASTLIENKDGTYNWMSWLLVNTCAHRDDVVLTCQVEHDGQQAVSKSYALEISAHQKEHGSDITHEAALAPTAPLLVALLLGPKLLLVVGVSAIYICWKQKA

SEQ ID NO: 12309 - protein, 181 aa, Homo sapiens
MPVPASWPHLPSPFLLMTLLLGRLTGVAGEDELQVIQPEKSVSVAAGESATLRCAMTSLIPVGPIMWFRGAGAGRELIYNQKEGHFPRVTTVSELTKRNNLDFSISISNITPADAGTYYCVKFRKGSPDDVEFKSGAGTELSVREAALAPTAPLLVALLLGPKLLLVVGVSAIYICWKQKA

SEQ ID NO: 12310 - protein, 398 aa, Homo sapiens
MPVPASWPHLPSPFLLMTLLLGRLTGVAGEEELQVIQPDKSISVAAGESATLHCTVTSLIPVGPIQWFRGAGPGRELIYNQKEGHFPRVTTVSDLTKRNNMDFSIRISNITPADAGTYYCVKFRKGSPDHVEFKSGAGTELSVRAKPSAPVVSGPAARATPQHTVSFTCESHGFSPRDITLKWFKNGNELSDFQTNVDPAGDSVSYSIHSTAKVVLTREDVHSQVICEVAHVTLQGDPLRGTANLSETIRVPPTLEVTQQPVRAENQVNVTCQVRKFYPQRLQLTWLENGNVSRTETASTLTENKDGTYNWMSWLLVNVSAHRDDVKLTCQVEHDGQPAVSKSHDLKVSAHPKEQGSNTAPGPALASAAPLLIAFLLGPKVLLVVGVSVIYVYWKQKA

SEQ ID NO: 12311 - protein, 398 aa, Homo sapiens; identical to SEQ ID NO: 12310

SEQ ID NO: 12312 - protein, 156 aa, Homo sapiens
MPVPASWPHPPCPFLLLTLLLGLTGVAGEDELQVIQPEKSVSVAAGESATLRCAMTSLIPVGPIMWFRGAGAGRELIYNQKEGHFPRVTTVSELTKRNNLDFSISISNITPADAGTYYCVKFRKGSPDDVEFKSGAGTELSVREAALAPTAPLLVA

SEQ ID NO: 12313 - protein, 180 aa, Homo sapiens
MPVPASWPHPPCPFLLLTLLLGLTGVAGEDELQVIQPEKSVSVAAGESATLRCAMTSLIPVGPIMWFRGAGAGRELIYNQKEGHFPRVTTVSELTKRNNLDFSISISNITPADAGTYYCVKFRKGSPDDVEFKSGAGTELSVREAALAPTAPLLVALLLGPKLLLVVGVSAIYICWKQKA

SEQ ID NO: 12314 - protein, 58 aa, Homo sapiens
RKGSPDHVEFKSGAGTELSVREAALAPTAPLLVALLLGPKLLLVVGVSAIYICWKQKA

SEQ ID NO: 12315 - protein, 131 aa, Homo sapiens
  VARIANT 1: note = misc_feature - Xaa can be any naturally occurring amino acid
XPPTLEVTQQPVRAENQVNVTCQVRKFYPQRLQLTWLENGNVSRTETASTLTENKDGTYNWMSWLLVNVSAHRDDVKLTCQVEHDGQPAVSKSHDLKVSAHPKEQGSNTAPVSLEFYRRGNQDLGSNGGYC

SEQ ID NO: 12316 - protein, 198 aa, Homo sapiens
MPIPASPLHPPLPSLLLYLLLELAGVTHVFHVQQTEMSQTVSTGESIILSCSVPNTLPNGPVLWFKGTGPNRKLIYNFKQGNFPRVKEIGDTTKPGNTDFSTRIREISLADAGTYYCVKFIKGRAIKEYQSGRGTQVFVTAEQNPRPPKNRPAGRAGSRAHHDAHTCLSALPERNSTNYFVQPCCCLRLLGLTGLLSK

SEQ ID NO: 12317 - protein, 197 aa, Homo sapiens
MPIPASPLHPPLPSLLLYLLLELAGVTHVFHVQQTEMSQTVSTGESIILSCSVPNTLPNGPVLWFKGTGPNRKLIYNFKQGNFPRVKEIGDTTKPGNTDFSTRIREISLADAGTYYCVKFIKGRAIKEYQSGRGTQVFVTEQNPRPPKNRPAGRAGSRAHHDAHTCLSALPERNSTNYFVQPCCCLRLLGLTGLLSK

SEQ ID NO: 12318 - protein, 80 aa, Homo sapiens
  VARIANT 1: note = misc_feature - Xaa can be any naturally occurring amino acid
XNGPVLWFKGTGPNRKLIYNFKQEQNPRPPKNRPAGRAGSRAHHDAHTCLSALPERNSTNYFVQPCCCLRLLGLTGLLSK

SEQ ID NO: 12319 - protein, 335 aa, Homo sapiens
MDPKGLLSLTFVLFLSLAFGASYGTGGRMMNCPKILRQLGSKVLLPLTYERINKSMNKSIHIVVTMAKSLENSVENKIVSLDPSEAGPPRYLGDRYKFYLENLTLGIRESRKEDEGWYLMTLEKNVSVQRFCLQLRLYEQVSTPEIKVLNKTQENGTCTLILGCTVEKGDHVAYSWSEKAGTHPLNPANSSHLLSLTLGPQHADNIYICTVSNPISNNSQTFSPWPGCRTDPSETKPWAVYAGLLGGVIMILIMVVILQLRRRGKTNHYQTTVEKKSLTIYAQVQKPGPLQKKLDSFPAQDPCTTIYVAATEPVPESVQETNSITVYASVTLPES

SEQ ID NO: 12320 - protein, 357 aa, Homo sapiens
MDPKGLLSLTFVLFLSLAFGASYGTGGRMMNCPKILRQLGSKVLLPLTYERINKSMNKSIHIVVTMAKSLENSVENKIVSLDPSEAGPPRYLGDRYKFYLENLTLGIRESRKEDEGWYLMTLEKNVSVQRFCLQLRLYEQVSTPEIKVLNKTQENGTCTLILGCTVEKGDHVAYSWSEKAGTHPLNPANSSHLLSLTLGPQHADNIYICTVSNPISNNSQTFSPWPGCRTDPSETKPWAVYAGLLGGVIMILIMVVILQLRRRATLTTTNQYWSQNVLTQDQERCPGCLPMVKRTITRQQWKKKALRSMPKSRNQVLFRRNLTPSQLRTLAPPYMLLPQSLSQSLSRKQIPSQSMLV

SEQ ID NO: 12321 - protein, 144 aa, Homo sapiens
MDPKGLLSLTFVLFLSLAFGASYGTGGRMMNCPKILRQLGSKVLLPLTYERINKSMNKSIHIVVTMAKSLENSVENKIVSLDPSEAGPPRYLGDRYKFYLENLTLGIRESRKEDEGWYLMTLEKSLHFGYLYFVLGADHDNLQT

SEQ ID NO: 12322 - protein, 149 aa, Homo sapiens
MAGSPTCLTLIYILWQLTEHLSKPKVTMGLQSNKNGTCVTNLTCCMEHGEEDVIYTWKALGQAANESHNGSILPISWRWGESDMTFICVARNPVSRNFSSPILARKLCEENNPKGRSSKYGLLHCGNTEKDGKSPLTAHDARHTKAICL

SEQ ID NO: 12323 - protein, 188 aa, Homo sapiens
MAGSPTCLTLIYILWQLTEHLSKPKVTMGLQSNKNGTCVTNLTCCMEHGEEDVIYTWKALGQAANESHNGSILPISWRWGESDMTFICVARNPVSRNFSSPILARKLCEEYIEEKKRVDICRETPNICPHSGENTEYDTIPHTNRTILKEDPANTVYSTVEIPKKMENPHSLLTMPDTPRLFAYENVI

SEQ ID NO: 12324 - protein, 228 aa, Homo sapiens
MAGSPTCLTLIYILWQLTEHLSKPKVTMGLQSNKNGTCVTNLTCCMEHGEEDVIYTWKALGQAANESHNGSILPISWRWGESDMTFICVARNPVSRNFSSPILARKLCEGAADDPDSSMVLLCLLLVPLLLSLFVLGLFLWFLKRERQEEYIEEKKRVDICRETPNICPHSGENTEYDTIPHTNRTILKEDPANTVYSTVEIPKKMENPHSLLTMPDTPRLFAYENVI

SEQ ID NO: 12325 - protein, 241 aa, Homo sapiens
MAGSPTCLTLIYILWQLTEHLSKPKVTMGLQSNKNGTCVTNLTCCMEHGEEDVIYTWKALGQAANESHNGSILPISWRWGESDMTFICVARNPVSRNFSSPILARKLCEGDCLSPLHRRLCPGAADDPDSSMVLLCLLLVPLLLSLFVLGLFLWFLKRERQEEYIEEKKRVDICRETPNICPHSGENTEYDTIPHTNRTILKEDPANTVYSTVEIPKKMENPHSLLTMPDTPRLFAYENVI

SEQ ID NO: 12326 - protein, 335 aa, Homo sapiens
MAGSPTCLTLIYILWQLTGSAASGPVKELVGSVGGAVTFPLKSKVKQVDSIVWTFNTTPLVTIQPEGGTIIVTQNRNRERVDFPDGGYSLKLSKLKKNDSGIYYVGIYSSSLQQPSTQEYVLHVYEHLSKPKVTMGLQSNKNGTCVTNLTCCMEHGEEDVIYTWKALGQAANESHNGSILPISWRWGESDMTFICVARNPVSRNFSSPILARKLCEGAADDPDSSMVLLCLLLVPLLLSLFVLGLFLWFLKRERQEEYIEEKKRVDICRETPNICPHSGENTEYDTIPHTNRTILKEDPANTVYSTVEIPKKMENPHSLLTMPDTPRLFAYENVI

SEQ ID NO: 12327 - protein, 296 aa, Homo sapiens
MAGSPTCLTLIYILWQLTGSAASGPVKELVGSVGGAVTFPLKSKVKQVDSIVWTFNTTPLVTIQPEGGTIIVTQNRNRERVDFPDGGYSLKLSKLKKNDSGIYYVGIYSSSLQQPSTQEYVLHVYEHLSKPKVTMGLQSNKNGTCVTNLTCCMEHGEEDVIYTWKALGQAANESHNGSILPISWRWGESDMTFICVARNPVSRNFSSPILARKLCEGAADDPDSSMVLLCLLLVPLLLSLFVLGLFLWFLKRERQEENNPKGRSSKYGLLHCGNTEKDGKSPLTAHDARHTKAICL

SEQ ID NO: 12328 - protein, 165 aa, Homo sapiens
MAGSPTCLTLIYILWQLTGSAASGPVKELVGSVGGAVTFPLKSKVKQVDSIVWTFNTTPLVTIQPEGGTIIVTQNRNRERVDFPDGGYSLKLSKLKKNDSGIYYVGIYSSSLQQPSTQEYVLHVYENNPKGRSSKYGLLHCGNTEKDGKSPLTAHDARHTKAICL

SEQ ID NO: 12329 - protein, 204 aa, Homo sapiens
MAGSPTCLTLIYILWQLTGSAASGPVKELVGSVGGAVTFPLKSKVKQVDSIVWTFNTTPLVTIQPEGGTIIVTQNRNRERVDFPDGGYSLKLSKLKKNDSGIYYVGIYSSSLQQPSTQEYVLHVYEYIEEKKRVDICRETPNICPHSGENTEYDTIPHTNRTILKEDPANTVYSTVEIPKKMENPHSLLTMPDTPRLFAYENVI

SEQ ID NO: 12330 - protein, 236 aa, Homo sapiens
  VARIANT 1: note = misc_feature - Xaa can be any naturally occurring amino acid
XAGSPTCLTLIYILWQLTGSAASGPVKELVGSVGGAVTFPLKSKVKQVDSIVWTFNTTPLVTIQPEGGTIIVTQNRNRERVDFPDGGYSLKLSKLKKNDSGIYYVGIYSSSLQQPSTQEYVLHVYEHLSKPKVTMGLQSNKNGTCVTNLTCCMEHGEEDVIYTWKALGQAANESHNGSILPISWRWGESDMTFICVARNPVSRNFSSPILARKLCEENNPKGRSSKYGLLHCGNTE

SEQ ID NO: 12331 - protein, 532 aa, Homo sapiens
MAGPRPPGDSPAIKEDSTGLGPTHEPFSGQPNSTSGDVLLSRRGPGHAIRPPGRAMVLMQDKGSSQQWPGLGGEGGGTGPLSMLRAALLLISLPWGAQGTASTSLSTAGGHTVPPTGGRYLSIGDGSVMEFEFPEDSEGIIVISSQYPGQANRTAPGPMLRVTSLDTEVLTIKNVSAITWGGGGGFVVSIHSGLAGLAPLHIQLVDAHEAPPTLIEERRDFCIKVSPAEDTPATLSADLAHFSENPILYLLLPLIFVNKCSFGCKVELEVLKGLMQSPQPMLLGLLGQFLVMPLYAFLMAKVFMLPKALALGLIITCSSPGGGGSYLFSLLLGGDVTLAISMTFLSTVAATGFLPLSSAIYSRLLSIHETLHVPISKILGTLLFIAIPIAVGVLIKSKLPKFSQLLLQVVKPFSFVLLLGGLFLAYRMGVFILAGIRLPIVLVGITVPLVGLLVGYCLATCLKLPVAQRRTVSIEVGVQNSLLALAMLQLSLRRLQADYASQAPFIVALSGTSEMLALVIGHFIYSSLFPVP

SEQ ID NO: 12332 - protein, 448 aa, Homo sapiens
MVLMQDKGSSQQWPGLGGEGGGTGPLSMLRAALLLISLPWGAQGTASTSLSTAGGHTVPPTGGRYLSIGDGSVMEFEFPEDSEGIIVISSQYPGQANRTAPGPMLRVTSLDTEVLTIKNLVDAHEAPPTLIEERRDFCIKVSPAEDTPATLSADLAHFSENPILYLLLPLIFVNKCSFGCKVELEVLKGLMQSPQPMLLGLLGQFLVMPLYAFLMAKVFMLPKALALGLIITCSSPGGGGSYLFSLLLGGDVTLAISMTFLSTVAATGFLPLSSAIYSRLLSIHETLHVPISKILGTLLFIAIPIAVGVLIKSKLPKFSQLLLQVVKPFSFVLLLGGLFLAYRMGVFILAGIRLPIVLVGITVPLVGLLVGYCLATCLKLPVAQRRTVSIEVGVQNSLLALAMLQLSLRRLQADYASQAPFIVALSGTSEMLALVIGHFIYSSLFPVP

SEQ ID NO: 12333 - protein, 218 aa, Homo sapiens
MVLMQDKGSSQQWPGLGGEGGGTGPLSMLRAALLLISLPWGAQGTASTSLSTAGGHTVPPTGGRYLSIGDGSVMEFEFPEDSEGIIVISSQYPGQANRTAPGPMLRVTSLDTEVLTIKNVSAITWGGGGGFVVSIHSGLAGLAPLHIQLVDAHEAPPTLIEERRDFCIKVSPAEDTPATLSADLAHFSENPILYLLLPLIFVNKCSFGCKVELEVLKG

SEQ ID NO: 12334 - protein, 477 aa, Homo sapiens
MVLMQDKGSSQQWPGLGGEGGGTGPLSMLRAALLLISLPWGAQGTASTSLSTAGGHTVPPTGGRYLSIGDGSVMEFEFPEDSEGIIVISSQYPGQANRTAPGPMLRVTSLDTEVLTIKNVSAITWGGGGGFVVSIHSGLAGLAPLHIQLVDAHEAPPTLIEERRDFCIKVSPAEDTPATLSADLAHFSENPILYLLLPLIFVNKCSFGCKVELEVLKGLMQSPQPMLLGLLGQFLVMPLYAFLMAKVFMLPKALALGLIITCSSPGGGGSYLFSLLLGGDVTLAISMTFLSTVAATGFLPLSSAIYSRLLSIHETLHVPISKILGTLLFIAIPIAVGVLIKSKLPKFSQLLLQVVKPFSFVLLLGGLFLAYRMGVFILAGIRLPIVLVGITVPLVGLLVGYCLATCLKLPVAQRRTVSIEVGVQNSLLALAMLQLSLRRLQADYASQAPFIVALSGTSEMLALVIGHFIYSSLFPVP

SEQ ID NO: 12335 - protein, 477 aa, Homo sapiens; identical to SEQ ID NO: 12334

SEQ ID NO: 12336 - protein, 43 aa, Homo sapiens
GAIMGIFFCLSGVGSLLGSSLVALLSLPGGWLHCPKDFAEEEL

SEQ ID NO: 12337 - protein, 209 aa, Homo sapiens
MDLGRDATRRFFNWFYWSINLGAVLSLLVVAFIQQNISFLLGYSIPVGCVGLAFFIFLFATPVFITKPPMGSQVSSMLKLALQNCCPQLWQRHSARDRQCARVLADERSPQPGASPQEDIANFQVLVKILPVMVTLVPYWMVYFQMQSTYVLQGLHLHIPNIFPANPANISVALRAQGSSYTIPEAWLLLANVVVVLILVPLKDRLIDP

SEQ ID NO: 12338 - protein, 581 aa, Homo sapiens
MPAPRAREQPRVPGERQPLLPRGARGPRRWRRAAGAAVLLVEMLERAAFFGVTANLVLYLNSTNFNWTGEQATRAALVFLGASYLLAPVGGWLADVYLGRYRAVALSLLLYLAASGLLPATAFPDGRSSFCGEMPASPLGPACPSAGCPRSSPSPYCAPVLYAGLLLLGLAASSVRSNLTSFGADQVMDLGRDATRRFFNWFYWSINLGAVLSLLVVAFIQQNISFLLGYSIPVGCVGLAFFIFLFATPVFITKPPMGSQVSSMLKLALQNCCPQLWQRHSARDRQCARVLADERSPQPGASPQEDIANFQVLVKILPVMVTLVPYWMVYFQMQSTYVLQGLHLHIPNIFPANPANISVALRAQGSSYTIPEAWLLLANVVVVLILVPLKDRLIDPLLLRCKLLPSALQKMALGMFFGFTSVIVAGVLEMERLHYIHHNETVSQQIGEVLYNAAPLSIWWQIPQYLLIGISEIFASIPGLEFAYSEAPRSMQGAIMGIFFCLSGVGSLLGSSLVALLSLPGGWLHCPKDFGNINNCRMDLYFFLLAGIQAVTALLFVWIAGRYERASQGPASHSRFSRDRG

SEQ ID NO: 12339 - protein, 456 aa, Homo sapiens
MPAPRAREQPRVPGERQPLLPRGARGPRRWRRAAGAAVLLVEMLERAAFFGVTANLVLYLNSTNFNWTGEQATRAALVFLGASYLLAPVGGWLADVYLGRYRAVALSLLLYLAASGLLPATAFPDGRSSFCGEMPASPLGPACPSAGCPRSSPSPYCAPVLYAGLLLLGLAASSVRSNLTSFGADQVMDLGRDATRRFFNWFYWSINLGAVLSLLVVAFIQQNISFLLGYSIPVGCVGLAFFIFLFATPVFITKPPMGSQVSSMLKLALQNCCPQLWQRHSARDRQCARVLADERSPQPGASPQEDIANFQVLVKILPVMVTLVPYWMVYFQMQSTYVLQGLHLHIPNIFPANPANISVALRAQGSSYTESWRWSAYTTSTTTRPCPSRLGRSCTTRHHCPSGGRSLSTCSLGSVRSLPASQAWSLPTQRPRAPCRAPSWASSSACRGWAHCWAPA

SEQ ID NO: 12340 - protein, 149 aa, Homo sapiens
MPASPLGPACPSAGCPRSSPSPYCAPVLYAGLLLLGLAASSVRSNLTSFGADQVMDLGRDATRRFFNWFYWSINLGAVLSLLVVAFIQQNISFLLGYSIPVGCVGLAFFIFLFATPVFITKPPMGSQVSSMLKLALQNCCPQLWQRHSA

SEQ ID NO: 12341 - protein, 247 aa, Homo sapiens
  VARIANT 1: note = misc_feature - Xaa can be any naturally occurring amino acid
XPGASPQEDIANFQVLVKILPVMVTLVPYWMVYFQIPEAWLLLANVVVVLILVPLKDRLIDPLLLRCKLLPSALQKMALGMFFGFTSVIVAGVLEMERLHYIHHNETVSQQIGEVLYNAAPLSIWWQIPQYLLIGISEIFASIPGLEFAYSEAPRSMQGAIMGIFFCLSGVGSLLGSSLVALLSLPGGWLHCPKDFGNINNCRMDLYFFLLAGIQAVTALLFVWIAGRYERASQGPASHSRFSRDRG

SEQ ID NO: 12342 - protein, 353 aa, Homo sapiens
MGIFPGIILIFLRVKFATAAVIHQKSTTVSHEMSGLNWKPFVYGGLASIVAEFGTFPVDLTKTRLQVQGQSIDARFKEIKYRGMFHALFRICKEEGVLALYSGIAPALLRQASYGTIKIGIYQSLKRLFVERLEDETLLINMICGVVSGVISSTIANPTDVLKIRMQAQGSLFQGSMIGSFIDIYQQEGTRGLWRCLCSKAVTGCVLWLMPVIPALWEANAGGSLEGVVPTAQRAAIVVGVELPVYDITKKHLILSGMMGDTILTHFVSSFTCGLAGALASNPVDVVRTRMMNQRAIVGHVDLYKGTVDGILKMWKHEGFFALYKGFWPNWLRLGPWNIIFFITYEQLKRLQI

SEQ ID NO: 12343 - protein, 353 aa, Homo sapiens; identical to SEQ ID NO: 12342

SEQ ID NO: 12344 - protein, 322 aa, Homo sapiens
MGIFPGIILIFLRVKFATAAVIHQKSTTVSHEMSGLNWKPFVYGGLASIVAEFGTFPVDLTKTRLQVQGQSIDARFKEIKYRGMFHALFRICKEEGVLALYSGIAPALLRQASYGTIKIGIYQSLKRLFVERLEDETLLINMICGVVSGVISSTIANPTDVLKIRMQAQGSLFQGSMIGSFIDIYQQEGTRGLWRGVVPTAQRAAIVVGVELPVYDITKKHLILSGMMGDTILTHFVSSFTCGLAGALASNPVDVVRTRMMNQRAIVGHVDLYKGTVDGILKMWKHEGFFALYKGFWPNWLRLGPWNIIFFITYEQLKRLQI

SEQ ID NO: 12345 - protein, 198 aa, Homo sapiens
MGIFPGIILIFLRVKFATAAVIVSGHQKSTTVSHEMSGLNWKPFVYGGLASIVAEFGTFPVDLTKTRLQVQGQSIDARFKEIKYRGMFHALFRICKEEGVLALYSGIAPALLRQASYGTIKIGIYQSLKRLFVERLEDETLLINMICGVVSGVISSTIANPTDVLKIRMQAQGSLFQGSMIGSFIDIYQQEGTRGLWR

SEQ ID NO: 12346 - protein, 325 aa, Homo sapiens
MGIFPGIILIFLRVKFATAAVIVSGHQKSTTVSHEMSGLNWKPFVYGGLASIVAEFGTFPVDLTKTRLQVQGQSIDARFKEIKYRGMFHALFRICKEEGVLALYSGIAPALLRQASYGTIKIGIYQSLKRLFVERLEDETLLINMICGVVSGVISSTIANPTDVLKIRMQAQGSLFQGSMIGSFIDIYQQEGTRGLWRGVVPTAQRAAIVVGVELPVYDITKKHLILSGMMGDTILTHFVSSFTCGLAGALASNPVDVVRTRMMNQRAIVGHVDLYKGTVDGILKMWKHEGFFALYKGFWPNWLRLGPWNIIFFITYEQLKRLQI

SEQ ID NO: 12347 - protein, 325 aa, Homo sapiens; identical to SEQ ID NO: 12346

SEQ ID NO: 12348 - protein, 290 aa, Homo sapiens
MSGLNWKPFVYGGLASIVAEFGTFPVDLTKTRLQVQGQSIDARFKEIKYRGMFHALFRICKEEGVLALYSGIAPALLRQASYGTIKIGIYQSLKRLFVERLEDETLLINMICGVVSGVISSTIANPTDVLKIRMQAQGSLFQGSMIGSFIDIYQQEGTRGLWRGVVPTAQRAAIVVGVELPVYDITKKHLILSGMMGDTILTHFVSSFTCGLAGALASNPVDVVRTRMMNQRAIVGHVDLYKGTVDGILKMWKHEGFFALYKGFWPNWLRLGPWNIIFFITYEQLKRLQI

SEQ ID NO: 12349 - protein, 75 aa, Homo sapiens
MLCLCLYVPVIGEAQTEFQYFESKGLPAELKSIFKLSVFIPSQEFSTYRQWKQCPLCTKGDLQIQGRRQKEAQAL

SEQ ID NO: 12350 - protein, 469 aa, Homo sapiens
MLCLCLYVPVIGEAQTEFQYFESKGLPAELKSIFKLSVFIPSQEFSTYRQWKQKIVQAGDKDLDGQLDFEEFVHYLQDHEKKLRLVFKSLDKKNDGRIDAQEIMQSLRDLGVKISEQQAEKILKSMDKNGTMTIDWNEWRDYHLLHPVENIPEIILYWKHSTIFDVGENLTVPDEFTVEERQTGMWWRHLVAGGGAGAVSRTCTAPLDRLKVLMQVHASRSNNMGIVGGFTQMIREGGARSLWRGNGINVLKIAPESAIKFMAYEQIKRLVGSDQETLRIHERLVAGSLAGAIAQSSIYPMEVLKTRMALRKTGQYSGMLDCARRILAREGVAAFYKGYVPNMLGIIPYAGIDLAVYETLKNAWLQHYAVNSADPGVFVLLACGTMSSTCGQLASYPLALVRTRMQAQASIEGAPEVTMSSLFKHILRTEGAFGLYRGLAPNFMKVIPAVSISYVVYENLKITLGVQSR

SEQ ID NO: 12351 - protein, 501 aa, Homo sapiens
MLQMLWHFLASFFPRAGCHGSREGDDREVRGTPAPAWRDQMASFLGKQDGRAEATEKRPTILLVVGPAEQFPKKIVQAGDKDLDGQLDFEEFVHYLQDHEKKLRLVFKSLDKKNDGRIDAQEIMQSLRDLGVKISEQQAEKILKRIRTGHFWGPVTYMDKNGTMTIDWNEWRDYHLLHPVENIPEIILYWKHSTIFDVGENLTVPDEFTVEERQTGMWWRHLVAGGGAGAVSRTCTAPLDRLKVLMQVHASRSNNMGIVGGFTQMIREGGARSLWRGNGINVLKIAPESAIKFMAYEQIKRLVGSDQETLRIHERLVAGSLAGAIAQSSIYPMEVLKTRMALRKTGQYSGMLDCARRILAREGVAAFYKGYVPNMLGIIPYAGIDLAVYETLKNAWLQHYAVNSADPGVFVLLACGTMSSTCGQLASYPLALVRTRMQAQASIEGAPEVTMSSLFKHILRTEGAFGLYRGLAPNFMKVIPAVSISYVVYENLKITLGVQSR

SEQ ID NO: 12352 - protein, 489 aa, Homo sapiens
MLQMLWHFLASFFPRAGCHGSREGDDREVRGTPAPAWRDQMASFLGKQDGRAEATEKRPTILLVVGPAEQFPKKIVQAGDKDLDGQLDFEEFVHYLQDHEKKLRLVFKSLDKKNDGRIDAQEIMQSLRDLGVKISEQQAEKILKSMDKNGTMTIDWNEWRDYHLLHPVENIPEIILYWKHSTIFDVGENLTVPDEFTVEERQTGMWWRHLVAGGGAGAVSRTCTAPLDRLKVLMQVHASRSNNMGIVGGFTQMIREGGARSLWRGNGINVLKIAPESAIKFMAYEQIKRLVGSDQETLRIHERLVAGSLAGAIAQSSIYPMEVLKTRMALRKTGQYSGMLDCARRILAREGVAAFYKGYVPNMLGIIPYAGIDLAVYETLKNAWLQHYAVNSADPGVFVLLACGTMSSTCGQLASYPLALVRTRMQAQASIEGAPEVTMSSLFKHILRTEGAFGLYRGLAPNFMKVIPAVSISYVVYENLKITLGVQSR

SEQ ID NO: 12353 - protein, 515 aa, Homo sapiens
MVSSVLCRCVASPPPDAAATAASSSASSPASVGDPCGGAICGGPDHRLRLWRLFQTLDVNRDGGLCVNDLAVGLRRLGLHRTEGELQKIVQAGDKDLDGQLDFEEFVHYLQDHEKKLRLVFKSLDKKNDGRIDAQEIMQSLRDLGVKISEQQAEKILKRIRTGHFWGPVTYMDKNGTMTIDWNEWRDYHLLHPVENIPEIILYWKHSTIFDVGENLTVPDEFTVEERQTGMWWRHLVAGGGAGAVSRTCTAPLDRLKVLMQVHASRSNNMGIVGGFTQMIREGGARSLWRGNGINVLKIAPESAIKFMAYEQIKRLVGSDQETLRIHERLVAGSLAGAIAQSSIYPMEVLKTRMALRKTGQYSGMLDCARRILAREGVAAFYKGYVPNMLGIIPYAGIDLAVYETLKNAWLQHYAVNSADPGVFVLLACGTMSSTCGQLASYPLALVRTRMQAQASIEGAPEVTMSSLFKHILRTEGAFGLYRGLAPNFMKVIPAVSISYVVYENLKITLGVQSR

SEQ ID NO: 12354 - protein, 503 aa, Homo sapiens
MVSSVLCRCVASPPPDAAATAASSSASSPASVGDPCGGAICGGPDHRLRLWRLFQTLDVNRDGGLCVNDLAVGLRRLGLHRTEGELQKIVQAGDKDLDGQLDFEEFVHYLQDHEKKLRLVFKSLDKKNDGRIDAQEIMQSLRDLGVKISEQQAEKILKSMDKNGTMTIDWNEWRDYHLLHPVENIPEIILYWKHSTIFDVGENLTVPDEFTVEERQTGMWWRHLVAGGGAGAVSRTCTAPLDRLKVLMQVHASRSNNMGIVGGFTQMIREGGARSLWRGNGINVLKIAPESAIKFMAYEQIKRLVGSDQETLRIHERLVAGSLAGAIAQSSIYPMEVLKTRMALRKTGQYSGMLDCARRILAREGVAAFYKGYVPNMLGIIPYAGIDLAVYETLKNAWLQHYAVNSADPGVFVLLACGTMSSTCGQLASYPLALVRTRMQAQASIEGAPEVTMSSLFKHILRTEGAFGLYRGLAPNFMKVIPAVSISYVVYENLKITLGVQSR

SEQ ID NO: 12355 - protein, 165 aa, Homo sapiens
  VARIANT 1: note = misc_feature - Xaa can be any naturally occurring amino acid
XTVEERQTGMWWRHLVAGGGAGAVSRTCTAPLDRLKVLMQVLKTRMALRKTGQYSGMLDCARRILAREGVAAFYKGYVPNMLGIIPYAGIDLAVYETLKNAWLQHYAVNSADPGVFVLLACGTMSSTCGQLASYPLALVRTRMQAQGKAGPGQSPGRSGGADRSI

SEQ ID NO: 12356 - protein, 81 aa, Homo sapiens
MEQQDQSMKEGRLTLVLALATLIAAFGSSFQYGYNVAAVNSPALLMQQFYNETYYGRTGEFMEDFPLTLLWSVTVSMFPFG

SEQ ID NO: 12357 - protein, 139 aa, Homo sapiens
MEQQDQSMKEGRLTLVLALATLIAAFGSSFQYGYNVAAVNSPALLMQQFYNETYYGRTGEFMEDFPLTLLWSVTVSMFPFGGFIGSLLVGPLVNKFGRKGALLFNNIFSIVPAILMGCSRVATSFELIIISRLLVGICA

SEQ ID NO: 12358 - protein, 166 aa, Homo sapiens
MEQQDQSMKEGRLTLVLALATLIAAFGSSFQYGYNVAAVNSPALLMQQFYNETYYGRTGEFMEDFPLTLLWSVTVSMFPFGGFIGSLLVGPLVNKFGRKGALLFNNIFSIVPAILMGCSRVATSFELIIISRLLVGICAGVSSNVVPMYLGELAPKNLRGALGVVP

SEQ ID NO: 12359 - protein, 190 aa, Homo sapiens
MEQQDQSMKEGRLTLVLALATLIAAFGSSFQYGYNVAAVNSPALLMQQFYNETYYGRTGEFMEDFPLTLLWSVTVSMFPFGGFIGSLLVGPLVNKFGRKGALLFNNIFSIVPAILMGCSRVATSFELIIISRLLVGICAGVSSNVVPMYLGELAPKNLRGALGVVPQLFITVGILVAQIFGLRNLLANVD

SEQ ID NO: 12360 - protein, 190 aa, Homo sapiens; identical to SEQ ID NO: 12359

SEQ ID NO: 12361 - protein, 190 aa, Homo sapiens; identical to SEQ ID NO: 12359

SEQ ID NO: 12362 - protein, 190 aa, Homo sapiens; identical to SEQ ID NO: 12359

SEQ ID NO: 12363 - protein, 244 aa, Homo sapiens
MEQQDQSMKEGRLTLVLALATLIAAFGSSFQYGYNVAAVNSPALLMQQFYNETYYGRTGEFMEDFPLTLLWSVTVSMFPFGGFIGSLLVGPLVNKFGRKGALLFNNIFSIVPAILMGCSRVATSFELIIISRLLVGICAGVSSNVVPMYLGELAPKNLRGALGVVPQLFITVGILVAQIFGLRNLLANVDGEFRTSREHPHPFTTTLGPLLVFQSHHHRTGLSADWSLLTGWMSLGGPSCPEPT

SEQ ID NO: 12364 - protein, 501 aa, Homo sapiens
MEQQDQSMKEGRLTLVLALATLIAAFGSSFQYGYNVAAVNSPALLMQQFYNETYYGRTGEFMEDFPLTLLWSVTVSMFPFGGFIGSLLVGPLVNKFGRKGALLFNNIFSIVPAILMGCSRVATSFELIIISRLLVGICAGVSSNVVPMYLGELAPKNLRGALGVVPQLFITVGILVAQIFGLRNLLANVDGWPILLGLTGVPAALQLLLLPFFPESPRYLLIQKKDEAAAKKALQTLRGWDSVDREVAEIRQEDEAEKAAGFISVLKLFRMRSLRWQLLSIIVLMGGQQLSGVNAIYYYADQIYLSAGVPEEHVQYVTAGTGAVNVVMTFCAVFVVELLGRRLLLLLGFSICLIACCVLTAALALQDTVSWMPYISIVCVISYVIGHALGPSPIPALLITEIFLQSSRPSAFMVGGSVHWLSNFTVGLIFPFIQEGLGPYSFIVFAVICLLTTIYIFLIVPETKAKTFIEINQIFTKMNKVSEVYPEKEELKELPPVTSEQ

SEQ ID NO: 12365 - protein, 313 aa, Homo sapiens
MALLVDRVRGHWRIAAGLLFNLLVSICIVFLNKWIYVYHGFPNMSLTLVHFVVTWLGLYICQKLDIFAPKSLPPSRLLLLALSFCGFVVFTNLSLQNNTIGTYQLAKAMTTPVIIAIQTFCYQKTFSTRIQLTLIPITLGVILNSYYDVKFNFLGMVFAALGVLVTSLYQVWVGAKQHELQVNSMQLLYYQAPMSSAMLLVAVPFFEPVFGEGGIFGPWSVSALLMVLLSGVIAFMVNLSIYWIIGNTSPVTYNMFGHFKFCITLFGGYVLFKDPLSINQALGILCTLFGILAYTHFKLSEQEGSRSKLAQRP

SEQ ID NO: 12366 - protein, 125 aa, Homo sapiens
QAPMSSAMLLVAVPFFEPVFGEGGIFGPWSVSALSTRLECSGTIMAHCSLSLLGSSNPPASTSPVAGTTGAHQHTWLIFIFFVETEFCHVAQADLKLLSSSHLSASASRSAGITGLSHHTWPVIS

SEQ ID NO: 12367 - protein, 39 aa, Homo sapiens
MKNVMVMILVVDTKILILIMKVNFDILEREKHHMLKIMQ

SEQ ID NO: 12368 - protein, 39 aa, Homo sapiens; identical to SEQ ID NO: 12367

SEQ ID NO: 12369 - protein, 38 aa, Homo sapiens
MKVHMHTKFCLICLLTFIFHHCNHCHEEHDHGPEALHR

SEQ ID NO: 12370 - protein, 126 aa, Homo sapiens
MKVHMHTKFCLICLLTFIFHHCNHCHEEHDHGPEALHRQHRGMTELEPSKFSKQAAENEKKYYIEKLFERYGENGRLSFFGLEKLLTNLGLGERKVVEINHEDLGHDHVSHLDILAVQEGKHFHSH

SEQ ID NO: 12371 - protein, 130 aa, Homo sapiens
MKVHMHTKFCLICLLTFIFHHCNHCHEEHDHGPEALHRQHRGMTELEPSKFSKQAAENEKKYYIEKLFERYGENGRLSFFGLEKLLTNLGLGERKVVEINHEDLGHDHVSHLDILAVQEGKHFHSHNHQH

SEQ ID NO: 12372 - protein, 831 aa, Homo sapiens
MKVHMHTKFCLICLLTFIFHHCNHCHEEHDHGPEALHRQHRGMTELEPSKFSKQAAENEKKYYIEKLFERYGENGRLSFFGLEKLLTNLGLGERKVVEINHEDLGHDHVSHLDILAVQEGKHFHSHNHQHSHNHLNSENQTVTSVSTKRNHKCDPEKETVEVSVKSDDKHMHDHNHRLRHHHRLHHHLDHNNTHHFHNDSITPSERGEPSNEPSTETNKTQEQSDVKLPKGKRKKKGRKSNENSEVITPGFPPNHDQGEQYEHNRVHKPDRVHNPGHSHVHLPERNGHDPGRGHQDLDPDNEGELRHTRKREAPHVKNNAIISLRKDLNEDDHHHECLNVTQLLKYYGHGANSPISTDLFTYLCPALLYQIDSRLCIEHFDKLLVEDINKDKNLVPEDEANIGASAWICGIISITVISLLSLLGVILVPIINQGCFKFLLTFLVALAVGTMSGDALLHLLPHSQGGHDHSHQHAHGHGHSHGHESNKFLEEYDAVLKGLVALGGIYLLFIIEHCIRMFKHYKQQRGKQKWFMKQNTEESTIGRKLSDHKLNNTPDSDWLQLKPLAGTDDSVVSEDRLNETELTDLEGQQESPPKNYLCIEEEKIIDHSHSDGLHTIHEHDLHAAAHNHHGENKTVLRKHNHQWHHKHSHHSHGPCHSGSDLKETGIANIAWMVIMGDGIHNFSDGLAIGAAFSAGLTGGISTSIAVFCHELPHELGDFAVLLKAGMTVKQAIVYNLLSAMMAYIGMLIGTAVGQYANNITLWIFAVTAGMFLYVALVDMLPEMLHGDGDNEEHGFCPVGQFILQNLGLLFGFAIMLVIALYEDKIVFDIQF

SEQ ID NO: 12373 - protein, 831 aa, Homo sapiens; identical to SEQ ID NO: 12372

SEQ ID NO: 12374 - protein, 202 aa, Homo sapiens
MKKTFYKRLLLYFIALAIGTLYSNALFQLIPEAFGFNPLEDYYVSKSAVVFGGFYLFFFTEKILKILLKQKNEHHHGHSHYASESLPSKKDQEEGVMEKLQNGDLDHMIPQHCSSELDGKAPMVDEKVIVGSLSVQDLQASQSACYWLKGVRYSDIGTLAWMITLSDGLHNFIDGLAIGASFTVSVFQGISTSVAILCEEFP

SEQ ID NO: 12375 - protein, 53 aa, Homo sapiens
MKLLLLHPAFQSCLLLTLLGLWRTTPEAHASSLGAPAISAASFLQDLIHRYGE

SEQ ID NO: 12376 - protein, 89 aa, Homo sapiens
MKLLLLHPAFQSCLLLTLLGLWRTTPEAHASSLGAPAISAASFLQDLIHRYGEGDSLTLQQLKALLNHLDVGVGRGNVTQHVQGHRNLS

SEQ ID NO: 12377 - protein, 90 aa, Homo sapiens
MKLLLLHPAFQSCLLLTLLGLWRTTPEAHASSLGAPAISAASFLQDLIHRYGEGDSLTLQQLKALLNHLDVGVGRGNVTQHVQGHRNLST

SEQ ID NO: 12378 - protein, 122 aa, Homo sapiens
MKLLLLHPAFQSCLLLTLLGLWRTTPEAHASSLGAPAISAASFLQDLIHRYGEGDSLTLQQLKALLNHLDVGVGRGNVTQHVQGHRNLSTCFSSGDLFTAHNFSEQSRIGSSELQEFCPTIL

SEQ ID NO: 12379 - protein, 127 aa, Homo sapiens
MKLLLLHPAFQSCLLLTLLGLWRTTPEAHASSLGAPAISAASFLQDLIHRYGEGDSLTLQQLKALLNHLDVGVGRGNVTQHVQGHRNLSTCFSSGDLFTAHNFSEQSRIGSSELQEFCPTILQQLDS

SEQ ID NO: 12380 - protein, 155 aa, Homo sapiens
MKLLLLHPAFQSCLLLTLLGLWRTTPEAHASSLGAPAISAASFLQDLIHRYGEGDSLTLQQLKALLNHLDVGVGRGNVTQHVQGHRNLSTCFSSGDLFTAHNFSEQSRIGSSELQEFCPTILQQLDSRACTSENQENEENEQTEEGRPSAVEVWG

SEQ ID NO: 12381 - protein, 492 aa, Homo sapiens
MKLLLLHPAFQSCLLLTLLGLWRTTPEAHASSLGAPAISAASFLQDLIHRYGEGDSLTLQQLKALLNHLDVGVGRGNVTQHVQGHRNLSTCFSSGDLFTAHNFSEQSRIGSSELQEFCPTILQQLDSRACTSENQENEENEQTEEGRPSAVEVWGFGFLSVSLINLASLLGVLVLPCTEKAFFSRVLTYFIALSIGTLLSNALFQLIPEAFGFNPLEDYYVSKSAVVFGGFYLFFFTEKILKILLKQKNEHHHGHSHYASESLPSKKDQEEGVMEKLQNGDLDHMIPQHCSSELDGKAPMVDEKVIVGSLSVQDLQASQSACYWLKGVRYSDIGTLAWMITLSDGLHNFIDGLAIGASFTVSVFQGISTSVAILCEEFPHELGDFVILLNAGMSIQQALFFNFLSACCCYLGLAFGILAGSHFSANWIFALAGGMFLYISLADMFPEMNEVCQEDERKGSILIPFIIQNLGLLTGFTIMVVLTMYSGQIQIG

SEQ ID NO: 12382 - protein, 481 aa, Homo sapiens
MKLLLLHPAFQSCLLLTLLGLWRTTPEAHASSLGAPAISAASFLQDLIHRYGEGDSLTLQQLKALLNHLDVGVGRGNVTQHVQGHRNLSTCFSSGDLFTAHNFSEQSRIGSSELQEFCPTILQQLDSRACTSENQENEENEQTEEGRPSAVEVWGYGLLCVTVISLCSLLGASVVPFMKKTFYKRLLLYFIALAIGTLYSNALFQLIPEAFGFNPLEDYYVSKSAVVFGGFYLFFFTEKILKILLKQKNEHHHGHSHYASESLPSKKDQEEGVMEKLQNGDLDHMIPQHCSSELDGKAPMVDEKVIVGSLSVQDLQASQSACYWLKGVRYSDIGTLAWMITLSDGLHNFIDGLAIGASFTVSVFQGISTSVAILCEEFPHELGDFVILLNAGMSIQQALFFNFLSACCCYLGLAFGILAGSHFSANWIFALAGGMFLYISLADMMEFCSVAQAGVQWCHLSSLQPLPLGLKRLSCLSLPSN

SEQ ID NO: 12383 - protein, 492 aa, Homo sapiens
MKLLLLHPAFQSCLLLTLLGLWRTTPEAHASSLGAPAISAASFLQDLIHRYGEGDSLTLQQLKALLNHLDVGVGRGNVTQHVQGHRNLSTCFSSGDLFTAHNFSEQSRIGSSELQEFCPTILQQLDSRACTSENQENEENEQTEEGRPSAVEVWGYGLLCVTVISLCSLLGASVVPFMKKTFYKRLLLYFIALAIGTLYSNALFQLIPEAFGFNPLEDYYVSKSAVVFGGFYLFFFTEKILKILLKQKNEHHHGHSHYASESLPSKKDQEEGVMEKLQNGDLDHMIPQHCSSELDGKAPMVDEKVIVGSLSVQDLQASQSACYWLKGVRYSDIGTLAWMITLSDGLHNFIDGLAIGASFTVSVFQGISTSVAILCEEFPHELGDFVILLNAGMSIQQALFFNFLSACCCYLGLAFGILAGSHFSANWIFALAGGMFLYISLADMFPEMNEVCQEDERKGSILIPFIIQNLGLLTGFTIMVVLTMYSGQIQIG

SEQ ID NO: 12384 - protein, 492 aa, Homo sapiens; identical to SEQ ID NO: 12383

SEQ ID NO: 12385 - protein, 184 aa, Homo sapiens
MASLVSLELGLLLAVLVVTATASPPAGLLSLLTSGQGALDQEALGGLLNTLADRVHCANGPCGKACVDIPQLLEEAVGAGAPGSAGGVLAALLDHVRSGSCFHALPSPQYFVDFVFQQHSSEVPMTLAELSALMQRLGVGREAHSDHSHRHRGASSRDPVPLISSSNSSSVWDTVCLSARDVMA

SEQ ID NO: 12386 - protein, 647 aa, Homo sapiens
MASLVSLELGLLLAVLVVTATASPPAGLLSLLTSGQGALDQEALGGLLNTLADRVHCANGPCGKCLSVEDALGLGEPEGSGLPPGPVLEARYVARLSAAAVLYLSNPEGTCEDARAGLWASHADHLLALLESPKALTPGLSWLLQRMQARAAGQTPKMACVDIPQLLEEAVGAGAPGSAGGVLAALLDHVRSGSCFHALPSPQYFVDFVFQQHSSEVPMTLAELSALMQRLGVGREAHSDHSHRHRGASSRDPVPLISSSNSSSVWDTVCLSARDVMAAYGLSEQAGVTPEAWAQLSPALLQQQLSGACTSQSRPPVQDQLSQSERYLYGSLATLLICLCAVFGLLLLTCTGCRGVTHYILQTFLSLAVGAVTGDAVLHLTPKVLGLHTHSEEGLSPQPTWRLLAMLAGLYAFFLFENLFNLLLPRDPEDLEDGPCGHSSHSHGGHSHGVSLQLAPSELRQPKPPHEGSRADLVAEESPELLNPEPRRLSPELRLLPYMITLGDAVHNFADGLAVGAAFASSWKTGLATSLAVFCHELPHELGDFAALLHAGLSVRQALLLNLASALTAFAGLYVALAVGVSEESEAWILAVATGLFLYVALCDMLPAMLKVRDPRPWLLFLLHNVGLLGGWTVLLLLSLYEDDITF

SEQ ID NO: 12387 - protein, 622 aa, Homo sapiens
MVDVVGLERETGPRGSPWPGLPLPSLVGPAPLLTCLCPQCLSVEDALGLGEPEGSGLPPGPVLEARYVARLSAAAVLYLSNPEGTCEDARAGLWASHADHLLALLESPKALTPGLSWLLQRMQARAAGQTPKMACVDIPQLLEEAVGAGAPGSAGGVLAALLDHVRSGSCFHALPSPQYFVDFVFQQHSSEVPMTLAELSALMQRLGVGREAHSDHSHRHRGASSRDPVPLISSSNSSSVWDTVCLSARDVMAAYGLSEQAGVTPEAWAQLSPALLQQQLSGACTSQSRPPVQDQLSQSERYLYGSLATLLICLCAVFGLLLLTCTGCRGVTHYILQTFLSLAVGAVTGDAVLHLTPKVLGLHTHSEEGLSPQPTWRLLAMLAGLYAFFLFENLFNLLLPRDPEDLEDGPCGHSSHSHGGHSHGVSLQLAPSELRQPKPPHEGSRADLVAEESPELLNPEPRRLSPELRLLPYMITLGDAVHNFADGLAVGAAFASSWKTGLATSLAVFCHELPHELGDFAALLHAGLSVRQALLLNLASALTAFAGLYVALAVGVSEESEAWILAVATGLFLYVALCDMLPAMLKVRDPRPWLLFLLHNVGLLGGWTVLLLLSLYEDDITF

SEQ ID NO: 12388 - protein, 239 aa, Homo sapiens
MMGSPEQNHYLAQLFGLYGENGTLTAGGLARLLHSLGLGRVQGLRLGQHGPLTGRAASPAADNSTHRPQNPELSVDVWAGMPLGPSGWGDLEESKAPHLPRGPAPSGLDLLHRLLLLDHSLADHLNEDCLNGSQLLVNFGLSPAAPLTPRQFALLCPALLYQIDSRVCIGAPAPAPPGDLLSALLQSALAVLLLSLPSPLSLLLLRLLGPRLLRPLLGFLGALAVGTLCGDALLHLLPH

SEQ ID NO: 12389 - protein, 123 aa, Homo sapiens
MMGSPVSHLLAGFCVWVVLGWVGGSVPNLGPAEQEQNHYLAQLFGLYGENGTLTAGGLARLLHSLGLGRVQGLRLGQHGPLTGRAASPAADNSTHRPQNPELSVDVWAGMPLGPSGWGDLEES

SEQ ID NO: 12390 - protein, 126 aa, Homo sapiens
MMGSPVSHLLAGFCVWVVLGWVGGSVPNLGPAEQEQNHYLAQLFGLYGENGTLTAGGLARLLHSLGLGRVQGLRLGQHGPLTGRAASPAADNSTHRPQNPELSVDVWAGMPLGPSGWGDLEESKAP

SEQ ID NO: 12391 - protein, 129 aa, Homo sapiens
MMGSPVSHLLAGFCVWVVLGWVGGSVPNLGPAEQEQNHYLAQLFGLYGENGTLTAGGLARLLHSLGLGRVQGLRLGQHGPLTGRAASPAADNSTHRPQNPELSVDVWAGMPLGPSGWGDLEESKAPHLP

SEQ ID NO: 12392 - protein, 156 aa, Homo sapiens
MMGSPVSHLLAGFCVWVVLGWVGGSVPNLGPAEQEQNHYLAQLFGLYGENGTLTAGGLARLLHSLGLGRVQGLRLGQHGPLTGRAASPAADNSTHRPQNPELSVDVWAGMPLGPSGWGDLEESKAPHLPRGPAPSGLDLLHRLLLLDHSLADHLNE

SEQ ID NO: 12393 - protein, 540 aa, Homo sapiens
MMGSPVSHLLAGFCVWVVLGWVGGSVPNLGPAEQEQNHYLAQLFGLYGENGTLTAGGLARLLHSLGLGRVQGLRLGQHGPLTGRAASPAADNSTHRPQNPELSVDVWAGMPLGPSGWGDLEESKAPHLPRGPAPSGLDLLHRLLLLDHSLADHLNEDCLNGSQLLVNFGLSPAAPLTPRQFALLCPALLYQIDSRVCIGAPAPAPPGDLLSALLQSALAVLLLSLPSPLSLLLLRLLGPRLLRPLLGFLGALAVGTLCGDALLHLLPHAQEGRHAGPGGLPEKDLGPGLSVLGGLFLLFVLENMLGLLRHRGLRPRCCRRKRRNLETRNLDPENGSGMALQPLQAAPEPGAQGQREKNSQHPPALAPPGHQGHSHGHQGGTDITWMVLLGDGLHNLTDGLAIGAAFSDGFSSGLSTTLAVFCHELPHELGDFAMLLQSGLSFRRLLLLSLVSGALGLGGAVLGVGLSLGPVPLTPWVFGVTAGVFLYVALVDMLPALLRPPEPLPTPHVLLQGLGLLLGGGLMLAITLLEERLLPVTTEG

SEQ ID NO: 12394 - protein, 540 aa, Homo sapiens; identical to SEQ ID NO: 12393

SEQ ID NO: 12395 - protein, 685 aa, Homo sapiens
MAEDKSKRDSIEMSMKGCQTNNGFVHNEDILEQTPDPGSSTDNLKHSTRGILGSQEPDFKGVQPYAGMPKEVLFQFSGQARYRIPREILFWLTVASVLVLIAATIAIIALSPKCLDWWQEGPMYQIYPRSFKDSNKDGNGDLKGIQDKLDYITALNIKTVWITSFYKSSLKDFRYGVEDFREVDPIFGTMEDFENLVAAIHDKGLKLIIDFIPNHTSDKHIWFQLSRTRTGKYTDYYIWHDCTHENGKTIPPNNWLSVYGNSSWHFDEVRNQCYFHQFMKEQPDLNFRNPDVQEEIKEILRFWLTKGVDGFSLDAVKFLLEAKHLRDEIQVNKTQIPDTVTQYSELYHDFTTTQVGMHDIVRSFRQTMDQYSTEPGRYRFMGTEAYAESIDRTVMYYGLPFIQEADFPFNNYLSMLDTVSGNSVYEVITSWMENMPEGKWPNWMIGGPDSSRLTSRLGNQYVNVMNMLLFTLPGTPITYYGEEIGMGNIVAANLNESYDINTLRSKSPMQWDNSSNAGFSEASNTWLPTNSDYHTVNVDVQKTQPRSALKLYQDLSLLHANELLLNRGWFCHLRNDSHYVVYTRELDGIDRIFIVVLNFGESTLLNLHNMISGLPAKMRIRLSTNSADKGSKVDTSGIFLDKGEGLIFEHNTKNLLHRQTAFRDRCFVSNRACYSSVLNILYTSC

SEQ ID NO: 12396 - protein, 564 aa, Homo sapiens
MAEDKSKRDSIEMSMKGCQTNNGFVHNEDILEQTPDPGSSTDNLKHSTRGILGSQEPDFKGVQPYAGMPKEVLFQFSGQARYRIPREILFWLTVASVLVLIAATIAIIALSPKCLDWWQEGPMYQIYPRSFKDSNKDGNGDLKGIQDKLDYITALNIKTVWITSFYKSSLKDFRYGVEDFREVDPIFGTMEDFENLVAAIHDKGLKLIIDFIPNHTSDKHIWFQLSRTRTGKYTDYYIWHDCTHENGKTIPPNNWLSVYGNSSWHFDEVRNQCYFHQFMKEQPDLNFRNPDVQEEIKEILRFWLTKGVDGFSLDAVKFLLEAKHLRDEIQVNKTQIPDTVTQYSELYHDFTTTQVGMHDIVRSFRQTMDQYSTEPGRYRFMGTEAYAESIDRTVMYYGLPFIQEADFPFNNYLSMLDTVSGNSVYEVITSWMENMPEGKWPNWMIGGPDSSRLTSRLGNQYVNVMNMLLFTLPGTPITYYGEEIGMGNIVAANLNESYDINTLRSKSPMQWDNSSNAGFSEASNTWLPTNSDYHTVNVDVSISENFMLILETKKWVSTESTHSP

SEQ ID NO: 12397 - protein, 564 aa, Homo sapiens
MAEDKSKRDSIEMSMKGCQTNNGFVHNEDILEQTPDPGSSTDNLKHSTRGILGSQEPDFKGVQPYAGMPKEVLFQFSGQARYRIPREILFWLTVASVLVLIAATIAIIALSPKCLDWWQEGPMYQIYPRSFKDSNKDGNGDLKGIQDKLDYITALNIKTVWITSFYKSSLKDFRYGVEDFREVDPIFGTMEDFENLVAAIHDKGLKLIIDFIPNHTSDKHIWFQLSRTRTGKYTDYYIWHDCTHENGKTIPPNNWLSVYGNSSWHFDEVRNQCYFHQFMKEQPDLNFRNPDVQEEIKEILRFWLTKGVDGFSLDAVKFLLEAKHLRDEIQVNKTQIPDTVTQYSELYHDFTTTQVGMHDIVRSFRQTMDQYSTEPGRYRFMGTEAYAESIDRTVMYYGLPFIQEADFPFNNYLSMLDTVSGNSVYEVITSWMENMPEGKWPNWMIGGPDSSRLTSRLGNQYVNVMNMLLFTLPGTPITYYGEEIGMGNIVAANLNESYDINTLRSKSPMQWDNSSNAGFSEASNTWLPTNSDYHTVNVDSCSVTHARVQWRDLGTLQPLLPGFK

SEQ ID NO: 12398 - protein, 502 aa, Homo sapiens
MAEDKSKRDSIEMSMKGCQTNNGFVHNEDILEQTPDPGSSTDNLKHSTRGILGSQEPDFKGVQPYAGMPKEVLFQFSGQARYRIPREILFWLTVASVLVLIAATIAIIALSPKCLDWWQEGPMYQIYPRSFKDSNKDGNGDLKGIQDKLDYITALNIKTVWITSFYKSSLKDFRYGVEDFREVDPIFGTMEDFENLVAAIHDKGLKLIIDFIPNHTSDKHIWFQLSRTRTGKYTDYYIWHDCTHENGKTIPPNNWLSVYGNSSWHFDEVRNQCYFHQFMKEQPDLNFRNPDVQEEIKEILRFWLTKGVDGFSLDAVKFLLEAKHLRDEIQVNKTQIPDTVTQYSELYHDFTTTQVGMHDIVRSFRQTMDQYSTEPGRYRFMGTEAYAESIDRTVMYYGLPFIQEADFPFNNYLSMLDTVSGNSVYEVITSWMENMPEGKWPNWMIGGPDSSRLTSRLGNQYVNVMNMLLFTLPGTPITYYGEEIGMGNIVAANLNESYDIVS

SEQ ID NO: 12399 - protein, 391 aa, Homo sapiens
MAEDKSKRDSIEMSMKGCQTNNGFVHNEDILEQTPDPGSSTDNLKHSTRGILGSQEPDFKGVQPYAGMPKEVLFQFSGQARYRIPREILFWLTVASVLVLIAATIAIIALSPKCLDWWQEGPMYQIYPRSFKDSNKDGNGDLKGIQDKLDYITALNIKTVWITSFYKSSLKDFRYGVEDFREVDPIFGTMEDFENLVAAIHDKGLKLIIDFIPNHTSDKHIWFQLSRTRTGKYTDYYIWHDCTHENGKTIPPNNWLSVYGNSSWHFDEVRNQCYFHQFMKEQPDLNFRNPDVQEEIKEILRFWLTKGVDGFSLDAVKFLLEAKHLRDEIQVNKTQIPDTVTQYSELYHDFTTTQVGMHDIVRSFRQTMDQYSTEPGRYRLTTAYALISSQA

SEQ ID NO: 12400 - protein, 552 aa, Homo sapiens
MAEDKSKRDSIEMSMKGCQTNNGFVHNEDILEQTPDPGSSTDNLKHSTRGILGSQEPDFKGVQPYAGMPKEVLFQFSGQARYRIPREILFWLTVASVLVLIAATIAIIALSPKCLDWWQEGPMYQIYPRSFKDSNKDGNGDLKGIQDKLDYITALNIKTVWITSFYKSSLKDFRYGVEDFREVDPIFGTMEDFENLVAAIHDKGLKLIIDFIPNHTSDKHIWFQLSRTRTGKYTDYYIWHDCTHENGKTIPPNNWLSVYGNSSWHFDEVRNQCYFHQFMKEQPDLNFRNPDVQEEIKEILRFWLTKGVDGFSLDAVKFLLEAKHLRDEIQVNKTQIPDTVTQYSELYHDFTTTQVGMHDIVRSFRQTMDQYSTEPGRYRFMGTEAYAESIDRTVMYYGLPFIQEADFPFNNYLSMLDTVSGNSVYEVITSWMENMPEGKWPNWMIGGPDSSRLTSRLGNQYVNVMNMLLFTLPGTPITYYGEEIGMGNIVAANLNESYDINTLRSKSPMQWDNSSNAGFSEASNTWLPTNSDYHTVNVDVILLRHPCSSAVA

SEQ ID NO: 12401 - protein, 184 aa, Homo sapiens
MGTEAYAESIDRTVMYYGLPFIQEADFPFNNYLSMLDTVSGNSVYEVITSWMENMPEGKWPNWMIGGPDSSRLTSRLGNQYVNVMNMLLFTLPGTPITYYGEEIGMGNIVAANLNESYDINTLRSKSPMQWDNSSNAGFSEASNTWLPTNSDYHTVNVDVSISENFMLILETKKWVSTESTHSP

SEQ ID NO: 12402 - protein, 407 aa, Homo sapiens
MKEQPDLNFRNPDVQEEIKEILRFWLTKGVDGFSLDAVKFLLEAKHLRDEIQVNKTQIPDTVTQYSELYHDFTTTQVGMHDIVRSFRQTMDQYSTEPGRYRFMGTEAYAESIDRTVMYYGLPFIQEADFPFNNYLSMLDTVSGNSVYEVITSWMENMPEGKWPNWMIGGPDSSRLTSRLGNQYVNVMNMLLFTLPGTPITYYGEEIGMGNIVAANLNESYDINTLRSKSPMQWDNSSNAGFSEASNTWLPTNSDYHTVNVDVQKTQPRSALKLYQDLSLLHANELLLNRGWFCHLRNDSHYVVYTRELDGIDRIFIVVLNFGESTLLNLHNMISGLPAKMRIRLSTNSADKGSKVDTSGIFLDKGEGLIFEHNTKNLLHRQTAFRDRCFVSNRACYSSVLNILYTSC

SEQ ID NO: 12403 - protein, 143 aa, Homo sapiens
MSGMFLSSKLTTILLLFTNKSLDPGQKIQENTLLSVYGNSSWHFDEVRNQCYFHQFMKEQPDLNFRNPDVQEEIKEILRFWLTKGVDGFSLDAVKFLLEAKHLRDEIQVNKTQIPDTVTQYSELYHDFTTTQVGMHDIVRSFR

SEQ ID NO: 12404 - protein, 316 aa, Homo sapiens
MTLNLVNSYRFMGTEAYAESIDRTVMYYGLPFIQEADFPFNNYLSMLDTVSGNSVYEVITSWMENMPEGKWPNWMIGGPDSSRLTSRLGNQYVNVMNMLLFTLPGTPITYYGEEIGMGNIVAANLNESYDINTLRSKSPMQWDNSSNAGFSEASNTWLPTNSDYHTVNVDVQKTQPRSALKLYQDLSLLHANELLLNRGWFCHLRNDSHYVVYTRELDGIDRIFIVVLNFGESTLLNLHNMISGLPAKMRIRLSTNSADKGSKVDTSGIFLDKGEGLIFEHNTKNLLHRQTAFRDRCFVSNRACYSSVLNILYTSC

SEQ ID NO: 12405 - protein, 340 aa, Homo sapiens
MEPGRTQIKLDPRYTADLLEVLKTNYGIPSACFSQPPTAAQLLRALGPVELALTSILTLLALGSIAIFLEDAVYLYKNTLCPIKRRTLLWKSSAPTVVSVLCCFGLWIPRSLVLVEMTITSFYAVCFYLLMLVMVEGFGGKEAVLRTLRDTPMMVHTGPCCCCCPCCPRLLLTRKKLQLLMLGPFQYAFLKITLTLVGLFLVPDGIYDPADISEGSTALWINTFLGVSTLLALWTLGIISRQARLHLGEQNMGAKFALFQVLLILTALQPSIFSVLANGGQIACSPPYSSKTRSQVMNCHLLILETFLMTVLTRMYYRRKDHKVGYETFSSPDLDLNLKA

SEQ ID NO: 12406 - protein, 58 aa, Homo sapiens
MEPGRTQIKLDPRYTADLLEVLKTNYGIPSACFSQPPTAAQLLRDRVWLCGPGWSAVV

SEQ ID NO: 12407 - protein, 66 aa, Homo sapiens
MLLILMLSLSFNEQASHPAPGPHLPAPPALPHPGACGIAGENAAMEPGRTQIKLDPRYTADLLEVL

SEQ ID NO: 12408 - protein, 23 aa, Homo sapiens
QARLHLGEQNMGAKFALFQQQHG

SEQ ID NO: 12409 - protein, 212 aa, Homo sapiens
  VARIANT 1: note = misc_feature - Xaa can be any naturally occurring amino acid
XACFSQPPTAAQLLRALGPVELALTSILTLLALGSIAIFLEDAVYLYKNTLCPIKRRTLLWKSSAPTLATFKERCLECVGFASCVLAAKGFRSLRVSLPPSPAPAPSEQVVSVLCCFGLWIPRSLVLVEMTITSFYAVCFYLLMLVMVEGFGGKEAVLRTLRDTPMMVHTGPCCCCCPCCPRLLLTRKKLQLLMLGPFQYAFLKITLTLVGL

SEQ ID NO: 12410 - protein, 175 aa, Homo sapiens
MAAPTPARPVLTHLLVALFGMGSWAAVNGIWVELPVVVKELPEAAAFQGLLLLLPPPPSVPTGELGSGLQVGAPGAEEEVEESSPLQEPPSQAAGTTPGPDPKAYQLLSARSACLLGLLAATNALTNGVLPAVQSFSCLPYGRLAYHLAVVLGSAANPLACFLAMGVLCRSLAGL

SEQ ID NO: 12411 - protein, 111 aa, Homo sapiens
MAAPTPARPVLTHLLVALFGMGSWAAVNGIWVELPVVVKELPEGAVVGAVSWRVLLREGGSQLPAAWRGPAGIAGSRRGHPGGLSARRCCYVPPDQHLSRVPQQKGLCRPL

SEQ ID NO: 12412 - protein, 69 aa, Homo sapiens
MAAPTPARPVLTHLLVALFGMGSWAAVNGIWVELPVVVKELPEGWSLPSYVSVLVALGNLGLLVVTLWR

SEQ ID NO: 12413 - protein, 87 aa, Homo sapiens
MAAPTPARPVLTHLLVALFGMGSWAAVNGIWVELPVVVKELPEGWSLPSYVSVLVALGNLGLLVVTLWRRLAPGKDEQVPIRVVQGS

SEQ ID NO: 12414 - protein, 172 aa, Homo sapiens
MAAPTPARPVLTHLLVALFGMGSWAAVNGIWVELPVVVKELPEGWSLPSYVSVLVALGNLGLLVVTLWRRLAPGKDEQVPIRVVQVLGMVGTALLASLWHHVAPVAGQLHSVAFLALAFVLALACCASNVTFLPFLSHLPPRFLRSFFLGQGLSALLPCVLALVQGVGRLEC

SEQ ID NO: 12415 - protein, 445 aa, Homo sapiens
MAAPTPARPVLTHLLVALFGMGSWAAVNGIWVELPVVVKELPEGWSLPSYVSVLVALGNLGLLVVTLWRRLAPGKDEQVPIRVVQVLGMVGTALLASLWHHVAPVAGQLHSVAFLALAFVLALACCASNVTFLPFLSHLPPRFLRSFFLGQGLSALLPCVLALVQGVGRLECPPAPINGTPGPPLDFLERFPASTFFWALTALLVASAAAFQGLLLLLPPPPSVPTGELGSGLQVGAPGAEEEVEESSPLQEPPSQAAGTTPGPDPKAYQLLSARSACLLGLLAATNALTNGVLPAVQSFSCLPYGRLAYHLAVVLGSAANPLACFLAMGVLCRSLAGLGGLSLLGVFCGGYLMALAVLSPCPPLVGTSAGVVLVVLSWVLCLGVFSYVKVAASSLLHGGGRPALLAAGVAIQVGSLLGAVAMFPPTSIYHVFHSRKDCADPCDS

SEQ ID NO: 12416 - protein, 445 aa, Homo sapiens; identical to SEQ ID NO: 12415

SEQ ID NO: 12417 - protein, 445 aa, Homo sapiens; identical to SEQ ID NO: 12415

SEQ ID NO: 12418 - protein, 445 aa, Homo sapiens; identical to SEQ ID NO: 12415

SEQ ID NO: 12419 - protein, 445 aa, Homo sapiens; identical to SEQ ID NO: 12415

SEQ ID NO: 12420 - protein, 445 aa, Homo sapiens; identical to SEQ ID NO: 12415

SEQ ID NO: 12421 - protein, 27 aa, Homo sapiens
MSVGVSTSAPLSPTSGTSVGMSTFSIM

SEQ ID NO: 12422 - protein, 39 aa, Homo sapiens
MSVGVSTSAPLSPTSGTSVGMSTFSIMDYVVFVLLLVLS

SEQ ID NO: 12423 - protein, 59 aa, Homo sapiens
MSVGVSTSAPLSPTSGTSVGMSTFSIMDYVVFVLLLVLSLAIGLYHACRGWGRHTVGEL

SEQ ID NO: 12424 - protein, 78 aa, Homo sapiens
MSVGVSTSAPLSPTSGTSVGMSTFSIMDYVVFVLLLVLSLAIGLYHACRGWGRHTVGELLMADRKMGCLPVALSLLAT

SEQ ID NO: 12425 - protein, 115 aa, Homo sapiens
MSVGVSTSAPLSPTSGTSVGMSTFSIMDYVVFVLLLVLSLAIGLYHACRGWGRHTVGELLMADRKMGCLPVALSLLATFQSAVAILGVPSEIYRFGTQYWFLGCCYFLGLLIPAH

SEQ ID NO: 12426 - protein, 133 aa, Homo sapiens
MSVGVSTSAPLSPTSGTSVGMSTFSIMDYVVFVLLLVLSLAIGLYHACRGWGRHTVGELLMADRKMGCLPVALSLLATFQSAVAILGVPSEIYRFGTQYWFLGCCYFLGLLIPAHIFIPVFYRLHLTSAYEYL

SEQ ID NO: 12427 - protein, 147 aa, Homo sapiens
MSVGVSTSAPLSPTSGTSVGMSTFSIMDYVVFVLLLVLSLAIGLYHACRGWGRHTVGELLMADRKMGCLPVALSLLATFQSAVAILGVPSEIYRFGTQYWFLGCCYFLGLLIPAHIFIPVFYRLHLTSAYEYLELRFNKTVRVCGTV

SEQ ID NO: 12428 - protein, 153 aa, Homo sapiens
MSVGVSTSAPLSPTSGTSVGMSTFSIMDYVVFVLLLVLSLAIGLYHACRGWGRHTVGELLMADRKMGCLPVALSLLATFQSAVAILGVPSEIYRFGTQYWFLGCCYFLGLLIPAHIFIPVFYRLHLTSAYEYLELRFNKTVRVCGTVTFIFQM

SEQ ID NO: 12429 - protein, 193 aa, Homo sapiens
MSVGVSTSAPLSPTSGTSVGMSTFSIMDYVVFVLLLVLSLAIGLYHACRGWGRHTVGELLMADRKMGCLPVALSLLATFQSAVAILGVPSEIYRFGTQYWFLGCCYFLGLLIPAHIFIPVFYRLHLTSAYEYLELRFNKTVRVCGTVTFIFQMVIYMGVVLYAPSLALNAVTGFDLWLSVLALGIVCTVYTAL

SEQ ID NO: 12430 - protein, 635 aa, Homo sapiens
MSVGVSTSAPLSPTSGTSVGMSTFSIMDYVVFVLLLVLSLAIGLYHACRGWGRHTVGELLMADRKMGCLPVALSLLATFQSAVAILGVPSEIYRFGTQYWFLGCCYFLGLLIPAHIFIPVFYRLHLTSAYEYLELRFNKTVRVCGTVTFIFQMVIYMGVVLYAPSLALNAVTGFDLWLSVLALGIVCTVYTALGGLKAVIWTDVFQTLVMFLGQLAVIIVGSAKVGGLGRVWAVASQHGRISGFELDPDPFVRHTFWTLAFGGVFMMLSLYGVNQAQVQRYLSSRTEKAAVLSCYAVFPFQQVSLCVGCLIGLVMFAYYQEYPMSIQQAQAAPDQFVLYFVMDLLKGLPGLPGLFIACLFSGSLSTISSAFNSLATVTMEDLIRPWFPEFSEARAIMLSRGLAFGYGLLCLGMAYISSQMGPVLQAAISIFGMVGGPLLGLFCLGMFFPCANPPGAVVGLLAGLVMAFWIGIGSIVTSMGSSMPPSPSNGSSFSLPTNLTVATVTTLMPLTTFSKPTGLQRFYSLSYLWYSAHNSTTVIVVGLIVSLLTGRMRGRSLNPATIYPVLPKLLSLLPLSCQKRLHCRSYGQDHLDTGLFPEKPRNGVLGDSRDKEAMALDGTAYQGSSSTCILQETSL

SEQ ID NO: 12431 - protein, 635 aa, Homo sapiens; identical to SEQ ID NO: 12430

SEQ ID NO: 12432 - protein, 574 aa, Homo sapiens
MFPYFIMLIFCGIPLFFMELSFGQFASQGCLGVWRISPMFKGVGYGMMVVSTYIGIYYNVVICIAFYYFFSSMTHVLPWAYCNNPWNTHDCAGVLDASNLTNGSRPAALPSNLSHLLNHSLQRTSPSEEYWRLYVLKLSDDIGNFGEVRLPLLGCLGVSWLVVFLCLIRGVKSSGKVVYFTATFPYVVLTILFVRGVTLEGAFDGIMYYLTPQWDKILEAKVWGDAASQIFYSLGCAWGGLITMASYNKFHNNCYRDSVIISITNCATSVYAGFVIFSILGFMANHLGVDVSRVADHGPGLAFVAYPEALTLLPISPLWSLLFFFMLILLGLGTQFCLLETLVTAIVDEVGNEWILQKKTYVTLGVAVAGFLLGIPLTSQAGIYWLLLMDNYAASFSLVVISCIMCVAIMYIYGHRNYFQDIQMMLGFPPPLFFQICWRFVSPAIIFLQAQVHRRLPQNPLHFASLPERNVLLHQLPQRGGVPEHDPPTPPSPARTYGPQVRVREVPRARRQRSPNPAPLWAPPSPKPHPCSAAGPLGWDCPFRNCQSLALSSARLLADSDAGGPETRQWEPGP

SEQ ID NO: 12433 - protein, 522 aa, Homo sapiens
MMVVSTYIGIYYNVVICIAFYYFFSSMTHVLPWAYCNNPWNTHDCAGVLDASNLTNGSRPAALPSNLSHLLNHSLQRTSPSEEYWRLYVLKLSDDIGNFGEVRLPLLGCLGVSWLVVFLCLIRGVKSSGKVVYFTATFPYVVLTILFVRGVTLEGAFDGIMYYLTPQWDKILEAKVWGDAASQIFYSLGCAWGGLITMASYNKFHNNCYRDSVIISITNCATSVYAGFVIFSILGFMANHLGVDVSRVADHGPGLAFVAYPEALTLLPISPLWSLLFFFMLILLGLGTQFCLLETLVTAIVDEVGNEWILQKKTYVTLGVAVAGFLLGIPLTSQAGIYWLLLMDNYAASFSLVVISCIMCVAIMYIYGHRNYFQDIQMMLGFPPPLFFQICWRFVSPAIIFFILVFTVIQYQPITYNHYQYPGWAVAIGFLMALSSVLCIPLYAMFRLCRTDGDTLLQRLKNATKPSRDWGPALLEHRTGRYAPTIAPSPEDGFEVQPLHPDKAQIPIVGSNGSSRLQDSRI

SEQ ID NO: 12434 - protein, 134 aa, Homo sapiens
MSGGDTRAAIARPRMAAAHGPVAPSSPEQNGAVPSEATKRDQNLKRGNWGNQIEFVLTSVGYAVGLGNVWRFPYLCYRNGGGAFMFPYFIMLIFCGIPLFFMELSFGQFASQGCLGVWRISPMFKGVGYGMMVV

SEQ ID NO: 12435 - protein, 652 aa, Homo sapiens
MSGGDTRAAIARPRMAAAHGPVAPSSPEQNGAVPSEATKRDQNLKRGNWGNQIEFVLTSVGYAVGLGNVWRFPYLCYRNGGGAFMFPYFIMLIFCGIPLFFMELSFGQFASQGCLGVWRISPMFKGVGYGMMVVSTYIGIYYNVVICIAFYYFFSSMTHVLPWAYCNNPWNTHDCAGVLDASNLTNGSRPAALPSNLSHLLNHSLQRTSPSEEYWRLYVLKLSDDIGNFGEVRLPLLGCLGVSWLVVFLCLIRGVKSSGKVVYFTATFPYVVLTILFVRGVTLEGAFDGIMYYLTPQWDKILEAKVWGDAASQIFYSLGCAWGGLITMASYNKFHNNCYRDSVIISITNCATSVYAGFVIFSILGFMANHLGVDVSRVADHGPGLAFVAYPEALTLLPISPLWSLLFFFMLILLGLGTQFCLLETLVTAIVDEVGNEWILQKKTYVTLGVAVAGFLLGIPLTSQAGIYWLLLMDNYAASFSLVVISCIMCVAIMYIYGHRNYFQDIQMMLGFPPPLFFQICWRFVSPAIIFFILVFTVIQYQPITYNHYQYPGWAVAIGFLMALSSVLCIPLYAMFRLCRTDGDTLLQRLKNATKPSRDWGPALLEHRTGRYAPTIAPSPEDGFEVQPLHPDKAQIPIVGSNGSSRLQDSRI

SEQ ID NO: 12436 - protein, 706 aa, Homo sapiens
MSGGDTRAAIARPRMAAAHGPVAPSSPEQVTLLPVQRSFFLPPFSGATPSTSLAESVLKVWHGAYNSGLLPQLMAQHSLAMAQNGAVPSEATKRDQNLKRGNWGNQIEFVLTSVGYAVGLGNVWRFPYLCYRNGGGAFMFPYFIMLIFCGIPLFFMELSFGQFASQGCLGVWRISPMFKGVGYGMMVVSTYIGIYYNVVICIAFYYFFSSMTHVLPWAYCNNPWNTHDCAGVLDASNLTNGSRPAALPSNLSHLLNHSLQRTSPSEEYWRLYVLKLSDDIGNFGEVRLPLLGCLGVSWLVVFLCLIRGVKSSGKVVYFTATFPYVVLTILFVRGVTLEGAFDGIMYYLTPQWDKILEAKVWGDAASQIFYSLGCAWGGLITMASYNKFHNNCYRDSVIISITNCATSVYAGFVIFSILGFMANHLGVDVSRVADHGPGLAFVAYPEALTLLPISPLWSLLFFFMLILLGLGTQFCLLETLVTAIVDEVGNEWILQKKTYVTLGVAVAGFLLGIPLTSQAGIYWLLLMDNYAASFSLVVISCIMCVAIMYIYGHRNYFQDIQMMLGFPPPLFFQICWRFVSPAIIFFILVFTVIQYQPITYNHYQYPGWAVAIGFLMALSSVLCIPLYAMFRLCRTDGDTLLQRLKNATKPSRDWGPALLEHRTGRYAPTIAPSPEDGFEVQPLHPDKAQIPIVGSNGSSRLQDSRI

SEQ ID NO: 12437 - protein, 633 aa, Homo sapiens
MVGKGAKGMLNGAVPSEATKRDQNLKRGNWGNQIEFVLTSVGYAVGLGNVWRFPYLCYRNGGGAFMFPYFIMLIFCGIPLFFMELSFGQFASQGCLGVWRISPMFKGVGYGMMVVSTYIGIYYNVVICIAFYYFFSSMTHVLPWAYCNNPWNTHDCAGVLDASNLTNGSRPAALPSNLSHLLNHSLQRTSPSEEYWRLYVLKLSDDIGNFGEVRLPLLGCLGVSWLVVFLCLIRGVKSSGKVVYFTATFPYVVLTILFVRGVTLEGAFDGIMYYLTPQWDKILEAKVWGDAASQIFYSLGCAWGGLITMASYNKFHNNCYRDSVIISITNCATSVYAGFVIFSILGFMANHLGVDVSRVADHGPGLAFVAYPEALTLLPISPLWSLLFFFMLILLGLGTQFCLLETLVTAIVDEVGNEWILQKKTYVTLGVAVAGFLLGIPLTSQAGIYWLLLMDNYAASFSLVVISCIMCVAIMYIYGHRNYFQDIQMMLGFPPPLFFQICWRFVSPAIIFFILVFTVIQYQPITYNHYQYPGWAVAIGFLMALSSVLCIPLYAMFRLCRTDGDTLLQRLKNATKPSRDWGPALLEHRTGRYAPTIAPSPEDGFEVQPLHPDKAQIPIVGSNGSSRLQDSRI

SEQ ID NO: 12438 - protein, 579 aa, Homo sapiens
MVGKGAKGMLNGAVPSEATKRDQNLKRGNWGNQIEFVLTSVGYAVGLGNVWRFPYLCYRNGGGAFMFPYFIMLIFCGIPLFFMELSFGQFASQGCLGVWRISPMFKGVGYGMMVVSTYIGIYYNVVICIAFYYFFSSMTHVLPWAYCNNPWNTHDCAGVLDASNLTNGSRPAALPSNLSHLLNHSLQRTSPSEEYWRLYVLKLSDDIGNFGEVRLPLLGCLGVSWLVVFLCLIRGVKSSGKVVYFTATFPYVVLTILFVRGVTLEGAFDGIMYYLTPQWDKILEAKVWGDAASQIFYSLGCAWGGLITMASYNKFHNNCYRDSVIISITNCATSVYAGFVIFSILGFMANHLGVDVSRVADHGPGLAFVAYPEALTLLPISPLWSLLFFFMLILLGLGTQFCLLETLVTAIVDEVGNEWILQKKTYVTLGVAVAGFLLGIPLTSQAGIYWLLLMDNYAASFSLVVISCIMCVAIMYIYGEHSSLRPPATRPLARPLCPAGLLTPHLSRAPELLPGHPDDAGIPTTPLLSDLLALRLSRHHLPPGSGPPPPPPESSSLRVAPGAERAPPPAPTARGSAGA

SEQ ID NO: 12439 - protein, 116 aa, Homo sapiens
MVGKGAKGMLVTLLPVQRSFFLPPFSGATPSTSLAESVLKVWHGAYNSGLLPQLMAQHSLAMAQNGAVPSEATKRDQNLKRGNWGNQIEFVLTSVGYAVGLGNVWRFPYLCYRNGG

SEQ ID NO: 12440 - protein, 664 aa, Homo sapiens
MRRLSLSPTFSMGFHLLVTVSLLFSHVDHVIAETEMEGEGNETGECTGSYYCKKGVILPIWEPQDPSFGDKIARATVYFVAMVYMFLGVSIIADRFMSSIEVITSQEKEITIKKPNGETTKTTVRIWNETVSNLTLMALGSSAPEILLSVIEVCGHNFTAGDLGPSTIVGSAAFNMFIIIALCVYVVPDGETRKIKHLRVFFVTAAWSIFAYTWLYIILSVISPGVVEVWEGLLTFFFFPICVVFAWVADRRLLFYKYVYKRYRAGKQRGMIIEHEGDRPSSKTEIEMDGKVVNSHVENFLDGALVLEVDERDQDDEEARREMARILKELKQKHPDKEIEQLIELANYQVLSQQQKSRAFYRIQATRLMTGAGNILKRHAADQARKAVSMHEVNTEVTENDPVSKIFFEQGTYQCLENCGTVALTIIRRGGDLTNTVFVDFRTEDGTANAGSDYEFTEGTVVFKPGDTQKEIRVGIIDDDIFEEDENFLVHLSNVKVSSEASEDGILEANHVSTLACLGSPSTATVTIFDDDHAGIFTFEEPVTHVSESIGIMEVKVLRTSGARGNVIVPYKTIEGTARGGGEDFEDTCGELEFQNDEIVKTISVKVIDDEEYEKNKTFFLEIGEPRLVEMSEKKGRSLPLEYLTVRNMRKSAVSPLCLRNQNG

SEQ ID NO: 12441 - protein, 73 aa, Homo sapiens
MYNMRRLSLSPTFSMGFHLLVTVSLLFSHVDHVIAETEMEGEGNETGECTGSYYCKKGVILPIWEPQDPSFGD

SEQ ID NO: 12442 - protein, 87 aa, Homo sapiens
MYNMRRLSLSPTFSMGFHLLVTVSLLFSHVDHVIAETEMEGEGNETGECTGSYYCKKGVILPIWEPQDPSFGDKIARATVYFVAMVY

SEQ ID NO: 12443 - protein, 87 aa, Homo sapiens; identical to SEQ ID NO: 12442

SEQ ID NO: 12444 - protein, 973 aa, Homo sapiens
MYNMRRLSLSPTFSMGFHLLVTVSLLFSHVDHVIAETEMEGEGNETGECTGSYYCKKGVILPIWEPQDPSFGDKIARATVYFVAMVYMFLGVSIIADRFMSSIEVITSQEKEITIKKPNGETTKTTVRIWNETVSNLTLMALGSSAPEILLSVIEVCGHNFTAGDLGPSTIVGSAAFNMFIIIALCVYVVPDGETRKIKHLRVFFVTAAWSIFAYTWLYIILSVISPGVVEVWEGLLTFFFFPICVVFAWVADRRLLFYKYVYKRYRAGKQRGMIIEHEGDRPSSKTEIEMDGKVVNSHVENFLDGALVLEVDERDQDDEEARREMARILKELKQKHPDKEIEQLIELANYQVLSQQQKSRAFYRIQATRLMTGAGNILKRHAADQARKAVSMHEVNTEVTENDPVSKIFFEQGTYQCLENCGTVALTIIRRGGDLTNTVFVDFRTEDGTANAGSDYEFTEGTVVFKPGDTQKEIRVGIIDDDIFEEDENFLVHLSNVKVSSEASEDGILEANHVSTLACLGSPSTATVTIFDDDHAGIFTFEEPVTHVSESIGIMEVKVLRTSGARGNVIVPYKTIEGTARGGGEDFEDTCGELEFQNDEIVKTISVKVIDDEEYEKNKTFFLEIGEPRLVEMSEKKALLLNELGGFTITGKYLFGQPVFRKVHAREHPILSTVITIADEYDDKQPLTSKEEEERRIAEMGRPILGEHTKLEVIIEESYEFKSTVDKLIKKTNLALVVGTNSWREQFIEAITVSAGEDDDDDECGEEKLPSCFDYVMHFLTVFWKVLFAFVPPTEYWNGWACFIVSILMIGLLTAFIGDLASHFGCTIGLKDSVTAVVFVALGTSVPDTFASKVAATQDQYADASIGNVTGSNAVNVFLGIGVAWSIAAIYHAANGEQFKVSPGTLAFSVTLFTIFAFINVGVLLYRRRPEIGGELGGPRTAKLLTSCLFVLLWLLYIFFSSLEAYCHIKGF

SEQ ID NO: 12445 - protein, 968 aa, Homo sapiens
MYNMRRLSLSPTFSMGFHLLVTVSLLFSHVDHVIAETEMEGEGNETGECTGSYYCKKGVILPIWEPQDPSFGDKIARATVYFVAMVYMFLGVSIIADRFMSSIEVITSQEKEITIKKPNGETTKTTVRIWNETVSNLTLMALGSSAPEILLSVIEVCGHNFTAGDLGPSTIVGSAAFNMFIIIALCVYVVPDGETRKIKHLRVFFVTAAWSIFAYTWLYIILSVISPGVVEVWEGLLTFFFFPICVVFAWVADRRLLFYKYVYKRYRAGKQRGMIIEHEGDRPSSKTEIEMDGKVVNSHVENFLDGALVLEVDERDQDDEEARREMARILKELKQKHPDKEIEQLIELANYQVLSQQQKSRAFYRIQATRLMTGAGNILKRHAADQARKAVSMHEVNTEVTENDPVSKIFFEQGTYQCLENCGTVALTIIRRGGDLTNTVFVDFRTEDGTANAGSDYEFTEGTVVFKPGDTQKEIRVGIIDDDIFEEDENFLVHLSNVKVSSEASEDGILEANHVSTLACLGSPSTATVTIFDDDHAGIFTFEEPVTHVSESIGIMEVKVLRTSGARGNVIVPYKTIEGTARGGGEDFEDTCGELEFQNDEIVKTISVKVIDDEEYEKNKTFFLEIGEPRLVEMSEKKALLLNELGGFTITGQPVFRKVHAREHPILSTVITIADEYDDKQPLTSKEEEERRIAEMGRPILGEHTKLEVIIEESYEFKSTVDKLIKKTNLALVVGTNSWREQFIEAITVSAGEDDDDDECGEEKLPSCFDYVMHFLTVFWKVLFAFVPPTEYWNGWACFIVSILMIGLLTAFIGDLASHFGCTIGLKDSVTAVVFVALGTSVPDTFASKVAATQDQYADASIGNVTGSNAVNVFLGIGVAWSIAAIYHAANGEQFKVSPGTLAFSVTLFTIFAFINVGVLLYRRRPEIGGELGGPRTAKLLTSCLFVLLWLLYIFFSSLEAYCHIKGF

SEQ ID NO: 12446 - protein, 937 aa, Homo sapiens
MYNMRRLSLSPTFSMGFHLLVTVSLLFSHVDHVIAETEMEGEGNETGECTGSYYCKKGVILPIWEPQDPSFGDKIARATVYFVAMVYMFLGVSIIADRFMSSIEVITSQEKEITIKKPNGETTKTTVRIWNETVSNLTLMALGSSAPEILLSVIEVCGHNFTAGDLGPSTIVGSAAFNMFIIIALCVYVVPDGETRKIKHLRVFFVTAAWSIFAYTWLYIILSVISPGVVEVWEGLLTFFFFPICVVFAWVADRRLLFYKYVYKRYRAGKQRGMIIEHEGDRPSSKTEIEMDGKVVNSHVENFLDGALVLEVDERDQDDEEARREMARILKELKQKHPDKEIEQLIELANYQVLSQQQKSRAFYRIQATRLMTGAGNILKRHAADQARKAVSMHEVNTEVTENDPVSKIFFEQGTYQCLENCGTVALTIIRRGGDLTNTVFVDFRTEDGTANAGSDYEFTEGTVVFKPGDTQKEIRVGIIDDDIFEEDENFLVHLSNVKVSSEASEDGILEANHVSTLACLGSPSTATVTIFDDDHAGIFTFEEPVTHVSESIGIMEVKVLRTSGARGNVIVPYKTIEGTARGGGEDFEDTCGELEFQNDEIVKIITIRIFDREEYEKECSFSLVLEEPKWIRRGMKGGFTITDEYDDKQPLTSKEEEERRIAEMGRPILGEHTKLEVIIEESYEFKSTVDKLIKKTNLALVVGTNSWREQFIEAITVSAGEDDDDDECGEEKLPSCFDYVMHFLTVFWKVLFAFVPPTEYWNGWACFIVSILMIGLLTAFIGDLASHFGCTIGLKDSVTAVVFVALGTSVPDTFASKVAATQDQYADASIGNVTGSNAVNVFLGIGVAWSIAAIYHAANGEQFKVSPGTLAFSVTLFTIFAFINVGVLLYRRRPEIGGELGGPRTAKLLTSCLFVLLWLLYIFFSSLEAYCHIKGF

SEQ ID NO: 12447 - protein, 937 aa, Homo sapiens; identical to SEQ ID NO: 12446

SEQ ID NO: 12448 - protein, 965 aa, Homo sapiens
MYNMRRLSLSPTFSMGFHLLVTVSLLFSHVDHVIAETEMEGEGNETGECTGSYYCKKGVILPIWEPQDPSFGDKIARATVYFVAMVYMFLGVSIIADRFMSSIEVITSQEKEITIKKPNGETTKTTVRIWNETVSNLTLMALGSSAPEILLSVIEVCGHNFTAGDLGPSTIVGSAAFNMFIIIALCVYVVPDGETRKIKHLRVFFVTAAWSIFAYTWLYIILSVISPGVVEVWEGLLTFFFFPICVVFAWVADRRLLFYKYVYKRYRAGKQRGMIIEHEGDRPSSKTEIEMDGKVVNSHVENFLDGALVLEVDERDQDDEEARREMARILKELKQKHPDKEIEQLIELANYQVLSQQQKSRAFYRIQATRLMTGAGNILKRHAADQARKAVSMHEVNTEVTENDPVSKIFFEQGTYQCLENCGTVALTIIRRGGDLTNTVFVDFRTEDGTANAGSDYEFTEGTVVFKPGDTQKEIRVGIIDDDIFEEDENFLVHLSNVKVSSEASEDGILEANHVSTLACLGSPSTATVTIFDDDHAGIFTFEEPVTHVSESIGIMEVKVLRTSGARGNVIVPYKTIEGTARGGGEDFEDTCGELEFQNDEIVKIITIRIFDREEYEKECSFSLVLEEPKWIRRGMKGGFTITGKYLFGQPVFRKVHAREHPILSTVITIADEYDDKQPLTSKEEEERRIAEMGRPILGEHTKLEVIIEESYEFKSTVDKLIKKTNLALVVGTNSWREQFIEAITVSAGEDDDDDECGEEKLPSCFDYVMHFLTVFWKVLFAFVPPTEYWNGWACFIVSILMIGLLTAFIGDLASHFGCTIGLKDSVTAVVFVALGTSVPDTFASKVAATQDQYADASIGNVTGSNAVNVFLGIGVAWSIAAIYHAANGEQFKVSPGTLAFSVTLFTIFAFINVGVLLYRRRPEIGGELGGPRTAKLLTSCLFVLLWLLYIFFSSLEAYCHIKGF

SEQ ID NO: 12449 - protein, 973 aa, Homo sapiens; identical to SEQ ID NO: 12444

SEQ ID NO: 12450 - protein, 937 aa, Homo sapiens; identical to SEQ ID NO: 12446

SEQ ID NO: 12451 - protein, 937 aa, Homo sapiens; identical to SEQ ID NO: 12446

SEQ ID NO: 12452 - protein, 99 aa, Homo sapiens
MAFSACFGGIIFNILVGVGLGCLLQISRSHTEVKLEPDGLLVWVLAGALGLSLVFSLVSVPLQCFQLSRVYGFCLLLFYLNFLVVALLTEFGVIHLKSM

SEQ ID NO: 12453 - protein, 103 aa, Homo sapiens
MAGRRLNLRWALSVLCVLLMAETVSGTRGSSTGAHISPQFPASGVNQTPVVDCRKVCGLNVSDRCDFIRTNPDCHSDGGYLDYLEGIFCHFPPSLLPLAVTLY

SEQ ID NO: 12454 - protein, 131 aa, Homo sapiens
MAGRRLNLRWALSVLCVLLMAETVSGTRGSSTGAHISPQFPASGVNQTPVVDCRKVCGLNVSDRCDFIRTNPDCHSDGGYLDYLEGIFCHFPPSLLPLAVTLYVSWLLYLFLILGVTAAKFFCPNLSAIST

SEQ ID NO: 12455 - protein, 231 aa, Homo sapiens
MAGRRLNLRWALSVLCVLLMAETVSGTRGSSTGAHISPQFPASGVNQTPVVDCRKVCGLNVSDRCDFIRTNPDCHSDGGYLDYLEGIFCHFPPSLLPLAVTLYVSWLLYLFLILGVTAAKFFCPNLSAISTTLKLSHNVAGVTFLAFGNGAPDIFSALVAFSDPHTAGLALGALFGAGVLVTTVVAGGITILHPFMAASRPFFRDIVFYMVAVFLTFLMLFRGRVTLAWAL

SEQ ID NO: 12456 - protein, 584 aa, Homo sapiens
MAGRRLNLRWALSVLCVLLMAETVSGTRGSSTGAHISPQFPASGVNQTPVVDCRKVCGLNVSDRCDFIRTNPDCHSDGGYLDYLEGIFCHFPPSLLPLAVTLYVSWLLYLFLILGVTAAKFFCPNLSAISTTLKLSHNVAGVTFLAFGNGAPDIFSALVAFSDPHTAGLALGALFGAGVLVTTVVAGGITILHPFMAASRPFFRDIVFYMVAVFLTFLMLFRGRVTLAWALGYLGLYVFYVVTVILCTWIYQRQRRGSLFCPMPVTPEILSDSEEDRVSSNTNSYDYGDEYRPLFFYQETTAQILVRALNPLDYMKWRRKSAYWKALKVFKLPVEFLLLLTVPVVDPDKDDQNWKRPLNCLHLVISPLVVVLTLQSGTYGVYEIGGLVPVWVVVVIAGTALASVTFFATSDSQPPRLHWLFAFLGFLTSALWINAAATEVVNILRSLGVVFRLSNTVLGLTLLAWGNSIGDAFSDFTLARQGYPRMAFSACFGGIIFNILVGVGLGCLLQISRSHTEVKLEPDGLLVWVLAGALGLSLVFSLVSVPLQCFQLSRVYGFCLLLFYLNFLVVALLTEFGVIHLKSM

SEQ ID NO: 12457 - protein, 584 aa, Homo sapiens; identical to SEQ ID NO: 12456

SEQ ID NO: 12458 - protein, 528 aa, Homo sapiens
MAGRRLNLRWALSVLCVLLMAETVSGTRGSSTGAHISPQFPASGVNQTPVVDCRKVCGLNVSDRCDFIRTNPDCHSDGGYLDYLEGIFCHFPPSLLPLAVTLYVSWLLYLFLILGVTAAKFFCPNLSAISTTLKLSHNVAGVTFLAFGNGAPDIFSALVAFSDPHTAGLALGALFGYLGLYVFYVVTVILCTWIYQRQRRGSLFCPMPVTPEILSDSEEDRVSSNTNSYDYGDEYRPLFFYQETTAQILVRALNPLDYMKWRRKSAYWKALKVFKLPVEFLLLLTVPVVDPDKDDQNWKRPLNCLHLVISPLVVVLTLQSGTYGVYEIGGLVPVWVVVVIAGTALASVTFFATSDSQPPRLHWLFAFLGFLTSALWINAAATEVVNILRSLGVVFRLSNTVLGLTLLAWGNSIGDAFSDFTLARQGYPRMAFSACFGGIIFNILVGVGLGCLLQISRSHTEVKLEPDGLLVWVLAGALGLSLVFSLVSVPLQCFQLSRVYGFCLLLFYLNFLVVALLTEFGVIHLKSM

SEQ ID NO: 12459 - protein, 53 aa, Homo sapiens
MAGRRLNLRWALSVLCVLLMAETVSGTRGSSTGAHISPQFPASVPQGVWPECL

SEQ ID NO: 12460 - protein, 53 aa, Homo sapiens; identical to SEQ ID NO: 12459

SEQ ID NO: 12461 - protein, 143 aa, Homo sapiens
MTVGENEGVDDQGGWGKRLTTAGPSCSCADAFSDFTLARQGYPRMAFSACFGGIIFNILVGVGLGCLLQISRSHTEVKLEPDGLLVWVLAGALGLSLVFSLVSVPLQCFQLSRVYGFCLLLFYLNFLVVALLTEFGVIHLKSM

SEQ ID NO: 12462 - protein, 404 aa, Homo sapiens
  VARIANT 1: note = misc_feature - Xaa can be any naturally occurring amino acid
XTLKLSHNVAGVTFLAFGNGAPDIFSALVAFSDPHTAGLALGALFGAGVLVTTVVAGGITILHPFMAASRPFFRDIVFYMVAVFLTFLMLFRGRVTLAWALGYLGLYVFYVVTVILCTWIYQRQRRGSLFCPMPVTPEILSDSEEDRVSSNTNSYDYGDEYRPLFFYQETTAQILVRALNPLDYMKWRRKSAYWKALKVFKLPVEFLLLLTVPVVDPDKDDQNWKRPLNCLHLVISPLVVVLTLQSGTYGVYEIGGLVPVWVVVVIAGTALASVTFFATSDSQPPRLHWLFAFLGFLTSALWINAAATEVVNILRSLGVVFRLSNTVLGLTLLAWGNSIGDAFSDFTLARQGYPRMAFSACFGGIIFNILVGVGLGCLLQISRSHTEVKTRRMQVAGKTKRHGA

SEQ ID NO: 12463 - protein, 701 aa, Homo sapiens
MARRGWRRAPLRRGVGSSPRARRLMRPLWLLLAVGVFDWAGASDGGGGEARAMDEEIVSEKQAEESHRQDSANLLIFILLLTLTILTIWLFKHRRARFLHETGLAMIYGLLVGLVLRYGIHVPSDVNNVTLSCEVQSSPTTLLVNVSGKFYEYMLKGEISSHELNNVQDNEMLRKVTFDPEVFFNILLPPIIFYAGYSLKRRHFFRNLGSILAYAFLGTAISCFVIGSIMYGCVTLMKVTGQLAGDFYFTDCLLFGAIVSATDPVTVLAIFHELQVDVELYALLFGESVLNDAVAIVLSSSIVAYQPAGDNSHTFDVTAMFKSIGIFLGIFSGSFAMGAATGVVTALVTKFTKLREFQLLETGLFFLMSWSTFLLAEAWGFTGVVAVLFCGITQAHYTYNNLSTESQHRTKQLFELLNFLAENFIFSYMGLTLFTFQNHVFNPTFVVGAFVAIFLGRAANIYPLSLLLNLGRRSKIGSNFQHMMMFAGLRGAMAFALAIRDTATYARQMMFSTTLLIVFFTVWVFGGGTTAMLSCLHIRVGVDSDQEHLGVPENERRTTKAESAWLFRMWYNFDHNYLKPLLTHSGPPLTTTLPACCGPIARCLTSPQAYENQEQLKDDDSDLILNDGDISLTYGDSTVNTEPATSSAPRRFMGNSSEDALDRELAFGDHELVIRGTRLVLPMDDSEPPLNLLDNTRHGPA

SEQ ID NO: 12464 - protein, 669 aa, Homo sapiens
MARRGWRRAPLRRGVGSSPRARRLMRPLWLLLAVGVFDWAGASDGGGGEARAMDEEIVSEKQAEESHRQDSANLLIFILLLTLTILTIWLFKHRRARFLHETGLAMIYGLLVGLVLRYGIHVPSDVNNVTLSCEVQSSPTTLLVTFDPEVFFNILLPPIIFYAGYSLKRRHFFRNLGSILAYAFLGTAISCFVIGSIMYGCVTLMKVTGQLAGDFYFTDCLLFGAIVSATDPVTVLAIFHELQVDVELYALLFGESVLNDAVAIVLSSSIVAYQPAGDNSHTFDVTAMFKSIGIFLGIFSGSFAMGAATGVVTALVTKFTKLREFQLLETGLFFLMSWSTFLLAEAWGFTGVVAVLFCGITQAHYTYNNLSTESQHRTKQLFELLNFLAENFIFSYMGLTLFTFQNHVFNPTFVVGAFVAIFLGRAANIYPLSLLLNLGRRSKIGSNFQHMMMFAGLRGAMAFALAIRDTATYARQMMFSTTLLIVFFTVWVFGGGTTAMLSCLHIRVGVDSDQEHLGVPENERRTTKAESAWLFRMWYNFDHNYLKPLLTHSGPPLTTTLPACCGPIARCLTSPQAYENQEQLKDDDSDLILNDGDISLTYGDSTVNTEPATSSAPRRFMGNSSEDALDRELAFGDHELVIRGTRLVLPMDDSEPPLNLLDNTRHGPA

SEQ ID NO: 12465 - protein, 184 aa, Homo sapiens
MDEEIVSEKQAEESHRQDSANLLIFILLLTLTILTIWLFKHRRARFLHETGLAMIYGLLVGLVLRYGIHVPSDVNNVTLSCEVQSSPTTLLVNVSGKFYEYMLKGEISSHELNNVQDNEMLRKVTFDPEVFFNILLPPIIFYAGYSLKRRHFFRNLGSILAYAFLGTAISCFVIGSIMYGCVTL

SEQ ID NO: 12466 - protein, 649 aa, Homo sapiens
MDEEIVSEKQAEESHRQDSANLLIFILLLTLTILTIWLFKHRRARFLHETGLAMIYGLLVGLVLRYGIHVPSDVNNVTLSCEVQSSPTTLLVNVSGKFYEYMLKGEISSHELNNVQDNEMLRKVTFDPEVFFNILLPPIIFYAGYSLKRRHFFRNLGSILAYAFLGTAISCFVIGSIMYGCVTLMKVTGQLAGDFYFTDCLLFGAIVSATDPVTVLAIFHELQVDVELYALLFGESVLNDAVAIVLSSSIVAYQPAGDNSHTFDVTAMFKSIGIFLGIFSGSFAMGAATGVVTALVTKFTKLREFQLLETGLFFLMSWSTFLLAEAWGFTGVVAVLFCGITQAHYTYNNLSTESQHRTKQLFELLNFLAENFIFSYMGLTLFTFQNHVFNPTFVVGAFVAIFLGRAANIYPLSLLLNLGRRSKIGSNFQHMMMFAGLRGAMAFALAIRDTATYARQMMFSTTLLIVFFTVWVFGGGTTAMLSCLHIRVGVDSDQEHLGVPENERRTTKAESAWLFRMWYNFDHNYLKPLLTHSGPPLTTTLPACCGPIARCLTSPQAYENQEQLKDDDSDLILNDGDISLTYGDSTVNTEPATSSAPRRFMGNSSEDALDRELAFGDHELVIRGTRLVLPMDDSEPPLNLLDNTRHGPA

SEQ ID NO: 12467 - protein, 649 aa, Homo sapiens; identical to SEQ ID NO: 12466

SEQ ID NO: 12468 - protein, 649 aa, Homo sapiens; identical to SEQ ID NO: 12466

SEQ ID NO: 12469 - protein, 679 aa, Homo sapiens
MDEEIVSEKQAEESHRQDSANLLIFILLLTLTILTIWLFKHRRARFLHETGLAMIYGLLVGLVLRYGIHVPSDVNNVTLSCEVQSSPTTLLVNVSGKFYEYMLKGEISSHELNNVQDNEMLRKVTFDPEVFFNILLPPIIFYAGYSLKRRHFFRNLGSILAYAFLGTAISCFVIGSIMYGCVTLMKVTGQLAGDFYFTDCLLFGAIVSATDPVTVLAIFHELQVDVELYALLFGESVLNDAVAIVLSSSIVAYQPAGDNSHTFDVTAMFKSIGIFLGIFSGSFAMGAATGVVTALVTKFTKLREFQLLETGLFFLMSWSTFLLAEAWGFTGVVAVLFCGITQAHYTYNNLSTESQHRTKQLFELLNFLAENFIFSYMGLTLFTFQNHVFNPTFVVGAFVAIFLGRAANIYPLSLLLNLGRRSKIGSNFQHMMMFAGLRGAMAFALAIRDTATYARQMMFSTTLLIVFFTVWVFGGGTTAMLSCLHIRYCARLWGYRDELRHGLYPQGTHSLFGETDRVGVDSDQEHLGVPENERRTTKAESAWLFRMWYNFDHNYLKPLLTHSGPPLTTTLPACCGPIARCLTSPQAYENQEQLKDDDSDLILNDGDISLTYGDSTVNTEPATSSAPRRFMGNSSEDALDRELAFGDHELVIRGTRLVLPMDDSEPPLNLLDNTRHGPA

SEQ ID NO: 12470 - protein, 649 aa, Homo sapiens; identical to SEQ ID NO: 12466

SEQ ID NO: 12471 - protein, 649 aa, Homo sapiens; identical to SEQ ID NO: 12466

SEQ ID NO: 12472 - protein, 617 aa, Homo sapiens
MDEEIVSEKQAEESHRQDSANLLIFILLLTLTILTIWLFKHRRARFLHETGLAMIYGLLVGLVLRYGIHVPSDVNNVTLSCEVQSSPTTLLVTFDPEVFFNILLPPIIFYAGYSLKRRHFFRNLGSILAYAFLGTAISCFVIGSIMYGCVTLMKVTGQLAGDFYFTDCLLFGAIVSATDPVTVLAIFHELQVDVELYALLFGESVLNDAVAIVLSSSIVAYQPAGDNSHTFDVTAMFKSIGIFLGIFSGSFAMGAATGVVTALVTKFTKLREFQLLETGLFFLMSWSTFLLAEAWGFTGVVAVLFCGITQAHYTYNNLSTESQHRTKQLFELLNFLAENFIFSYMGLTLFTFQNHVFNPTFVVGAFVAIFLGRAANIYPLSLLLNLGRRSKIGSNFQHMMMFAGLRGAMAFALAIRDTATYARQMMFSTTLLIVFFTVWVFGGGTTAMLSCLHIRVGVDSDQEHLGVPENERRTTKAESAWLFRMWYNFDHNYLKPLLTHSGPPLTTTLPACCGPIARCLTSPQAYENQEQLKDDDSDLILNDGDISLTYGDSTVNTEPATSSAPRRFMGNSSEDALDRELAFGDHELVIRGTRLVLPMDDSEPPLNLLDNTRHGPA

SEQ ID NO: 12473 - protein, 170 aa, Homo sapiens
MLSCLHIRVGVDSDQEHLGVPENERRTTKAESAWLFRMWYNFDHNYLKPLLTHSGPPLTTTLPACCGPIARCLTSPQAYENQEQLKDDDSDLILNDGDISLTYGDSTVNTEPATSSAPRRFMGNSSEDALDRELAFGDHELVIRGTRLVLPMDDSEPPLNLLDNTRHGPA

SEQ ID NO: 12474 - protein, 33 aa, Homo sapiens
  VARIANT 1: note = misc_feature - Xaa can be any naturally occurring amino acid
XAMLSCLHIRVGVDSDQEHLKGPQLFLNHRSYL

SEQ ID NO: 12475 - protein, 32 aa, Homo sapiens
MENGTQILRPTQDPSECTKEVKSLMWVYVLVG

SEQ ID NO: 12476 - protein, 538 aa, Homo sapiens
MENGTQILRPTQDPSECTKEVKSLMWVYVLVGNIVRGMGETPILPLGISYIEDFAKFENSPLYIGLVETGAIIGPLIGLLLASFCANVYVDTGFVNTDDLIITPTDTRWVGAWWFGFLICAGVNVLTAIPFFFLPNTLPKEGLETNADIIKNENEDKQKEEVKKEKYGITKDFLPFMKSLSCNPIYMLFILVSVIQFNAFVNMISFMPKYLEQQYGISSSDAIFLMGIYNLPPICIGYIIGGLIMKKFKITVKQAAHIGCWLSLLEYLLYFLSFLMTCENSSVVGINTSYEGIPQDLYVENDIFADCNVDCNCPSKIWDPVCGNNGLSYLSACLAGCETSIGTGINMVFQNCSCIQTSGNSSAVLGLCDKGPDCSLMLQYFLILSAMSSFIYSLAAIPGYMVLLRCMKSEEKSLGVGLHTFCTRVFAGIPAPIYFGALMDSTCLHWGTLKCGESGACRIYDSTTFRYIYLGLPAALRGSSFVPALIILILLRKCHLPGENASSGTELIETKVKGKENECKDIYQKSTVLKDDELKTKL

SEQ ID NO: 12477 - protein, 93 aa, Homo sapiens
MFLTKNCKQEQERVESAKMFLLAITCAFVSKTLSGSYMNSMLTQIERQFNIPTSLVGFINGSFEIDMNMNLQFQFQATCPQTVSCVWKMEPRF

SEQ ID NO: 12478 - protein, 71 aa, Homo sapiens
MFLTKNCKQEQERVESAKMFLLAITCAFVSKTLSGSYMNSMLTQIERQFNIPTSLVGFINGSFEIGNLLLI

SEQ ID NO: 12479 - skipped

SEQ ID NO: 12480 - protein, 13 aa, Homo sapiens
MGETEKRIETHRI

SEQ ID NO: 12481 - protein, 51 aa, Homo sapiens
MGETEKRIETHRIRCLSKLKMFLLAITCAFVSKTLSGSYMNSMLTQIERQF

SEQ ID NO: 12482 - protein, 95 aa, Homo sapiens
MGETEKRIETHRIRCLSKLKMFLLAITCAFVSKTLSGSYMNSMLTQIERQFNIPTSLVGFINGSFEIDMNMNLQFQFQATCPQTVSCVWKMEPRF

SEQ ID NO: 12483 - protein, 88 aa, Homo sapiens
MGETEKRIETHRIRCLSKLKMFLLAITCAFVSKTLSGSYMNSMLTQIERQFNIPTSLVGFINGSFEIGNLLLIIFVSYFGTKLHRPIM

SEQ ID NO: 12484 - protein, 91 aa, Homo sapiens
MGETEKRIETHRIRCLSKLKMFLLAITCAFVSKTLSGSYMNSMLTQIERQFNIPTSLVGFINGSFEIGNLLLIIFVSYFGTKLHRPIMIGI

SEQ ID NO: 12485 - protein, 99 aa, Homo sapiens
MGETEKRIETHRIRCLSKLKMFLLAITCAFVSKTLSGSYMNSMLTQIERQFNIPTSLVGFINGSFEIGNLLLIIFVSYFGTKLHRPIMIGIGCVVMGLG

SEQ ID NO: 12486 - protein, 137 aa, Homo sapiens
MGETEKRIETHRIRCLSKLKMFLLAITCAFVSKTLSGSYMNSMLTQIERQFNIPTSLVGFINGSFEIGNLLLIIFVSYFGTKLHRPIMIGIGCVVMGLGCFLKSLPHFLMNQYEYESTVSVSGNLSSNSFLCMENGT

SEQ ID NO: 12487 - protein, 147 aa, Homo sapiens
MGETEKRIETHRIRCLSKLKMFLLAITCAFVSKTLSGSYMNSMLTQIERQFNIPTSLVGFINGSFEIGNLLLIIFVSYFGTKLHRPIMIGIGCVVMGLGCFLKSLPHFLMNQYEYESTVSVSGNLSSNSFLCMENGTQILRPTQDPS

SEQ ID NO: 12488 - protein, 670 aa, Homo sapiens
MGETEKRIETHRIRCLSKLKMFLLAITCAFVSKTLSGSYMNSMLTQIERQFNIPTSLVGFINGSFEIGNLLLIIFVSYFGTKLHRPIMIGIGCVVMGLGCFLKSLPHFLMNQYEYESTVSVSGNLSSNSFLCMENGTQILRPTQDPSECTKEVKSLMWVYVLVGNIVRGMGETPILPLGISYIEDFAKFENSPLYIGLVETGAIIGPLIGLLLASFCANVYVDTGFVNTDDLIITPTDTRWVGAWWFGFLICAGVNVLTAIPFFFLPNTLPKEGLETNADIIKNENEDKQKEEVKKEKYGITKDFLPFMKSLSCNPIYMLFILVSVIQFNAFVNMISFMPKYLEQQYGISSSDAIFLMGIYNLPPICIGYIIGGLIMKKFKITVKQAAHIGCWLSLLEYLLYFLSFLMTCENSSVVGINTSYEGIPQDLYVENDIFADCNVDCNCPSKIWDPVCGNNGLSYLSACLAGCETSIGTGINMVFQNCSCIQTSGNSSAVLGLCDKGPDCSLMLQYFLILSAMSSFIYSLAAIPGYMVLLRCMKSEEKSLGVGLHTFCTRVFAGIPAPIYFGALMDSTCLHWGTLKCGESGACRIYDSTTFRYIYLGLPAALRGSSFVPALIILILLRKCHLPGENASSGTELIETKVKGKENECKDIYQKSTVLKDDELKTKL

SEQ ID NO: 12489 - protein, 782 aa, Homo sapiens [sequence omitted]

SEQ ID NO: 12490 - protein, 1534 aa, Homo sapiens
MALTPGWGSSAGPVRPELWLLLWAAAWRLGASACPALCTCTGTTVDCHGTGLQAIPKNIPRNTERLELNGNNITRIHKNDFAGLKQLRVLQLMENQIGAVERGAFDDMKELERLRLNRNQLHMLPELLFQNNQALSRLDLSENAIQAIPRKAFRGATDLKNLQLDKNQISCIEEGAFRALRGLEVLTLNNNNITTIPVSSFNHMPKLRTFRLHSNHLFCDCHLAWLSQWLRQRPTIGLFTQCSGPASLRGLNVAEVQKSEFSCSGQGEAGRVPTCTLSSGSCPAMCTCSNGIVDCRGKGLTAIPANLPETMTEIRLELNGIKSIPPGAFSPYRKLRRIDLSNNQIAEIAPDAFQGLRSLNSLVLYGNKITDLPRGVFGGLYTLQLLLLNANKINCIRPDAFQDLQNLSLLSLYDNKIQSLAKGTFTSLRAIQTLHLAQNPFICDCNLKWLADFLRTNPIETSGARCASPRRLANKRIGQIKSKKFRCSAKEQYFIPGTEDYQLNSECNSDVVCPHKCRCEANVVECSSLKLTKIPERIPQSTAELRLNNNEISILEATGMFKKLTHLKKINLSNNKVSEIEDGAFEGAASVSELHLTANQLESIRSGMFRGLDGLRTLMLRNNRISCIHNDSFTGLRNVRLLSLYDNQITTVSPGAFDTLQSLSTLNLLANPFNCNCQLAWLGGWLRKRKIVTGNPRCQNPDFLRQIPLQDVAFPDFRCEEGQEEGGCLPRPQCPQECACLDTVVRCSNKHLRALPKGIPKNVTELYLDGNQFTLVPGQLSTFKYLQLVDLSNNKISSLSNSSFTNMSQLTTLILSYNALQCIPPLAFQGLRSLRLLSLHGNDISTLQEGIFADVTSLSHLAIGANPLYCDCHLRWLSSWVKTGYKEPGIARCAGPQDMEGKLLLTTPAKKFECQGPPTLAVQAKCDLCLSSPCQNQGTCHNDPLEVYRCACPSGYKGRDCEVSLDSCSSGPCENGGTCHAQEGEDAPFTCSCPTGFEGPTCGVNTDDCVDHACANGGVCVDGVGNYTCQCPLQYEGKACEQLVDLCSPDLNPCQHEAQCVGTPDGPRCECMPGYAGDNCSENQDDCRDHRCQNGAQCMDEVNSYSCLCAEGYSGQLCEIPPHLPAPKSPCEGTECQNGANCVDQGNRPVCQCLPGFGGPECEKLLSVNFVDRDTYLQFTDLQNWPRANITLQVSTAEDNGILLYNGDNDHIAVELYQGHVRVSYDPGSYPSSAIYSAETINDGQFHTVELVAFDQMVNLSIDGGSPMTMDNFGKHYTLNSEAPLYVGGMPVDVNSAAFRLWQILNGTGFHGCIRNLYINNELQDFTKTQMKPGVVPGCEPCRKLYCLHGICQPNATPGPMCHCEAGWVGLHCDQPADGPCHGHKCVHGQCVPLDALSYSCQCQDGYSGALCNQAGALAEPCRGLQCLHGHCQASGTKGAHCVCDPGFSGELCEQESECRGDPVRDFHQVQRGYAICQTTRPLSWVECRGSCPGQGCCQGLRLKRRKFTFECSDGTSFAEEVEKPTKCGCALCA

SEQ ID NO: 12491 - protein, 1461 aa, Homo sapiens
MALTPGWGSSAGPVRPELWLLLWAAAWRLGASACPALCTCTGTTVDCHGTGLQAIPKNIPRNTERLELNGNNITRIHKNDFAGLKQLRVLQLMENQIGAVERGAFDDMKELERLRLNRNQLHMLPELLFQNNQALSRLDLSENAIQAIPRKAFRGATDLKNLQLDKNQISCIEEGAFRALRGLEVLTLNNNNITTIPVSSFNHMPKLRTFRLHSNHLFCDCHLAWLSQWLRQRPTIGLFTQCSGPASLRGLNVAEVQKSEFSCSGQGEAGRVPTCTLSSGSCPAMCTCSNGIVDCRGKGLTAIPANLPETMTEIRLELNGIKSIPPGAFSPYRKLRRIDLSNNQIAEIAPDAFQGLRSLNSLVLYGNKITDLPRGVFGGLYTLQLLLLNANKINCIRPDAFQDLQNLSLLSLYDNKIQSLAKGTFTSLRAIQTLHLAQNPFICDCNLKWLADFLRTNPIETSGARCASPRRLANKRIGQIKSKKFRCSAKEQYFIPGTEDYQLNSECNSDVVCPHKCRCEANVVECSSLKLTKIPERIPQSTAELRLNNNEISILEATGMFKKLTHLKKINLSNNKVSEIEDGAFEGAASVSELHLTANQLESIRSGMFRGLDGLRTLMLRNNRISCIHNDSFTGLRNVRLLSLYDNQITTVSPGAFDTLQSLSTLNLLANPFNCNCQLAWLGGWLRKRKIVTGNPRCQNPDFLRQIPLQDVAFPDFRCEEGQEEGGCLPRPQCPQECACLDTVVRCSNKHLRALPKGIPKNVTELYLDGNQFTLVPGQLSTFKYLQLVDLSNNKISSLSNSSFTNMSQLTTLILSYNALQCIPPLAFQGLRSLRLLSLHGNDISTLQEGIFADVTSLSHLAIGANPLYCDCHLRWLSSWVKTGYKEPGIARCAGPQDMEGKLLLTTPAKKFECQGPPTLAVQAKCDLCLSSPCQNQGTCHNDPLEVYRCACPSGYKGRDCEVSLDSCSSGPCENGGTCHAQEGEDAPFTCSCPTGFEGPTCGVNTDDCVDHACANGGVCVDGVGNYTCQCPLQYEGKACEQLVDLCSPDLNPCQHEAQCVGTPDGPRCECMPGYAGDNCSENQDDCRDHRCQNGAQCMDEVNSYSCLCAEGYSGQLCEIPPHLPAPKSPCEGTECQNGANCVDQGNRPVCQCLPGFGGPECEKLLSVNFVDRDTYLQFTDLQNWPRANITLQVSTAEDNGILLYNGDNDHIAVELYQGHVRVSYDPGSYPSSAIYSAETINDGQFHTVELVAFDQMVNLSIDGGSPMTMDNFGKHYTLNSEAPLYVGGMPVDVNSAAFRLWQILNGTGFHGCIRNLYINNELQDFTKTQMKPGVVPGCEPCRKLYCLHGICQPNATPGPMCHCEAGWVGLHCDQPADGPCHGHKCVHGQCVPLDALSYSCQCQDGYSGALCNQSPSAGGTLSGTFTRSRGAMPSARPRAPCHGWSAGARAQARAAARAFG

SEQ ID NO: 12492 - protein, 409 aa, Homo sapiens
MALTPGWGSSAGPVRPELWLLLWAAAWRLGASACPALCTCTGTTVDCHGTGLQAIPKNIPRNTERLELNGNNITRIHKNDFAGLKQLRVLQLMENQIGAVERGAFDDMKELERLRLNRNQLHMLPELLFQNNQALSRLDLSENAIQAIPRKAFRGATDLKNLQLDKNQISCIEEGAFRALRGLEVLTLNNNNITTIPVSSFNHMPKLRTFRLHSNHLFCDCHLAWLSQWLRQRPTIGLFTQCSGPASLRGLNVAEVQKSEFSCSGQGEAGRVPTCTLSSGSCPAMCTCSNGIVDCRGKGLTAIPANLPETMTEIRLELNGIKSIPPGAFSPYRKLRRIDLSNNQIAEIAPDAFQGLRSLNSLHTGPVTCPHTTGTHSSHCRAFAVAVPHSRNDLEAMFEEEVPRIFYSA

SEQ ID NO: 12493 - protein, 146 aa, Homo sapiens
MEAVLFVNAEAAAPRQSGRPRDLNGNNITRITKTDFAGLRHLRVLQLMENKISTIERGAFQDLKELERLRLNRNHLQLFPELLFLGTAKLYRLDLSENQIQAIPRKAFRGAVDIKNLQLDYNQISCIEDGAFRALRDLEVLTLNNN

SEQ ID NO: 12494 - protein, 1439 aa, Homo sapiens
MENKISTIERGAFQDLKELERLRLNRNHLQLFPELLFLGTAKLYRLDLSENQIQAIPRKAFRGAVDIKNLQLDYNQISCIEDGAFRALRDLEVLTLNNNNITRLSVASFNHMPKLRTFRLHSNNLYCDCHLAWLSDWLRQRPRVGLYTQCMGPSHLRGHNVAEVQKREFVCSARHGGHQSFMAPSCSVLHCPAACTCSNNIVDCRGKGLTEIPTNLPETITEIRLEQNTIKVIPPGAFSPYKKLRRIDLSNNQISELAPDAFQGLRSLNSLVLYGNKITELPKSLFEGLFSLQLLLLNANKINCLRVDAFQDLHNLNLLSLYDNKLQTIAKGTFSPLRAIQTMHLAQNPFICDCHLKWLADYLHTNPIETSGARCTSPRRLANKRIGQIKSKKFRCSGTEDYRSKLSGDCFADLACPEKCRCEGTTVDCSNQKLNKIPEHIPQYTAELRLNNNEFTVLEATGIFKKLPQLRKINFSNNKITDIEEGAFEGASGVNEILLTSNRLENVQHKMFKGLESLKTLMLRSNRITCVGNDSFIGLSSVRLLSLYDNQITTVAPGAFDTLHSLSTLNLLANPFNCNCYLAWLGEWLRKKRIVTGNPRCQKPYFLKEIPIQDVAIQDFTCDDGNDDNSCSPLSRCPTECTCLDTVVRCSNKGLKVLPKGIPRDVTELYLDGNQFTLVPKELSNYKHLTLIDLSNNRISTLSNQSFSNMTQLLTLILSYNRLRCIPPRTFDGLKSLRLLSLHGNDISVVPEGAFNDLSALSHLAIGANPLYCDCNMQWLSDWVKSEYKEPGIARCAGPGEMADKLLLTTPSKKFTCQGPVDVNILAKCNPCLSNPCKNDGTCNSDPVDFYRCTCPYGFKGQDCDVPIHACISNPCKHGGTCHLKEGEEDGFWCICADGFEGENCEVNVDDCEDNDCENNSTCVDGINNYTCLCPPEYTGELCEEKLDFCAQDLNPCQHDSKCILTPKGFKCDCTPGYVGEHCDIDFDDCQDNKCKNGAHCTDAVNGYTCICPEGYSGLFCEFSPPMVLPRTSPCDNFDCQNGAQCIVRINEPICQCLPGYQGEKCEKLVSVNFINKESYLQIPSAKVRPQTNITLQIATDEDSGILLYKGDKDHIAVELYRGRVRASYDTGSHPASAIYSVETINDGNFHIVELLALDQSLSLSVDGGNPKIITNLSKQSTLNFDSPLYVGGMPGKSNVASLRQAPGQNGTSFHGCIRNLYINSELQDFQKVPMQTGILPGCEPCHKKVCAHGTCQPSSQAGFTCECQEGWMGPLCDQRTNDPCLGNKCVHGTCLPINAFSYSCKCLEGHGGVLCDEEEDLFNPCQAIKCKHGKCRLSGLGQPYCECSSGYTGDSCDREISCRGERIRDYYQKQQGYAACQTTKKVSRLECRGGCAGGQCCGPLRSKRRKYSFECTDGSSFVDEVEKVVKCGCTRCVS

SEQ ID NO: 12495 - protein, 1542 aa, Homo sapiens
MRGVGWQMLSLSLGLVLAILNKVAPQACPAQCSCSGSTVDCHGLALRSVPRNIPRNTERLDLNGNNITRITKTDFAGLRHLRVLQLMENKISTIERGAFQDLKELERLRLNRNHLQLFPELLFLGTAKLYRLDLSENQIQAIPRKAFRGAVDIKNLQLDYNQISCIEDGAFRALRDLEVLTLNNNNITRLSVASFNHMPKLRTFRLHSNNLYCDCHLAWLSDWLRQRPRVGLYTQCMGPSHLRGHNVAEVQKREFVCSDEEEGHQSFMAPSCSVLHCPAACTCSNNIVDCRGKGLTEIPTNLPETITEIRLEQNTIKVIPPGAFSPYKKLRRIDLSNNQISELAPDAFQGLRSLNSLVLYGNKITELPKSLFEGLFSLQLLLLNANKINCLRVDAFQDLHNLNLLSLYDNKLQTIAKGTFSPLRAIQTMHLAQNPFICDCHLKWLADYLHTNPIETSGARCTSPRRLANKRIGQIKSKKFRCSAKEQYFIPGTEDYRSKLSGDCFADLACPEKCRCEGTTVDCSNQKLNKIPEHIPQYTAELRLNNNEFTVLEATGIFKKLPQLRKINFSNNKITDIEEGAFEGASGVNEILLTSNRLENVQHKMFKGLESLKTLMLRSNRITCVGNDSFIGLSSVRLLSLYDNQITTVAPGAFDTLHSLSTLNLLANPFNCNCYLAWLGEWLRKKRIVTGNPRCQKPYFLKEIPIQDVAIQDFTCDDGNDDNSCSPLSRCPTECTCLDTVVRCSNKGLKVLPKGIPRDVTELYLDGNQFTLVPKELSNYKHLTLIDLSNNRISTLSNQSFSNMTQLLTLILSYNRLRCIPPRTFDGLKSLRLLSLHGNDISVVPEGAFNDLSALSHLAIGANPLYCDCNMQWLSDWVKSEYKEPGIARCAGPGEMADKLLLTTPSKKFTCQGPVDVNILAKCNPCLSNPCKNDGTCNSDPVDFYRCTCPYGFKGQDCDVPIHACISNPCKHGGTCHLKEGEEDGFWCICADGFEGENCEVNVDDCEDNDCENNSTCVDGINNYTCLCPPEYTAANLNEVEKGELCEEKLDFCAQDLNPCQHDSKCILTPKGFKCDCTPGYVGEHCDIDFDDCQDNKCKNGAHCTDAVNGYTCICPEGYSGLFCEFSPPMVLPRTSPCDNFDCQNGAQCIVRINEPICQCLPGYQGEKCEKLVSVNFINKESYLQIPSAKVRPQTNITLQIATDEDSGILLYKGDKDHIAVELYRGRVRASYDTGSHPASAIYSVETINDGNFHIVELLALDQSLSLSVDGGNPKIITNLSKQSTLNFDSPLYVGGMPGKSNVASLRQAPGQNGTSFHGCIRNLYINSELQDFQKVPMQTGILPGCEPCHKKVCAHGTCQPSSQAGFTCECQEGWMGPLCDQRTNDPCLGNKCVHGTCLPINAFSYSCKCLEGHGGVLCDEEEDLFNPCQAIKCKHGKCRLSGLGQPYCECSSGYTGDSCDREISCRGERIRDYYQKQQGYAACQTTKKVSRLECRGGCAGGQCCGPLRSKRRKYSFECTDGSSFVDEVEKVVKCGCTRCVS

SEQ ID NO: 12496 - protein, 1529 aa, Homo sapiens
MRGVGWQMLSLSLGLVLAILNKVAPQACPAQCSCSGSTVDCHGLALRSVPRNIPRNTERLDLNGNNITRITKTDFAGLRHLRVLQLMENKISTIERGAFQDLKELERLRLNRNHLQLFPELLFLGTAKLYRLDLSENQIQAIPRKAFRGAVDIKNLQLDYNQISCIEDGAFRALRDLEVLTLNNNNITRLSVASFNHMPKLRTFRLHSNNLYCDCHLAWLSDWLRQRPRVGLYTQCMGPSHLRGHNVAEVQKREFVCSGHQSFMAPSCSVLHCPAACTCSNNIVDCRGKGLTEIPTNLPETITEIRLEQNTIKVIPPGAFSPYKKLRRIDLSNNQISELAPDAFQGLRSLNSLVLYGNKITELPKSLFEGLFSLQLLLLNANKINCLRVDAFQDLHNLNLLSLYDNKLQTIAKGTFSPLRAIQTMHLAQNPFICDCHLKWLADYLHTNPIETSGARCTSPRRLANKRIGQIKSKKFRCSAKEQYFIPGTEDYRSKLSGDCFADLACPEKCRCEGTTVDCSNQKLNKIPEHIPQYTAELRLNNNEFTVLEATGIFKKLPQLRKINFSNNKITDIEEGAFEGASGVNEILLTSNRLENVQHKMFKGLESLKTLMLRSNRITCVGNDSFIGLSSVRLLSLYDNQITTVAPGAFDTLHSLSTLNLLANPFNCNCYLAWLGEWLRKKRIVTGNPRCQKPYFLKEIPIQDVAIQDFTCDDGNDDNSCSPLSRCPTECTCLDTVVRCSNKGLKVLPKGIPRDVTELYLDGNQFTLVPKELSNYKHLTLIDLSNNRISTLSNQSFSNMTQLLTLILSYNRLRCIPPRTFDGLKSLRLLSLHGNDISVVPEGAFNDLSALSHLAIGANPLYCDCNMQWLSDWVKSEYKEPGIARCAGPGEMADKLLLTTPSKKFTCQGPVDVNILAKCNPCLSNPCKNDGTCNSDPVDFYRCTCPYGFKGQDCDVPIHACISNPCKHGGTCHLKEGEEDGFWCICADGFEGENCEVNVDDCEDNDCENNSTCVDGINNYTCLCPPEYTGELCEEKLDFCAQDLNPCQHDSKCILTPKGFKCDCTPGYVGEHCDIDFDDCQDNKCKNGAHCTDAVNGYTCICPEGYSGLFCEFSPPMVLPRTSPCDNFDCQNGAQCIVRINEPICQCLPGYQGEKCEKLVSVNFINKESYLQIPSAKVRPQTNITLQIATDEDSGILLYKGDKDHIAVELYRGRVRASYDTGSHPASAIYSVETINDGNFHIVELLALDQSLSLSVDGGNPKIITNLSKQSTLNFDSPLYVGGMPGKSNVASLRQAPGQNGTSFHGCIRNLYINSELQDFQKVPMQTGILPGCEPCHKKVCAHGTCQPSSQAGFTCECQEGWMGPLCDQRTNDPCLGNKCVHGTCLPINAFSYSCKCLEGHGGVLCDEEEDLFNPCQAIKCKHGKCRLSGLGQPYCECSSGYTGDSCDREISCRGERIRDYYQKQQGYAACQTTKKVSRLECRGGCAGGQCCGPLRSKRRKYSFECTDGSSFVDEVEKVVKCGCTRCVS

SEQ ID NO: 12497 - protein, 1521 aa, Homo sapiens
MRGVGWQMLSLSLGLVLAILNKVAPQACPAQCSCSGSTVDCHGLALRSVPRNIPRNTERLDLNGNNITRITKTDFAGLRHLRVLQLMENKISTIERGAFQDLKELERLRLNRNHLQLFPELLFLGTAKLYRLDLSENQIQAIPRKAFRGAVDIKNLQLDYNQISCIEDGAFRALRDLEVLTLNNNNITRLSVASFNHMPKLRTFRLHSNNLYCDCHLAWLSDWLRQRPRVGLYTQCMGPSHLRGHNVAEVQKREFVCSGHQSFMAPSCSVLHCPAACTCSNNIVDCRGKGLTEIPTNLPETITEIRLEQNTIKVIPPGAFSPYKKLRRIDLSNNQISELAPDAFQGLRSLNSLVLYGNKITELPKSLFEGLFSLQLLLLNANKINCLRVDAFQDLHNLNLLSLYDNKLQTIAKGTFSPLRAIQTMHLAQNPFICDCHLKWLADYLHTNPIETSGARCTSPRRLANKRIGQIKSKKFRCSGTEDYRSKLSGDCFADLACPEKCRCEGTTVDCSNQKLNKIPEHIPQYTAELRLNNNEFTVLEATGIFKKLPQLRKINFSNNKITDIEEGAFEGASGVNEILLTSNRLENVQHKMFKGLESLKTLMLRSNRITCVGNDSFIGLSSVRLLSLYDNQITTVAPGAFDTLHSLSTLNLLANPFNCNCYLAWLGEWLRKKRIVTGNPRCQKPYFLKEIPIQDVAIQDFTCDDGNDDNSCSPLSRCPTECTCLDTVVRCSNKGLKVLPKGIPRDVTELYLDGNQFTLVPKELSNYKHLTLIDLSNNRISTLSNQSFSNMTQLLTLILSYNRLRCIPPRTFDGLKSLRLLSLHGNDISVVPEGAFNDLSALSHLAIGANPLYCDCNMQWLSDWVKSEYKEPGIARCAGPGEMADKLLLTTPSKKFTCQGPVDVNILAKCNPCLSNPCKNDGTCNSDPVDFYRCTCPYGFKGQDCDVPIHACISNPCKHGGTCHLKEGEEDGFWCICADGFEGENCEVNVDDCEDNDCENNSTCVDGINNYTCLCPPEYTGELCEEKLDFCAQDLNPCQHDSKCILTPKGFKCDCTPGYVGEHCDIDFDDCQDNKCKNGAHCTDAVNGYTCICPEGYSGLFCEFSPPMVLPRTSPCDNFDCQNGAQCIVRINEPICQCLPGYQGEKCEKLVSVNFINKESYLQIPSAKVRPQTNITLQIATDEDSGILLYKGDKDHIAVELYRGRVRASYDTGSHPASAIYSVETINDGNFHIVELLALDQSLSLSVDGGNPKIITNLSKQSTLNFDSPLYVGGMPGKSNVASLRQAPGQNGTSFHGCIRNLYINSELQDFQKVPMQTGILPGCEPCHKKVCAHGTCQPSSQAGFTCECQEGWMGPLCDQRTNDPCLGNKCVHGTCLPINAFSYSCKCLEGHGGVLCDEEEDLFNPCQAIKCKHGKCRLSGLGQPYCECSSGYTGDSCDREISCRGERIRDYYQKQQGYAACQTTKKVSRLECRGGCAGGQCCGPLRSKRRKYSFECTDGSSFVDEVEKVVKCGCTRCVS

SEQ ID NO: 12498 - protein, 1525 aa, Homo sapiens
MRGVGWQMLSLSLGLVLAILNKVAPQACPAQCSCSGSTVDCHGLALRSVPRNIPRNTERLDLNGNNITRITKTDFAGLRHLRVLQLMENKISTIERGAFQDLKELERLRLNRNHLQLFPELLFLGTAKLYRLDLSENQIQAIPRKAFRGAVDIKNLQLDYNQISCIEDGAFRALRDLEVLTLNNNNITRLSVASFNHMPKLRTFRLHSNNLYCDCHLAWLSDWLRQRPRVGLYTQCMGPSHLRGHNVAEVQKREFVCSDEEEGHQSFMAPSCSVLHCPAACTCSNNIVDCRGKGLTEIPTNLPETITEIRLEQNTIKVIPPGAFSPYKKLRRIDLSNNQISELAPDAFQGLRSLNSLVLYGNKITELPKSLFEGLFSLQLLLLNANKINCLRVDAFQDLHNLNLLSLYDNKLQTIAKGTFSPLRAIQTMHLAQNPFICDCHLKWLADYLHTNPIETSGARCTSPRRLANKRIGQIKSKKFRCSGTEDYRSKLSGDCFADLACPEKCRCEGTTVDCSNQKLNKIPEHIPQYTAELRLNNNEFTVLEATGIFKKLPQLRKINFSNNKITDIEEGAFEGASGVNEILLTSNRLENVQHKMFKGLESLKTLMLRSNRITCVGNDSFIGLSSVRLLSLYDNQITTVAPGAFDTLHSLSTLNLLANPFNCNCYLAWLGEWLRKKRIVTGNPRCQKPYFLKEIPIQDVAIQDFTCDDGNDDNSCSPLSRCPTECTCLDTVVRCSNKGLKVLPKGIPRDVTELYLDGNQFTLVPKELSNYKHLTLIDLSNNRISTLSNQSFSNMTQLLTLILSYNRLRCIPPRTFDGLKSLRLLSLHGNDISVVPEGAFNDLSALSHLAIGANPLYCDCNMQWLSDWVKSEYKEPGIARCAGPGEMADKLLLTTPSKKFTCQGPVDVNILAKCNPCLSNPCKNDGTCNSDPVDFYRCTCPYGFKGQDCDVPIHACISNPCKHGGTCHLKEGEEDGFWCICADGFEGENCEVNVDDCEDNDCENNSTCVDGINNYTCLCPPEYTGELCEEKLDFCAQDLNPCQHDSKCILTPKGFKCDCTPGYVGEHCDIDFDDCQDNKCKNGAHCTDAVNGYTCICPEGYSGLFCEFSPPMVLPRTSPCDNFDCQNGAQCIVRINEPICQCLPGYQGEKCEKLVSVNFINKESYLQIPSAKVRPQTNITLQIATDEDSGILLYKGDKDHIAVELYRGRVRASYDTGSHPASAIYSVETINDGNFHIVELLALDQSLSLSVDGGNPKIITNLSKQSTLNFDSPLYVGGMPGKSNVASLRQAPGQNGTSFHGCIRNLYINSELQDFQKVPMQTGILPGCEPCHKKVCAHGTCQPSSQAGFTCECQEGWMGPLCDQRTNDPCLGNKCVHGTCLPINAFSYSCKCLEGHGGVLCDEEEDLFNPCQAIKCKHGKCRLSGLGQPYCECSSGYTGDSCDREISCRGERIRDYYQKQQGYAACQTTKKVSRLECRGGCAGGQCCGPLRSKRRKYSFECTDGSSFVDEVEKVVKCGCTRCVS

SEQ ID NO: 12499 - protein, 212 aa, Homo sapiens
MTQLLTLILSYNRLRCIPPRTFDGLKSLRLLSLHGNDISVVPEGAFNDLSALSHLAIGANPLYCDCNMQWLSDWVKSEYKEPGIARCAGPGEMADKLLLTTPSKKFTCQGLPGPCGFLIPGPVDVNILAKCNPCLSNPCKNDGTCNSDPVDFYRCTCPYGFKGQDCDVPIHACISNPCKHGGTCHLKEGEEDGFWCICADGFEGENCEVNVD

SEQ ID NO: 12500 - protein, 196 aa, Homo sapiens
  VARIANT 1: note = misc_feature - Xaa can be any naturally occurring amino acid
XSDWVKSEYKEPGIARCAGPGEMADKLLLTTPSKKFTCQGPVDVNILAKCNPCLSNPCKNDGTCNSDPVDFYRCTCPYGFKGQDCDVPIHACISNPCKHGGTCHLKEGEEDGFWCICADGFEGENCEVNVDDCEDNDCENNSTCVDGINNYTCLCPPEYTGTNNRKYFAFHQYICLKASLELCYICLVNLFLFDKW

SEQ ID NO: 12501 - protein, 82 aa, Homo sapiens
  VARIANT 1: note = misc_feature - Xaa can be any naturally occurring amino acid
XSYDTGSHPASAIYSVETINDGNFHIVELLALDQSLSLSVDGGNPKIITNLSKQSTLNFDSPLYVGGMPGKSNVASLRQGAL

SEQ ID NO: 12502 - protein, 1530 aa, Homo sapiens
MAPGWAGVGAAVRARLALALALASVLSGPPAVACPTKCTCSAASVDCHGLGLRAVPRGIPRNAERLDLDRNNITRITKMDFAGLKNLRVLHLEDNQVSVIERGAFQDLKQLERLRLNKNKLQVLPELLFQSTPKLTRLDLSENQIQGIPRKAFRGITDVKNLQLDNNHISCIEDGAFRALRDLEILTLNNNNISRILVTSFNHMPKIRTLRLHSNHLYCDCHLAWLSDWLRQRRTVGQFTLCMAPVHLRGFNVADVQKKEYVCPAPHSEPPSCNANSISCPSPCTCSNNIVDCRGKGLMEIPANLPEGIVEIRLEQNSIKAIPAGAFTQYKKLKRIDISKNQISDIAPDAFQGLKSLTSLVLYGNKITEIVKGLFDGLVSLQLLLLNANKINCLRVNTFQDLQNLNLLSLYDNKLQTISKGLFAPLQSIQTLHLAQNPFVCDCHLKWLADYLQDNPIETSGARCSSPRRLANKRISQIKSKKFRCSGSEDYRSRFSSECFMDLVCPEKCRCEGTIVDCSNQKLVRIPSHLPEYVTDLRLNDNEVSVLEATGIFKKLPNLRKINLSNNKIKEVREGAFDGAASVQELMLTGNQLETVHGRVFRGLSGLKTLMLRSNLIGCVSNDTFAGLSSVRLLSLYDNRITTITPGAFTTLVSLSTINLLSNPFNCNCHLAWLGKWLRKRRIVSGNPRCQKPFFLKEIPIQDVAIQDFTCDGNEESSCQLSPRCPEQCTCMETVVRCSNKGLRALPRGMPKDVTELYLEGNHLTAVPRELSALRHLTLIDLSNNSISMLTNYTFSNMSHLSTLILSYNRLRCIPVHAFNGLRSLRVLTLHGNDISSVPEGSFNDLTSLSHLALGTNPLHCDCSLRWLSEWVKAGYKEPGIARCSSPEPMADRLLLTTPTHRFQCKVLWFCCPGPVDINIVAKCNACLSSPCKNNGTCTQDPVELYRCACPYSYKGKDCTVPINTCIQNPCQHGGTCHLSDSHKDGFSCSCPLGFEGQRCEINPDDCEDNDCENNATCVDGINNYVCICPPNYTGELCDEVIDHCVPELNLCQHEAKCIPLDKGFSCECVPGYSGKLCETDNDDCVAHKCRHGAQCVDTINGYTCTCPQGFSGPFCEHPPPMVLLQTSPCDQYECQNGAQCIVVQQEPTCRCPPGFAGPRCEKLITVNFVGKDSYVELASAKVRPQANISLQVATDKDNGILLYKGDNDPLALELYQGHVRLVYDSLSSPPTTVYSVETVNDGQFHSVELVTLNQTLNLVVDKGTPKSLGKLQKQPAVGINSPLYLGGIPTSTGLSALRQGTDRPLGGFHGCIHEVRINNELQDFKALPPQSLGVSPGCKSCTVCKHGLCRSVEKDSVVCECRPGWTGPLCDQEARDPCLGHRCHHGKCVATGTSYMCKCAEGYGGDLCDNKNDSANACSAFKCHHGQCHISDQGEPYCLCQPGFSGEHCQQENPCLGQVVREVIRRQKGYASCATASKVPIMECRGGCGPQCCQPTRSKRRKYVFQCTDGSSFVEEVERHLECGCLACS

SEQ ID NO: 12503 - protein, 1523 aa, Homo sapiens
MAPGWAGVGAAVRARLALALALASVLSGPPAVACPTKCTCSAASVDCHGLGLRAVPRGIPRNAERLDLDRNNITRITKMDFAGLKNLRVLHLEDNQVSVIERGAFQDLKQLERLRLNKNKLQVLPELLFQSTPKLTRLDLSENQIQGIPRKAFRGITDVKNLQLDNNHISCIEDGAFRALRDLEILTLNNNNISRILVTSFNHMPKIRTLRLHSNHLYCDCHLAWLSDWLRQRRTVGQFTLCMAPVHLRGFNVADVQKKEYVCPAPHSEPPSCNANSISCPSPCTCSNNIVDCRGKGLMEIPANLPEGIVEIRLEQNSIKAIPAGAFTQYKKLKRIDISKNQISDIAPDAFQGLKSLTSLVLYGNKITEIVKGLFDGLVSLQLLLLNANKINCLRVNTFQDLQNLNLLSLYDNKLQTISKGLFAPLQSIQTLHLAQNPFVCDCHLKWLADYLQDNPIETSGARCSSPRRLANKRISQIKSKKFRCSGSEDYRSRFSSECFMDLVCPEKCRCEGTIVDCSNQKLVRIPSHLPEYVTDLRLNDNEVSVLEATGIFKKLPNLRKINLSNNKIKEVREGAFDGAASVQELMLTGNQLETVHGRVFRGLSGLKTLMLRSNLIGCVSNDTFAGLSSVRLLSLYDNRITTITPGAFTTLVSLSTINLLSNPFNCNCHLAWLGKWLRKRRIVSGNPRCQKPFFLKEIPIQDVAIQDFTCDGNEESSCQLSPRCPEQCTCMETVVRCSNKGLRALPRGMPKDVTELYLEGNHLTAVPRELSALRHLTLIDLSNNSISMLTNYTFSNMSHLSTLILSYNRLRCIPVHAFNGLRSLRVLTLHGNDISSVPEGSFNDLTSLSHLALGTNPLHCDCSLRWLSEWVKAGYKEPGIARCSSPEPMADRLLLTTPTHRFQCKGPVDINIVAKCNACLSSPCKNNGTCTQDPVELYRCACPYSYKGKDCTVPINTCIQNPCQHGGTCHLSDSHKDGFSCSCPLGFEGQRCEINPDDCEDNDCENNATCVDGINNYVCICPPNYTGELCDEVIDHCVPELNLCQHEAKCIPLDKGFSCECVPGYSGKLCETDNDDCVAHKCRHGAQCVDTINGYTCTCPQGFSGPFCEHPPPMVLLQTSPCDQYECQNGAQCIVVQQEPTCRCPPGFAGPRCEKLITVNFVGKDSYVELASAKVRPQANISLQVATDKDNGILLYKGDNDPLALELYQGHVRLVYDSLSSPPTTVYSVETVNDGQFHSVELVTLNQTLNLVVDKGTPKSLGKLQKQPAVGINSPLYLGGIPTSTGLSALRQGTDRPLGGFHGCIHEVRINNELQDFKALPPQSLGVSPGCKSCTVCKHGLCRSVEKDSVVCECRPGWTGPLCDQEARDPCLGHRCHHGKCVATGTSYMCKCAEGYGGDLCDNKNDSANACSAFKCHHGQCHISDQGEPYCLCQPGFSGEHCQQENPCLGQVVREVIRRQKGYASCATASKVPIMECRGGCGPQCCQPTRSKRRKYVFQCTDGSSFVEEVERHLECGCLACS

SEQ ID NO: 12504 - protein, 1393 aa, Homo sapiens
RDLSENQIQGIPRKAFRGITDVKNLQLDNNHISCIEDGAFRALRDLEILTLNNNNISRILVTSFNHMPKIRTLRLHSNHLYCDCHLAWLSDWLRQRRTVGQFTLCMAPVHLRGFNVADVQKKEYVCPAPHSEPPSCNANSISCPSPCTCSNNIVDCRGKGLMEIPANLPEGIVEIRLEQNSIKAIPAGAFTQYKKLKRIDISKNQISDIAPDAFQGLKSLTSLVLYGNKITEIVKGLFDGLVSLQLLLLNANKINCLRVNTFQDLQNLNLLSLYDNKLQTISKGLFAPLQSIQTLHLAQNPFVCDCHLKWLADYLQDNPIETSGARCSSPRRLANKRISQIKSKKFRCSGSEDYRSRFSSECFMDLVCPEKCRCEGTIVDCSNQKLVRIPSHLPEYVTDLRLNDNEVSVLEATGIFKKLPNLRKINLSNNKIKEVREGAFDGAASVQELMLTGNQLETVHGRVFRGLSGLKTLMLRSNLIGCVSNDTFAGLSSVRLLSLYDNRITTITPGAFTTLVSLSTINLLSNPFNCNCHLAWLGKWLRKRRIVSGNPRCQKPFFLKEIPIQDVAIQDFTCDGNEESSCQLSPRCPEQCTCMETVVRCSNKGLRALPRGMPKDVTELYLEGNHLTAVPRELSALRHLTLIDLSNNSISMLTNYTFSNMSHLSTLILSYNRLRCIPVHAFNGLRSLRVLTLHGNDISSVPEGSFNDLTSLSHLALGTNPLHCDCSLRWLSEWVKAGYKEPGIARCSSPEPMADRLLLTTPTHRFQCKVLWFCCPGPVDINIVAKCNACLSSPCKNNGTCTQDPVELYRCACPYSYKGKDCTVPINTCIQNPCQHGGTCHLSDSHKDGFSCSCPLGFEGQRCEINPDDCEDNDCENNATCVDGINNYVCICPPNYTGELCDEVIDHCVPELNLCQHEAKCIPLDKGFSCECVPGYSGKLCETDNDDCVAHKCRHGAQCVDTINGYTCTCPQGFSGPFCEHPPPMVLLQTSPCDQYECQNGAQCIVVQQEPTCRCPPGFAGPRCEKLITVNFVGKDSYVELASAKVRPQANISLQVATDKDNGILLYKGDNDPLALELYQGHVRLVYDSLSSPPTTVYSVETVNDGQFHSVELVTLNQTLNLVVDKGTPKSLGKLQKQPAVGINSPLYLGGIPTSTGLSALRQGTDRPLGGFHGCIHEVRINNELQDFKALPPQSLGVSPGCKSCTVCKHGLCRSVEKDSVVCECRPGWTGPLCDQEARDPCLGHRCHHGKCVATGTSYMCKCAEGYGGDLCDNKNDSANACSAFKCHHGQCHISDQGEPYCLCQPGFSGEHCQQENPCLGQVVREVIRRQKGYASCATASKVPIMECRGGCGPQCCQPTRSKRRKYVFQCTDGSSFVEEVERHLECGCLACS

SEQ ID NO: 12505 - protein, 163 aa, Homo sapiens
MKPSIAEMLHRGRMLWIILLSTIALGWTTPIPLIEDSEEIDEPCFDPCYCEVKESLFHIHCDSKGFTNISQITEFWSRPFKLYLQRNSMRKLYTNSFLHLNNAVSINLGNNALQDIQTGAFNGLKILKRLYLHENKLDVFRNDTFLGLESLEYLQADYNVIKR

SEQ ID NO: 12506 - protein, 977 aa, Homo sapiens
MKPSIAEMLHRGRMLWIILLSTIALGWTTPIPLIEDSEEIDEPCFDPCYCEVKESLFHIHCDSKGFTNISQITEFWSRPFKLYLQRNSMRKLYTNSFLHLNNAVSINLGNNALQDIQTGAFNGLKILKRLYLHENKLDVFRNDTFLGLESLEYLQADYNVIKRIESGAFRNLSKLRVLILNDNLIPMLPTNLFKAVSLTHLDLRGNRLKVLFYRGMLDHIGRSLMELQLEENPWNCTCEIVQLKSWLERIPYTALVGDITCETPFHFHGKDLREIRKTELCPLLSDSEVEASLGIPHSSSSKENAWPTKPSSMLSSVHFTASSVEYKSSNKQPKPTKQPRTPRPPSTSQALYPGPNQPPIAPYQTRPPIPIICPTGCTCNLHINDLGLTVNCKERGFNNISELLPRPLNAKKLYLSSNLIQKIYRSDFWNFSSLDLLHLGNNRISYVQDGAFINLPNLKSLFLNGNDIEKLTPGMFRGLQSLHYLYFEFNVIREIQPAAFSLMPNLKLLFLNNNLLRTLPTDAFAGTSLARLNLRKNYFLYLPVAGVLEHLNAIVQIDLNENPWDCTCDLVPFKQWIETISSVSVVGDVLCRSPENLTHRDVRTIELEVLCPEMLHVAPAGESPAQPGDSHLIGAPTSASPYEFSPPGGPVPLSVLILSLLVLFFSAVFVAAGLFAYVLRRRRKKLPFRSKRQEGVDLTGIQMQCHRLFEDGGGGGGGSGGGGRPTLSSPEKAPPVGHVYEYIPHPVTQMCNNPIYKPREEEEVAVSSAQEAGSAERGGPGTQPPGMGEALLGSEQFAETPKENHSNYRTLLEKEKEWALAVSSSQLNTIVTVNHHHPHHPAVGGVSGVVGGTGGDLAGFRHHEKNGGVVLFPPGGGCGSGSMLLDRERPQPAPCTVGFVDCLYGTVPKLKELHVHPPGMQYPDLQQDARLKETLLFSAGKGFTDHQTQKSDYLELRAKLQTKPDYLEVLEKTTYRF

SEQ ID NO: 12507 - protein, 977 aa, Homo sapiens; identical to SEQ ID NO: 12506

SEQ ID NO: 12508 - protein, 132 aa, Homo sapiens
MKSSGLFPFLVLLALGTLAPWAVEGSGKSFKAGVCPPKKSAQCLRYKKPECQSDWQCPGKKRCCPDTCGIKCLDPVDTPNPTRRKPGKCPVTYGQCLMLNPPNFCEMDGQCKRDLKCCMGMCGKSCVSPVKA

SEQ ID NO: 12509 - protein, 600 aa, Homo sapiens
GKVLSAKVVTNARSPGAKCYGIVTMSSSTEVSRCIAHLHRTELHGQLISVEKVKGDPSKKEMKKENDEKSSSRSSGDKKNTSDRSSKTQASVKKEEKRSSEKSEKKESKDTKKIEGSKSPGHMVILDQTKGDHCRPSRRGRYEKIHGRSKEKERASLDKKRDKDYRRKEILPFEKMKEQRLREHLVRFERLRRAMELRRRREIAERERRERERIRIIREREERERLQRERERLEIERQKLERERMERERLERERIRIEQERRKEAERIAREREELRRQQQQLRYEQEKRNSLKRPRDVDHRRDDPYWSENKKLSLDTDARFGHGSDYSRQQNRFNDFDHRERGRFPESSAVQSSSFERRDRFVGQSEGKKARPTARREDPSFERYPKNFSDSRRNEPPPPRNELRESDRREVRGERDERRTVIIHDRPDITHPRHPREAGPNPSRPTSWKSEGSMSTDKRETRVERPERSGREVSGHSVRGAPPGNRSSASGYGSREGDRGVITDRGGGSQHYPEERHVVERHGRDTSGPRKEWHGPPSQGPSYHDTRRMGDGRAGAGMITQHSSNASPINRIVQISGNSMPRGSGSGFKPFKGGPPRRF

SEQ ID NO: 12510 - protein, 100 aa, Homo sapiens
GVITDRGGGSQHYPEERHVVERHGRDTSGPRKEWHGPPSQGPSYHDTRRMGDGRAGAGMITQHSSNASPINRIVQISGNSMPRGSGSGFKPFKGGPPRRF

SEQ ID NO: 12511 - protein, 89 aa, Homo sapiens
MAAATGAVAASAASGQAEGKKITDLRVIDLKSELKRRNLDITGVKTVLISRLKQAIEEEGGDPDNIELTVSTDTPNKKPTKGKDYKLKH

SEQ ID NO: 12512 - protein, 1034 aa, Homo sapiens
MAAATGAVAASAASGQAEGKKITDLRVIDLKSELKRRNLDITGVKTVLISRLKQAIEEEGGDPDNIELTVSTDTPNKKPTKGKGKKHEADELSGDASVEDDAFIKDCELENQEAHEQDGNDELKDSEEFGENEEENVHSKELLSAEENKRAHELIEAEGIEDIEKEDIESQEIEAQEGEDDTFLTAQDGEEEENEKDIAGSGDGTQEVSKPLPSEGSLAEADHTAHEEMEAHTTVKEAEDDNISVTIQAEDAITLDFDGDDLLETGKNVKITDSEASKPKDGQDAIAQSPEKESKDYEMNANHKDGKKEDCVKGDPVEKEARESSKKAESGDKEKDTLKKGPSSTGASGQAKSSSKESKDSKTSSKDDKGSTSSTSGSSGSSTKNIWVSGLSSNTKAADLKNLFGKYGKVLSAKVVTNARSPGAKCYGIVTMSSSTEVSRCIAHLHRTELHGQLISVEKVKGDPSKKEMKKENDEKSSSRSSGDKKNTSDRSSKTQASVKKEEKRSSEKSEKKESKDTKKIEGKDEKNDNGASGQTSESIKKSEEKKRISSKSPGHMVILDQTKGDHCRPSRRGRYEKIHGRSKEKERASLDKKRDKDYRRKEILPFEKMKEQRLREHLVRFERLRRAMELRRRREIAERERRERERIRIIREREERERLQRERERLEIERQKLERERMERERLERERIRIEQERRKEAERIAREREELRRQQQQLRYEQEKRNSLKRPRDVDHRRDDPYWSENKKLSLDTDARFGHGSDYSRQQNRFNDFDHRERGRFPESSAVQSSSFERRDRFVGQSEGKKARPTARREDPSFERYPKNFSDSRRNEPPPPRNELRESDRREVRGERDERRTVIIHDRPDITHPRHPREAGPNPSRPTSWKSEGSMSTDKRETRVERPERSGREVSGHSVRGAPPGNRSSASGYGSREGDRGVITDRGGGSQHYPEERHVVERHGRDTSGPRKEWHGPPSQGPSYHDTRRMGDGRAGAGMITQHSSNASPINRIVQISGNSMPRGSGSGFKPFKGGPPRRF

SEQ ID NO: 12513 - protein, 229 aa, Homo sapiens
MAAATGAVAASAASGQAEGKKITDLRVIDLKSELKRRNLDITGVKTVLISRLKQAIEEEGGDPDNIELTVSTDTPNKKPTKGKGKKHEADELSGDASVEDDAFIKDCELENQEAHEQDGNDELKDSEEFGENEEENVHSKELLSAEENKRAHELIEAEGIEDIEKEDIESQEIEAQEGEDDTFLTAQDGEEEENEKDSEASKPKDGQDAIAQSPEKESKDYEMNANHKD

SEQ ID NO: 12514 - protein, 453 aa, Homo sapiens
MAAATGAVAASAASGQAEGKKITDLRVIDLKSELKRRNLDITGVKTVLISRLKQAIEEEGGDPDNIELTVSTDTPNKKPTKGKGKKHEADELSGDASVEDDAFIKDCELENQEAHEQDGNDELKDSEEFGENEEENVHSKELLSAEENKRAHELIEAEGIEDIEKEDIESQEIEAQEGEDDTFLTAQDGEEEENEKEGSLAEADHTAHEEMEAHTTVKEAEDDNISVTIQAEDAITLDFDGDDLLETGKNVKITDSEASKPKDGQDAIAQSPEKESKDYEMNANHKDGKKEDCVKGDPVEKEARESSKKAESGDKEKDTLKKGPSSTGASGQAKSSSKESKDSKTSSKDDKGSTSSTSGSSGSSTKNIWVSGLSSNTKAADLKNLFGKYGKVLSAKVVTNARSPGAKCYGIVTMSSSTEVSRCIAHLHRTELHGQLISVEKVKGDPSKKEMKK

SEQ ID NO: 12515 - protein, 192 aa, Homo sapiens
MAAATGAVAASAASGQAEGKKITDLRVIDLKSELKRRNLDITGVKTVLISRLKQAIEEEGGDPDNIELTVSTDTPNKKPTKGKGKKHEADELSGDASVEDDAFIKDGEEEENEKDIAGSGDGTQEVSKPLPSEGSLAEADHTAHEEMEAHTTVKEAEDDNISVTIQAEDAITLDFDGDDLLETGKNVKITDS

SEQ ID NO: 12516 - protein, 177 aa, Homo sapiens
MAAATGAVAASAASGQAEGKKITDLRVIDLKSELKRRNLDITGVKTVLISRLKQAIEEEGGDPDNIELTVSTDTPNKKPTKGKGKKHEADELSGDASVEDDAFIKEIEAQEGEDDTFLTAQDGEEEENEKALQRNLKTARHHLKMTKEVQVVLVVAVEAQLKISGLVDFHLIPKLLI

SEQ ID NO: 12517 - protein, 161 aa, Homo sapiens
MAAATGAVAASAASGQAEGKKITDLRVIDLKSELKRRNLDITGVKTVLISRLKQAIEEEGGDPDNIELTVSTDTPNKKPTKGKGKKHEADELSGDASVEDDAFIKEIEAQEGEDDTFLTAQDGEEEENEKEGSLAEADHTAHEEMEAHTTVKEAEDDNISV

SEQ ID NO: 12518 - protein, 62 aa, Homo sapiens
MAAATGAVAASAASGQAEGKKITDLRVIDLKSELKRRNLDITGVKTVLISRLKQVKNMKQMS

SEQ ID NO: 12519 - protein, 62 aa, Homo sapiens; identical to SEQ ID NO: 12518

SEQ ID NO: 12520 - protein, 62 aa, Homo sapiens; identical to SEQ ID NO: 12518

SEQ ID NO: 12521 - protein, 205 aa, Homo sapiens
  VARIANT 1: note = misc_feature - Xaa can be any naturally occurring amino acid
XDITGVKTVLISRLKQAIEEEGGDPDNIELTVSTDTPNKKPTKGKGKKHEADELSGDASVEDDAFIKDCELENQEAHEQDGNDELKDSEEFGENEEENVHSKELLSAEENKRAHELIEAEGIEDIEKEDIESQEIEAQEGEDDTFLTAQDGEEEENEKALQRNLKTARHHLKMTKEVQVVLVVAVEAQLKISGLVDFHLIPKLLI

SEQ ID NO: 12522 - protein, 112 aa, Homo sapiens
  VARIANT 1: note = misc_feature - Xaa can be any naturally occurring amino acid
XLRYEQEKRNSLKRPRDVDHSKYFSSRRDDPYWSENKKLSLDTDARFGHGSDYSRQQNRFNDFDHRERGRFPESSAVQSSSFERRDRFVGQSEGKKARPTARREDPSFERYP

SEQ ID NO: 12523 - protein, 103 aa, Homo sapiens
MASRWAVQLLLVAAWSMGCGEALKCYTCKEPMTSASCRTITRCKPEDTACMTTLVTVEAEYPFNQSPVVTRSCSSSCVATDPDSIGAAHLIFCCFRDLCNSEL

SEQ ID NO: 12524 - protein, 57 aa, Homo sapiens
AAAQPPAAAVPGPSVPQPAPGQPSPVLQLQQKQSRISPIQKPQGLDPVEILQEREYR

SEQ ID NO: 12525 - protein, 37 aa, Homo sapiens
AEGGESALGPDGECFVEGVRGKNHWPIDESSQMSDLP

SEQ ID NO: 12526 - protein, 68 aa, Homo sapiens
MAIEDGNLEEMEEEVRLKKRKRRRNVDKDPAKEDVEKAKKRRGRPPAEKLSPNPPKLTKQMNAIIDTV

SEQ ID NO: 12527 - protein, 254 aa, Homo sapiens
MEEEVRLKKRKRRRNVDKDPAKEDVEKAKKRRGRPPAEKLSPNPPKLTKQMNAIIDTVINYKDRCNVEKVPSNSQLEIEGNSSGRQLSEVFIQLPSRKELPEYYELIRKPVDFKKIKERIRNHKYRSLGDLEKDVMLLCHNAQTFNLEGSQIYEDSIVLQSVFKSARQKIAKEEESEDESNEEEEEEDEEESESEAKSVKVKIKLNKKDDKGRDKGKGKKRPNRGKAKPVVSDFDSDEEQDEREQSEGSGTDDE

SEQ ID NO: 12528 - protein, 254 aa, Homo sapiens; identical to SEQ ID NO: 12527

SEQ ID NO: 12529 - protein, 149 aa, Homo sapiens
MEEEVRLKKRKRRRNVDKDPAKEDVEKAKKRRGRPPAEKLSPNPPKLTKQMNAIIDTVINYKDSSGRQLSEVFIQLPSRKELPEYYELIRKPVDFKKIKERIRNHKYRSLGDLEKDVMLLCHNAQTFNLEGSQIYEDSIVLQSVFKSAR

SEQ ID NO: 12530 - protein, 169 aa, Homo sapiens
MEEEVRLKKRKRRRNVDKDPAKEDVEKAKKRRGRPPAEKLSPNPPKLTKQMNAIIDTVINYKDSSGRQLSEVFIQLPSRKELPEYYELIRKPVDFKKIKERIRNHKYRSLGDLEKDVMLLCHNAQTFNLEGSQIYEDSIVLQSVFKSARQKIAKEEESEDESNEEEEEE

SEQ ID NO: 12531 - protein, 192 aa, Homo sapiens
MEEEVRLKKRKRRRNVDKDPAKEDVEKAKKRRGRPPAEKLSPNPPKLTKQMNAIIDTVINYKDSSGRQLSEVFIQLPSRKELPEYYELIRKPVDFKKIKERIRNHKYRSLGDLEKDVMLLCHNAQTFNLEGSQIYEDSIVLQSVFKSARQKIAKEEESEDESNEEEEEEDEEESESEAKSVKVKIKLNKKDD

SEQ ID NO: 12532 - protein, 202 aa, Homo sapiens
MEEEVRLKKRKRRRNVDKDPAKEDVEKAKKRRGRPPAEKLSPNPPKLTKQMNAIIDTVINYKDSSGRQLSEVFIQLPSRKELPEYYELIRKPVDFKKIKERIRNHKYRSLGDLEKDVMLLCHNAQTFNLEGSQIYEDSIVLQSVFKSARQKIAKEEESEDESNEEEEEEDEEESESEAKSVKVKIKLNKKDDKGRDKGKGKK

SEQ ID NO: 12533 - protein, 236 aa, Homo sapiens
MEEEVRLKKRKRRRNVDKDPAKEDVEKAKKRRGRPPAEKLSPNPPKLTKQMNAIIDTVINYKDSSGRQLSEVFIQLPSRKELPEYYELIRKPVDFKKIKERIRNHKYRSLGDLEKDVMLLCHNAQTFNLEGSQIYEDSIVLQSVFKSARQKIAKEEESEDESNEEEEEEDEEESESEAKSVKVKIKLNKKDDKGRDKGKGKKRPNRGKAKPVVSDFDSDEEQDEREQSEGSGTDDE

SEQ ID NO: 12534 - protein, 260 aa, Homo sapiens
MIINISHVWCCGEMKAIEDGNLEEMEEEVRLKKRKRRRNVDKDPAKEDVEKAKKRRGRPPAEKLSPNPPKLTKQMNAIIDTVINYKDSSGRQLSEVFIQLPSRKELPEYYELIRKPVDFKKIKERIRNHKYRSLGDLEKDVMLLCHNAQTFNLEGSQIYEDSIVLQSVFKSARQKIAKEEESEDESNEEEEEEDEEESESEAKSVKVKIKLNKKDDKGRDKGKGKKRPNRGKAKPVVSDFDSDEEQDEREQSEGSGTDDE

SEQ ID NO: 12535 - protein, 62 aa, Homo sapiens
MKGTGMRPPHPGMGPPQSPMDQHSQGYMSPHPSPLGAPEHVSSPMSGGGPTPPQMPPSQPGA

SEQ ID NO: 12536 - protein, 244 aa, Homo sapiens
MKRLAARCFAGLLILSPLTVISDSRPADSGKAIEDGNLEEMEEEVRLKKRKRRRNVDKDPAKEDVEKAKKRRGRPPAEKLSPNPPKLTKQMNAIIDTVINYKDRCNVEKVPSNSQLEIEGNSSGRQLSEVFIQLPSRKELPEYYELIRKPVDFKKIKERIRNHKYRSLGDLEKDVMLLCHNAQTFNLEGSQIYEDSIVLQSVFKSARQKIAKEEESEDESNEEEEEEDEEESESEAKSVKVKIK

SEQ ID NO: 12537 - protein, 245 aa, Homo sapiens
MKRLAARCFAGLLILSPLTVISDSRPADSGKAIEDGNLEEMEEEVRLKKRKRRRNVDKDPAKEDVEKAKKRRGRPPAEKLSPNPPKLTKQMNAIIDTVINYKDRCNVEKVPSNSQLEIEGNSSGRQLSEVFIQLPSRKELPEYYELIRKPVDFKKIKERIRNHKYRSLGDLEKDVMLLCHNAQTFNLEGSQIYEDSIVLQSVFKSARQKIAKEEESEDESNEEEEEEDEEESESEAKSVKVKIKL

SEQ ID NO: 12538 - protein, 200 aa, Homo sapiens
MKRLAARCFAGLLILSPLTVISDSRPADSGKAIEDGNLEEMEEEVRLKKRKRRRNVDKDPAKEDVEKAKKRRGRPPAEKLSPNPPKLTKQMNAIIDTVINYKDSSGRQLSEVFIQLPSRKELPEYYELIRKPVDFKKIKERIRNHKYRSLGDLEKDVMLLCHNAQTFNLEGSQIYEDSIVLQSVFKSARQKIAKEEESED

SEQ ID NO: 12539 - protein, 228 aa, Homo sapiens
MKRLAARCFAGLLILSPLTVISDSRPADSGKAIEDGNLEEMEEEVRLKKRKRRRNVDKDPAKEDVEKAKKRRGRPPAEKLSPNPPKLTKQMNAIIDTVINYKDSSGRQLSEVFIQLPSRKELPEYYELIRKPVDFKKIKERIRNHKYRSLGDLEKDVMLLCHNAQTFNLEGSQIYEDSIVLQSVFKSARQKIAKEEESEDESNEEEEEEDEEESESEAKSVKVKIKLN

SEQ ID NO: 12540 - protein, 229 aa, Homo sapiens
MKRLAARCFAGLLILSPLTVISDSRPADSGKAIEDGNLEEMEEEVRLKKRKRRRNVDKDPAKEDVEKAKKRRGRPPAEKLSPNPPKLTKQMNAIIDTVINYKDSSGRQLSEVFIQLPSRKELPEYYELIRKPVDFKKIKERIRNHKYRSLGDLEKDVMLLCHNAQTFNLEGSQIYEDSIVLQSVFKSARQKIAKEEESEDESNEEEEEEDEEESESEAKSVKVKIKLNK

SEQ ID NO: 12541 - protein, 276 aa, Homo sapiens
MKRLAARCFAGLLILSPLTVISDSRPADSGKAIEDGNLEEMEEEVRLKKRKRRRNVDKDPAKEDVEKAKKRRGRPPAEKLSPNPPKLTKQMNAIIDTVINYKDSSGRQLSEVFIQLPSRKELPEYYELIRKPVDFKKIKERIRNHKYRSLGDLEKDVMLLCHNAQTFNLEGSQIYEDSIVLQSVFKSARQKIAKEEESEDESNEEEEEEDEEESESEAKSVKVKIKLNKKDDKGRDKGKGKKRPNRGKAKPVVSDFDSDEEQDEREQSEGSGTDDE

SEQ ID NO: 12542 - protein, 276 aa, Homo sapiens; identical to SEQ ID NO: 12541

SEQ ID NO: 12543 - protein, 98 aa, Homo sapiens
MKRLAARCFAGLLILSPLTVISDSRPADSGKCCWLWFKASVCRPSKTAIWRKWKRKYGLRSEKDEEMWIKILQKKMWKKLRREEAALPLRNCHQIPPN

SEQ ID NO: 12544 - protein, 98 aa, Homo sapiens; identical to SEQ ID NO: 12543

SEQ ID NO: 12545 - protein, 98 aa, Homo sapiens; identical to SEQ ID NO: 12543

SEQ ID NO: 12546 - protein, 232 aa, Homo sapiens [sequence omitted]

SEQ ID NO: 12547 - protein, 278 aa, Homo sapiens
MLMKRLAARCFAGLLILSPLTVISDSRPADSGKAIEDGNLEEMEEEVRLKKRKRRRNVDKDPAKEDVEKAKKRRGRPPAEKLSPNPPKLTKQMNAIIDTVINYKDSSGRQLSEVFIQLPSRKELPEYYELIRKPVDFKKIKERIRNHKYRSLGDLEKDVMLLCHNAQTFNLEGSQIYEDSIVLQSVFKSARQKIAKEEESEDESNEEEEEEDEEESESEAKSVKVKIKLNKKDDKGRDKGKGKKRPNRGKAKPVVSDFDSDEEQDEREQSEGSGTDDE

SEQ ID NO: 12548-12549 - skipped (2 entries)

SEQ ID NO: 12550 - protein, 5 aa, Homo sapiens
MSTPT

SEQ ID NO: 12551 - protein, 7 aa, Homo sapiens
MSTPTDP

SEQ ID NO: 12552 - protein, 9 aa, Homo sapiens
MSTPTDPGA

SEQ ID NO: 12553 - protein, 193 aa, Homo sapiens
MSTPTDPGAMPHPGPSPGPGPSPGPILGPSPGPGPSPGSVHSMMGPSPGPPSVSHPMPTMGSTDFPQEGMHQMHKPIDGIHDKGIVEDIHCGSMKGTGMRPPHPGMGPPQSPMDQHSQGYMSPHPSPLGAPEHVSSPMSGGGPTPPQMPPSQPGALIPGDPQAMSQPNRGPSPFSPVQLHQLRAQILAYKMLA

SEQ ID NO: 12554 - protein, 215 aa, Homo sapiens
MSTPTDPGAMPHPGPSPGPGPSPGPILGPSPGPGPSPGSVHSMMGPSPGPPSVSHPMPTMGSTDFPQEGMHQMHKPIDGIHDKGIVEDIHCGSMKGTGMRPPHPGMGPPQSPMDQHSQGYMSPHPSPLGAPEHVSSPMSGGGPTPPQMPPSQPGALIPGDPQAMSQPNRGPSPFSPVQLHQLRAQILAYKMLARGQPLPETLQLAVQGKRTLPGL

SEQ ID NO: 12555 - protein, 1590 aa, Homo sapiens
MSTPTDPGAMPHPGPSPGPGPSPGPILGPSPGPGPSPGSVHSMMGPSPGPPSVSHPMPTMGSTDFPQEGMHQMHKPIDGIHDKGIVEDIHCGSMKGTGMRPPHPGMGPPQSPMDQHSQGYMSPHPSPLGAPEHVSSPMSGGGPTPPQMPPSQPGALIPGDPQAMSQPNRGPSPFSPVQLHQLRAQILAYKMLARGQPLPETLQLAVQGKRTLPGLQQQQQQQQQQQQQQQQQQQQQQQPQQQPPQPQTQQQQQPALVNYNRPSGPGPELSGPSTPQKLPVPAPGGRPSPAPPAAAQPPAAAVPGPSVPQPAPGQPSPVLQLQQKQSRISPIQKPQGLDPVEILQEREYRLQARIAHRIQELENLPGSLPPDLRTKATVELKALRLLNFQRQLRQEVVACMRRDTTLETALNSKAYKRSKRQTLREARMTEKLEKQQKIEQERKRRQKHQEYLNSILQHAKDFKEYHRSVAGKIQKLSKAVATWHANTEREQKKETERIEKERMRRLMAEDEEGYRKLIDQKKDRRLAYLLQQTDEYVANLTNLVWEHKQAQAAKEKKKRRRRKKKAEENAEGGESALGPDGEPIDESSQMSDLPVKVTHTETGKVLFGPEAPKASQLDAWLEMNPGYEVAPRSDSEESDSDYEEEDEEEESSRQETEEKILLDPNSEEVSEKDAKQIIETAKQDVDDEYSMQYSARGSQSYYTVAHAISERVEKQSALLINGTLKHYQLQGLEWMVSLYNNNLNGILADEMGLGKTIQTIALITYLMEHKRLNGPYLIIVPLSTLSNWTYEFDKWAPSVVKISYKGTPAMRRSLVPQLRSGKFNVLLTTYEYIIKDKHILAKIRWKYMIVDEGHRMKNHHCKLTQVLNTHYVAPRRILLTGTPLQNKLPELWALLNFLLPTIFKSCSTFEQWFNAPFAMTGERVDLNEEETILIIRRLHKVLRPFLLRRLKKEVESQLPEKVEYVIKCDMSALQKILYRHMQAKGILLTDGSEKDKKGKGGAKTLMNTIMQLRKICNHPYMFQHIEESFAEHLGYSNGVINGAELYRASGKFELLDRILPKLRATNHRVLLFCQMTSLMTIMEDYFAFRNFLYLRLDGTTKSEDRAALLKKFNEPGSQYFIFLLSTRAGGLGLNLQAADTVVIFDSDWNPHQDLQAQDRAHRIGQQNEVRVLRLCTVNSVEEKILAAAKYKLNVDQKVIQAGMFDQKSSSHERRAFLQAILEHEEENEEEDEVPDDETLNQMIARREEEFDLFMRMDMDRRREDARNPKRKPRLMEEDELPSWIIKDDAEVERLTCEEEEEKIFGRGSRQRRDVDYSDALTEKQWLRAIEDGNLEEMEEEVRLKKRKRRRNVDKDPAKEDVEKAKKRRGRPPAEKLSPNPPKLTKQMNAIIDTVINYKDRCNVEKVPSNSQLEIEGNSSGRQLSEVFIQLPSRKELPEYYELIRKPVDFKKIKERIRNHKYRSLGDLEKDVMLLCHNAQTFNLEGSQIYEDSIVLQSVFKSARQKIAKEEESEDESNEEEEEEDEEESESEAKSVKVKIKLNKKDDKGRDKGKGKKRPNRGKAKPVVSDFDSDEEQDEREQSEGSGTDDE

SEQ ID NO: 12556 - protein, 1572 aa, Homo sapiens
MSTPTDPGAMPHPGPSPGPGPSPGPILGPSPGPGPSPGSVHSMMGPSPGPPSVSHPMPTMGSTDFPQEGMHQMHKPIDGIHDKGIVEDIHCGSMKGTGMRPPHPGMGPPQSPMDQHSQGYMSPHPSPLGAPEHVSSPMSGGGPTPPQMPPSQPGALIPGDPQAMSQPNRGPSPFSPVQLHQLRAQILAYKMLARGQPLPETLQLAVQGKRTLPGLQQQQQQQQQQQQQQQQQQQQQQQPQQQPPQPQTQQQQQPALVNYNRPSGPGPELSGPSTPQKLPVPAPGGRPSPAPPAAAQPPAAAVPGPSVPQPAPGQPSPVLQLQQKQSRISPIQKPQGLDPVEILQEREYRLQARIAHRIQELENLPGSLPPDLRTKATVELKALRLLNFQRQLRQEVVACMRRDTTLETALNSKAYKRSKRQTLREARMTEKLEKQQKIEQERKRRQKHQEYLNSILQHAKDFKEYHRSVAGKIQKLSKAVATWHANTEREQKKETERIEKERMRRLMAEDEEGYRKLIDQKKDRRLAYLLQQTDEYVANLTNLVWEHKQAQAAKEKKKRRRRKKKAEENAEGGESALGPDGEPIDESSQMSDLPVKVTHTETGKVLFGPEAPKASQLDAWLEMNPGYEVAPRSDSEESDSDYEEEDEEEESSRQETEEKILLDPNSEEVSEKDAKQIIETAKQDVDDEYSMQYSARGSQSYYTVAHAISERVEKQSALLINGTLKHYQLQGLEWMVSLYNNNLNGILADEMGLGKTIQTIALITYLMEHKRLNGPYLIIVPLSTLSNWTYEFDKWAPSVVKISYKGTPAMRRSLVPQLRSGKFNVLLTTYEYIIKDKHILAKIRWKYMIVDEGHRMKNHHCKLTQVLNTHYVAPRRILLTGTPLQNKLPELWALLNFLLPTIFKSCSTFEQWFNAPFAMTGERVDLNEEETILIIRRLHKVLRPFLLRRLKKEVESQLPEKVEYVIKCDMSALQKILYRHMQAKGILLTDGSEKDKKGKGGAKTLMNTIMQLRKICNHPYMFQHIEESFAEHLGYSNGVINGAELYRASGKFELLDRILPKLRATNHRVLLFCQMTSLMTIMEDYFAFRNFLYLRLDGTTKSEDRAALLKKFNEPGSQYFIFLLSTRAGGLGLNLQAADTVVIFDSDWNPHQDLQAQDRAHRIGQQNEVRVLRLCTVNSVEEKILAAAKYKLNVDQKVIQAGMFDQKSSSHERRAFLQAILEHEEENEEEDEVPDDETLNQMIARREEEFDLFMRMDMDRRREDARNPKRKPRLMEEDELPSWIIKDDAEVERLTCEEEEEKIFGRGSRQRRDVDYSDALTEKQWLRAIEDGNLEEMEEEVRLKKRKRRRNVDKDPAKEDVEKAKKRRGRPPAEKLSPNPPKLTKQMNAIIDTVINYKDSSGRQLSEVFIQLPSRKELPEYYELIRKPVDFKKIKERIRNHKYRSLGDLEKDVMLLCHNAQTFNLEGSQIYEDSIVLQSVFKSARQKIAKEEESEDESNEEEEEEDEEESESEAKSVKVKIKLNKKDDKGRDKGKGKKRPNRGKAKPVVSDFDSDEEQDEREQSEGSGTDDE

SEQ ID NO: 12557 - protein, 1590 aa, Homo sapiens; identical to SEQ ID NO: 12555

SEQ ID NO: 12558 - protein, 1514 aa, Homo sapiens
MSTPTDPGAMPHPGPSPGPGPSPGPILGPSPGPGPSPGSVHSMMGPSPGPPSVSHPMPTMGSTDFPQEGMHQMHKPIDGIHDKGIVEDIHCGSMKGTGMRPPHPGMGPPQSPMDQHSQGYMSPHPSPLGAPEHVSSPMSGGGPTPPQMPPSQPGALIPGDPQAMSQPNRGPSPFSPVQLHQLRAQILAYKMLARGQPLPETLQLAVQGKRTLPGLQQQQQQQQQQQQQQQQQQQQQQQPQQQPPQPQTQQQQQPALVNYNRPSGPGPELSGPSTPQKLPVPAPGGRPSPAPPAAAQPPAAAVPGPSVPQPAPGQPSPVLQLQQKQSRISPIQKPQGLDPVEILQEREYRLQARIAHRIQELENLPGSLPPDLRTKATVELKALRLLNFQRQLRQEVVACMRRDTTLETALNSKAYKRSKRQTLREARMTEKLEKQQKIEQERKRRQKHQEYLNSILQHAKDFKEYHRSVAGKIQKLSKAVATWHANTEREQKKETERIEKERMRRLMAEDEEGYRKLIDQKKDRRLAYLLQQTDEYVANLTNLVWEHKQAQAAKEKKKRRRRKKKAEENAEGGESALGPDGEPIDESSQMSDLPVKVTHTETGKVLFGPEAPKASQLDAWLEMNPGYEVAPRSDSEESDSDYEEEDEEEESSRQETEEKILLDPNSEEVSEKDAKQIIETAKQDVDDEYSMQYSARGSQSYYTVAHAISERVEKQSALLINGTLKHYQLQGLEWMVSLYNNNLNGILADEMGLGKTIQTIALITYLMEHKRLNGPYLIIVPLSTLSNWTYEFDKWAPSVVKISYKGTPAMRRSLVPQLRSGKFNVLLTTYEYIIKDKHILAKIRWKYMIVDEGHRMKNHHCKLTQVDLNEEETILIIRRLHKVLRPFLLRRLKKEVESQLPEKVEYVIKCDMSALQKILYRHMQAKGILLTDGSEKDKKGKGGAKTLMNTIMQLRKICNHPYMFQHIEESFAEHLGYSNGVINGAELYRASGKFELLDRILPKLRATNHRVLLFCQMTSLMTIMEDYFAFRNFLYLRLDGTTKSEDRAALLKKFNEPGSQYFIFLLSTRAGGLGLNLQAADTVVIFDSDWNPHQDLQAQDRAHRIGQQNEVRVLRLCTVNSVEEKILAAAKYKLNVDQKVIQAGMFDQKSSSHERRAFLQAILEHEEENEEEDEVPDDETLNQMIARREEEFDLFMRMDMDRRREDARNPKRKPRLMEEDELPSWIIKDDAEVERLTCEEEEEKIFGRGSRQRRDVDYSDALTEKQWLRAIEDGNLEEMEEEVRLKKRKRRRNVDKDPAKEDVEKAKKRRGRPPAEKLSPNPPKLTKQMNAIIDTVINYKDSSGRQLSEVFIQLPSRKELPEYYELIRKPVDFKKIKERIRNHKYRSLGDLEKDVMLLCHNAQTFNLEGSQIYEDSIVLQSVFKSARQKIAKEEESEDESNEEEEEEDEEESESEAKSVKVKIKLNKKDDKGRDKGKGKKRPNRGKAKPVVSDFDSDEEQDEREQSEGSGTDDE

SEQ ID NO: 12559 - protein, 1572 aa, Homo sapiens; identical to SEQ ID NO: 12556

SEQ ID NO: 12560 - protein, 1428 aa, Homo sapiens
MSTPTDPGAMPHPGPSPGPGPSPGPILGPSPGPGPSPGSVHSMMGPSPGPPSVSHPMPTMGSTDFPQEGMHQMHKPIDGIHDKGIVEDIHCGSMKGTGMRPPHPGMGPPQSPMDQHSQGYMSPHPSPLGAPEHVSSPMSGGGPTPPQMPPSQPGALIPGDPQAMSQPNRGPSPFSPVQLHQLRAQILAYKMLARGQPLPETLQLAVQGKRTLPGLQQQQQQQQQQQQQQQQQQQQQQQPQQQPPQPQTQQQQQPALVNYNRPSGPGPELSGPSTPQKLPVPAPGGRPSPAPPAAAQPPAAAVPGPSVPQPAPGQPSPVLQLQQKQSRISPIQKPQGLDPVEILQEREYRLQARIAHRIQELENLPGSLPPDLRTKATVELKALRLLNFQRQLRQEVVACMRRDTTLETALNSKAYKRSKRQTLREARMTEKLEKQQKIEQERKRRQKHQEYLNSILQHAKDFKEYHRSVAGKIQKLSKAVATWHANTEREQKKETERIEKERMRRLMAEDEEGYRKLIDQKKDRRLAYLLQQTDEYVANLTNLVWEHKQAQAAKEKKKRRRRKKKAEENAEGGESALGPDGEPIDESSQMSDLPVKVTHTETGKVLFGPEAPKASQLDAWLEMNPGYEVAPRSDSEESDSDYEEEDEEEESSRQETEEKILLDPNSEEVSEKDAKQIIETAKQDVDDEYSMQYSARGSQSYYTVAHAISERVEKQSALLINGTLKHYQLQGLEWMVSLYNNNLNGILADEMGLGKTIQTIALITYLMEHKRLNGPYLIIVPLSTLSNWTYEFDKWAPSVVKISYKGTPAMRRSLVPQLRSGKFNVLLTTYEYIIKDKHILAKIRWKYMIVDEGHRMKNHHCKLTQVLNTHYVAPRRILLTGTPLQNKLPELWALLNFLLPTIFKSCSTFEQWFNAPFAMTGERVDLNEEETILIIRRLHKVLRPFLLRRLKKEVESQLPEKVEYVIKCDMSALQKILYRHMQAKGILLTDGSEKDKKGKGGAKTLMNTIMQLRKICNHPYMFQHIEESFAEHLGYSNGVINGAELYRASGKFELLDRILPKLRATNHRVLLFCQMTSLMTIMEDYFAFRNFLYLRLDGTTKSEDRAALLKKFNEPGSQYFIFLLSTRAGGLGLNLQAADTVVIFDSDWNPHQDLQAQDRAHRIGQQNEVRVLRLCTVNSVEEKILAAAKYKLNVDQKVIQAGMFDQKSSSHERRAFLQAILEHEEENEEEDEVPDDETLNQMIARREEEFDLFMRMDMDRRREDARNPKRKPRLMEEDELPSWIIKDDAEVERLTCEEEEEKIFGRGSRQRRDVDYSDALTEKQWLRAIEDGNLEEMEEEVRLKKRKRRRNVDKDPAKEDVEKAKKRRGRPPAEKLSPNPPKLTKQMNAIIDTVINYKDRCNVEKVPSNSQLEIEGNRKGFVIISTGA

SEQ ID NO: 12561 - protein, 279 aa, Homo sapiens
MSTPTDPGAMPHPGPSPGPGPSPGPILGPSPGPGPSPGSVHSMMGPSPGPPSVSHPMPTMGSTDFPQEGMHQMHKPIDGIHDKGIVEDIHCGSMKGTGMRPPHPGMGPPQSPMDQHSQGYMSPHPSPLGAPEHVSSPMSGGGPTPPQMPPSQPGALIPGDPQAMSQPNRGPSPFSPVQLHQLRAQILAYKMLARGQPLPETLQLAVQGKRTLPGLQQQQQQQQQQQQQQQQQQQQQQQPQQQPPQPQTQQQQQPALVNYNRPSGRLIRNQMNNAMVQLG

SEQ ID NO: 12562 - protein, 288 aa, Homo sapiens
MSTPTDPGAMPHPGPSPGPGPSPGPILGPSPGPGPSPGSVHSMMGPSPGPPSVSHPMPTMGSTDFPQEGMHQMHKPIDGIHDKGIVEDIHCGSMKGTGMRPPHPGMGPPQSPMDQHSQGYMSPHPSPLGAPEHVSSPMSGGGPTPPQMPPSQPGALIPGDPQAMSQPNRGPSPFSPVQLHQLRAQILAYKMLARGQPLPETLQLAVQGKRTLPGLQQQQQQQQQQQQQQQQQQQQQQQPQQQPPQPQTQQQQQPALVNYNRPSALNAGNSNLKTPADSVSGEGLLPDS

SEQ ID NO: 12563 - protein, 279 aa, Homo sapiens; identical to SEQ ID NO: 12561

SEQ ID NO: 12564 - protein, 288 aa, Homo sapiens; identical to SEQ ID NO: 12562

SEQ ID NO: 12565 - protein, 183 aa, Homo sapiens [sequence omitted]

SEQ ID NO: 12566 - protein, 248 aa, Homo sapiens
MWLAIEDGNLEEMEEEVRLKKRKRRRNVDKDPAKEDVEKAKKRRGRPPAEKLSPNPPKLTKQMNAIIDTVINYKDSSGRQLSEVFIQLPSRKELPEYYELIRKPVDFKKIKERIRNHKYRSLGDLEKDVMLLCHNAQTFNLEGSQIYEDSIVLQSVFKSARQKIAKEEESEDESNEEEEEEDEEESESEAKSVKVKIKLNKKDDKGRDKGKGKKRPNRGKAKPVVSDFDSDEEQDEREQSEGSGTDDE

SEQ ID NO: 12567 - protein, 271 aa, Homo sapiens
  VARIANT 1: note = misc_feature - Xaa can be any naturally occurring amino acid
XEEEKIFGRGSRQRRDVDYSDALTEKQWLRAIEDGNLEEMEEEVRLKKRKRRRNVDKDPAKEDVEKAKKRRGRPPAEKLSPNPPKLTKQMNAIIDTVINYKDSSGRQLSEVFIQLPSRKELPEYYELIRKPVDFKKIKERIRNHKYRSLGDLEKDVMLLCHNAQTFNLEGSQIYEDSIVLQSVFKSARQKIAKEEESEDESNEEEEEEDEEESESEAKSVKVKIKLNKKDDKGRDKGKGKKRPNRGKAKPVVSDFDSDEEQDERVSVADWD

SEQ ID NO: 12568 - protein, 270 aa, Homo sapiens
  VARIANT 1: note = misc_feature - Xaa can be any naturally occurring amino acid
XLNLQAADTVVIFDSDWNPHQEEDEVPDDETLNQMIARREEEFDLFMRMDMDRRREDARNPKRKPRLMEEDELPSWIIKDDAEVERLTCEEEEEKIFGRGSRQRRDVDYSDALTEKQWLRAIEDGNLEEMEEEVRLKKRKRRRNVDKDPAKEDVEKAKKRRGRPPAEKLSPNPPKLTKQMNAIIDTVINYKDSSGRQLSEVFIQLPSRKELPEYYELIRKPVDFKKIKERIRNHKYRSLGDLEKDVMLLCHNAQTFNLEGSQIYEDSIVL

SEQ ID NO: 12569 - protein, 228 aa, Homo sapiens
  VARIANT 1: note = misc_feature - Xaa can be any naturally occurring amino acid
XNSEEVSEKDAKQIIETAKQDVDDEYSMQYSARGSQSYYTVAHAISERVEKQSALLINGTLKHYQLQGLEWMVSLYNNNLNGILADEMGLGKTIQTIALITYLMEHKRLNGPYLIIVPLSTLSNWTYEFDKWAPSVVKISYKGTPAMRRSLVPQLRSGKFNVLLTTYEYIIKDKHILAKVDLNEEETILIIRRLHKVLRPFLLRRLKKEVESQLPEKVEYVIKCDMSA

SEQ ID NO: 12570 - protein, 58 aa, Homo sapiens
  VARIANT 1: note = misc_feature - Xaa can be any naturally occurring amino acid
XPFPSSLFFPDQLMKRLAARCFAGLLILSPLTVISDSRPADSGHRRRQFGGNGRGSTA

SEQ ID NO: 12571 - protein, 38 aa, Homo sapiens
  VARIANT 1: note = misc_feature - Xaa can be any naturally occurring amino acid
XSGRQLSEVFIQLPSRKELPEYYELIRKPVDFKKIKDS

SEQ ID NO: 12572 - protein, 1419 aa, Homo sapiens
MAEGLERVRISASELRGILATLAPQAGSRENMKELKEARPRKDNRRPDLEIYKPGLSRLRNKPKIKEPPGSEEFKDEIVNDRDCSAVENGTQPVKDVCKELNNQEQNGPIDPENNRGQESFPRTAGQEDRSLKIIKRTKKPDLQIYQPGRRLQTVSKESASRVEEEEVLNQVEQLRVEEDECRGNVAKEEVANKPDRAEIEKSPGGGRVGAAKGEKGKRMGKGEGVRETHDDPARGRPGSAKRYSRSDKRRNRYRTRSTSSAGSNNSAEGAGLTDNGCRRRRQDRTKERPRLKKQVSVSSTDSLDEDRIDEPDGLGPRRSSERKRHLERNWSGRGEGEQKNSAKEYRGTLRVTFDAEAMNKESPMVRSARDDMDRGKPDKGLSSGGKGSEKQESKNPKQELRGRGRGILILPAHTTLSVNSAGSPESAPLGPRLLFGSGSKGSRSWGRGGTTRRLWDPNNPDQKPALKTQTPQLHFLDTDDEVSPTSWGDSRQAQASYYKFQNSDNPYYYPRTPGPASQYPYTGYNPLQYPVGPTNGVYPGPYYPGYPTPSGQYVCSPLPTSTMSPEEVEQHMRNLQQQELHRLLRVADNQELQLSNLLSRDRISPEGLEKMAQLRAELLQLYERCILLDIEFSDNQNVDQILWKNAFYQVIEKFRQLVKDPNVENPEQIRNRLLELLDEGSDFFDSLLQKLQVTYKFKLEDYMDGLAIRSKPLRKTVKYALISAQRCMICQGDIARYREQASDTANYGKARSWYLKAQHIAPKNGRPYNQLALLAVYTRRKLDAVYYYMRSLAASNPILTAKESLMSLFEETKRKAEQMEKKQHEEFDLSPDQWRKGKKSTFRHVGDDTTRLEIWIHPSHPRSSQGTESGKDSEQENGLGSLSPSDLNKRFILSFLHAHGKLFTRIGMETFPAVAEKVLKEFQVLLQHSPSPIGSTRMLQLMTINMFAVHNSQLKDCFSEECRSVIQEQAAALGLAMFSLLVRRCTCLLKESAKAQLSSPEDQDDQDDIKVSSFVPDLKELLPSVKVWSDWMLGYPDTWNPPPTSLDLPSHVAVDVWSTLADFCNILTAVNQSEVPLYKDPDDDLTLLILEEDRLLSGFVPLLAAPQDPCYVEKTSDKVIAADCKRVTVLKYFLEALCGQEEPLLAFKGGKYVSVAPVPDTMGKEMGSQEGTRLEDEEEDVVIEDFEEDSEAEGSGGEDDIRELRAKKLALARKIAEQQRRQEKIQAVLEDHSQMRQMELEIRPLFLVPDTNGFIDHLASLARLLESRKYILVVPLIVINELDGLAKGQETDHRAGGYARVVQEKARKSIEFLEQRFESRDSCLRALTSRGNELESIAFRSEDITGQLGNNDDLILSCCLHYCKDKAKDFMPASKEEPIRLLREVVLLTDDRNLRVKALTRNVPVRDIPAFLTWAQVG

SEQ ID NO: 12573 - protein, 119 aa, Homo sapiens
METFPAVAEKVLKEFQVLLQHSPSPIGSTRMLQLMTINMFAVHNSQLKDCFSEECRSVIQEQAAALGLAMFSLLVRRCTCLLKESAKAQLSSPEDQDDQDDIKVSSFVPDLKELLPSVK

SEQ ID NO: 12574 - protein, 123 aa, Homo sapiens
METFPAVAEKVLKEFQVLLQHSPSPIGSTRMLQLMTINMFAVHNSQLKDCFSEECRSVIQEQAAALGLAMFSLLVRRCTCLLKESAKAQLSSPEDQDDQDDIKVSSFVPDLKELLPSVKVWSD

SEQ ID NO: 12575 - protein, 162 aa, Homo sapiens
METFPAVAEKVLKEFQVLLQHSPSPIGSTRMLQLMTINMFAVHNSQLKDCFSEECRSVIQEQAAALGLAMFSLLVRRCTCLLKESAKAQLSSPEDQDDQDDIKVSSFVPDLKELLPSVKVWSDWMLGYPDTWNPPPTSLDLPSHVAVDVWSTLADFCNILTA

SEQ ID NO: 12576 - protein, 163 aa, Homo sapiens
METFPAVAEKVLKEFQVLLQHSPSPIGSTRMLQLMTINMFAVHNSQLKDCFSEECRSVIQEQAAALGLAMFSLLVRRCTCLLKESAKAQLSSPEDQDDQDDIKVSSFVPDLKELLPSVKVWSDWMLGYPDTWNPPPTSLDLPSHVAVDVWSTLADFCNILTAV

SEQ ID NO: 12577 - protein, 164 aa, Homo sapiens
METFPAVAEKVLKEFQVLLQHSPSPIGSTRMLQLMTINMFAVHNSQLKDCFSEECRSVIQEQAAALGLAMFSLLVRRCTCLLKESAKAQLSSPEDQDDQDDIKVSSFVPDLKELLPSVKVWSDWMLGYPDTWNPPPTSLDLPSHVAVDVWSTLADFCNILTAVN

SEQ ID NO: 12578 - protein, 511 aa, Homo sapiens
METFPAVAEKVLKEFQVLLQHSPSPIGSTRMLQLMTINMFAVHNSQLKDCFSEECRSVIQEQAAALGLAMFSLLVRRCTCLLKESAKAQLSSPEDQDDQDDIKVSSFVPDLKELLPSVKVWSDWMLGYPDTWNPPPTSLDLPSHVAVDVWSTLADFCNILTAVNQSEVPLYKDPDDDLTLLILEEDRLLSGFVPLLAAPQDPCYVEKTSDKVIAADCKRVTVLKYFLEALCGQEEPLLAFKGGKYVSVAPVPDTMGKEMGSQEGTRLEDEEEDVVIEDFEEDSEAEGSGGEDDIRELRAKKLALARKIAEQQRRQEKIQAVLEDHSQMRQMELEIRPLFLVPDTNGFIDHLASLARLLESRKYILVVPLIVINELDGLAKGQETDHRAGGYARVVQEKARKSIEFLEQRFESRDSCLRALTSRGNELESIAFRSEDITGQLGNNDDLILSCCLHYCKDKAKDFMPASKEEPIRLLREVVLLTDDRNLRVKALTRNVPVRDIPAFLTWAQVG

SEQ ID NO: 12579 - protein, 511 aa, Homo sapiens; identical to SEQ ID NO: 12578

SEQ ID NO: 12580 - protein, 115 aa, Homo sapiens
MFSLLVRRCTCLLKESAKAQLSSPEDQDDQDDIKVSSFVPDLKELLPSVKVWSDWMLGYPDTWNPPPTSLDLPSHVAVDVWSTLADFCNILTAVNQSEVPLYKDPDDDLTLLILE

SEQ ID NO: 12581 - protein, 124 aa, Homo sapiens
MFSLLVRRCTCLLKESAKAQLSSPEDQDDQDDIKVSSFVPDLKELLPSVKVWSDWMLGYPDTWNPPPTSLDLPSHVAVDVWSTLADFCNILTAVNQSEVPLYKDPDDDLTLLILEEDRLLSGFV

SEQ ID NO: 12582 - protein, 139 aa, Homo sapiens
MFSLLVRRCTCLLKESAKAQLSSPEDQDDQDDIKVSSFVPDLKELLPSVKVWSDWMLGYPDTWNPPPTSLDLPSHVAVDVWSTLADFCNILTAVNQSEVPLYKDPDDDLTLLILEEDRLLSGFVPLLAAPQDPCYVEKT

SEQ ID NO: 12583 - protein, 208 aa, Homo sapiens
MTGPCIRQLSLQILFPLCVAVDVWSTLADFCNILTAVNQSEVPLYKDPDDDLTLLILEEDRLLSGFVPLLAAPQDPCYVEKTSDKVIAADCKRVTVLKYFLEALCGQEEPLLAFKGGKYVSVAPVPDTMGKEMGSQEGTRLEDEEEDVVIEDFEEDSEAEGSGGEDDIRELRAKKLALARKIAEQQRRQEKIQAVLEDHSQMRQMELE

SEQ ID NO: 12584 - protein, 49 aa, Homo sapiens
MIGDILLFGTLLMNAGAVLNFKLKKKDTQGFGEESREPSTGCSALESQR

SEQ ID NO: 12585 - protein, 49 aa, Homo sapiens; identical to SEQ ID NO: 12584

SEQ ID NO: 12586 - protein, 49 aa, Homo sapiens; identical to SEQ ID NO: 12584

SEQ ID NO: 12587 - protein, 49 aa, Homo sapiens; identical to SEQ ID NO: 12584

SEQ ID NO: 12588 - protein, 75 aa, Homo sapiens
MIGDILLFGTLLMNAGAVLNFKLKKKDTQGFGEESREPSTGDNIREFLLSLRYFRIFIALWNIFMMFCMIVLFGS

SEQ ID NO: 12589 - protein, 75 aa, Homo sapiens; identical to SEQ ID NO: 12588

SEQ ID NO: 12590 - protein, 75 aa, Homo sapiens; identical to SEQ ID NO: 12588

SEQ ID NO: 12591 - protein, 75 aa, Homo sapiens; identical to SEQ ID NO: 12588

SEQ ID NO: 12592 - protein, 75 aa, Homo sapiens; identical to SEQ ID NO: 12588

SEQ ID NO: 12593 - protein, 75 aa, Homo sapiens; identical to SEQ ID NO: 12588

SEQ ID NO: 12594 - protein, 103 aa, Homo sapiens
MIGDILLFGTLLMNAGAVLNFKLKKKDTQGFGEESREPSTGDNIREFLLSLRYFRIFIALWNIFMMFCMIVLRKLKQIAFPSSTGAITLILLLTNCEICCKWI

SEQ ID NO: 12595 - protein, 103 aa, Homo sapiens; identical to SEQ ID NO: 12594

SEQ ID NO: 12596 - protein, 103 aa, Homo sapiens; identical to SEQ ID NO: 12594

SEQ ID NO: 12597 - protein, 47 aa, Homo sapiens
MIGDILLFGTLLMNAGAVLNFKLKKKDTQGFGEESREPSTGLERESD

SEQ ID NO: 12598 - protein, 56 aa, Homo sapiens
MIGDILLFGTLLMNAGAVLNFKLKKKDTQGFGEESREPSTGWSAVVRSWLTADSTS

SEQ ID NO: 12599 - protein, 63 aa, Homo sapiens
MNAGAVLNFKLKKKDTQGFGEESREPSTGDNIREFLLSLRYFRIFIALWNIFMMFCMIVLFGS

SEQ ID NO: 12600 - protein, 63 aa, Homo sapiens; identical to SEQ ID NO: 12599

SEQ ID NO: 12601 - protein, 435 aa, Homo sapiens
MLPARCARLLTPHLLLVLVQLSPARGHRTTGPRFLISDRDPQCNLHCSRTQPKPICASDGRSYESMCEYQRAKCRDPTLGVVHRGRCKDAGQSKCRLERAQALEQAKKPQEAVFVPECGEDGSFTQVQCHTYTGYCWCVTPDGKPISGSSVQNKTPVCSGSVTDKPLSQGNSGRKDDGSKPTPTMETQPVFDGDEITAPTLWIKHLVIKDSKLNNTNIRNSEKVYSCDQERQSALEEAQQNPREGIVIPECAPGGLYKPVQCHQSTGYCWCVLVDTGRPLPGTSTRYVMPSCESDARAKTTEADDPFKDRELPGCPEGKKMEFITSLLDALTTDMVQAINSAAPTGGGRFSEPDPSHTLEERVVHWYFSQLDSNSSNDINKREMKPFKRYVKKKAKPKKCARRFTDYCDLNKDKVISLPELKGCLGVSKEVGRLV

SEQ ID NO: 12602 - protein, 434 aa, Homo sapiens
MLPARCARLLTPHLLLVLVQLSPARGHRTTGPRFLISDRDPQCNLHCSRTQPKPICASDGRSYESMCEYQRAKCRDPTLGVVHRGRCKDAGQSKCRLERAQALEQAKKPQEAVFVPECGEDGSFTQVQCHTYTGYCWCVTPDGKPISGSSVQNKTPVCSGSVTDKPLSQGNSGRKDDGSKPTPTMETQPVFDGDEITAPTLWIKHLVIKDSKLNNTNIRNSEKVYSCDQERQSALEEAQQNPREGIVIPECAPGGLYKPVQCHQSTGYCWCVLVDTGRPLPGTSTRYVMPSCESDARAKTTEADDPFKDRELPGCPEGKKMEFITSLLDALTTDMVQAINSAAPTGGGRFSEPDPSHTLEERVVHWYFSQLDSNSSNDINKREMKPFKRYVKKKAKPKKCARRFTDYCDLNKDKVISLPELKGCLGVSKEGRLV

SEQ ID NO: 12603 - protein, 67 aa, Homo sapiens
GKKEIKPFKRFLRKKSKPKKCVKKFVEYCDVNNDKSISVQELMGCLGVAKEDGKADTKKRHRSKRNL

SEQ ID NO: 12604 - protein, 84 aa, Homo sapiens
KKSKPKKCVKKFVEYCDVNNDKSISVQELMGCLGVAKEDGKADTKKRHTPRGHAESTSNRQDAMVVSSRPKATTHRKSRTLSRR

SEQ ID NO: 12605 - protein, 446 aa, Homo sapiens
MLLPQLCWLPLLAGLLPPVPAQKFSALTFLRVDQDKDKDCSLDCAGSPQKPLCASDGRTFLSRCEFQRAKCKDPQLEIAYRGNCKDVSRCVAERKYTQEQARKEFQQVFIPECNDDGTYSQVQCHSYTGYCWCVTPNGRPISGTAVAHKTPRCPGSVNEKLPQREGTGKTDDAAAPALETQPQGDEEDIASRYPTLWTEQVKSRQNKTNKNSVSSCDQEHQSALEEAKQPKNDNVVIPECAHGGLYKPVQCHPSTGYCWCVLVDTGRPIPGTSTRYEQPKCDNTARAHPAKARDLYKGRQLQGCPGAKKHEFLTSVLDALSTDMVHAASDPSSSSGRLSEPDPSHTLEERVVHWYFKLLDKNSSGDIGKKEIKPFKRFLRKKSKPKKCVKKFVEYCDVNNDKSISVQELMGCLGVAKEDGKADTKKRHTPRGHAESTSNRQPRKQG

SEQ ID NO: 12606 - protein, 457 aa, Homo sapiens
MLLPQLCWLPLLAGLLPPVPAQKFSALTFLRVDQDKDKDCSLDCAGSPQKPLCASDGRTFLSRCEFQRAKCKDPQLEIAYRGNCKDVSRCVAERKYTQEQARKEFQQVFIPECNDDGTYSQVQCHSYTGYCWCVTPNGRPISGTAVAHKTPRCPGSVNEKLPQREGTGKTVSLQIFSVLNSDDAAAPALETQPQGDEEDIASRYPTLWTEQVKSRQNKTNKNSVSSCDQEHQSALEEAKQPKNDNVVIPECAHGGLYKPVQCHPSTGYCWCVLVDTGRPIPGTSTRYEQPKCDNTARAHPAKARDLYKGRQLQGCPGAKKHEFLTSVLDALSTDMVHAASDPSSSSGRLSEPDPSHTLEERVVHWYFKLLDKNSSGDIGKKEIKPFKRFLRKKSKPKKCVKKFVEYCDVNNDKSISVQELMGCLGVAKEDGKADTKKRHTPRGHAESTSNRQPRKQG

SEQ ID NO: 12607 - protein, 136 aa, Homo sapiens
MVGGCLGGSKSSHSAWEGPILPKCKSSRGVTELANRLVCLVFLLHVDIILLILLPGPPQGYRKVKSSPEPIMSSLLTEGTAGYVVPPGLVLAAGGGAGSPRFLSAFLNASRVRELANGKFIRVALAEKDRSGMPTQ

SEQ ID NO: 12608 - protein, 453 aa, Homo sapiens
MALVRALVCCLLTAWHCRSGLGLPVAPAGGRNPPPAIGQFWHVTDLHLDPTYHITDDHTKVCASSKGANASNPGPFGDVLCDSPYQLILSAFDFIKNSGQEASFMIWTGDSPPHVPVPELSTDTVINVITNMTTTIQSLFPNLQVFPALGNHDYWPQDQLPVVTSKVYNAVANLWKPWLDEEAISTLRKGGFYSQKVTTNPNLRIISLNTNLYYGPNIMTLNKTDPANQFEWLESTLNNSQQNKEKVYIIAHVPVGYLPSSQNITAMREYYNEKLIDIFQKYSDVIAGQFYGHTHRDSIMVLSDKKGSPVNSLFVAPAVTPVKSVLEKQTNNPGIRLFQYDPRDYKLLDMLQYYLNLTEANLKGESIWKLEYILTQTYDIEDLQPESLYGLAKQFTILDSKQFIKYYNYFFVSYDSSVTCDKTCKAFQICAIMNLDNISYADCLKQLYIKHNY

SEQ ID NO: 12609 - protein, 322 aa, Homo sapiens
MTTTIQSLFPNLQVFPALGNHDYWPQDQLPVVTSKVYNAVANLWKPWLDEEAISTLRKGGFYSQKVTTNPNLRIISLNTNLYYGPNIMTLNKTDPANQFEWLESTLNNSQQNKEKVYIIAHVPVGYLPSSQNITAMREYYNEKLIDIFQKYSDVIAGQFYGHTHRDSIMVLSDKKGSPVNSLFVAPAVTPVKSVLEKQTNNPGIRLFQYDPRDYKLLDMLQYYLNLTEANLKGESIWKLEYILTQTYDIEDLQPESLYGLAKQFTILDSKQFIKYYNYFFVSYDSSVTCDKTCKAFQICAIMNLDNISYADCLKQLYIKHNY

SEQ ID NO: 12610 - protein, 269 aa, Homo sapiens
MRLLAWLIFLANWGGARAEPEEAQGPCAQEKGKGPPPTSILASLAPGLEAGKFWHIADLHLDPDYKVSKDPFQVCPSAGSQPVPDAGPWGDYLCDSPWALINSSIYAMKEIEPEPDFILWTGDDTPHVPDEKLGEAAVLEIVERLTKLIREVFPDTKVYAALGNHDFHPKNQFPAGSNNIYNQIAELWKPWLSNESIALFKKGAFYCEKLPGPSGAGRIVVLNTNLYYTSNALTADMADPGQQFQWLEDVLTDASKAGDMVYIVGHVPP

SEQ ID NO: 12611 - protein, 102 aa, Homo sapiens
MRLLAWLIFLANWGGARAEPGKFWHIADLHLDPDYKVSKDPFQVCPSAGSQPVPDAGPWGDYLCDSPWALINSSIYAMKEIEPEPDFILWTGAVPSFSSAAS

SEQ ID NO: 12612 - protein, 455 aa, Homo sapiens
MRLLAWLIFLANWGGARAEPGKFWHIADLHLDPDYKVSKDPFQVCPSAGSQPVPDAGPWGDYLCDSPWALINSSIYAMKEIEPEPDFILWTGDDTPHVPDEKLGEAAVLEIVERLTKLIREVFPDTKVYAALGNHDFHPKNQFPAGSNNIYNQIAELWKPWLSNESIALFKKGAFYCEKLPGPSGAGRIVVLNTNLYYTSNALTADMADPGQQFQWLEDVLTDASKAGDMVYIVGHVPPGFFEKTQNKAWFREGFNEKYLKVVRKHHRVIAGQFFGHHHTDSFRMLYDDAGVPISAMFITPGVTPWKTTLPGVVNGANNPAIRVFEYDRATLSLKDMVTYFMNLSQANAQGTPRWELEYQLTEAYGVPDASAHSMHTVLDRIAGDQSTLQRYYVYNSVSYSAGVCDEACSMQHVCAMRQVDIDAYTTCLYASGTTPVPQLPLLLMALLGLCTLVL

SEQ ID NO: 12613 - protein, 373 aa, Homo sapiens
MRLLAWLIFLANWGGARAEPGKFWHIADLHLDPDYKVSKDPFQVCPSAGSQPVPDAGPWGDYLCDSPWALINSSIYAMKEIEPEPDFILWTGDDTPHVPDEKLGEAAVLEIVERLTKLIREVFPDTKVYAALGNHDFHPKNQFPAGSNNIYNQIAELWKPWLSNESIALFKKGAFYCEKLPGPSGAGRIVVLNTNLYYTSNALTADMADPGQQFQWLEDVLTDASKAGDMVYIVGHVPPGFFEKTQNKAWFREGFNEKYLKVVRKHHRVIAGQFFGHHHTDSFRMLYDDAGVPISAMFITPGVTPWKTTLPGVVNGANNPAIRVFEYDRATLSLKVRSPAEARGGGWEGLKCITTFPHSQLIHLPLTTEPQEG

SEQ ID NO: 12614 - protein, 407 aa, Homo sapiens
MRLLAWLIFLANWGGARAEPGKFWHIADLHLDPDYKVSKDPFQVCPSAGSQPVPDAGPWGDYLCDSPWALINSSIYAMKEIEPEPDFILWTGDDTPHVPDEKLGEAAVLEIVERLTKLIREVFPGAFYCEKLPGPSGAGRIVVLNTNLYYTSNALTADMADPGQQFQWLEDVLTDASKAGDMVYIVGHVPPGFFEKTQNKAWFREGFNEKYLKVVRKHHRVIAGQFFGHHHTDSFRMLYDDAGVPISAMFITPGVTPWKTTLPGVVNGANNPAIRVFEYDRATLSLKDMVTYFMNLSQANAQGTPRWELEYQLTEAYGVPDASAHSMHTVLDRIAGDQSTLQRYYVYNSVSYSAGVCDEACSMQHVCAMRQVDIDAYTTCLYASGTTPVPQLPLLLMALLGLCTLVL

SEQ ID NO: 12615 - protein, 134 aa, Homo sapiens
MKSLTWILGLWALAACFTPGESQRGPRGPYPPGPLAPPPPPCFPFGTGFVPPPHPPPYGPGRFPPPLSPPYGPGRIPPSPPPPYGPGRIQSHSLPPPYGPGYPQPPSQPRPYPPGPPFFPVNSPTDPALPTPAP

SEQ ID NO: 12616 - protein, 79 aa, Homo sapiens
MKSLTWILGLWALAACFTPGESQRGPRGPYPPGPLAPPQPFGPGFVPPPPPPPYGPGRIPPPPPAPYGPGIFPPPPPQP

SEQ ID NO: 12617 - protein, 79 aa, Homo sapiens; identical to SEQ ID NO: 12616

SEQ ID NO: 12618 - protein, 79 aa, Homo sapiens; identical to SEQ ID NO: 12616

SEQ ID NO: 12619 - protein, 599 aa, Homo sapiens
MHGILGACGRLRLEPATPLTPLLCAERDECRAHPCRNGGSCRNLPGAYVCRCPAGFVGVHCETEVDACDSSPCQHGGRCESGGGAYLCVCPESFFGYHCETVSDPCFSSPCGGRGYCLASNGSHSCTCKVGYTGEDCAKELFPPTALKMERVEESGVSISWNPPNGPAARQMLDGYAVTYVSSDGSYRRTDFVDRTRSSHQLQALAAGRAYNISVFSVKRNSNNKNDISRPAVLLARTRPRPVEGFEVTNVTASTISVQWALHRIRHATVSGVRVSIRHPEALRDQATDVDRSVDRFTFRALLPGKRYTIQLTTLSGLRGEEHPTESLATAPTHVWTRPLPPANLTAARVTATSAHVVWDAPTPGSLLEAYVINVTTSQSTKSRYVPNGKLASYTVRDLLPGRRYQLSVIAVQSTELGPQHSEPAHLYIITSPRDGADRRWHQGGHHPRVLKNRPPPARLPELRLLNDHSAPETPTQPPRFSELVDGRGRVSARFGGSPSKAATVRSHVPGNCSENPCQNGGTCVPGADAHSCDCGPGFKGRRCELACIKVSRPCTRLFSETKAFPVWEGGVCHHVYKRVYRVHQDICFKESCESTSLK

SEQ ID NO: 12620 - protein, 1413 aa, Homo sapiens
MRHGVAWALLVAAALGLGARGVRGAVALADFYPFGAERGDAVTPKQDDGGSGLRPLSVPFPFFGAEHSGLYVNNNGIISFLKEVSQFTPVAFPIAKDRCVVAAFWADVDNRRAGDVYYREATDPAMLRRATEDVRHYFPELLDFNATWVFVATWYRVTFFGGSSSSPVNTFQTVLITDGKLSFTIFNYESIVWTTGTHASSGGNATGLGGIAAQAGFNAGDGQRYFSIPGSRTADMAEVETTTNVGVPGRWAFRIDDAQVRVGGCGHTTSVCLALRPCLNGGKCIDDCVTGNPSYTCSCLSGFTGRRCHLDVNECASQPCQNGGTCTHGINSFRCQCPAGFGGPTCETAQSPCDTKECQHGGQCQVENGSAVCVCQAGYTGAACEMDVDDCSPDPCLNGGSCVDLVGNYTCLCAEPFKGLRCETGDHPVPDACLSAPCHNGGTCVDADQGYVCECPEGFMGLDCRERVPDDCECRNGGRCLGANTTLCQCPLGFFGLLCEFEITAMPCNMNTQCPDGGYCMEHGGSYLCVCHTDHNASHSLPSPCDSDPCFNGGSCDAHDDSYTCECPRGFHGKHCEKARPHLCSSGPCRNGGTCKEAGGEYHCSCPYRFTGRHCEIGKPDSCASGPCHNGGTCFHYIGKYKCDCPPGFSGRHCEIAPSPCFRSPCVNGGTCEDRDTDFFCHCQAGYMGRRCQAEVDCGPPEEVKHATLRFNGTRLGAVALYACDRGYSLSAPSRIRVCQPHGVWSEPPQCLEIDECRSQPCLHGGSCQDRVAGYLCLCSTGYEGAHCELERDECRAHPCRNGGSCRNLPGAYVCRCPAGFVGVHCETEVDACDSSPCQHGGRCESGGGAYLCVCPESFFGYHCETVSDPCFSSPCGGRGYCLASNGSHSCTCKVGYTGEDCAKELFPPTALKMERVEESGVSISWNPPNGPAARQMLDGYAVTYVSSDGSYRRTDFVDRTRSSHQLQALAAGRAYNISVFSVKRNSNNKNDISRPAVLLARTRPRPVEGFEVTNVTASTISVQWALHRIRHATVSGVRVSIRHPEALRDQATDVDRSVDRFTFRALLPGKRYTIQLTTLSGLRGEEHPTESLATAPTHVWTRPLPPANLTAARVTATSAHVVWDAPTPGSLLEAYVINVTTSQSTKSRYVPNGKLASYTVRDLLPGRRYQLSVIAVQSTELGPQHSEPAHLYIITSPRDGADRRWHQGGHHPRVLKNRPPPARLPELRLLNDHSAPETPTQPPRFSELVDGRGRVSARFGGSPSKAATVRSQPTASAQLENMEEAPKRVSLALQLPEHGSKDIGNVPGNCSENPCQNGGTCVPGADAHSCDCGPGFKGRRCELACIKVSRPCTRLFSETKAFPVWEGGVCHHVYKRVYRVHQDICFKESCESTSLKKTPNRKQSKSQTLEKS

SEQ ID NO: 12621 - protein, 1324 aa, Homo sapiens
MRHGVAWALLVAAALGLGARGVRGAVALADFYPFGAERGDAVTPKQDDGGSGLRPLSVPFPFFGAEHSGLYVNNNGIISFLKEVSQFTPVAFPIAKDRCVVAAFWADVDNRRAGDVYYREATDPAMLRRATEDVRHYFPELLDFNATWVFVATWYRVTFFGGSSSSPVNTFQTVLITDGKLSFTIFNYESIVWTTGTHASSGGNATGLGGIAAQAGFNAGDGQRYFSIPGSRTADMAEVETTTNVGVPGRWAFRIDDAQVRVGGCGHTTSVCLALRPCLNGGKCIDDCVTGNPSYTCSCLSGFTGRRCHLDVNECASQPCQNGGTCTHGINSFRCQCPAGFGGPTCETAQSPCDTKECQHGGQCQVENGSAVCVCQAGYTGAACEMDVDDCSPDPCLNGGSCVDLVGNYTCLCAEPFKGLRCETGDHPVPDACLSAPCHNGGTCVDADQGYVCECPEGFMGLDCRERVPDDCECRNGGRCLGANTTLCQCPLGFFGLLCEFEITAMPCNMNTQCPDGGYCMEHGGSYLCVCHTDHNASHSLPSPCDSDPCFNGGSCDAHDDSYTCECPRGFHGKHCEKARPHLCSSGPCRNGGTCKEAGGEYHCSCPYRFTGRHCEIGKPDSCASGPCHNGGTCFHYIGKYKCDCPPGFSGRHCEIAPSPCFRSPCVNGGTCEDRDTDFFCHCQAGYMGRRCQAEVDCGPPEEVKHATLRFNGTRLGAVALYACDRGYSLSAPSRIRVCQPHGVWSEPPQCLEIDECRSQPCLHGGSCQDRVAGYLCLCSTGYEGAHCELERDECRAHPCRNGGSCRNLPGAYVCRCPAGFVGVHCETEVDACDSSPCQHGGRCESGGGAYLCVCPESFFGYHCETVSDPCFSSPCGGRGYCLASNGSHSCTCKVGYTGEDCAKELFPPTALKMERVEESGVSISWNPPNGPAARQMLDGYAVTYVSSDGSYRRTDFVDRTRSSHQLQALAAGRAYNISVFSVKRNSNNKNDISRPAVLLARTRPRPVEGFEVTNVTASTISVQWALHRIRHATVSGVRVSIRHPEALRDQATDVDRSVDRFTFRALLPGKRYTIQLTTLSGLRGEEHPTESLATAPTHVWTRPLPPANLTAARVTATSAHVVWDAPTPGSLLEAYVINVTTSQSTKSRYVPNGKLASYTVRDLLPGRRYQLSVIAVQSTELGPQHSEPAHLYIITSPRDGADRRWHQGGHHPRVLKNRPPPARLPELRLLNDHSAPETPTQPPRFSELVDGRGRVSARFGGSPSKAATVRSQPTASAQLENMEEAPKRVSLALQLPEHGSKDIGSESAALVGTLGLTDCSQGP

SEQ ID NO: 12622 - protein, 1352 aa, Homo sapiens
MRHGVAWALLVAAALGLGARGVRGAVALADFYPFGAERGDAVTPKQDDGGSGLRPLSVPFPFFGAEHSGLYVNNNGIISFLKEVSQFTPVAFPIAKDRCVVAAFWADVDNRRAGDVYYREATDPAMLRRATEDVRHYFPELLDFNATWVFVATWYRVTFFGGSSSSPVNTFQTVLITDGKLSFTIFNYESIVWTTGTHASSGGNATGLGGIAAQAGFNAGDGQRYFSIPGSRTADMAEVETTTNVGVPGRWAFRIDDAQVRVGGCGHTTSVCLALRPCLNGGKCIDDCVTGNPSYTCSCLSGFTGRRCHLDVNECASQPCQNGGTCTHGINSFRCQCPAGFGGPTCETAQSPCDTKECQHGGQCQVENGSAVCVCQAGYTGAACEMDVDDCSPDPCLNGGSCVDLVGNYTCLCAEPFKGLRCETGDHPVPDACLSAPCHNGGTCVDADQGYVCECPEGFMGLDCRERVPDDCECRNGGRCLGANTTLCQCPLGFFGLLCEFEITAMPCNMNTQCPDGGYCMEHGGSYLCVCHTDHNASHSLPSPCDSDPCFNGGSCDAHDDSYTCECPRGFHGKHCEKARPHLCSSGPCRNGGTCKEAGGEYHCSCPYRFTGRHCEIGKPDSCASGPCHNGGTCFHYIGKYKCDCPPGFSGRHCEIAPSPCFRSPCVNGGTCEDRDTDFFCHCQAGYMGRRCQAEVDCGPPEEVKHATLRFNGTRLGAVALYACDRGYSLSAPSRIRVCQPHGVWSEPPQCLEIDECRSQPCLHGGSCQDRVAGYLCLCSTGYEGAHCELERDECRAHPCRNGGSCRNLPGAYVCRCPAGFVGVHCETEVDACDSSPCQHGGRCESGGGAYLCVCPESFFGYHCETVSDPCFSSPCGGRGYCLASNGSHSCTCKVGYTGEDCAKELFPPTALKMERVEESGVSISWNPPNGPAARQMLDGYAVTYVSSDGSYRRTDFVDRTRSSHQLQALAAGRAYNISVFSVKRNSNNKNDISRPAVLLARTRPRPVEGFEVTNVTASTISVQWALHRIRHATVSGVRVSIRHPEALRDQATDVDRSVDRFTFRALLPGKRYTIQLTTLSGLRGEEHPTESLATAPTHVWTRPLPPANLTAARVTATSAHVVWDAPTPGSLLEAYVINVTTSQSTKSRYVPNGKLASYTVRDLLPGRRYQLSVIAVQSTELGPQHSEPAHLYIITSPRDGADRRWHQGGHHPRVLKNRPPPARLPELRLLNDHSAPETPTQPPRFSELVDGRGRVSARFGGSPSKAATVRSHVPGNCSENPCQNGGTCVPGADAHSCDCGPGFKGRRCELACIKVSRPCTRLFSETKAFPVWEGGVCHHVKQSKSQTLEKS

SEQ ID NO: 12623 - protein, 66 aa, Homo sapiens
QCQVENGSAVCVCQAGYTGAACEMDVDDCSPDPCLNGGSCVDLVGNYTCLCAEPFKGLRCETVVTC

SEQ ID NO: 12624 - protein, 272 aa, Homo sapiens
  VARIANT 1: note = misc_feature - Xaa can be any naturally occurring amino acid
XPTCETAQSPCDTKECQHGGQCQVENGSAVCVCQAGYTGAACEMDVDDCSPDPCLNGGSCVDLVGNYTCLCAEPFKGLRCETGDHPVPDACLSAPCHNGGTCVDADQGYVCECPEGFMGLDCRERVPDDCECRNGGRCLGANTTLCQCPLGFFGLLCEFEITAMPCNMNTQCPDGGYCMEHGGSYLCVCHTDHNASHSLPSPCDSDPCFNGGSCDAHDDSYTCECPRGFHGKHCEKGMAGRGVRAGVSTLESARGPPSCFSAVSLLVSRIAD

SEQ ID NO: 12625 - protein, 300 aa, Homo sapiens
  VARIANT 1: note = misc_feature - Xaa can be any naturally occurring amino acid
XSLPHVSDVNECASQPCQNGGTCTHGINSFRCQCPAGFGGPTCETAQSPCDTKECQHGGQCQVENGSAVCVCQAGYTGAACEMDVDDCSPDPCLNGGSCVDLVGNYTCLCAEPFKGLRCETGDHPVPDACLSAPCHNGGTCVDADQGYVCECPEGFMGLDCRERVPDDCECRNGGRCLGANTTLCQCPLGFFGLLCEFEITAMPCNMNTQCPDGGYCMEHGGSYLCVCHTDHNASHSLPSPCDSDPCFNGGSCDAHDDSYTCECPRGFHGKHCEKARPHLCSSGPCRNGGTCKEAGGEYH

SEQ ID NO: 12626 - protein, 28 aa, Homo sapiens
MAVAAAAAAAGPAGAGGGRAQRSGLLEV

SEQ ID NO: 12627 - protein, 538 aa, Homo sapiens [sequence omitted]

SEQ ID NO: 12628 - protein, 538 aa, Homo sapiens [sequence omitted]

SEQ ID NO: 12629 - protein, 540 aa, Homo sapiens
MRVAAATAAAGAGPAMAVWTRATKAGLVELLLRERWVRVVAELSGESLSLTGDAAAAELEPALGPAAAAFNGLPNGGGAGDSLPGSPSRGLGPPSPPAPPRGPAGEAGASPPVRRVRVVKQEAGGLGISIKGGRENRMPILISKIFPGLAADQSRALRLGDAILSVNGTDLRQATHDQAVQALKRAGKEVLLEVKFIREVTPYIKKPSLVSDLPWEGAAPQSPSFSGSEDSGSPKHQNSTKDRKIIPLKMCFAARNLSMPDLENRLIELHSPDSRNTLILRCKDTATAHSWFVAIHTNIMALLPQVLAELNAMLGATSTAGGSKEVKHIAWLAEQAKLDGGRQQWRPVLMAVTEKDLLLYDCMPWTRDAWASPCHSYPLVATRLVHSGSGCRSPSLGSDLTFATRTGSRQGIEMHLFRVETHRDLSSWTRILVQGCHAAAELIKEVSLGCMLNGQEVRLTIHYENGFTISRENGGSSSILYRYPFERLKMSADDGIRNLYLDFGGPEGELTMDLHSCPKPIVFVLHTFLSAKVTRMGLLV

SEQ ID NO: 12630 - protein, 267 aa, Homo sapiens
MRVAAATAAAGAGPAMAVWTRATKAGLVELLLRERWVRVVAELSGESLSLTGDAAAAELEPALGPAAAAFNGLPNGGGAGDSLPGSPSRGLGPPSPPAPPRGPAGEAGASPPVRRVRVVKQEAGGLGISIKGGRENRMPILISKIFPGLAADQSRALRLGDAILSVNGTDLRQATHDQAVQALKRAGKEVLLEVKFIREVTPYIKKPSLVSDLPWEGAAPQSPSFSGSEDSGSPKHQNSTKDRKIIPLKMCFAARNLSMPDLENRQN

SEQ ID NO: 12631 - protein, 64 aa, Homo sapiens
  VARIANT 1: note = misc_feature - Xaa can be any naturally occurring amino acid
XGRENRMPILISKIFPGLAADQSRALRLGDAILSVNGTDLRQATHDQAVQALKRAGKEVLLEGL

SEQ ID NO: 12632 - protein, 162 aa, Homo sapiens
  VARIANT 1: note = misc_feature - Xaa can be any naturally occurring amino acid
XGRENRMPILISKIFPGLAADQSRALRLGDAILSVNGTDLRQATHDQAVQALKRAGKEVLLEVKFIREVTPYIKKPSLVSDLPWEGAAPQSPSFSGSEDSGSPKHQNSTKDRKIIPLKMCFAARNLSMPDLENRLIELHSPDSRNTLILRCKDTATAHSWQN

SEQ ID NO: 12633 - protein, 139 aa, Homo sapiens
  VARIANT 1: note = misc_feature - Xaa can be any naturally occurring amino acid
XPHLQDLPRAGCRPEPGAAAGRRHPVGERHRPAPGHPRPGRAGAEARGQGVKFIREVTPYIKKPSLVSDLPWEGAAPQSPSFSGSEDSGSPKHQNSTKDRKIIPLKMCFAARNLSMPDLENRLIELHSPDSRNTLILRC

SEQ ID NO: 12634 - protein, 212 aa, Homo sapiens
DAQLPSKRIIGPKNYEFLKSKREEFQEYLQKLLQHPELSNSQLLADFLSPNGGETQFLDKILPDVNLGKIIKSVPGKLMKEKGQHLEPFIMNFINSCESPKPKPSRPELTILSPTSENNKKLFNDLFKNNANRAENTERKQNQNYFMEVMTVEGVYDYLMYVDAIFCENTEPRSLQDKQKGAKQTFEEMMNYIPDLLVKCIGEETKYESIRL

SEQ ID NO: 12635 - protein, 91 aa, Homo sapiens
MIFWSFVAGVVTFYCSLGPDSLLPNIFFTIKYKPKQLGLQELFPQGHSCAVCGKVKCKRHRPSLLLENYQPWLDLKISSKVDASLSEGCDR

SEQ ID NO: 12636 - protein, 145 aa, Homo sapiens
MIFWSFVAGVVTFYCSLGPDSLLPNIFFTIKYKPKQLGLQELFPQGHSCAVCGKVKCKRHRPSLLLENYQPWLDLKISSKVDASLSEVDIPSIITKKLLKAAMKHIEVIVKARQKVKNTEFLQQAALEEYGPELHVALRSRRDEL

SEQ ID NO: 12637 - protein, 894 aa, Homo sapiens
MIFWSFVAGVVTFYCSLGPDSLLPNIFFTIKYKPKQLGLQELFPQGHSCAVCGKVKCKRHRPSLLLENYQPWLDLKISSKVDASLSEVLELVLENFVYPWYRDVTDDESFVDELRITLRFFASVLIRRIHKVDIPSIITKKLLKAAMKHIEVIVKARQKVKNTEFLQQAALEEYGPELHVALRSRRDELHYLRKLTELLFPYILPPKATDCRSLTLLIREILSGSVFLPSLDFLADPDTVNHLLIIFIDDSPPEKATEPASPLVPFLQKFAEPRNKKPSVLKLELKQIREQQDLLFRFMNFLKQEGAVHVLQFCLTVEEFNDRILRPELSNDEMLSLHEELQKIYKTYCLDESIDKIRFDPFIVEEIQRIAEGPYIDVVKLQTMRCLFEAYEHVLSLLENVFTPMFCHSDEYFRQLLRGAESPTRNSKLNRGSLSLDDFRNTQKRGESFGISRIGSKIKGVFKSTTMEGAMLPNYGVAEGEDDFIEEGIVVMEDDSPVEAVSTPNTPRNLAAWKISIPYVDFFEDPSSERKEKKERIPVFCIDVERNDRRAVGHEPEHWSVYRRYLEFYVLESKLTEFHGAFPDAQLPSKRIIGPKNYEFLKSKREEFQEYLQKLLQHPELSNSQLLADFLSPNGGETQFLDKILPDVNLGKIIKSVPGKLMKEKGQHLEPFIMNFINSCESPKPKPSRPELTILSPTSENNKKLFNDLFKNNANRAENTERKQNQNYFMEVMTVEGVYDYLMYVGRVVFQVPDWLHHLLMGTRILFKNTLEMYTDYYLQCKLEQLFQEHRLVSLITLLRDAIFCENTEPRSLQDKQKGAKQTFEEMMNYIPDLLVKCIGEETKYESIRLLFDGLQQPVLNKQLTYVLLDIVIQELFPELNKVQKEVTSVTSWM

SEQ ID NO: 12638 - protein, 833 aa, Homo sapiens
MKMKTFVIIHFHLIQLGLQELFPQGHSCAVCGKVKCKRHRPSLLLENYQPWLDLKISSKVDASLSEVLELVLENFVYPWYRDVTDDESFVDELRITLRFFASVLIRRIHKVDIPSIITKKLLKAAMKHIEVIVKARQKVKNTEFLQQAALEEYGPELHVALRSRRDELHYLRKLTELLFPYILPPKATDCRSLTLLIREILSGSVFLPSLDFLADPDTVNHLLIIFIDDSPPEKATEPASPLVPFLQKFAEPRNKKPSVLKLELKQIREQQDLLFRFMNFLKQEGAVHVLQFCLTVEEFNDRILRPELSNDEMLSLHEELQKIYKTYCLDESIDKIRFDPFIVEEIQRIAEGPYIDVVKLQTMRCLFEAYEHVLSLLENVFTPMFCHSDEYFRQLLRGAESPTRNSKLNRNTQKRGESFGISRIGSKIKGVFKSTTMEGAMLPNYGVAEGEDDFIEEGIVVMEDDSPVEAVSTPNTPRNLAAWKISIPYVDFFEDPSSERKEKKERIPVFCIDVERNDRRAVGHEPEHWSVYRRYLEFYVLESKLTEFHGAFPDAQLPSKRIIGPKNYEFLKSKREEFQEYLQKLLQHPELSNSQLLADFLSPNGGETQFLDKILPDVNLGKIIKSVPGKLMKEKGQHLEPFIMNFINSCESPKPKPSRPELTILSPTSENNKKLFNDLFKNNANRAENTERKQNQNYFMEVMTVEGVYDYLMYVGRVVFQVPDWLHHLLMGTRILFKNTLEMYTDYYLQCKLEQLFQEHRLVSLITLLRDAIFCENTEPRSLQDKQKGAKQTFEEMMNYIPDLLVKCIGEETKYESIRLLFDGLQQPVLNKQ

SEQ ID NO: 12639 - protein, 236 aa, Homo sapiens
MVPWVRTMGQKLKQRLRLDVGREICRQYPLFCFLLLCLSAASLLLNRYIHILMIFWSFVAGVVTFYCSLGPDSLLPNIFFTIKYKPKLGLQELFPQGHSCAVCGKVKCKRHRPSLLLENYQPWLDLKISSKVDASLSEVLELVLENFVYPWYRDVTDDESFVDELRITLRFFASVLIRRIHKVDIPSIITKKLLKAAMKHIEVIVKARQKVKNTEFLQQAALEEYGPELHVALRSR

SEQ ID NO: 12640 - protein, 893 aa, Homo sapiens
MVPWVRTMGQKLKQRLRLDVGREICRQYPLFCFLLLCLSAASLLLNRYIHILMIFWSFVAGVVTFYCSLGPDSLLPNIFFTIKYKPKQLGLQELFPQGHSCAVCGKVKCKRHRPSLLLENYQPWLDLKISSKVDASLSEVDIPSIITKKLLKAAMKHIEVIVKARQKVKNTEFLQQAALEEYGPELHVALRSRRDELHYLRKLTELLFPYILPPKATDCRSLTLLIREILSGSVFLPSLDFLADPDTVNHLLIIFIDDSPPEKATEPASPLVPFLQKFAEPRNKKPSVLKLELKQIREQQDLLFRFMNFLKQEGAVHVLQFCLTVEEFNDRILRPELSNDEMLSLHEELQKIYKTYCLDESIDKIRFDPFIVEEIQRIAEGPYIDVVKLQTMRCLFEAYEHVLSLLENVFTPMFCHSDEYFRQLLRGAESPTRNSKLNRNTQKRGESFGISRIGSKIKGVFKSTTMEGAMLPNYGVAEGEDDFIEEGIVVMEDDSPVEAVSTPNTPRNLAAWKISIPYVDFFEDPSSERKEKKERIPVFCIDVERNDRRAVGHEPEHWSVYRRYLEFYVLESKLTEFHGAFPDAQLPSKRIIGPKNYEFLKSKREEFQEYLQKLLQHPELSNSQLLADFLSPNGGETQFLDKILPDVNLGKIIKSVPGKLMKEKGQHLEPFIMNFINSCESPKPKPSRPELTILSPTSENNKKLFNDLFKNNANRAENTERKQNQNYFMEVMTVEGVYDYLMYVGRVVFQVPDWLHHLLMGTRILFKNTLEMYTDYYLQCKLEQLFQEHRLVSLITLLRDAIFCENTEPRSLQDKQKGAKQTFEEMMNYIPDLLVKCIGEETKYESIRLLFDGLQQPVLNKQLTYVLLDIVIQELFPELNKVQKEVTSVTSWM

SEQ ID NO: 12641 - protein, 183 aa, Homo sapiens
MVPWVRTMGQKLKQRLRLDVGREICRQYPLFCFLLLCLSAASLLLNRYIHILMIFWSFVAGVVTFYCSLGPDSLLPNIFFTIKYKPKQLGLQELFPQGHSCAVCGKVKCKRHRPSLLLENYQPWLDLKISSKVDASLSEVLELVLENFVYPWYRDVTDDESFVDELRITLRFFASVLIRRIHK

SEQ ID NO: 12642 - protein, 946 aa, Homo sapiens
MVPWVRTMGQKLKQRLRLDVGREICRQYPLFCFLLLCLSAASLLLNRYIHILMIFWSFVAGVVTFYCSLGPDSLLPNIFFTIKYKPKQLGLQELFPQGHSCAVCGKVKCKRHRPSLLLENYQPWLDLKISSKVDASLSEVLELVLENFVYPWYRDVTDDESFVDELRITLRFFASVLIRRIHKVDIPSIITKKLLKAAMKHIEVIVKARQKVKNTEFLQQAALEEYGPELHVALRSRRDELHYLRKLTELLFPYILPPKATDCRSLTLLIREILSGSVFLPSLDFLADPDTVNHLLIIFIDDSPPEKATEPASPLVPFLQKFAEPRNKKPSVLKLELKQIREQQDLLFRFMNFLKQEGAVHVLQFCLTVEEFNDRILRPELSNDEMLSLHEELQKIYKTYCLDESIDKIRFDPFIVEEIQRIAEGPYIDVVKLQTMRCLFEAYEHVLSLLENVFTPMFCHSDEYFRQLLRGAESPTRNSKLNRGSLSLDDFRNTQKRGESFGISRIGSKIKGVFKSTTMEGAMLPNYGVAEGEDDFIEEGIVVMEDDSPVEAVSTPNTPRNLAAWKISIPYVDFFEDPSSERKEKKERIPVFCIDVERNDRRAVGHEPEHWSVYRRYLEFYVLESKLTEFHGAFPDAQLPSKRIIGPKNYEFLKSKREEFQEYLQKLLQHPELSNSQLLADFLSPNGGETQFLDKILPDVNLGKIIKSVPGKLMKEKGQHLEPFIMNFINSCESPKPKPSRPELTILSPTSENNKKLFNDLFKNNANRAENTERKQNQNYFMEVMTVEGVYDYLMYVGRVVFQVPDWLHHLLMGTRILFKNTLEMYTDYYLQCKLEQLFQEHRLVSLITLLRDAIFCENTEPRSLQDKQKGAKQTFEEMMNYIPDLLVKCIGEETKYESIRLLFDGLQQPVLNKQLTYVLLDIVIQELFPELNKVQKEVTSVTSWM

SEQ ID NO: 12643 - protein, 937 aa, Homo sapiens
MVPWVRTMGQKLKQRLRLDVGREICRQYPLFCFLLLCLSAASLLLNRYIHILMIFWSFVAGVVTFYCSLGPDSLLPNIFFTIKYKPKQLGLQELFPQGHSCAVCGKVKCKRHRPSLLLENYQPWLDLKISSKVDASLSEVLELVLENFVYPWYRDVTDDESFVDELRITLRFFASVLIRRIHKVDIPSIITKKLLKAAMKHIEVIVKARQKVKNTEFLQQAALEEYGPELHVALRSRRDELHYLRKLTELLFPYILPPKATDCRSLTLLIREILSGSVFLPSLDFLADPDTVNHLLIIFIDDSPPEKATEPASPLVPFLQKFAEPRNKKPSVLKLELKQIREQQDLLFRFMNFLKQEGAVHVLQFCLTVEEFNDRILRPELSNDEMLSLHEELQKIYKTYCLDESIDKIRFDPFIVEEIQRIAEGPYIDVVKLQTMRCLFEAYEHVLSLLENVFTPMFCHSDEYFRQLLRGAESPTRNSKLNRNTQKRGESFGISRIGSKIKGVFKSTTMEGAMLPNYGVAEGEDDFIEEGIVVMEDDSPVEAVSTPNTPRNLAAWKISIPYVDFFEDPSSERKEKKERIPVFCIDVERNDRRAVGHEPEHWSVYRRYLEFYVLESKLTEFHGAFPDAQLPSKRIIGPKNYEFLKSKREEFQEYLQKLLQHPELSNSQLLADFLSPNGGETQFLDKILPDVNLGKIIKSVPGKLMKEKGQHLEPFIMNFINSCESPKPKPSRPELTILSPTSENNKKLFNDLFKNNANRAENTERKQNQNYFMEVMTVEGVYDYLMYVGRVVFQVPDWLHHLLMGTRILFKNTLEMYTDYYLQCKLEQLFQEHRLVSLITLLRDAIFCENTEPRSLQDKQKGAKQTFEEMMNYIPDLLVKCIGEETKYESIRLLFDGLQQPVLNKQLTYVLLDIVIQELFPELNKVQKEVTSVTSWM

SEQ ID NO: 12644 - protein, 665 aa, Homo sapiens
MVPWVRTMGQKLKQRLRLDVGREICRQYPLFCFLLLCLSAASLLLNRYIHILMIFWSFVAGVVTFYCSLGPDSLLPNIFFTIKYKPKQLGLQELFPQGHSCAVCGKVKCKRHRPSLLLENYQPWLDLKISSKVDASLSEVLELVLENFVYPWYRDVTDDESFVDELRITLRFFASVLIRRIHKVDIPSIITKKLLKAAMKHIEVIVKARQKVKNTEFLQQAALEEYGPELHVALRSRRDELHYLRKLTELLFPYILPPKATDCRSLTLLIREILSGSVFLPSLDFLADPDTVNHLLIIFIDDSPPEKATEPASPLVPFLQKFAEPRNKKPSVLKLELKQIREQQDLLFRFMNFLKQEGAVHVLQFCLTVEEFNDRILRPELSNDEMLSLHEELQKIYKTYCLDESIDKIRFDPFIVEEIQRRKIIKSVPGKLMKEKGQHLEPFIMNFINSCESPKPKPSRPELTILSPTSENNKKLFNDLFKNNANRAENTERKQNQNYFMEVMTVEGVYDYLMYVGRVVFQVPDWLHHLLMGTRILFKNTLEMYTDYYLQCKLEQLFQEHRLVSLITLLRDAIFCENTEPRSLQDKQKGAKQTFEEMMNYIPDLLVKCIGEETKYESIRLLFDGLQQPVLNKQLTYVLLDIVIQELFPELNKVQKEVTSVTSWM

SEQ ID NO: 12645 - protein, 178 aa, Homo sapiens
  VARIANT 1: note = misc_feature - Xaa can be any naturally occurring amino acid
XKNNANRAENTERKQNQNYFMEVMTVEGVYDYLMYVGRVVFQVPDWLHHLLMGTRILFKNTLEMYTDYYLQCKLEQLFQEHRLVSLITLLRDAIFCENTEPRSLQDKQKGAKQTFEEMMNYIPDLLVKCIGEETKYESIRLLFDGLQQPVLNKQLTYVLLDIVIQELFPELNKVTEKQ

SEQ ID NO: 12646 - protein, 54 aa, Homo sapiens
MLALLCSCLLLAAGASDAWTGEDSAEPNSDSAEWIRDMYAKVTEIWQEVMQRRD

SEQ ID NO: 12647 - protein, 240 aa, Homo sapiens
MLALLCSCLLLAAGASDAWTGEDSAEPNSDSAEWIRDMYAKVTEIWQEVMQRRDDDGALHAACQVQPSATLDAAQPRVTGVVLFRQLAPRAKLDAFFALEGFPTEPNSSSRAIHVHQFGDLSQGCESTGPHYNPLAVPHPQHPGDFGNFAVRDGSLWRYRAGLAASLAGPHSIVGRAVVVHAGEDDLGRGGNQASVENGNAGRRLACCVVGVCGPGLWERQAREHSERKKRRRESECKAA

SEQ ID NO: 12648 - protein, 213 aa, Homo sapiens
MQLPLALCLVCLLVHTAFRVVEGQGWQAFKNDATEIIPELGEYPEPPPELENNKTMNRAENGGRPPHHPFETKDVSEYSCRELHFTRYVTDGPCRSAKPVTELVCSGQCGPARLLPNAIGRGKWWRPSGPDFRCIPDRYRAQRVQLLCPGGEAPRARKVRLVASCKCKRLTRFHNQSELKDFGTEAARPQKGRKPRPRARSAKANQAELENAY

SEQ ID NO: 12649 - protein, 230 aa, Homo sapiens
MLPPAIHFYLLPLACILMKSCLAFKNDATEILYSHVVKPVPAHPSSNSTLNQARNGGRHFSNTGLDRNRTESLTRQNYFWLFPGAFLRQLQEARVQVGCRELRSTKYISDGQCTSISPLKELVCAGECLPLPVLPNWIGGGYGTKYWSRRSSQEWRCVNDKTRTQRIQLQCQDGSTRTYKITVVTACKCKRYTRQHNESSHNFESMSPAKPVQHHRERKRASKSSKHSMS

SEQ ID NO: 12650 - protein, 206 aa, Homo sapiens
MLPPAIHFYLLPLACILMKSCLAFKNDATEILYSHVVKPVPAHPSSNSTLNQARNGGRHFSNTGLDRNTRVQVGCRELRSTKYISDGQCTSISPLKELVCAGECLPLPVLPNWIGGGYGTKYWSRRSSQEWRCVNDKTRTQRIQLQCQDGSTRTYKITVVTACKCKRYTRQHNESSHNFESMSPAKPVQHHRERKRASKSSKHSMS

SEQ ID NO: 12651 - protein, 549 aa, Homo sapiens
MALAAAAAAAAAGVSQAAVLGFLQEHGGKVRNSELLSRFKPLLDAGDPRGRAARRDRFKQFVNNVAVVKELDGVKFVVLRKKPRPPEPEPAPFGPPGAAAQPSKPTSTVLPRSASAPGAPPLVRVPRPVEPPGDLGLPTEPQDTPGGPASEPAQPPGERSADPPLPALELAQATERPSADAAPPPRAPSEAASPCSDPPDAEPGPGAAKGPPQQKPCMLPVRCVPAPATLRLRAEEPGLRRQLSEEPSPRSSPLLLRRLSVEESGLGLGLGPGRSPHLRRLSRAGPRLLSPDAEELPAAPPPSAVPLEPSEHEWLVRTAGGRWTHQLHGLLLRDRGLAAKRDFMSGFTALHWAAKSGDGEMALQLVEVARRSGAPVDVNARSHGGYTPLHLAALHGHEDAAVLLVVRLGAQVHVRDHSGRRAYQYLRPGSSYALRRLLGDPGLRGTTEPDATGGGSGSLAARRPVQVAATILSSTTSAFLGVLADDLMLQDLARGLKKSSSFSKFLSASPMAPRKKTKIRGGLPAFSEISRRPTPGPLAGLVPSLPPTT

SEQ ID NO: 12652 - protein, 146 aa, Homo sapiens
MLLALVCLLSCLLPSSEAKLYGRCELARVLHDFGLDGYRGYSLADWVCLAYFTSGFNAAALDYEADGSTNNGIFQINSRRWCSNLTPNVPNVCRMYCSDLLNPNLKDTVICAMKITQEPQGLGYWEAWRHHCQGKDLTEWVDGCDF

SEQ ID NO: 12653 - protein, 112 aa, Homo sapiens
MVSALRGAPLIRVCLAYFTSGFNAAALDYEADGSTNNGIFQINSRRWCSNLTPNVPNVCRMYCSDLLNPNLKDTVICAMKITQEPQGLGYWEAWRHHCQGKDLTEWVDGCDF

SEQ ID NO: 12654 - protein, 215 aa, Homo sapiens [sequence omitted]

SEQ ID NO: 12655 - protein, 124 aa, Homo sapiens
MVLCWLLLLVMALPPGTTGVKDCVFCELTDSMQCPGTYMHCGDDEDCFTGHGVAPGTGPVINKGCLRATSCGLEEPVSYRGVTYSLTTNCCTGRLCNRAPSSQTVGATTSLALGLGMLLPPRLL

SEQ ID NO: 12656 - protein, 159 aa, Homo sapiens
MKAWGTVVVTLATLMVVTVDAKIYERCELAARLERAGLNGYKGYGVGDWLCMAHYESGFDTAFVDHNPDGSSEYGIFQLNSAWWCDNGITPTKNLCHMDCHDLLNRHILDDIRCAKQIVSSQNGLSAWTSWRLHCSGHDLSEWLKGCDMHVKIDPKIHP

SEQ ID NO: 12657 - protein, 159 aa, Homo sapiens; identical to SEQ ID NO: 12656

SEQ ID NO: 12658 - protein, 159 aa, Homo sapiens; identical to SEQ ID NO: 12656

SEQ ID NO: 12659 - protein, 195 aa, Homo sapiens
MAVSQGDGTLCFVLLLCCWQETELRPRTVIPGSPTEIPFSSKQEDMSELLDEILVQEILDLNKTTPSEMPSTASTLSTPLHAGIDENYQAGGSENYHELLENLQFSPGIEVKISNDEANANANLHGDPSENYRGPQVSPGSEKSVSSKEKNSKNTQYENLSILDQILQNIGRSSGNIFHKEQQRTSAQRRSQGSQ

SEQ ID NO: 12660 - protein, 164 aa, Homo sapiens
MLWLLPTDRGRSGNGNEPQDEILVQEILDLNKTTPSEMPSTASTLSTPLHAGIDENYQAGGSENYHELLENLQFSPGIEVKISNDEANANANLHGDPSENYRGPQVSPGSEKSVSSKEKNSKNTQYENLSILDQILQNIGRSSGNIFHKEQQRTSAQRRSQGSQ

SEQ ID NO: 12661 - protein, 104 aa, Homo sapiens
MLWLLPTDRGRSGNGNEPQGSPTEIPFSSKQEDMSELLDEILVQEILDLNKTTPSEMPSTASTLSTPLHAGIDENYQAGGSENYHELLENLQFSPGIEVKISND

SEQ ID NO: 12662 - protein, 112 aa, Homo sapiens
MTFFTHLWDGDPVSQVAGSPTEIPFSSKQEDMSELLDEILVQEILDLNKTTPSEMPSTASTLSTPLHAGIDENYQAGGSENYHELLENLQFSPGIEVKISNDEANANANLHG

SEQ ID NO: 12663 - protein, 80 aa, Homo sapiens
MKVFFLFAVLFCLVQTNSGDVPLGIRNTICRMQQGICRLFFCHSGEKKRDISSDPWNRCCVSNTDEEGKEKPEMDGRSGI

SEQ ID NO: 12664 - protein, 50 aa, Homo sapiens
MKVFFLFAVLFCLVQTNSVHISHQEARGPSFKICVGFLGPRWARGCSTGN

SEQ ID NO: 12665 - protein, 113 aa, Homo sapiens
MRQRLLPSVTSLLLVALLFPGSSQARHVNHSATEALGELRERAPGQGTNGFQLLRHAVKRDLLPPRTPPYQEPASDLKVVDCRRSEGFCQEYCNYMETQVGYCSKKKDACCLH

SEQ ID NO: 12666 - protein, 133 aa, Homo sapiens
MRQRLLPSVTSLLLVALLFPGSSQARHVNHSATEALGELRERAPGQGTNGFQLLRHAVKRDLLPPRTPPYQGDVPLGIRNTICRMQQGICRLFFCHSGEKKRDISSDPWNRCCVSNTDEEGKEKPEMDGRSGI

SEQ ID NO: 12667 - protein, 108 aa, Homo sapiens
MRQRLLPSVTSLLLVALLFPGSSQARHVNHSATEALGELRERAPGQGTNGFQLLRHAVKRDLLPPRTPPYQGDVPLGIRNTICRMQQGICRLFFCHSGTGQQHRQRCG

SEQ ID NO: 12668 - protein, 82 aa, Homo sapiens
MRQRLLPSVTSLLLVALLFPGSSQARHVNHSATEALGELRERAPGQGTNGFQLLRHAVKRDLLPPRTPPYQGTGQQHRQRCG

SEQ ID NO: 12669 - protein, 103 aa, Homo sapiens
MRQRLLPSVTSLLLVALLFPGSSQARHVNHSATEALGELRERAPGQGTNGFQLLRHAVKRDLLPPRTPPYQVHISHQEARGPSFKICVGFLGPRWARGCSTGN

SEQ ID NO: 12670 - protein, 53 aa, Homo sapiens
SSQARHVNHSATEALGELRERAPGQGTNGFQLLRHAVKRDLLPPRTPPYQEMK

SEQ ID NO: 12671 - protein, 106 aa, Homo sapiens
  VARIANT 1: note = misc_feature - Xaa can be any naturally occurring amino acid
XFPGSSQARHVNHSATEALGELRERAPGQGTNGFQLLRHAVKRDLLPPRTPPYQGTHSVAQAGVQWHCYRLLQPLPPGLKCSSHLSLPNTWDHRHAPLHTASFFRC

SEQ ID NO: 12672 - protein, 106 aa, Homo sapiens
LFPGSSQARHVNHSATEALGELRERAPGQGTNGFQLLRHAVKRDLLPPRTPPYQGTHSVAQAGVQWHCYRLLQPLPPGLKCSSHLSLPNTWDHRHAPLHTASFFRC

SEQ ID NO: 12673 - protein, 80 aa, Homo sapiens
MKVFFLFAVLFCLVQTNSGDVPPGIRNTICHMQQGICRLFFCHSGEKKRDICSDPWNRCCVSNTDEEGKEKPEMDGRSGI

SEQ ID NO: 12674 - protein, 50 aa, Homo sapiens
MKVFFLFAVLFCLVQTNSVHISHREARGPSFRICVDFLGPRWARGCSTGN

SEQ ID NO: 12675 - protein, 113 aa, Homo sapiens; identical to SEQ ID NO: 12665

SEQ ID NO: 12676 - protein, 133 aa, Homo sapiens
MRQRLLPSVTSLLLVALLFPGSSQARHVNHSATEALGELRERAPGQGTNGFQLLRHAVKRDLLPPRTPPYQGDVPPGIRNTICHMQQGICRLFFCHSGEKKRDICSDPWNRCCVSNTDEEGKEKPEMDGRSGI

SEQ ID NO: 12677 - protein, 108 aa, Homo sapiens
MRQRLLPSVTSLLLVALLFPGSSQARHVNHSATEALGELRERAPGQGTNGFQLLRHAVKRDLLPPRTPPYQGDVPPGIRNTICHMQQGICRLFFCHSGTGQQHRQRCG

SEQ ID NO: 12678 - protein, 82 aa, Homo sapiens; identical to SEQ ID NO: 12668

SEQ ID NO: 12679 - protein, 103 aa, Homo sapiens
MRQRLLPSVTSLLLVALLFPGSSQARHVNHSATEALGELRERAPGQGTNGFQLLRHAVKRDLLPPRTPPYQVHISHREARGPSFRICVDFLGPRWARGCSTGN

SEQ ID NO: 12680 - protein, 53 aa, Homo sapiens; identical to SEQ ID NO: 12670

SEQ ID NO: 12681 - protein, 115 aa, Homo sapiens
MCVCQDPTSCPAPIGEFEKVCSNDNKTFDSSCHFFATKCTLEGTKKGHKLHLDYIGPCKYIPPCLDSELTEFPLRMRDWLKNVLVTLYERDEDNNLLTEKQKLRVKKIHENEKRL

SEQ ID NO: 12682 - protein, 149 aa, Homo sapiens
MCVCQDPTSCPAPIGEFEKVCSNDNKTFDSSCHFFATKCTLEGTKKGHKLHLDYIGPCKYIPPCLDSELTEFPLRMRDWLKNVLVTLYERDEDNNLLTEKQKLRVKKIHENEKRLEAGDHPVELLARDFEKNYNMYIFPVHWQFGQLDQ

SEQ ID NO: 12683 - protein, 53 aa, Homo sapiens
MRAWIFFLLCLAGRALAAPQQEALPDETEVVEETVAEVTEVSVGANPVQVEVG

SEQ ID NO: 12684 - protein, 111 aa, Homo sapiens
MRAWIFFLLCLAGRALAAPQQEALPDETEVVEETVAEVTEVSVGANPVQVEVGEFDDGAEETEEEVVAENPCQNHHCKHGKVCELDENNTPMCVCQDPTSCPAPIGEFEKV

SEQ ID NO: 12685 - protein, 303 aa, Homo sapiens
MRAWIFFLLCLAGRALAAPQQEALPDETEVVEETVAEVTEVSVGANPVQVEVGEFDDGAEETEEEVVAENPCQNHHCKHGKVCELDENNTPMCVCQDPTSCPAPIGEFEKVCSNDNKTFDSSCHFFATKCTLEGTKKGHKLHLDYIGPCKYIPPCLDSELTEFPLRMRDWLKNVLVTLYERDEDNNLLTEKQKLRVKKIHENEKRLEAGDHPVELLARDFEKNYNMYIFPVHWQFGQLDQHPIDGYLSHTELAPLRAPLIPMEHCTTRFFETCDLDNDKYIALDEWAGCFGIKQKDIDKDLVI

SEQ ID NO: 12686 - protein, 56 aa, Homo sapiens
MKTGLFFLCLLGTAAAIPTNARLLSDHSKPTAETVAPDNTAIPSLRAEAEENEKET

SEQ ID NO: 12687 - protein, 89 aa, Homo sapiens
MKTGLFFLCLLGTAAAIPTNARLLSDHSKPTAETVAPDNTAIPSLRAEAEENEKETAVSTEDDSHHKAEKSSVLKSKEESHEQSAEQGK

SEQ ID NO: 12688 - protein, 120 aa, Homo sapiens
MKTGLFFLCLLGTAAAIPTNARLLSDHSKPTAETVAPDNTAIPSLRAEAEENEKETAVSTEDDSHHKAEKSSVLKSKEESHEQSAEQGKSSSQELGLKDQEDSDGHLSVNLEYAPTEGTL

SEQ ID NO: 12689 - protein, 127 aa, Homo sapiens
MKTGLFFLCLLGTAAAIPTNARLLSDHSKPTAETVAPDNTAIPSLRAEAEENEKETAVSTEDDSHHKAEKSSVLKSKEESHEQSAEQGKSSSQELGLKDQEDSDGHLSVNLEYAPTEGTLDIKEDMS

SEQ ID NO: 12690 - protein, 141 aa, Homo sapiens
MKTGLFFLCLLGTAAAIPTNARLLSDHSKPTAETVAPDNTAIPSLRAEAEENEKETAVSTEDDSHHKAEKSSVLKSKEESHEQSAEQGKSSSQELGLKDQEDSDGHLSVNLEYAPTEGTLDIKEDMSEPQEKKLSENTDFL

SEQ ID NO: 12691 - protein, 144 aa, Homo sapiens
MKTGLFFLCLLGTAAAIPTNARLLSDHSKPTAETVAPDNTAIPSLRAEAEENEKETAVSTEDDSHHKAEKSSVLKSKEESHEQSAEQGKSSSQELGLKDQEDSDGHLSVNLEYAPTEGTLDIKEDMSEPQEKKLSENTDFLAPG

SEQ ID NO: 12692 - protein, 664 aa, Homo sapiens
MKTGLFFLCLLGTAAAIPTNARLLSDHSKPTAETVAPDNTAIPSLRAEAEENEKETAVSTEDDSHHKAEKSSVLKSKEESHEQSAEQGKSSSQELGLKDQEDSDGHLSVNLEYAPTEGTLDIKEDMSEPQEKKLSENTDFLAPGVSSFTDSNQQESITKREENQEQPRNYSHHQLNRSSKHSQGLRDQGNQEQDPNISNGEEEEEKEPGEVGTHNDNQERKTELPREHANSKQEEDNTQSDDILEESDQPTQVSKMQEDEFDQGNQEQEDNSNAEMEEENASNVNKHIQETEWQSQEGKTGLEAISNHKETEEKTVSEALLMEPTDDGNTTPRNHGVDDDGDDDGDDGGTDGPRHSASDDYFIPSQAFLEAERAQSIAYHLKIEEQREKVHENENIGTTEPGEHQEAKKAENSSNEEETSSEGNMRVHAVDSCMSFQCKRGHICKADQQGKPHCVCQDPVTCPPTKPLDQVCGTDNQTYASSCHLFATKCRLEGTKKGHQLQLDYFGACKSIPTCTDFEVIQFPLRMRDWLKNILMQLYEANSEHAGYLNEKQRNKVKKIYLDEKRLLAGDHPIDLLLRDFKKNYHMYVYPVHWQFSELDQHPMDRVLTHSELAPLRASLVPMEHCITRFFEECDPNKDKHITLKEWGHCFGIKEEDIDENLLF

SEQ ID NO: 12693 - protein, 664 aa, Homo sapiens; identical to SEQ ID NO: 12692

SEQ ID NO: 12694 - protein, 19 aa, Homo sapiens
MSEPQEKKLSENTDFLAPG

SEQ ID NO: 12695 - protein, 539 aa, Homo sapiens
MSEPQEKKLSENTDFLAPGVSSFTDSNQQESITKREENQEQPRNYSHHQLNRSSKHSQGLRDQGNQEQDPNISNGEEEEEKEPGEVGTHNDNQERKTELPREHANSKQEEDNTQSDDILEESDQPTQVSKMQEDEFDQGNQEQEDNSNAEMEEENASNVNKHIQETEWQSQEGKTGLEAISNHKETEEKTVSEALLMEPTDDGNTTPRNHGVDDDGDDDGDDGGTDGPRHSASDDYFIPSQAFLEAERAQSIAYHLKIEEQREKVHENENIGTTEPGEHQEAKKAENSSNEEETSSEGNMRVHAVDSCMSFQCKRGHICKADQQGKPHCVCQDPVTCPPTKPLDQVCGTDNQTYASSCHLFATKCRLEGTKKGHQLQLDYFGACKSIPTCTDFEVIQFPLRMRDWLKNILMQLYEANSEHAGYLNEKQRNKVKKIYLDEKRLLAGDHPIDLLLRDFKKNYHMYVYPVHWQFSELDQHPMDRVLTHSELAPLRASLVPMEHCITRFFEECDPNKDKHITLKEWGHCFGIKEEDIDENLLF

SEQ ID NO: 12696 - protein, 802 aa, Homo sapiens
MLGARAWLGRVLLLPRAGAGLAASRRCPGVWPRTWPHRSPSRGSSSRDKDRSATVSSSVPMPAGGKGSHPSSTPQRVPNRLIHEKSPYLLQHAYNPVDWYPWGQEAFDKARKENKPIFLSVGYSTCHWCHMMEEESFQNEEIGRLLSEDFVSVKVDREERPDVDKVYMTFVQATSSGGGWPMNVWLTPNLQPFVGGTYFPPEDGLTRVGFRTVLLRIREQWKQNKNTLLENSQRVTTALLARSEISVGDRQLPPSAATVNNRCFQQLDEGYDEEYGGFAEAPKFPTPVILSFLFSYWLSHRLTQDGSRAQQMALHTLKMMANGGIRDHVGQGFHRYSTDRQWHVPHFEKMLYDQAQLAVAYSQAFQLSGDEFYSDVAKGILQYVARSLSHRSGGFYSAEDADSPPERGQRPKEGAYYVWTVKEVQQLLPEPVLGATEPLTSGQLLMKHYGLTEAGNISPSQDPKGELQGQNVLTVRYSLELTAARFGLDVEAVRTLLNSGLEKLFQARKHRPKPHLDSKMLAAWNGLMVSGYAVTGAVLGQDRLINYATNGAKFLKRHMFDVASGRLMRTCYTGPGGTVEHSNPPCWGFLEDYAFVVRGLLDLYEASQESAWLEWALRLQDTQDKLFWDSQGGGYFCSEAELGAGLPLRLKDDQDGAEPSANSVSAHNLLRLHGFTGHKDWMDKCVCLLTAFSERMRRVPVALPEMVRALSAQQQTLKQIVICGDRQAKDTKALVQCVHSVYIPNKVLILADGDPSSFLSRQLPFLSTLRRLEDQATAYVCENQACSVPITDPCELRKLLHP

SEQ ID NO: 12697 - protein, 56 aa, Homo sapiens
MLGARAWLGRVLLLPRAGAGLAASRRCPGVWPRTWPHRSPSRPRRLGETNLARSPQ

SEQ ID NO: 12698 - protein, 67 aa, Homo sapiens
MLGARAWLGRVLLLPRAGAGLAASRRCPGVWPRTWPHRSPSRWALSEGVPMSGFLCLSLTWSSPRPY

SEQ ID NO: 12699 - protein, 786 aa, Homo sapiens
MLGARAWLGRVLLLPRAGAGLAASRRGSSSRDKDRSATVSSSVPMPAGGKGSHPSSTPQRVPNRLIHEKSPYLLQHAYNPVDWYPWGQEAFDKARKENKPIFLSVGYSTCHWCHMMEEESFQNEEIGRLLSEDFVSVKVDREERPDVDKVYMTFVQATSSGGGWPMNVWLTPNLQPFVGGTYFPPEDGLTRVGFRTVLLRIREQWKQNKNTLLENSQRVTTALLARSEISVGDRQLPPSAATVNNRCFQQLDEGYDEEYGGFAEAPKFPTPVILSFLFSYWLSHRLTQDGSRAQQMALHTLKMMANGGIRDHVGQGFHRYSTDRQWHVPHFEKMLYDQAQLAVAYSQAFQLSGDEFYSDVAKGILQYVARSLSHRSGGFYSAEDADSPPERGQRPKEGAYYVWTVKEVQQLLPEPVLGATEPLTSGQLLMKHYGLTEAGNISPSQDPKGELQGQNVLTVRYSLELTAARFGLDVEAVRTLLNSGLEKLFQARKHRPKPHLDSKMLAAWNGLMVSGYAVTGAVLGQDRLINYATNGAKFLKRHMFDVASGRLMRTCYTGPGGTVEHSNPPCWGFLEDYAFVVRGLLDLYEASQESAWLEWALRLQDTQDKLFWDSQGGGYFCSEAELGAGLPLRLKDDQDGAEPSANSVSAHNLLRLHGFTGHKDWMDKCVCLLTAFSERMRRVPVALPEMVRALSAQQQTLKQIVICGDRQAKDTKALVQCVHSVYIPNKVLILADGDPSSFLSRQLPFLSTLRRLEDQATAYVCENQACSVPITDPCELRKLLHP

SEQ ID NO: 12700 - protein, 43 aa, Homo sapiens
MLGARAWLGRVLLLPRAGAGLAASRRSACSPTSRLNSLRSLIP

SEQ ID NO: 12701 - protein, 43 aa, Homo sapiens; identical to SEQ ID NO: 12700

SEQ ID NO: 12702 - protein, 43 aa, Homo sapiens; identical to SEQ ID NO: 12700

SEQ ID NO: 12703 - protein, 43 aa, Homo sapiens; identical to SEQ ID NO: 12700

SEQ ID NO: 12704 - protein, 43 aa, Homo sapiens; identical to SEQ ID NO: 12700

SEQ ID NO: 12705 - protein, 742 aa, Homo sapiens
MPAGGKGSHPSSTPQRVPNRLIHEKSPYLLQHAYNPVDWYPWGQEAFDKARKENKPIFLSVGYSTCHWCHMMEEESFQNEEIGRLLSEDFVSVKVDREERPDVDKVYMTFVQATSSGGGWPMNVWLTPNLQPFVGGTYFPPEDGLTRVGFRTVLLRIREQWKQNKNTLLENSQRVTTALLARSEISVGDRQLPPSAATVNNRCFQQLDEGYDEEYGGFAEAPKFPTPVILSFLFSYWLSHRLTQDGSRAQQMALHTLKMMANGGIRDHVGQGFHRYSTDRQWHVPHFEKMLYDQAQLAVAYSQAFQLSGDEFYSDVAKGILQYVARSLSHRSGGFYSAEDADSPPERGQRPKEGAYYVWTVKEVQQLLPEPVLGATEPLTSGQLLMKHYGLTEAGNISPSQDPKGELQGQNVLTVRYSLELTAARFGLDVEAVRTLLNSGLEKLFQARKHRPKPHLDSKMLAAWNGLMVSGYAVTGAVLGQDRLINYATNGAKFLKRHMFDVASGRLMRTCYTGPGGTVEHSNPPCWGFLEDYAFVVRGLLDLYEASQESAWLEWALRLQDTQDKLFWDSQGGGYFCSEAELGAGLPLRLKDDQDGAEPSANSVSAHNLLRLHGFTGHKDWMDKCVCLLTAFSERMRRVPVALPEMVRALSAQQQTLKQIVICGDRQAKDTKALVQCVHSVYIPNKVLILADGDPSSFLSRQLPFLSTLRRLEDQATAYVCENQACSVPITDPCELRKLLHP

SEQ ID NO: 12706 - protein, 521 aa, Homo sapiens
MSHLSSPPKKHKGEHKGHSLPHGSERGSSSRDKDRSATVSSSVPMPAGGKGSHPSSTPQRVPNRLIHEKSPYLLQHAYNPVDWYPWGQEAFDKARKENKPIFLSVGYSTCHWCHMMEEESFQNEEIGRLLSEDFVSVKVDREERPDVDKVYMTFVQATSSGGGWPMNVWLTPNLQPFVGGTYFPPEDGLTRVGFRTVLLRIREQWKQNKNTLLENSQRVTTALLARSEISVGDRQLPPSAATVNNRCFQQLDEGYDEEYGGFAEAPKFPTPVILSFLFSYWLSHRLTQDGSRAQQMALHTLKMMANGGIRDHVGQGFHRYSTDRQWHVPHFEKMLYDQAQLAVAYSQAFQLSGDEFYSDVAKGILQYVARSLSHRSGGFYSAEDADSPPERGQRPKEGAYYVWTVKEVQQLLPEPVLGATEPLTSGQLLMKHYGLTEAGNISPSQDPKGELQGQNVLTVRYSLELTAARFGLDVEAVRTLLNSGLEKLFQARKHRPKPHLDSKMLAAWNGGAAHLRPSLSA

SEQ ID NO: 12707 - protein, 786 aa, Homo sapiens
MSHLSSPPKKHKGEHKGHSLPHGSERGSSSRDKDRSATVSSSVPMPAGGKGSHPSSTPQRVPNRLIHEKSPYLLQHAYNPVDWYPWGQEAFDKARKENKPIFLSVGYSTCHWCHMMEEESFQNEEIGRLLSEDFVSVKVDREERPDVDKVYMTFVQATSSGGGWPMNVWLTPNLQPFVGGTYFPPEDGLTRVGFRTVLLRIREQWKQNKNTLLENSQRVTTALLARSEISVGDRQLPPSAATVNNRCFQQLDEGYDEEYGGFAEAPKFPTPVILSFLFSYWLSHRLTQDGSRAQQMALHTLKMMANGGIRDHVGQGFHRYSTDRQWHVPHFEKMLYDQAQLAVAYSQAFQLSGDEFYSDVAKGILQYVARSLSHRSGGFYSAEDADSPPERGQRPKEGAYYVWTVKEVQQLLPEPVLGATEPLTSGQLLMKHYGLTEAGNISPSQDPKGELQGQNVLTVRYSLELTAARFGLDVEAVRTLLNSGLEKLFQARKHRPKPHLDSKMLAAWNGLMVSGYAVTGAVLGQDRLINYATNGAKFLKRHMFDVASGRLMRTCYTGPGGTVEHSNPPCWGFLEDYAFVVRGLLDLYEASQESAWLEWALRLQDTQDKLFWDSQGGGYFCSEAELGAGLPLRLKDDQDGAEPSANSVSAHNLLRLHGFTGHKDWMDKCVCLLTAFSERMRRVPVALPEMVRALSAQQQTLKQIVICGDRQAKDTKALVQCVHSVYIPNKVLILADGDPSSFLSRQLPFLSTLRRLEDQATAYVCENQACSVPITDPCELRKLLHP

SEQ ID NO: 12708 - protein, 247 aa, Homo sapiens
  VARIANT 1: note = misc_feature - Xaa can be any naturally occurring amino acid
XESFQNEEIGRLLSEDFVSVKVDREERPDVDKVYMTFVQATSSGGGWPMNVWLTPNLQPFVGGTYFPPEDGLTRVGFRTVLLRIREQWKQNKNTLLENSQRVTTALLARSEISVGDRQLPPSAATVNNRCFQQLDEGYDEEYGGFAEAPKFPTPVILSFLFSYWLSHRLTQDGSRAQQMALHTLKMMANGGIRDHVGQTASGTSLTLRRCSMTRHSSLWPIRRPSSSLVMNSTLTWPKASCSTWLGA

SEQ ID NO: 12709 - protein, 110 aa, Homo sapiens
  VARIANT 1: note = misc_feature - Xaa can be any naturally occurring amino acid
XQAQLAVAYSQAFQLSGDEFYSDVAKGILQYVARSLSHRSGGFYSAEDADSPPERGQRPKEGAYYVWTVKEVQQLLPEPVLGATEPLTSGQLLMKHYGLTEAGNISPSQA

SEQ ID NO: 12710 - protein, 350 aa, Homo sapiens
MKPLVLLVALLLWPSSVPAYPSITVTPDEEQNLNHYIQVLENLVRSVPSGEPGREKKSNSPKHVYSIASKGSKFKELVTHGDASTENDVLTNPISEETTTFPTGGFTPEIGKKKHTESTPFWSIKPNNVSIVLHAEEPYIENEEPEPEPEPAAKQTEAPRMLPVVTESSTSPYVTSYKSPVTTLDKSTGIGISTESEDVPQLSGETAIEKPEEFGKHPESWNNDDILKKILDINSQVQQALLSDTSNPAYREDIEASKDHLKRSLALAAAAEHKLKTMYKSQLLPVGRTSNKIDDIETVINMLCNSRSKLYEYLDIKCVPPEMREKAATVFNTLKNMCRSRRVTALLKVY

SEQ ID NO: 12711 - protein, 65 aa, Homo sapiens
MKVTGIFLLSALALLSLSGNTGADSLGREAKCYNELNGCTKIYDPVCGTDGNTYPNECVLCFENR

SEQ ID NO: 12712 - protein, 79 aa, Homo sapiens
MKVTGIFLLSALALLSLSGNTGADSLGREAKCYNELNGCTKIYDPVCGTDGNTYPNECVLCFENRKRQTSILIQKSGPC

SEQ ID NO: 12713 - protein, 94 aa, Homo sapiens
MAAFPHKIIFFLVCSTLTHVAFSGIFNKRDFTRWPKPRCKMYIPLDPDYNADCPNVTAPVCASNGHTFQNECFFCVEQREFHYRIKFEKYGKCD

SEQ ID NO: 12714 - protein, 94 aa, Homo sapiens; identical to SEQ ID NO: 12713

SEQ ID NO: 12715 - protein, 54 aa, Homo sapiens
MYIPLDPDYNADCPNVTAPVCASNGHTFQNECFFCVEQREFHYRIKFEKYGKCD

SEQ ID NO: 12716 - protein, 47 aa, Homo sapiens
MAKSFPVFSLLSFILIHLVLSSVSGPRHWWPPRGIIKEISWKNQVLP

SEQ ID NO: 12717 - protein, 97 aa, Homo sapiens
MAKSFPVFSLLSFILIHLVLSSVSGPRHWWPPRGIIKVKCPYEKVNLSWYNGTVNPCPGLYQPICGTNFITYDNPCILCVESLKSHGRIRFYHDGKC

SEQ ID NO: 12718 - protein, 84 aa, Homo sapiens
MALSVLRLALLLLAVTFAASLIPQFGLFSKYRTPNCSQYRLPGCPRHFNPVCGSDMSTYANECTLCMKIREGGHNIKIIRNGPC

SEQ ID NO: 12719 - protein, 119 aa, Homo sapiens
MALSVLRLALLLLAVTFAGSARSGPGERGPPEKSGFGSQTGGGPCPAPGGLGDASLIPQFGLFSKYRTPNCSQYRLPGCPRHFNPVCGSDMSTYANECTLCMKIREGGHNIKIIRNGPC

SEQ ID NO: 12720 - protein, 88 aa, Homo sapiens [sequence omitted]

SEQ ID NO: 12721 - protein, 134 aa, Homo sapiens
MALSVLRLALLLLAVTFAGSARSGPGERGPPEKSGFGSQTGGGPCPAPGGLGDGTRAPVTGGSPEDLPASLIPQFGLFSKYRTPNCSQYRLPGCPRHFNPVCGSDMSTYANECTLCMKIREGGHNIKIIRNGPC

SEQ ID NO: 12722 - protein, 103 aa, Homo sapiens [sequence omitted]

SEQ ID NO: 12723 - protein, 134 aa, Homo sapiens
MALSVLRLALLLLAVTFAGSARSGPGERGPPEKSGFGSQTGGGPCPAPGGLGDGTRAPVTGGSPEDLPGKVVIILKSFEMDPADGAVYRKEDGETTFTGRLDKLHFPFFSFPVFLYMRFVNTHFLRAGMEDSHV

SEQ ID NO: 12724 - protein, 86 aa, Homo sapiens
MAVRQWVIALALAALLVVDREVPVAAGKLPFSRMPICEHMVESPTCSQMSNLVCGTDGLTYTNECQLCLARIKTKQDIQIMKDGKC

SEQ ID NO: 12725 - protein, 109 aa, Homo sapiens
MILGIGSSPHLLWTLEGTHIWSLLGDASHTDRLPEAGAGKLLSEVPVAAGKLPFSRMPICEHMVESPTCSQMSNLVCGTDGLTYTNECQLCLARIKTKQDIQIMKDGKC

SEQ ID NO: 12726 - protein, 68 aa, Homo sapiens
MKIATVSVLLPLALCLIQDAASKNEDQDKKFFQSLDGIMFINKCATCKMILEKEAKSQKRARHLARAP

SEQ ID NO: 12727 - protein, 869 aa, Homo sapiens
MKIATVSVLLPLALCLIQDAASKNEDQDKKFFQSLDGIMFINKCATCKMILEKEAKSQKRARHLARAPKATAPTELNCDDFKKGERDGDFICPDYYEAVCGTDGKTYDNRCALCAENAKTGSQIGVKSEGECKSSNPEQDVCSAFRPFVRDGRLGCTRENDPVLGPDGKTHGNKCAMCAELFLKEAENAKREGETRIRRNAEKDFCKEYEKQVRNGRLFCTRESDPVRGPDGRMHGNKCALCAEIFKQRFSEENSKTDQNLGKAEEKTKVKREIVKLCSQYQNQAKNGILFCTRENDPIRGPDGKMHGNLCSMCQAYFQAENEEKKKAEARARNKRESGKATSYAELCSEYRKLVRNGKLACTRENDPIQGPDGKVHGNTCSMCEVFFQAEEEEKKKKEGKSRNKRQSKSTASFEELCSEYRKSRKNGRLFCTRENDPIQGPDGKMHGNTCSMCEAFFQQEERARAKAKREAAKEICSEFRDQVRNGTLICTREHNPVRGPDGKMHGNKCAMCASVFKLEEEEKKNDKEEKGKVEAEKVKREAVQELCSEYRHYVRNGRLPCTRENDPIEGLDGKIHGNTCSMCEAFFQQEAKEKERAEPRAKVKREAEKETCDEFRRLLQNGKLFCTRENDPVRGPDGKTHGNKCAMCKAVFQKENEERKRKEEEDQRNAAGHGSSGGGGGNTQDECAEYREQMKNGRLSCTRESDPVRDADGKSYNNQCTMCKAKLEREAERKNEYSRSRSNGTGSESGKDTCDEFRSQMKNGKLICTRESDPVRGPDGKTHGNKCTMCKEKLEREAAEKKKKEDEDRSNTGERSNTGERSNDKEDLCREFRSMQRNGKLICTRENNPVRGPYGKMHINKCAMCQSI

SEQ ID NO: 12728 - protein, 1064 aa, Homo sapiens
MKIATVSVLLPLALCLIQDAASKNEDQEMCHEFQAFMKNGKLFCPQDKKFFQSLDGIMFINKCATCKMILEKEAKSQKRARHLARAPKATAPTELNCDDFKKGERDGDFICPDYYEAVCGTDGKTYDNRCALCAENAKTGSQIGVKSEGECKSSNPEQDVCSAFRPFVRDGRLGCTRENDPVLGPDGKTHGNKCAMCAELFLKEAENAKREGETRIRRNAEKDFCKEYEKQVRNGRLFCTRESDPVRGPDGRMHGNKCALCAEIFKQRFSEENSKTDQNLGKAEEKTKVKREIVKLCSQYQNQAKNGILFCTRENDPIRGPDGKMHGNLCSMCQAYFQAENEEKKKAEARARNKRESGKATSYAELCSEYRKLVRNGKLACTRENDPIQGPDGKVHGNTCSMCEVFFQAEEEEKKKKEGKSRNKRQSKSTASFEELCSEYRKSRKNGRLFCTRENDPIQGPDGKMHGNTCSMCEAFFQQEERARAKAKREAAKEICSEFRDQVRNGTLICTREHNPVRGPDGKMHGNKCAMCASVFKLEEEEKKNDKEEKGKVEAEKVKREAVQELCSEYRHYVRNGRLPCTRENDPIEGLDGKIHGNTCSMCEAFFQQEAKEKERAEPRAKVKREAEKETCDEFRRLLQNGKLFCTRENDPVRGPDGKTHGNKCAMCKAVFQKENEERKRKEEEDQRNAAGHGSSGGGGGNTQDECAEYREQMKNGRLSCTRESDPVRDADGKSYNNQCTMCKAKLEREAERKNEYSRSRSNGTGSESGKDTCDEFRSQMKNGKLICTRESDPVRGPDGKTHGNKCTMCKEKLEREAAEKKKKEDEDRSNTGERSNTGERSNDKEDLCREFRSMQRNGKLICTRENNPVRGPYGKMHINKCAMCQSIFDREANERKKKDEEKSSSKPSNNAKDECSEFRNYIRNNELICPRENDPVHGADGKFYTNKCYMCRAVFLTEALERAKLQEKPSHVRASQEEDSPDSFSSLDSEMCKDYRVLPRIGYLCPKDLKPVCGDDGQTYNNPCMLCHENLIRQTNTHIRSTGKCEESSTPGTTAASMPPSDE

SEQ ID NO: 12729 - protein, 1094 aa, Homo sapiens
MKIATVSVLLPLALCLIQDAASKNEDQEMCHEFQAFMKNGKLFCPQDKKFFQSLDGIMFINKCATCKMILEKEAKSQKRARHLARAPKATAPTELNCDDFKKGERDGDFICPDYYEAVCGTDGKTYDNRCALCAENAKTGSQIGVKSEGECKSSNPEQDVCSAFRPFVRDGRLGCTRENDPVLGPDGKTHGNKCAMCAELFLKEAENAKREGETRIRRNAEKDFCKEYEKQVRNGRLFCTRESDPVRGPDGRMHGNKCALCAEIFKQRFSEENSKTDQNLGKAEEKTKVKREIVKLCSQYQNQAKNGILFCTRENDPIRGPDGKMHGNLCSMCQAYFQAENEEKKKAEARARNKRESGKATSYAELCSEYRKLVRNGKLACTRENDPIQGPDGKVHGNTCSMCEVFFQAEEEEKKKKEGKSRNKRQSKSTASFEELCSEYRKSRKNGRLFCTRENDPIQGPDGKMHGNTCSMCEAFFQQEERARAKAKREAAKEICSEFRDQVRNGTLICTREHNPVRGPDGKMHGNKCAMCASVFKLEEEEKKNDKEEKGKVEAEKVKREAVQELCSEYRHYVRNGRLPCTRENDPIEGLDGKIHGNTCSMCEAFFQQEAKEKERAEPRAKVKREAEKETCDEFRRLLQNGKLFCTRENDPVRGPDGKTHGNKCAMCKAVFQKENEERKRKEEEDQRNAAGHGSSGGGGGNTQDECAEYREQMKNGRLSCTRESDPVRDADGKSYNNQCTMCKAKLEREAERKNEYSRSRSNGTGSESGKDTCDEFRSQMKNGKLICTRESDPVRGPDGKTHGNKCTMCKEKLEREAAEKKKKEDEDRSNTGERSNTGERSNDKEDLCREFRSMQRNGKLICTRENNPVRGPYGKMHINKCAMCQSIFDREANERKKKDEEKSSSKPSNNAKDQCRQVQNEAEDAKFRQPGRSLASVARMSTDECSEFRNYIRNNELICPRENDPVHGADGKFYTNKCYMCRAVFLTEALERAKLQEKPSHVRASQEEDSPDSFSSLDSEMCKDYRVLPRIGYLCPKDLKPVCGDDGQTYNNPCMLCHENLIRQTNTHIRSTGKCEESSTPGTTAASMPPSDE

SEQ ID NO: 12730 - protein, 916 aa, Homo sapiens
MKIATVSVLLPLALCLIQDAASKNEDQEMCHEFQAFMKNGKLFCPQDKKFFQSLDGIMFINKCATCKMILEKEAKSQKRARHLARAPKATAPTELNCDDFKKGERDGDFICPDYYEAVCGTDGKTYDNRCALCAENAKTGSQIGVKSEGECKSSNPEQDVCSAFRPFVRDGRLGCTRENDPVLGPDGKTHGNKCAMCAELFLKEAENAKREGETRIRRNAEKDFCKEYEKQVRNGRLFCTRESDPVRGPDGRMHGNKCALCAEIFKQRFSEENSKTDQNLGKAEEKTKVKREIVKLCSQYQNQAKNGILFCTRENDPIRGPDGKMHGNLCSMCQAYFQAENEEKKKAEARARNKRESGKATSYAELCSEYRKLVRNGKLACTRENDPIQGPDGKVHGNTCSMCEVFFQAEEEEKKKKEGKSRNKRQSKSTASFEELCSEYRKSRKNGRLFCTRENDPIQGPDGKMHGNTCSMCEAFFQQEERARAKAKREAAKEICSEFRDQVRNGTLICTREHNPVRGPDGKMHGNKCAMCASVFKLEEEEKKNDKEEKGKVEAEKVKREAVQELCSEYRHYVRNGRLPCTRENDPIEGLDGKIHGNTCSMCEAFFQQEAKEKERAEPRAKVKREAEKETCDEFRRLLQNGKLFCTRENDPVRGPDGKTHGNKCAMCKAVFQKENEERKRKEEEDQRNAAGHGSSGGGGGNTQDECAEYREQMKNGRLSCTRESDPVRDADGKSYNNQCTMCKAKLEREAERKNEYSRSRSNGTGSESGKDTCDEFRSQMKNGKLICTRESDPVRGPDGKTHGNKCTMCKEKLEREAAEKKKKEDEDRSNTGERSNTGERSNDKEDLCREFRSMQRNGKLICTRENNPVRGPYGKMHINKCAMCQSIFDREANERKKKDEEKSSSKPSNNAKVIY

SEQ ID NO: 12731 - protein, 201 aa, Homo sapiens
MKIATVSVLLPLALCLIQDAASKNEDQEMCHEFQAFMKNGKLFCPQDKKFFQSLDGIMFINKCATCKMILEKEAKSQKRARHLARAPKATAPTELNCDDFKKGERDGDFICPDYYEAVCGTDGKTYDNRCALCAENAKTGSQIGVKSEGECKSSNPEQFCEPVMVGEGEGRKDLIHVTLVFFQEIGSKLMARTVLCLSSGT

SEQ ID NO: 12732 - protein, 41 aa, Homo sapiens
MKLSGMFLLLSLALFCFLTGVFSQGGQVDCGEFQDPKVYCT

SEQ ID NO: 12733 - protein, 80 aa, Homo sapiens
MKLSGMFLLLSLALFCFLTGVFSQGGQVDCGEFQDPKVYCTRESNPHCGSDGQTYGNKCAFCKAIVKSGGKISLKHPGKC

SEQ ID NO: 12734 - protein, 80 aa, Homo sapiens; identical to SEQ ID NO: 12733

SEQ ID NO: 12735 - protein, 85 aa, Homo sapiens
MKITGGLLLLCTVVYFCSSSEAASLSPKKVDCSIYKKYPVVAIPCPITYLPVCGSDYITYGNECHLCTESLKSNGRVQFLHDGSC

SEQ ID NO: 12736 - protein, 59 aa, Homo sapiens
MTQVDCSIYKKYPVVAIPCPITYLPVCGSDYITYGNECHLCTESLKSNGRVQFLHDGSC

SEQ ID NO: 12737 - protein, 97 aa, Homo sapiens
MKGICSDAILVLATSMWMAFAIDFPLPMASERGQLDKTIVECLKNVNKCWFLSYIKPSEPICGSDQVTYSSDCHLCSKILFEGLNITKLYDGQCENS

SEQ ID NO: 12738 - protein, 86 aa, Homo sapiens
MRATAIVLLLALTLATMFSIECAKQTKQMVDCSHYKKLPPGQQRFCHHMYDPICGSDGKTYKNDCFFCSKVKKTDGTLKFVHFGKC

SEQ ID NO: 12739 - protein, 107 aa, Homo sapiens
MVFMNPSHHCFHYKTPPSSSGEHNEPRRLMGLTQPEHLQGIECAKQTKQMVDCSHYKKLPPGQQRFCHHMYDPICGSDGKTYKNDCFFCSKVKKTDGTLKFVHFGKC

SEQ ID NO: 12740 - protein, 294 aa, Homo sapiens
ELWGLKEGTYLFQLTVTSSDHPEDTANVTVTVLSTKQTEDYCLASNKVGRCRGSFPRWYYDPTEQICKSFVYGGCLGNKNNYLREEECILACRGVQVCSGTCQPTQFRCSNGCCIDSFLECDDTPNCPDASDEAACEKYTSGFDELQRIHFPSDKGHCVDLPDTGLCKESIPRWYYNPFSEHCARFTYGGCYGNKNNFEEEQQCLESCRGISKKDVFGLRREIPIPSTGSVEMAVAVFLVICIVVVVAILGYCFFKNQRKDFHGHHHHPPPTPASSTVSTTEDTEHLVYNHTTR

SEQ ID NO: 12741 - protein, 529 aa, Homo sapiens
MAPARTMARARLAPAGIPAVALWLLCTLGLQGTQAGPPPAPPGLPAGADCLNSFTAGVPGFVLDTNASVSNGATFLESPTVRRGWDCVRACCTTQNCNLALVELQPDRGEDAIAACFLINCLYEQNFVCKFAPREGFINYLTREVYRSYRQLRTQGFGGSGIPKAWAGIDLKVQPQEPLVLKDVENTDWRLLRGDTDVRVERKDPNQVELWGLKEGTYLFQLTVTSSDHPEDTANVTVTVLSTKQTEDYCLASNKVGRCRGSFPRWYYDPTEQICKSFVYGGCLGNKNNYLREEECILACRGVQGGPLRGSSGAQATFPQGPSMERRHPVCSGTCQPTQFRCSNGCCIDSFLECDDTPNCPDASDEAACEKYTSGFDELQRIHFPSDKGHCVDLPDTGLCKESIPRWYYNPFSEHCARFTYGGCYGNKNNFEEEQQCLESCRGISKKDVFGLRREIPIPSTGSVEMAVAVFLVICIVVVVAILGYCFFKNQRKDFHGHHHHPPPTPASSTVSTTEDTEHLVYNHTTRPL

SEQ ID NO: 12742 - protein, 513 aa, Homo sapiens
MAPARTMARARLAPAGIPAVALWLLCTLGLQGTQAGPPPAPPGLPAGADCLNSFTAGVPGFVLDTNASVSNGATFLESPTVRRGWDCVRACCTTQNCNLALVELQPDRGEDAIAACFLINCLYEQNFVCKFAPREGFINYLTREVYRSYRQLRTQGFGGSGIPKAWAGIDLKVQPQEPLVLKDVENTDWRLLRGDTDVRVERKDPNQVELWGLKEGTYLFQLTVTSSDHPEDTANVTVTVLSTKQTEDYCLASNKVGRCRGSFPRWYYDPTEQICKSFVYGGCLGNKNNYLREEECILACRGVQGPSMERRHPVCSGTCQPTQFRCSNGCCIDSFLECDDTPNCPDASDEAACEKYTSGFDELQRIHFPSDKGHCVDLPDTGLCKESIPRWYYNPFSEHCARFTYGGCYGNKNNFEEEQQCLESCRGISKKDVFGLRREIPIPSTGSVEMAVAVFLVICIVVVVAILGYCFFKNQRKDFHGHHHHPPPTPASSTVSTTEDTEHLVYNHTTRPL

SEQ ID NO: 12743 - protein, 302 aa, Homo sapiens
MAPARTMARARLAPAGIPAVALWLLCTLGLQGTQAGPPPAPPGLPAGADCLNSFTAGVPGFVLDTNASVSNGATFLESPTVRRGWDCVRACCTTQNCNLALVELQPDRGEDAIAACFLINCLYEQNFVCKFAPREGFINYLTREVYRSYRQLRTQGFGGSGIPKAWAGIDLKVQPQEPLVLKDVENTDWRLLRGDTDVRVERKDPNQVELWGLKEGTYLFQLTVTSSDHPEDTANVTVTVLSTKQTEDYCLASNKVGRCRGSFPRWYYDPTEQICKSFVYGGCLGNKNNYLREEECILACRG

SEQ ID NO: 12744 - protein, 472 aa, Homo sapiens
PPGLPAGADCLNSFTAGVPGFVLDTNASVSNGATFLESPTVRRGWDCVRACCTTQNCNLALVELQPDRGEDAIAACFLINCLYEQNFVCKFAPREGFINYLTREVYRSYRQLRTQGFGGSGIPKAWAGIDLKVQPQEPLVLKDVENTDWRLLRGDTDVRVERKDPNQVELWGLKEGTYLFQLTVTSSDHPEDTANVTVTVLSTKQTEDYCLASNKVGRCRGSFPRWYYDPTEQICKSFVYGGCLGNKNNYLREEECILACRGVQGGPLRGSSGAQATFPQVCSGTCQPTQFRCSNGCCIDSFLECDDTPNCPDASDEAACEKYTSGFDELQRIHFPSDKGHCVDLPDTGLCKESIPRWYYNPFSEHCARFTYGGCYGNKNNFEEEQQCLESCRGISKKDVFGLRREIPIPSTGSVEMAVAVFLVICIVVVVAILGYCFFKNQRKDFHGHHHHPPPTPASSTVSTTEDTEHLV

SEQ ID NO: 12745 - protein, 313 aa, Homo sapiens
  VARIANT 1: note = misc_feature - Xaa can be any naturally occurring amino acid
XEKAAEPQLSEHRVGSRDPSRAGSWDRNLGGPGPTQLTCAGHQHPRNPEARALKVTPLGRKAMAPARTMARARLAPAGIPAVALWLLCTLGLQGTQAGPPPAPPGLPAGADCLNSFTAGVPGFVLDTNASVSNGATFLESPTVRRGWDCVRACCTTQNCNLALVELQPDRGEDAIAACFLINCLYEQNFVCKFAPREGFINYLTREVYRSYRQLRTQGFGGSGIPKAWAGIDLKVQPQEPLVLKDVENTDWRLLRGDTDVRVELTVTSSDHPEDTANVTVTVLSTKQTEDYCLASNKVGRCRGSFPRWYYDPT

SEQ ID NO: 12746 - protein, 204 aa, Homo sapiens
  VARIANT 1: note = misc_feature - Xaa can be any naturally occurring amino acid
XLGNKNNYLREEECILACRGVQGGPLRGSSGAQATFPQGPSMERRHPDTSGFDELQRIHFPSDKGHCVDLPDTGLCKESIPRWYYNPFSEHCARFTYGGCYGNKNNFEEEQQCLESCRGISKKDVFGLRREIPIPSTGSVEMAVAVFLVICIVVVVAILGYCFFKNQRKDFHGHHHHPPPTPASSTVSTTEDTEHLVYNHTTRP

SEQ ID NO: 12747 - protein, 240 aa, Homo sapiens
  VARIANT 1: note = misc_feature - Xaa can be any naturally occurring amino acid
XVENTDWRLLRGDTDVRVERKDPNQVELWGLKEGTYLFQLTVTSSDHPEDTANVTVTVLSTKQTEDYCLASNKVGRCRGSFPRWYYDPTEQICKSFVYGGCLGNKNNYLREEECILACRGVQGPSMERRHPDTSGFDELQRIHFPSDKGHCVDLPDTGLCKESIPRWYYNPFSEHCARFTYGGCYGNKNNFEEEQQCLESCRGISKKDVFGLRREIPIPSTGSVEMAVAVFLVICIVVVV

SEQ ID NO: 12748 - protein, 175 aa, Homo sapiens [sequence omitted]

SEQ ID NO: 12749 - protein, 252 aa, Homo sapiens
MAQLCGLRRSRAFLALLGSLLLSGVLAADRERSIHDFCLVSKVVGRCRASMPRWWYNVTDGSCQLFVYGGCDGNSNNYLTKEECLKKCATVTENATGDLATSRNAADSSVPSAPRRQDSEDHSSDMFNYEEYCTANAVTGPCRASFPRWYFDVERNSCNNFIYGGCRGNKNSYRSEEACMLRCFRQQENPPLPLGSKVVVLAGLFVMVLILFLGASMVYLIRVARRNQERALRTVWSSGDDKEQLVKNTYVL

SEQ ID NO: 12750 - protein, 195 aa, Homo sapiens
MAQLCGLRRSRAFLALLGSLLLSGVLAADRERSIHENATGDLATSRNAADSSVPSAPRRQDSEDHSSDMFNYEEYCTANAVTGPCRASFPRWYFDVERNSCNNFIYGGCRGNKNSYRSEEACMLRCFRQQENPPLPLGSKVVVLAGLFVMVLILFLGASMVYLIRVARRNQERALRTVWSSGDDKEQLVKNTYVL

SEQ ID NO: 12751 - protein, 52 aa, Homo sapiens
MPRWWYNVTDGSCQLFVYGGCDGNSNNYLTKEECLKKCATVTENATGDLATS

SEQ ID NO: 12752 - protein, 62 aa, Homo sapiens
MPRWWYNVTDGSCQLFVYGGCDGNSNNYLTKEECLKKCATVTENATGDLATSRNAADSSVPS

SEQ ID NO: 12753 - protein, 202 aa, Homo sapiens
MPRWWYNVTDGSCQLFVYGGCDGNSNNYLTKEECLKKCATVTENATGDLATSRNAADSSVPSAPRRQDSEDHSSDMFNYEEYCTANAVTGPCRASFPRWYFDVERNSCNNFIYGGCRGNKNSYRSEEACMLRCFRQQENPPLPLGSKVVVLAGLFVMVLILFLGASMVYLIRVARRNQERALRTVWSSGDDKEQLVKNTYVL

SEQ ID NO: 12754 - protein, 130 aa, Homo sapiens
  VARIANT 1: note = misc_feature - Xaa can be any naturally occurring amino acid
XPRRQDSEDHSSDMFNYEEYCTANAVTGPCRASFPRWYFDVERNSCNNFIYGGCRGNKNSYRSEEACMLRCFRQQENPPLPLGSKGKWPLTLLLPSACLLPSLTELSPAQLWFTLSFTVNIILAESHVSA

SEQ ID NO: 12755 - protein, 106 aa, Homo sapiens
  VARIANT 1: note = misc_feature - Xaa can be any naturally occurring amino acid
XRGTPAITSSMEAAGAIRTATALRRPACSAASAVCSLPGQQENPPLPLGSKVVVLAGLFVMVLILFLGASMVYLIRVARRNQERALRTVWSSGDDKEQLVKNTYVL

SEQ ID NO: 12756 - protein, 89 aa, Homo sapiens
MQLQASLSFLLILTLCLELRSELARDTIKDLLPNVCAFPMEKGPCQTYMTRWFFNFETGECELFAYGGCGGNSNNFLRKEKCEKFCKFT

SEQ ID NO: 12757 - protein, 99 aa, Homo sapiens
MKSAKLGFLLRFFIFCSLNTLLLGGVNKIAEKICGDLKDPCKLDMNFGSCYEVHFRYFYNRTSKRCETFVFSGCNGNLNNFKLKIEREVACVAKYKPPR

SEQ ID NO: 12758 - protein, 377 aa, Homo sapiens
DDYFRNWNPNKPFDQALDPSKDPCLKVKCSPHKVCVTQDYQTALCVSRKHLLPRQKKGNVAQKHWVGPSNLVKCKPCPVAQSAMVCGSDGHSYTSKCKLEFHACSTGKSLATLCDGPCPCLPEPEPPKHKAERSACTDKELRNLASRLKDWFGALHEDANRVIKPTSSNTAQGRFDTSILPICKDSLGWMFNKLDMNYDLLLDPSEINAIYLDKYEPCIKPLFNSCDSFKDGKLSNNEWCYCFQKPGGLPCQNEMNRIQKLSKGKSLLGAFIPRCNEEGYYKATQCHGSTGQCWCVDKYGNELAGSRKQGAVSCEEEQETSGDFGSGGSVVLLDDLEYERELGPKDKEGKLRVHTRAVTEDDEDEDDDKEDEVGYIW

SEQ ID NO: 12759 - protein, 139 aa, Homo sapiens
MPAIAVLAAAAAAWCFLQVESRHLDALAGGAGPNHGNFLDNDQWLSTVSQYDRDKYWNRFRDDDYFRNWNPNKPFDQALDPSKDPCLKVKCSPHKVCVTQDYQTALCVSRKHLLPRQKKGNVAQKHWVGPSNLVKCKPC

SEQ ID NO: 12760 - protein, 439 aa, Homo sapiens
MPAIAVLAAAAAAWCFLQVESRHLDALAGGAGPNHGNFLDNDQWLSTVSQYDRDKYWNRFRDDDYFRNWNPNKPFDQALDPSKDPCLKVKCSPHKVCVTQDYQTALCVSRKHLLPRQKKGNVAQKHWVGPSNLVKCKPCPVAQSAMVCGSDGHSYTSKCKLEFHACSTGKSLATLCDGPCPCLPEPEPPKHKAERSACTDKELRNLASRLKDWFGALHEDANRVIKPTSSNTAQGRFDTSILPICKDSLGWMFNKLDMNYDLLLDPSEINAIYLDKYEPCIKPLFNSCDSFKDGKLSNNEWCYCFQKPGGLPCQNEMNRIQKLSKGKSLLGAFIPRCNEEGYYKATQCHGSTGQCWCVDKYGNELAGSRKQGAVSCEEEQETSGDFGSGGSVVLLDDLEYERELGPKDKEGKLRVHTRAVTEDDEDEDDDKEDEVGYIW

SEQ ID NO: 12761 - protein, 67 aa, Homo sapiens
MVCGSDGHSYTSKCKLEFHACSTGKSLATLCDGPCPCLPEPEPPKHKAERSACTDKELRNLASRLKD

SEQ ID NO: 12762 - protein, 424 aa, Homo sapiens
MRAPGCGRLVLPLLLLAAAALAEGDAKGLKEGETPGNFMEDEQWLSSISQYSGKIKHWNRFRDEVEDDYIKSWEDNQQGDEALDTTKDPCQKVKCSRHKVCIAQGYQRAMCISRKKLEHRIKQPTVKLHGNKDSICKPCHMAQLASVCGSDGHTYSSVCKLEQQACLSSKQLAVRCEGPCPCPTEQAATSTADGKPETCTGQDLADLGDRLRDWFQLLHENSKQNGSASSVAGPASGLDKSLGASCKDSIGWMFSKLDTSADLFLDQTELAAINLDKYEVCIRPFFNSCDTYKDGRVSTAEWCFCFWREKPPCLAELERIQIQEAAKKKPGIFIPSCDEDGYYRKMQCDQSSGDCWCVDQLGLELTGTRTHGSPDCDDIVGFSGDFGSGVGWEDEEEKETEEAGEEAEEEEGEAGEADDGGYIW

SEQ ID NO: 12763 - protein, 424 aa, Homo sapiens; identical to SEQ ID NO: 12762

SEQ ID NO: 12764 - protein, 423 aa, Homo sapiens [sequence omitted]

SEQ ID NO: 12765 - protein, 77 aa, Homo sapiens
MRAPGCGRLVLPLLLLAAAALAEGDAKGLKEGETPGNFMEDEQWLSSISQYSGKIKHWNRFRDVPSSDPPSTTQATP

SEQ ID NO: 12766 - protein, 385 aa, Homo sapiens
MITQDHIHMSSGLSQDDYFRTWSPGKPFDQALDPAKDPCLKMKCSRHKVCIAQDSQTAVCISHRRLTHRMKEAGVDHRQWRGPILSTCKQCPVVYPSPVCGSDGHTYSFQCKLEYQACVLGKQISVKCEGHCPCPSDKPTSTSRNVKRACSDLEFREVANRLRDWFKALHESGSQNKKTKTLLRPERSRFDTSILPICKDSLGWMFNRLDTNYDLLLDQSELRSIYLDKNEQCTKAFFNSCDTYKDSLISNNEWCYCFQRQQDPPCQTELSNIQKRQGVKKLLGQYIPLCDEDGYYKPTQCHGSVGQCWCVDRYGNEVMGSRINGVADCAIDFEISGDFASGDFHEWTDDEDDEDDIMNDEDEIEDDDEDEGDDDDGGDDHDVYI

SEQ ID NO: 12767 - protein, 344 aa, Homo sapiens
MKCSRHKVCIAQDSQTAVCISHRRLTHRMKEAGVDHRQWRGPILSTCKQCPVVYPSPVCGSDGHTYSFQCKLEYQACVLGKQISVKCEGHCPCPSDKPTSTSRNVKRACSDLEFREVANRLRDWFKALHESGSQNKKTKTLLRPERSRFDTSILPICKDSLGWMFNRLDTNYDLLLDQSELRSIYLDKNEQCTKAFFNSCDTYKDSLISNNEWCYCFQRQQDPPCQTELSNIQKRQGVKKLLGQYIPLCDEDGYYKPTQCHGSVGQCWCVDRYGNEVMGSRINGVADCAIDFEISGDFASGDFHEWTDDEDDEDDIMNDEDEIEDDDEDEGDDDDGGDDHDVYI

SEQ ID NO: 12768 - protein, 316 aa, Homo sapiens
MKEAGVDHRQWRGPILSTCKQCPVVYPSPVCGSDGHTYSFQCKLEYQACVLGKQISVKCEGHCPCPSDKPTSTSRNVKRACSDLEFREVANRLRDWFKALHESGSQNKKTKTLLRPERSRFDTSILPICKDSLGWMFNRLDTNYDLLLDQSELRSIYLDKNEQCTKAFFNSCDTYKDSLISNNEWCYCFQRQQDPPCQTELSNIQKRQGVKKLLGQYIPLCDEDGYYKPTQCHGSVGQCWCVDRYGNEVMGSRINGVADCAIDFEISGDFASGDFHEWTDDEDDEDDIMNDEDEIEDDDEDEGDDDDGGDDHDVYI

SEQ ID NO: 12769 - protein, 63 aa, Homo sapiens
MLKVSAVLCVCAAAWCSQSLAAAAAVAAAGGRSDGGNFLDDKQWLTTISQYDKEVGQWNKFRD

SEQ ID NO: 12770 - protein, 338 aa, Homo sapiens
MLKVSAVLCVCAAAWCSQSLAAAAAVAAAGGRSDGGNFLDDKQWLTTISQYDKEVGQWNKFRDCKLEYQACVLGKQISVKCEGHCPCPSDKPTSTSRNVKRACSDLEFREVANRLRDWFKALHESGSQNKKTKTLLRPERSRFDTSILPICKDSLGWMFNRLDTNYDLLLDQSELRSIYLDKNEQCTKAFFNSCDTYKDSLISNNEWCYCFQRQQDPPCQTELSNIQKRQGVKKLLGQYIPLCDEDGYYKPTQCHGSVGQCWCVDRYGNEVMGSRINGVADCAIDFEISGDFASGDFHEWTDDEDDEDDIMNDEDEIEDDDEDEGDDDDGGDDHDVYI

SEQ ID NO: 12771 - protein, 173 aa, Homo sapiens [sequence omitted]

SEQ ID NO: 12772 - protein, 161 aa, Homo sapiens
MLKVSAVLCVCAAAWCSQSLAAAAAVAAAGGRSDGGNFLDDKQWLTTISQYDKEVGQWNKFRDDDYFRTWSPGKPFDQALDPAKDPCLKMKCSRHKVCIAQDSQTAVCISHRRLTHRMKEAGVDHRQWRGPILSTCKQCPVVYPSPVCGSDGHTYSFQCKL

SEQ ID NO: 12773 - protein, 433 aa, Homo sapiens
MLKVSAVLCVCAAAWCSQSLAAAAAVAAAGGRSDGGNFLDDKQWLTTISQYDKEVGQWNKFRDDDYFRTWSPGKPFDQALDPAKDPCLKMKCSRHKVCIAQDSQTAVCISHRRLTHRMKEAGVDHRQWRGPILSTCKQCPVVYPSPVCGSDGHTYSFQCKLEYQACVLGKQISVKCEGHCPCPSDKPTSTSRNVKRACSDLEFREVANRLRDWFKALHESGSQNKKTKTLLRPERSRFDTSILPICKDSLGWMFNRLDTNYDLLLDQSELRSIYLDKNEQCTKAFFNSCDTYKDSLISNNEWCYCFQRQQDPPCQTELSNIQKRQGVKKLLGQYIPLCDEDGYYKPTQCHGSVGQCWCVDRYGNEVMGSRINGVADCAIDFEISGDFASGDFHEWTDDEDDEDDIMNDEDEIEDDDEDEGDDDDGGDDHDVYI

SEQ ID NO: 12774 - protein, 313 aa, Homo sapiens
MLKVSAVLCVCAAAWCSQSLAAAAAVAAAGGRSDGGNFLDDKQWLTTISQYDKEVGQWNKFRDDDYFRTWSPGKPFDQALDPAKDPCLKMKCSRHKVCIAQDSQTAVCISHRRLTHRMKEAGVDHRQWRGPILSTCKQCPVVYPSPVCGSDGHTYSFQCKLEYQACVLGKQISVKCEGHCPCPSDKPTSTSRNVKRACSDLEFREVANRLRDWFKALHESGSQNKKTKTLLRPERSRFDTSILPICKDSLGWMFNRLDTNYDLLLDQSELRSIYLDKNEQCTKAFFNSCDTYKDSLISNNEWCYCFQRQQGKR

SEQ ID NO: 12775 - protein, 433 aa, Homo sapiens; identical to SEQ ID NO: 12773

SEQ ID NO: 12776 - protein, 433 aa, Homo sapiens; identical to SEQ ID NO: 12773

SEQ ID NO: 12777 - protein, 393 aa, Homo sapiens
MLKVSAVLCVCAAAWCSQSLAAAAAVAAAGGRSDGGNFLDDKQWLTTISQYDKEVGQWNKFRDDDYFRTWSPGKPFDQALDPAKDPCLKMKCSRHKVCIAQDSQTAVCISHRRLTHRMKEAGVDHRQWRGPILSTCKQCPVVYPSPVCGSDGHTYSFQCKLEYQACVLGKQISVKCEGHCPCPSDKPTSTSRNVKRGFDTSILPICKDSLGWMFNRLDTNYDLLLDQSELRSIYLDKNEQCTKAFFNSCDTYKDSLISNNEWCYCFQRQQDPPCQTELSNIQKRQGVKKLLGQYIPLCDEDGYYKPTQCHGSVGQCWCVDRYGNEVMGSRINGVADCAIDFEISGDFASGDFHEWTDDEDDEDDIMNDEDEIEDDDEDEGDDDDGGDDHDVYI

SEQ ID NO: 12778 - protein, 89 aa, Homo sapiens
MLKVSAVLCVCAAAWCSQSLAAAAAVAAAGGRSDGGNFLDDKQWLTTISQYDKEVGQWNKFRDDDYFRTWSPGKPFDQALSFHDLGIFV

SEQ ID NO: 12779 - protein, 79 aa, Homo sapiens
MLKVSAVLCVCAAAWCSQSLAAAAAVAAAGGRSDGGNFLDDKQWLTTISQYDKEVGQWNKFRDDDYFRTWSPGKPFDQG

SEQ ID NO: 12780 - protein, 79 aa, Homo sapiens; identical to SEQ ID NO: 12779

SEQ ID NO: 12781 - protein, 71 aa, Homo sapiens
MLKVSAVLCVCAAAWCSQSLAAAAAVAAAGGRSDGGNFLDDKQWLTTISQYDKEVGQWNKFRDDERSRSRP

SEQ ID NO: 12782 - protein, 115 aa, Homo sapiens
MLKVSAVLCVCAAAWCSQSLAAAAAVAAAGGRSDGGNFLDDKQWLTTISQYDKEVGQWNKFRDEVEDDYFRTWSPGKPFDQALDPAKDPCLKMKCSRHKVCIAQDSQTAVCISHR

SEQ ID NO: 12783 - protein, 115 aa, Homo sapiens; identical to SEQ ID NO: 12782

SEQ ID NO: 12784 - protein, 436 aa, Homo sapiens
MLKVSAVLCVCAAAWCSQSLAAAAAVAAAGGRSDGGNFLDDKQWLTTISQYDKEVGQWNKFRDEVEDDYFRTWSPGKPFDQALDPAKDPCLKMKCSRHKVCIAQDSQTAVCISHRRLTHRMKEAGVDHRQWRGPILSTCKQCPVVYPSPVCGSDGHTYSFQCKLEYQACVLGKQISVKCEGHCPCPSDKPTSTSRNVKRACSDLEFREVANRLRDWFKALHESGSQNKKTKTLLRPERSRFDTSILPICKDSLGWMFNRLDTNYDLLLDQSELRSIYLDKNEQCTKAFFNSCDTYKDSLISNNEWCYCFQRQQDPPCQTELSNIQKRQGVKKLLGQYIPLCDEDGYYKPTQCHGSVGQCWCVDRYGNEVMGSRINGVADCAIDFEISGDFASGDFHEWTDDEDDEDDIMNDEDEIEDDDEDEGDDDDGGDDHDVYI

SEQ ID NO: 12785 - protein, 436 aa, Homo sapiens; identical to SEQ ID NO: 12784

SEQ ID NO: 12786 - protein, 436 aa, Homo sapiens; identical to SEQ ID NO: 12784

SEQ ID NO: 12787 - protein, 436 aa, Homo sapiens; identical to SEQ ID NO: 12784

SEQ ID NO: 12788 - protein, 122 aa, Homo sapiens
MLKVSAVLCVCAAAWCSQSLAAAAAVAAAGGRSDGGNFLDDKQWLTTISQYDKEVGQWNKFRDEVEDDYFRTWSPGKPFDQALDPAKDPCLKMKCSRHKVCIAQDSQTAVCISHRRLTHSAN

SEQ ID NO: 12789 - protein, 122 aa, Homo sapiens; identical to SEQ ID NO: 12788

SEQ ID NO: 12790 - protein, 64 aa, Homo sapiens
MLKVSAVLCVCAAAWCSQSLAAAAAVAAAGGRSDGGNFLDDKQWLTTISQYDKEVGQWNKFRDL

SEQ ID NO: 12791 - protein, 83 aa, Homo sapiens
NFLDDKQWLTTISQYDKEVGQWNKFRDDDYFRTWSPGKPFDQALDPAKDPCLKMKCSRHKVCIAQDSQTAVCISHRRLTHSAN

SEQ ID NO: 12792 - protein, 807 aa, Homo sapiens
MRLSPAPLKLSRTPALLALALPLAAALAFSDETLDKVPKSEGYCSRILRAQGTRREGYTEFSLRVEGDPDFYKPGTSYRVTLSAAPPSYFRGFTLIALRENREGDKEEDHAGTFQIIDEEETQFMSNCPVAVTESTPRRRTRIQVFWIAPPAGTGCVILKASIVQKRIIYFQDEGSLTKKLCEQDSTFDGVTDKPILDCCACGTAKYRLTFYGNWSEKTHPKDYPRRANHWSAIIGGSHSKNYVLWEYGGYASEGVKQVAELGSPVKMEEEIRQQSDEVLTVIKAKAQWPAWQPLNVRAAPSAEFSVDRTRHLMSFLTMMGPSPDWNVGLSAEDLCTKECGWVQKVVQDLIPWDAGTDSGVTYESPNKPTIPQEKIRPLTSLDHPQSPFYDPEGGSITQVARVVIERIARKGEQCNIVPDNVDDIVADLAPEEKDEDDTPETCIYSNWSPWSACSSSTCDKGKRMRQRMLKAQLDLSVPCPDTQDFQPCMGPGCSDEDGSTCTMSEWITWSPCSISCGMGMRSRERYVKQFPEDGSVCTLPTEETEKCTVNEECSPSSCLMTEWGEWDECSATCGMGMKKRHRMIKMNPADGSMCKAETSQAEKCMMPECHTIPCLLSPWSEWSDCSVTCGKGMRTRQRMLKSLAELGDCNEDLEQVEKCMLPECPIDCELTEWSQWSECNKSCGKGHVIRTRMIQMEPQFGGAPCPETVQRKKCRIRKCLRNPSIQKLRWREARESRRSEQLKEESEGEQFPGCRMRPWTAWSECTKLCGGGIQERYMTVKKRFKSSQFTSCKDKKEIRACNVHPC

SEQ ID NO: 12793 - protein, 8 aa, Homo sapiens
MENPSPAA

SEQ ID NO: 12794 - protein, 16 aa, Homo sapiens
MENPSPAAALGKALCA

SEQ ID NO: 12795 - protein, 17 aa, Homo sapiens
MENPSPAAALGKALCAL

SEQ ID NO: 12796 - protein, 24 aa, Homo sapiens
MENPSPAAALGKALCALLLATLGA

SEQ ID NO: 12797 - protein, 61 aa, Homo sapiens
MENPSPAAALGKALCALLLATLGAAGQPLGGESICSARALAKYSITFTGKWSQTAFPKQYP

SEQ ID NO: 12798 - protein, 64 aa, Homo sapiens
MENPSPAAALGKALCALLLATLGAAGQPLGGESICSARALAKYSITFTGKWSQTAFPKQYPLFR

SEQ ID NO: 12799 - protein, 108 aa, Homo sapiens
MENPSPAAALGKALCALLLATLGAAGQPLGGESICSARALAKYSITFTGKWSQTAFPKQYPLFRPPAQWSSLLGAAHSSDYSMWRKNQYVSNGLRDFAERGEAWALMK

SEQ ID NO: 12800 - protein, 331 aa, Homo sapiens
MENPSPAAALGKALCALLLATLGAAGQPLGGESICSARALAKYSITFTGKWSQTAFPKQYPLFRPPAQWSSLLGAAHSSDYSMWRKNQYVSNGLRDFAERGEAWALMKEIEAAGEALQSVHAVFSAPAVPSGTGQTSAELEVQRRHSLVSFVVRIVPSPDWFVGVDSLDLCDGDRWREQAALDLYPYDAGTDSGFTFSSPNFATIPQDTVTEITSSSPSHPANSFYYPRLKALPPIARVTLVRLRQSPRAFIPPAPVLPSRDNEIVDSASVPETPLDCEVSLWSSWGLCGGHCGRLGTKSRTRYVRVQPANNGSPCPELEEEAECVPDNCV

SEQ ID NO: 12801 - protein, 331 aa, Homo sapiens; identical to SEQ ID NO: 12800

SEQ ID NO: 12802 - protein, 331 aa, Homo sapiens; identical to SEQ ID NO: 12800

SEQ ID NO: 12803 - protein, 314 aa, Homo sapiens
MRIAVICFCLLGITCAIPVKQADSGSSEEKQLYNKYPDAVATWLNPDPSQKQNLLAPQNAVSSEETNDFKQETLPSKSNESHDHMDDMDDEDDDDHVDSQDSIDSNDSDDVDDTDDSHQSDESHHSDESDELVTDFPTDLPATEVFTPVVPTVDTYDGRGDSVVYGLRSKSKKFRRPDIQYPDATDEDITSHMESEELNGAYKAIPVAQDLNAPSDWDSRGKDSYETSQLDDQSAETHSHKQSRLYKRKANDESNEHSDVIDSQELSKVSREFHSHEFHSHEDMLVVDPKSKEEDKHLKFRISHELDSASSEVN

SEQ ID NO: 12804 - protein, 292 aa, Homo sapiens
MRIAVICFCLLGITCAIPVKQADSGSSEEKQLYNKYPDAVATWLNPDPSQKQNLLAPQNAVSSEETNDFKQETLPSKSNESHDHMDDMDDEDDDSHQSDESHHSDESDELVTDFPTDLPATEVFTPVVPTVDTYDGRGDSVVYGLRSKSKKFRRPDIQYPDATDEDITSHMESEELNGAYKAIPVAQDLNAPSDWDSRGKDSYETSQLDDQSAETHSHKQSRLYKRKANDESNEHSDVIDSQELSKVSREFHSHEFHSHEDMLVVDPKSKEEDKHLKFRISHELDSASSEVN

SEQ ID NO: 12805 - protein, 300 aa, Homo sapiens
MRIAVICFCLLGITCAIPVKQADSGSSEEKQLYNKYPDAVATWLNPDPSQKQNLLAPQTLPSKSNESHDHMDDMDDEDDDDHVDSQDSIDSNDSDDVDDTDDSHQSDESHHSDESDELVTDFPTDLPATEVFTPVVPTVDTYDGRGDSVVYGLRSKSKKFRRPDIQYPDATDEDITSHMESEELNGAYKAIPVAQDLNAPSDWDSRGKDSYETSQLDDQSAETHSHKQSRLYKRKANDESNEHSDVIDSQELSKVSREFHSHEFHSHEDMLVVDPKSKEEDKHLKFRISHELDSASSEVN

SEQ ID NO: 12806 - protein, 287 aa, Homo sapiens
MRIAVICFCLLGITCAIPVKQADSGSSEEKQNAVSSEETNDFKQETLPSKSNESHDHMDDMDDEDDDDHVDSQDSIDSNDSDDVDDTDDSHQSDESHHSDESDELVTDFPTDLPATEVFTPVVPTVDTYDGRGDSVVYGLRSKSKKFRRPDIQYPDATDEDITSHMESEELNGAYKAIPVAQDLNAPSDWDSRGKDSYETSQLDDQSAETHSHKQSRLYKRKANDESNEHSDVIDSQELSKVSREFHSHEFHSHEDMLVVDPKSKEEDKHLKFRISHELDSASSEVN

SEQ ID NO: 12807 - protein, 241 aa, Homo sapiens
MRIAVICFCLLGITCAIPVKQADSGSSEEKQTLPSKSNESHDHMDDMDDEDDDDHVDSQDSIDSNDSDDVDDTDDSHQSDESHHSDESDELVTDFPTDLPATEVFTPVVPTVDTYDGRGDSVVYGLRSKSKKFRRPDIQYPDATDEDITSHMESEELNGAYKAIPVAQDLNAPSDWDSRGKDSYETSQLDDQSAETHSHKQSRLYKRKANDESNEHSDVIDSQELSKVSREFHSHEFHSHE

SEQ ID NO: 12808 - protein, 211 aa, Homo sapiens
MISRMEKMTMMMKILIMFALGMNYWSCSGFPVYDYDPSSLRDALSASVVKVNSQSLSPYLFRAFRSSLKRVEVLDENNLVMNLEFSIRETTCRKDSGEDPATCAFQRDYYVSTAVCRSTVKVSAQQVQGVHARCSWSSSTSESYSSEEMIFGDMLGSHKWRNNYLFGLISDESISEQFYDRSLGIMRRVLPPGNRRYPNHRHRARINTDFE

SEQ ID NO: 12809 - protein, 211 aa, Homo sapiens; identical to SEQ ID NO: 12808

SEQ ID NO: 12810 - protein, 131 aa, Homo sapiens
MNLEFSIRETTCRKDSGEDPATCAFQRDYYVSTAVCRSTVKVSAQQVQGVHARCSWSSSTSESYSSEEMIFGDMLGSHKWRNNYLFGLISDESISEQFYDRSLGIMRRVLPPGNRRYPNHRHRARINTDFE

SEQ ID NO: 12811 - protein, 151 aa, Homo sapiens
MNWAPATCWALLLAAAFLCDSGAAKGGRGGARGSARGGVRGGARGASRVRVRPAQRYGAPGSSLRVAAAGAAAGAAAGAAAGLAAGSGWRRAAGPGERGLEDEEDGVPGGNGTGPGIYSYRAWTSGAGPTRGPRLCLVLGGALGALGLLRP

SEQ ID NO: 12812 - protein, 442 aa, Homo sapiens
MRRTRRPRFVLMNKMDDLNLHYRFLNWRRRIREIREVRAFRYQERFKHILVDGDTLSYHGNSGEVGCYVASRPLTKDSNYFEVSIVDSGVRGTIAVGLVPQYYSLDHQPGWLPDSVAYHADDGKLYNGRAKGRQFGSKCNSGDRIGCGIEPVSFDVQTAQIFFTKNGKRVGSTIMPMSPDGLFPAVGMHSLGEEVRLHLNAELGREDDSVMMVDSYEDEWGRLHDVRVCGTLLEYLGKGKSIVDVGLAQARHPLSTRSHYFEVEIVDPGEKCYIALGLARKDYPKNRHPGWSRGSVAYHADDGKIFHGSGVGDPFGPRCYKGDIMGCGIMFPRDYILDSEGDSDDSCDTVILSPTARAVRNVRNVMYLHQEGEEEEEEEEEEEDGEEIEPEHEGRKVVVFFTRNGKIIGKKDAVVPSGGFFPTIGMLSCGEKVKVDLHPLSG

SEQ ID NO: 12813 - protein, 165 aa, Homo sapiens
MRRTRRPRFVLMNKMDDLNLHYRFLNWRRRIREIREVRAFRYQERFKHILVDGDTLSYHGNSGEVGCYVASRPLTKDSNYFEVSIVDSGVRGTIAVGLVPQYYSLDHQPGWLPDSVAYHADDGKWALPSCPCPQMDCSQQWACTPWVRRCGCTSTLSWAVRTTAS

SEQ ID NO: 12814 - protein, 479 aa, Homo sapiens
MRRTRRPRVLLCQPGWNVVAQSELTAALTCQTQAIFSLLSSWDYRFVLMNKMDDLNLHYRFLNWRRRIREIREVRAFRYQERFKHILVDGDTLSYHGNSGEVGCYVASRPLTKDSNYFEVSIVDSGVRGTIAVGLVPQYYSLDHQPGWLPDSVAYHADDGKLYNGRAKGRQFGSKCNSGDRIGCGIEPVSFDVQTAQIFFTKNGKRVGSTIMPMSPDGLFPAVGMHSLGEEVRLHLNAELGREDDSVMMVDSYEDEWGRLHDVRVCGTLLEYLGKGKSIVDVGLAQARHPLSTRSHYFEVEIVDPGEKCYIALGLARKDYPKNRHPGWSRGSVAYHADDGKIFHGSGVGDPFGPRCYKGDIMGCGIMFPRDYILDSEGDSDDSCDTVILSPTARAVRNVRNVMYLHQEGEEEEEEEEEEEDGEEIEPEHEGRKVVVFFTRNGKIIGKKDAVVPSGGFFPTIGMLSCGEKVKVDLHPLSG

SEQ ID NO: 12815 - protein, 60 aa, Homo sapiens
  VARIANT 1: note = misc_feature - Xaa can be any naturally occurring amino acid
XDGEEIEPEHEGRKVVVFFTRNGKIIGKKDAVVPSGGFFPTIGMLSCGEKVKVDLHPLSG

SEQ ID NO: 12816 - protein, 207 aa, Homo sapiens
MALLFARSLRLCRWGAKRLGVASTEAQRGVSFKLEEKTAHSSLALFRDDTGVKYGLVGLEPTKVALNVERFREWAVVLADTAVTSGRHYWEVTVKRSQQFRIGVADVDMSRDSCIGVDDRSWVFTYAQRKWYTMLANEKAPVEGIGQPEKVGLLLEYEAQKLSLVDVSQVSVVHTLQTDFRGPVVPAFALWDGELLTHSGLEVPEGL

SEQ ID NO: 12817 - protein, 59 aa, Homo sapiens
MIVLGWMFFVGLVCYMGTFPELMPPTLKWQERWPVQESKTQLRRRALGEDLLQNHVEGI

SEQ ID NO: 12818 - protein, 59 aa, Homo sapiens; identical to SEQ ID NO: 12817

SEQ ID NO: 12819 - protein, 56 aa, Homo sapiens
MIVLGWMFFVGLVCYMGTFPELMPPTLKWQERWPVQESKTQLRRRALGLALPPRLE

SEQ ID NO: 12820 - protein, 76 aa, Homo sapiens
MIVLGWMFFVGLVCYMGTFPELMPPTLKWQERWPVQESKTQLRRRALGTMWKGYKYPPGGTPVEVSKDDPGEVMQL

SEQ ID NO: 12821 - protein, 40 aa, Homo sapiens
MIVVLWMLLIAGTMWKGYKYPPGGTPVEVSKDDPGEVMQL

SEQ ID NO: 12822 - protein, 40 aa, Homo sapiens; identical to SEQ ID NO: 12821

SEQ ID NO: 12823 - protein, 116 aa, Homo sapiens
MKGLRSLAATTLALFLVFVFLGNSSCAPQRLLERRNWTPQAMLYLKGAQGRRFISDQSRRKDLSDRPLPERRSPNPQLLTIPEAATILLASLQKSPEDEEKNFDQTRFLEDSLLNW

SEQ ID NO: 12824 - protein, 36 aa, Homo sapiens
MLYLKGAQGRRFISDQSRRKDLSDRPLPDEAQIPNY

SEQ ID NO: 12825 - protein, 158 aa, Homo sapiens
MMQKLLKCSRLVLALALILVLESSVQGYPTRRARYQWVRCNPDSNSANCLEEKGPMFELLPGESNKIPRLRTDLFPKTRIQDLNRIFPLSEDYSGSGFGSGSGSGSGSGSGFLTEMEQDYQLVDESDAFHDNLRSLDRNLPSDSQDLGQHGLEEDFML

SEQ ID NO: 12826 - protein, 431 aa, Homo sapiens
MLNEDKPSDDYSAVLQRLRKIYHSSIKPLEQSYKYNELRQHEITDGEITSKPMVLFLGPWSVGKSTMINYLLGLENTRYQLYTGAEPTTSEFTVLMHGPKLKTIEGIVMAADSARSFSPLEKFGQNFLEKLIGIEVPHKLLERVTFVDTPGIIENRKQQERGYPFNDVCQWFIDRADLIFVVFDPTKLDVGLELEMLFRQLKGRESQIRIILNKADNLATQMLMRVYGALFWSLAPLINVTEPPRVYVSSFWPQEYKPDTHQELFLQEEISLLEDLNQVIENRLENKIAFIRQHAIRVRIHALLVDRYLQTYKDKMTFFSDGELVFKDIVEDPDKFYIFKTILAKTNVSKFDLPNREAYKDFFGINPISSFKLLSQQCSYMGGCFLEKIERAITQELPGLLGSLGLGKNPGALNCDKTGCSETPKNRYRKH

SEQ ID NO: 12827 - protein, 473 aa, Homo sapiens
MRALVLLGCLLASLLFSGQAEETEDANEEAPLRDRSHIEKTLMLNEDKPSDDYSAVLQRLRKIYHSSIKPLEQSYKYNELRQHEITDGEITSKPMVLFLGPWSVGKSTMINYLLGLENTRYQLYTGAEPTTSEFTVLMHGPKLKTIEGIVMAADSARSFSPLEKFGQNFLEKLIGIEVPHKLLERVTFVDTPGIIENRKQQERGYPFNDVCQWFIDRADLIFVVFDPTKLDVGLELEMLFRQLKGRESQIRIILNKADNLATQMLMRVYGALFWSLAPLINVTEPPRVYVSSFWPQEYKPDTHQELFLQEEISLLEDLNQVIENRLENKIAFIRQHAIRVRIHALLVDRYLQTYKDKMTFFSDGELVFKDIVEDPDKFYIFKTILAKTNVSKFDLPNREAYKDFFGINPISSFKLLSQQCSYMGGCFLEKIERAITQELPGLLGSLGLGKNPGALNCDKTGCSETPKNRYRKH

SEQ ID NO: 12828 - protein, 486 aa, Homo sapiens
MRALVLLGCLLASLLFSGQAELQVSASGGTEDVGNLLENHFSAGDASLEEKERALYADTAPQDKKLLLHYPDGREAESPKKTPASAASAGPDPEASLSNASATESPPPGERDDRDAAGPGEEKNGPPVASALPPGGAKGPVEEEWPEPSSGEGQGEEETGFGLPTEGTASGEAGGQAGGHELPEEVQEVQGDSLVQGAVAGTAEPKAEGASPHSEGDGVGPLNAEAEGSPGPGEEPAVPEGAPDVAAVGGESEPDIDTQASEGTEDQGEPGPAAEASAEPGGAQSVKAGDTEENQSPEMTEEDADEASSEEESGDGSGSEEEGGVPSEEESEEDSGDGASSEEAEGASEEATEPQEAGEPQEAREPQEGGDLQEAEESQEGGDPQEAEEPQEGGAPQEGGEPQEGGDPQEAREPQEAREPQEGAELPEATGTTSHRDRGAQPGPEELNTESMGSETLDMKAEEPEEGHQGEGESHHCCPGRDGGCK

SEQ ID NO: 12829 - protein, 56 aa, Homo sapiens
MAYSNLLRANMDGLKKRDKKNKTKKTKAAAAAAAAAPAAAATAPTTAATTAATAAQ

SEQ ID NO: 12830 - protein, 56 aa, Homo sapiens; identical to SEQ ID NO: 12829

SEQ ID NO: 12831 - protein, 136 aa, Homo sapiens
MVLLESEQFLTELTRLFQKCRTSGSVYITLKKYDGRTKPIPKKGTVEGFEPADNKCLLRATDGKKKISTVVSSKEVNKFQMAYSNLLRANMDGLKKRDKKNKTKKTKAAAAAAAAAPAAAATAPTTAATTAATAAQ

SEQ ID NO: 12832 - protein, 115 aa, Homo sapiens
MVLLESEQFLTELTRLFQKCRTSGSVYITLKKYDGRTKPIPKKGTVEGFEPADNKCLLRATDGKKKISTVVSSKEVNKFQMVSFGCSLCFPSQGKSQYDSEHWVRLILGFTALRR

SEQ ID NO: 12833 - protein, 444 aa, Homo sapiens
MGSPAHRPALLLLLPPLLLLLLLRVPPSRSFPDTPWCSPIKVKYGDVYCRAPQGGYYKTALGTRCDIRCQKGYELHGSSLLICQSNKRWSDKVICKQKRCPTLAMPANGGFKCVDGAYFNSRCEYYCSPGYTLKGERTVTCMDNKAWSGRPASCVDMEPPRIKCPSVKERIAEPNKLTVRVSWETPEGRDTADGILTDVILKGLPPGSNFPEGDHKIQYTVYDRAENKGTCKFRVKVRVKRCGKLNAPENGYMKCSSDGDNYGATCEFSCIGGYELQGSPARVCQSNLAWSGTEPTCAAMNVNVGVRTAAALLDQFYEKRRLLIVSTPTARNLLYRLQLGMLQQAQCGLDLRHITVVELVGVFPTLIGRIGAKIMPPALALQLRLLLRIPLYSFSMVLVDKHGMDKERYVSLVMPVALFNLIDTFPLRKEEMVLQAEMSQTCNT

SEQ ID NO: 12834 - protein, 405 aa, Homo sapiens
MGSPAHRPALLLLLPPLLLLLLLRVPPSRSFPGSGDSPLEDDEVGYSHPRYKDTPWCSPIKVKYGDVYCRAPQGGYYKTALGTRCDIRCQKGYELHGSSLLICQSNKRWSDKVICKHMEPPRIKCPSVKERIAEPNKLTVRVSWETPEGRDTADGILTDVILKGLPPGSNFPEGDHKIQYTVYDRAENKGTCKFRVKVRVKRCGKLNAPENGYMKCSSDGDNYGATCEFSCIGGYELQGSPARVCQSNLAWSGTEPTCAAMNVNVGVRTAAALLDQFYEKRRLLIVSTPTARNLLYRLQLGMLQQAQCGLDLRHITVVELVGVFPTLIGRIGAKIMPPALALQLRLLLRIPLYSFSMVLVDKHGMDKERYVSLVMPVALFNLIDTFPLRKEEMVLQAEMSQTCNT

SEQ ID NO: 12835 - protein, 464 aa, Homo sapiens
MGSPAHRPALLLLLPPLLLLLLLRVPPSRSFPGSGDSPLEDDEVGYSHPRYKDTPWCSPIKVKYGDVYCRAPQGGYYKTALGTRCDIRCQKGYELHGSSLLICQSNKRWSDKVICKQKRCPTLAMPANGGFKCVDGAYFNSRCEYYCSPGYTLKGERTVTCMDNKAWSGRPASCVDMEPPRIKCPSVKERIAEPNKLTVRVSWETPEGRDTADGILTDVILKGLPPGSNFPEGDHKIQYTVYDRAENKGTCKFRVKVRVKRCGKLNAPENGYMKCSSDGDNYGATCEFSCIGGYELQGSPARVCQSNLAWSGTEPTCAAMNVNVGVRTAAALLDQFYEKRRLLIVSTPTARNLLYRLQLGMLQQAQCGLDLRHITVVELVGVFPTLIGRIGAKIMPPALALQLRLLLRIPLYSFSMVLVDKHGMDKERYVSLVMPVALFNLIDTFPLRKEEMVLQAEMSQTCNT

SEQ ID NO: 12836 - protein, 379 aa, Homo sapiens
MGSPAHRPALLLLLPPLLLLLLLRVPPSRSFPGSGDSPLEDDEVGYSHPRYKDTPWCSPIKVKYGDVYCRAPQGGYYKTALGTRCDIRCQKGYELHGSSLLICQSNKRWSDKVICKQKRCPTLAMPANGGFKCVDGAYFNSRCEYYCSPGYTLKGERTVTCMDNKAWSGRPASCVDMEPPRIKCPSVKERIAEPNKLTVRVSWETPEGRDTADGILTDVILKGLPPGSNFPEGDHKIQYTVYDRAENKGTCKFRVKVRVKRCGKLNAPENGYMKCSSDGDNYGATCEFSCIGGYELQGSPARVCQSNLAWSGTEPTCAAMNVNVGVRTAAALLDQFYEKRRLLIVSTPTARNLLYRLQLGMLQAVAANPTLLLQYGASG

SEQ ID NO: 12837 - protein, 62 aa, Homo sapiens
CAPMKINVNVNSAAGLLDQFYEKQRLLIISAPDPSNRYYKMQISMLQAISAPHSLLLQHGVD

SEQ ID NO: 12838 - protein, 312 aa, Homo sapiens
MASQLTQRGALFLLFFLTPAVTPTWYAGSGYYPDESYNEVYAEEVPQAPALDYRACLSSIATVPRWCYTLNIQDGEATCYSPKGGNYHSSLGTRCELSCDRGFRLIGRRSVQCLPSRRWSGTAYCRQMRCHALPFITSGTYTCTNGVLLDSRCDYSCSSGYHLEGDRSRICMEDGRWSGGEPVCVDIDPPKIRCPHSREKMAEPEKLTARVYWDPPLVKDSADGTITRVTLRGPEPGSHFPEGEHVIRYTAYDRAYNRASCKFIVKVQVRRCPTLKPPQHGYLTCTSAGDNYGATCEYHCDGGYDRQGTPSR

SEQ ID NO: 12839 - protein, 224 aa, Homo sapiens
MASQLTQRGALFLLFFLTPAVTPTWYAGSGYYPDESYNEVYAEEVPQAPALDYRVPRWCYTLNIQDGEATCYSPKGGNYHSSLGTRCELSCDRGFRLIGRRSVQCLPSRRWSGTAYCRQMRCHALPFITSGTYTCTNGVLLDSRCDYSCSSGYHLEGDRSRICMEDGRWSGGEPVCVDIDPPKIRCPHSREKMAEPEKLTARVYWDPPLVKDSADGTITRVTLR

SEQ ID NO: 12840 - protein, 465 aa, Homo sapiens
MASQLTQRGALFLLFFLTPAVTPTWYAGSGYYPDESYNEVYAEEVPQAPALDYRVPRWCYTLNIQDGEATCYSPKGGNYHSSLGTRCELSCDRGFRLIGRRSVQCLPSRRWSGTAYCRQMRCHALPFITSGTYTCTNGVLLDSRCDYSCSSGYHLEGDRSRICMEDGRWSGGEPVCVDIDPPKIRCPHSREKMAEPEKLTARVYWDPPLVKDSADGTITRVTLRGPEPGSHFPEGEHVIRYTAYDRAYNRASCKFIVKVQVRRCPTLKPPQHGYLTCTSAGDNYGATCEYHCDGGYDRQGTPSRVCQSSRQWSGSPPICAPMKINVNVNSAAGLLDQFYEKQRLLIISAPDPSNRYYKMQISMLQQSTCGLDLRHVTIIELVGQPPQEVGRIREQQLSANIIEELRQFQRLTRSYFNMVLIDKQGIDRDRYMEPVTPEEIFTFIDDYLLSNQELTQRREQRDICE

SEQ ID NO: 12841 - protein, 575 aa, Homo sapiens
MHKEAEMLIGPQLDEKRWGWRLGDGSAAPPFLPQALSFLLLLPLASALQPTPLPFQELRLVGGPSRCRGRLEVMHGGSWGSVCDDDWDVVDANVVCRQLGCGLALPVPRPLAFGQGRGPILLDNVECRGQEAALSECGSRGWGVHNCFHYEDVAVLCDEFLPTQPPTRKMLTSRAPPTTLPNGKSEGSVRLVGGANLCQGRVEILHSGLWGTVCDDDWGLPDAAVVCRQLGCGAAMAATTNAFFGYGTGHILLDNVHCEGGEPRLAACQSLGWGVHNCGHHEDAGALCAGLGPPTLTALPSSATREDWAWQTDPSATGVGPQPSRETALLTTAAWAAGKKSGRLRLVGGPGPCRGRVEVLHAGGWGTVCDDDWDFADARVACREAGCGPALGATGLGHFGYGRGPVLLDNVGCAGTEARLSDCFHLGWGQHNCGHHEDAGALCAGPEELGLQVQQDGSETTRVPTPRPRDGHLRLVNGAHRCEGRVELYLGQRWGTVCDDAWDLRAAGVLCRQLGCGQALAAPGEAHFGPGRGPILLDNVKCRGEESALLLCSHIRWDAHNCDHSEDASVLCQPS

SEQ ID NO: 12842 - protein, 118 aa, Homo sapiens
DAGAVCDGMPLGYVPPTAPTDSNNSTPREAASRPPSTMTSQAPGTAGVSPPPASPTVLWEPGPEAGPPGLDSISDPFSWSWIPGLGRDRDAWLPGELATKPSASVTASVLEKTTTKAP

SEQ ID NO: 12843 - protein, 90 aa, Homo sapiens
MRVLACLLAALVGIQAVERLRLADGPHGCAGRLEVWHGGRWGTVCDDGWDLRDAAVACRQLGCGGALAAPGGAFFGEGAGPVWLSELACR

SEQ ID NO: 12844 - protein, 1573 aa, Homo sapiens
MRVLACLLAALVGIQAVERLRLADGPHGCAGRLEVWHGGRWGTVCDDGWDLRDAAVACRQLGCGGALAAPGGAFFGEGAGPVWLSELACRGNEGQLGLCHHRGWKAHICSHEEDAGVVCAGQRVANSRDDSTSPLDGAPWPGLLLELSPSTEEPLVTHAPRPAGNPQNASRKKSPRPKQAKSTRAPLLTTGAPRQERLRLVSGPHRCAGRLEVWHGGRWGTVCDDGWDLRDAAVACRELGCGGALAAPGGARFGPGAGPVWMDDVGCGGGEQALRDCPRSPWGRSNCDHSEDAGLVCTGPAPRLRLADGPHGCAGRLEVWHGGRWGSVCDDAWDLRDAAVACRELGCGGALAAPGGAFFGEGSGPIILDDLRCRGNETALRFCPARPWGQHDCHHREDAGAVCDGMPLGYVPPTAPTDSNNSTPREAASRPPSTMTSQAPGTAGVSPPPASPTVLWEPGPEAGSPQLRLVAGPSKCSGRLEVWHDQRWGTVCDDSWDMRDSAVVCRELGCGGPQQPDPAAGRFGWGAGPIWLDDVGCVGTEASLSDCPAAPWGKHNCAHNEDVGVTCTGPPGLDSISDPFSWSWIPGLGRDRDAWLPGELATKPSASVTASVLEKTTTKAPGKMPKSTKKWVTKNAKRPTTQPPVMPTTKHSRAQSPPDLTSQTTAALTTEASRRPTSEFTRRPTTEAPQRWTSHTTATLTPQAPRERTTKTMAMLTTQGPQEMTSESTIKSIPQASLEPSAEIPEGSPESPKDPAPSPSVSTTGESGLFRVRLADGPNRCAGRLEVWHAGRWGTVCDDNWDLRDATVACWELGCGKVRPRVGKTHYGPGTGPIWLDDMGCKGSEASLSDCPSGAWGKHNCDHEEDVGLTCTGYTDYDDYPPWTWDPTSREDLAKGTTTAGVPGHTLPWRTTRRPGSSSPAIRRLPDTGSKDGYKLPWTWDTPSGRGLAEGTPTAGKLGPTLGAGTTRSPGSPPTLRVHGDTGSPRKPWPERRPPRPAATRTAPPTPSPGPSASPGPPGPALTSDSSRELTPHSALTSEATSDAPDTSPPTPDPASRTNPDLILTSPDFALSTPDSSVVPALTPEPSPTPLPTLPKELTSDPSTPSEVTSLSPTSEQVPESDTTPDLDTTPYSSTVSEYSRSPDPSPSPHPTTTPDPTMAPDPITTLNPTVTPHFPTTPHPTTTPHPTTITHSTMIPDPTTTPQPFTTITHSTMIPDPTTTPQPFTTMQPTTTPHSTTPHPTTTPHPTTITHSTMIPDPTTTPQPFTTMQPTTMPHPTTTPHPTTTPHPTTTPHPTTTPHPTMTPDPTTTPYPTTTPDPTTTPHPTTPDPSSTPVITTVSLPTSLGTELSSPTLAPTVKPSLHPQLTFTAPAPHTSTSQIPTLEPSPALESSPSRSSTATSMDPLSTEDFKPPRSQSPNLTPPPTHTPHSASDLTVSPDPLLSPTAHPLDHPPLDPLTLGPTPGQSPGPHGPCVAPTPPVRVMACEPPALVELVAAVRDVGGQLQRLTQVVEQERQERQALLLGLTQLVEAARGLGQLGEAVKRLAEMAWTTSMPAPTTTTPEEEERPLRGDV

SEQ ID NO: 12845 - protein, 951 aa, Homo sapiens
MRVLACLLAALVGIQAVERLRLADGPHGCAGRLEVWHGGRWGTVCDDGWDLRDAAVACRQLGCGGALAAPGGAFFGEGAGPVWLSELACRGNEGQLGLCHHRGWKAHICSHEEDAGVVCAGQRVANSRDDSTSPLDGAPWPGLLLELSPSTEEPLVTHAPRPAGNPQNASRKKSPRPKQAKSTRAPLLTTGAPRQERLRLVSGPHRCAGRLEVWHGGRWGTVCDDGWDLRDAAVACRELGCGGALAAPGGARFGPGAGPVWMDDVGCGGGEQALRDCPRSPWGRSNCDHSEDAGLVCTGPAPRLRLADGPHGCAGRLEVWHGGRWGSVCDDAWDLRDAAVACRELGCGGALAAPGGAFFGEGSGPIILDDLRCRGNETALRFCPARPWGQHDCHHREDAGAVCDGMPLGYVPPTAPTDSNNSTPREAASRPPSTMTSQAPGTAGVSPPPASPTVLWEPGPEAGSPQLRLVAGPSKCSGRLEVWHDQRWGTVCDDSWDMRDSAVVCRELGCGGPQQPDPAAGRFGWGAGPIWLDDVGCVGTEASLSDCPAAPWGKHNCAHNEDVGVTCTGPPGLDSISDPFSWSWIPGLGRDRDAWLPGELATKPSASVTASVLEKTTTKAPGKMPKSTKKWVTKNAKRPTTQPPVMPTTKHSRAQSPPDLTSQTTAALTTEASRRPTSEFTRRPTTEAPQRWTSHTTATLTPQAPRERTTKTMAMLTTQGPQEMTSESTIKSIPQASLEPSAEIPEGSPESPKDPAPSPSVSTTGESGLFRVRLADGPNRCAGRLEVWHAGRWGTVCDDNWDLRDATVACWELGCGKVRPRVGKTHYGPGTGPIWLDDMGCKGSEASLSDCPSGAWGKHNCDHEEDVGLTCTGYTDYDDYPPWTWDPTSREDLAKGTTTAGVPGHTLPWRTTRRPGSSSPAIRRLPDTEPEAGAPRGDAPRSRTARVAAPP

SEQ ID NO: 12846 - protein, 5150 aa, Homo sapiens
MLLPALLFGMAWALADGRWCEWTETIRVEEEVAPRQEDLVPCASLDHYSRLGWRLDLPWSGRSGLTRSPAPGLCPIYKPPETRPAKWNRTVRTCCPGWGGAHCTEALAKASPEGHCFAMWQCQLQAGSANASAGSLEECCARPWGQSWWDGSSQACRSCSSRHLPGSASSPALLQPLAGAVGQLWSQHQRPSATCASWSGFHYRTFDGRHYHFLGRCTYLLAGAADSTWAVHLTPGDRCPQPGHCQRVTMGPEEVLIQAGNVSVKGQLVPEGQSWLLHGLSLQWLGDWLVLSGGLGVVVRLDRTGSISISVDHELWGQTQGLCGLYNGWPEDDFMEPGGGLAMLAATFGNSWRLPGSESGCLDAVEVAQGCDSPLGLIDADVEPGHLRAEAQDVCHQLLEGPFGQCHAQVSPAEYHEACLFAYCAGAMAGSGQEGRQQAVCATFASYVQACARRHIHIRWRKPGFCERLCPGGQLYSDCVSLCPPSCEAVGQGEEESCREECVSGCECPRGLFWNGTLCVPAAHCPCYYCRQRYVPGDTVRQLCNPCVCRDGRWHCAQALCPAECAVGGDGHYLTFDGRSYSFWGGQGCRYSLVQDYVKGQLLILLEHGACDAGSCLHAISVSLEDTHIQLRDSGAVLVNGQDVGLPWIGAEGLSVRRASSAFLLLRWPGAQVLWGLSDPVAYITLDPRHAHQVQGLCGTFTQNQQDDFLTPAGDVETSIAAFASKFQVAGKGRCPSEDSALLSPCTTHSQRHAFAEAACAILHSSVFQECHRLVDKEPFYLRCLAAVCGCDPGSDCLCPVLSAYARRCAQEGASPPWRNQTLCPVMCPGGQEYRECAPACGQHCGKPEDCGELGSCVAGCNCPLGLLWDPEGQCVPPSLCPCQLGARRYAPGSATMKECNRCICQERGLWNCTARHCPSQAFCPRELVYAPGACLLTCDSPSANHSCPAGSTDGCVCPPGTVLLDERCVPPDLCPCRHSGQWYLPNATIQEDCNVCVCRGRQWHCTGQRRSGRCQASGAPHYVTFDGLAFTYPGACEYLLVREASGLFTVSAQNLPCGASGLTCTKALAVRLEGTVVHMLRGRAVTVNGVSVTPPKVYTGPGLSLRRAGLFLLLSTHLGLTLLWDGGTRVLVQLSPQFRGRVAGLCGDFDGDASNDLRSRQGVLEPTAELAAHSWRLSPLCPEPGDLPHPCTMNTHRAGWARARCGALLQPLFTLCHAEVPPQQHYEWCLYDACGCDSGGDCECLCSAIATYADECARHGHHVRWRSQELCSLQCEGGQVYEACGPTCPPTCHEQHPEPGWHCQVVACVEGCFCPEGTLLHGGACLEPASCPCEWGRNSFPPGSVLQKDCGNCTCQEGQWHCGGDGGHCEELVPACAEGEALCQENGHCVPHGWLCDNQDDCGDGSDEEGCAAPGCGEGQMTCSSGHCLPLALLCDRQDDCGDGTDEPSYPCPQGLLACADGRCLPPALLCDGHPDCLDAADEESCLGQVTCVPGEVSCVDGTCLGAIQLCDGVWDCPDGADEGPGHCPLPSLPTPPASTLPGPSPGSLDTASSPLASASPAPPCGPFEFRCGSGECTPRGWRCDQEEDCADGSDERGCGGPCAPHHAPCARGPHCVSPEQLCDGVRQCPDGSDEGPDACGGLPALGGPNRTGLPCPEYTCPNGTCIGFQLVCDGQPDCGRPGQVGPSPEEQGCGAWGPWSPWGPCSRTCGPWGQGRSRRCSPLGLLVLQNCPGPEHQSQACFTAACPVDGEWSTWSPWSVCSEPCRGTMTRQRQCHSPQNGGRTCAALPGGLHSTRQTKPCPQDGCPNATCSGELMFQPCAPCPLTCDDISGQVTCPPDWPCGSPGCWCPEGQVLGSEGWCVWPRQCPCLVDGARYWPGQRIKADCQLCICQDGRPRRCRLNPDCAVDCGWSSWSPWAKCLGPCGSQSIQWSFRSSNNPRPSGRGRQCRGIHRKARRCQTEPCEGCEHQGQVHRVGERWHGGPCRVCQCLHNLTAHCSPYCPLGSCPQGWVLVEGTGESCCHCALPGENQTVQPMATPAAAPAPSPQIRFPLATYILPPSGDPCYSPLGLAGLAEGSLHASSQQLEHPTQAALLGAPTQGPSPQGWHAGGDAYAKWHTRPHYLQLDLLQPRNLTGILVPETGSSNAYASSFSLQFSSNGLHWHDYRDLLPGILPLPKLFPRNWDDLDPAVWTFGRMVQARFVRVWPHDVHHSDVPLQVELLGCEPGSPPAPLCPGVGLRCASGECVLRGGPCDGVLDCEDGSDEEGCVLLPEGTGRFHSTAKTLALSSAQPGQLLHWPREGLAETEHWPPGQESPTSPTETRPVSPGPASGVPHHGESVQMVTTTPIPQMEARTLPPGMAAVTVVPPHPVTPATPAGQSVAPGPFPPVQCGPGQTPCEVLGCVEQAQVCDGREDCLDGSDERHCARNLLMWLPSLPALWAASTVPFMMPTMALPGLPASRALCSPSQLSCGSGECLSAERRCDLRPDCQDGSDEDGCVDCVLAPWSVWSSCSRSCGLGLTFQRQELLRPPLPGGSCPRDRFRSQSCFVQACPVAGAWAMWEAWGPCSVSCGGGHQSRQRSCVDPPPKNGGAPCPGASQERAPCGLQPCSGGTDCELGRVYVSADLCQKGLVPPCPPSCLDPKANRSCSGHCVEGCRCPPGLLLHDTRCLPLSECPCLVGEELKWPGVSFLLGNCSQCVCEKGELLCQPGGCPLPCGWSAWSSWAPCDRSCGSGVRARFRSPSNPPAAWGGAPCEGDRQELQGCHTVCGTEVFGWTPWTSWSSCSQSCLAPGGGPGWRSRSRLCPSPGDSSCPGDATQEEPCSPPVCPVPSIWGLWAPWSTCSAPCDGGIQTRGRSCSSLAPGDTTCPGPHSQTRDCNTQPCTAQCPENMLFRSAEQCHQEGGPCPRLCLTQGPGIECTGFCAPGCTCPPGLFLHNASCLPRSQCPCQLHGQLYASGAMARLDSCNNCTCVSGKMACTSERCPVACGWSPWTLWSLCSCSCNVGIRRRFRAGTAPPAAFGGAECQGPTMEAEFCSLRPCPGPGGEWGPWSPCSVPCGGGYRNRTRGSSRSLMEFSTCGLQPCAGPVPGMCPRDKQWLDCAQGPASCAELSAPRGTNQTCHPGCHCPSGMLLLNNVCVPTQDCPCAHEGHLYPPGSTVVRPCENCSCVSGLIANCSSWPCAEGEPTWSPWTPWSQCSASCGPARCHRHRFCARSPSAVPSTVAPLPLPATPTPLCSGPEAEEEPCLLQGCDRAGGWGPWGPWSHCSRSCGGGLRSRTRACDQPPPQGLGDYCEGPRAQGEVCQALPCPVTNCTAIEGAEYSPCGPPCPRSCDDLVHCVWRCQPGCYCPPGQVLSSNGAICVQPGHCSCLDLLTGQRHHPGARLARPDGCNHCTCLEGRLNCTDLPCPVPGGWCPWSEWTMCSQPCRGQTRSRSRACACPTPQHGGAPCTGEAGEAGAQHQREACPSYATCPVDGAWGPWGPWSPCDMCLGQSHRSRACSRPPTPEGGRPCPGNHTQSRPCQENSTQCTDCGGGQSLHPCGQPCPRSCQDLSPGSVCQPGSVGCQPTCGCPLGQLSQDGLCVPPAHCRCQYQPGAMGIPENQSRSAGSRFSSWESLEPGEVVTGPCDNCTCVAGILQCQEVPDCPDPGVWSSWGPWEDCSVSCGGGEQLRSRRCARPPCPGPARQSRTCSTQVCREAGCPAGRLYRECQPGEGCPFSCAHVTQQVGCFSEGCEEGCHCPEGTFQHRLACVQECPCVLTAWLLQELGATIGDPGQPLGPGDELDSGQTLRTSCGNCSCAHGKLSCSLDDCFEADGGFGPWSPWGPCSRSCGGLGTRTRSRQCVLTMPTLSGQGCRGPRQDLEYCPSPDCPGAEGSTVEPVTGLPGGWGPWSSWSPCSRSCTDPARPAWRSRTRLCLANCTMGDPLQERPCNLPSCTELPVCPGPGCGAGNCSWTSWAPWEPCSRSCGVGQQRRLRAYRPPGPGGHWCPNILTAYQERRFCNLRACPVPGGWSRWSPWSWCDRSCGGGQSLRSRSCSSPPSKNGGAPCAGERHQARLCNPMPCEAGCPAGMEVVTCANRCPRRCSDLQEGIVCQDDQVCQKGCRCPKGSLEQDGGCVPIGHCDCTDAQGHSWAPGSQHQDACNNCSCQAGQLSCTAQPCPPPTHCAWSHWSAWSPCSHSCGPRGQQSRFRSSTSGSWAPECREEQSQSQPCPQPSCPPLCLQGTRSRTLGDSWLQGECQRCSCTPEGVICEDTECAVPEAWTLWSSWSDCPVSCGGGNQVRTRACRAAAPHHRSPPCLGPDTQTRQQPCPGLLEACSWGPWGPCSRSCGPGLASRSGSCPCLMAKADPTCNSTFLHLDTQGCYSGPCPEECVWSSWSSWTRCSCRVLVQQRYRHQGPASRGARAGAPCTRLDGHFRPCLISNCSEDSCTPPFEFHACGSPCAGLCATHLSHQLCQDLPPCQPGCYCPKGLLEQAGGCIPPEECNCWHTSAAGAGMTLAPGDRLQLGCKECECRRGELHCTSQGCQGLLPLSEWSEWSPCGPCLPPSALAPASRTALEEHWLRDPTGLSPTLAPLLASEQHRHRLCLDPATGRPWTGAPHLCTAPLSQQRLCPDPGACPDSCQWSLWGPWSPCQVPCSGGFRLRWREAEALCGGGCREPWAQESCNGGPCPESCEAQDTVFTLDCANQCPHSCADLWDRVQCLQGPCRPGCRCPPGQLVQDGRCVPISSCRCGLPSANASWELAPAQAVQLDCQNCTCVNESLVCPHQECPVLGPWSAWSSCSAPCGGGTMERHRTCEGGPGVAPCQAQDTEQRQECNLQPCPECPPGQVLSACATSCPCLCWHLQPGAICVQEPCQPGCGCPGGQLLHNGTCVPPTACPCTQHSLPWGLTLTLEEQAQELPPGTVLTRNCTRCVCHGGAFSCSLVDCQVPPGETWQQVAPGELGLCEQTCLEMNATKTQSNCSSARASGCVCQPGHFRSQAGPCVPEDHCECWHLGRPHLPGSEWQEACESCLCLSGRPVCTQHCSPLTCAQGEEMVLEPGSCCPSCRREAPEEQSPSCQLLTELRNFTKGTCYLDQVEVSYCSGYCPSSTHVMPEEPYLQSQCDCCSYRLDPESPVRILNLRCLGGHTEPVVLPVIHSCQCSSCQGGDFSKR

SEQ ID NO: 12847 - protein, 115 aa, Homo sapiens [sequence omitted]

SEQ ID NO: 12848 - protein, 62 aa, Homo sapiens
MRLLSFVVLALFAVTQAEEGARLLASKSLLNRYAVEGRDLTLQYNIYNVGSRHVHEEKLRQG

SEQ ID NO: 12849 - protein, 86 aa, Homo sapiens
MRLLSFVVLALFAVTQAEEGARLLASKSLLNRYAVEGRDLTLQYNIYNVGSRLALPVHLDREESWLSGSLTGDSPLIFWTGQPLGS

SEQ ID NO: 12850 - protein, 147 aa, Homo sapiens
MRLLSFVVLALFAVTQAEEGARLLASKSLLNRYAVEGRDLTLQYNIYNVGSSAALDVELSDDSFPPEDFGIVSGMLNVKWDRIAPASNVSHTVVLRPLKAGYFNFTSATITYLAQEDGPVVIGSTSAPGQGGILAQREFDRRFSPHF

SEQ ID NO: 12851 - protein, 183 aa, Homo sapiens
MRLLSFVVLALFAVTQAEEGARLLASKSLLNRYAVEGRDLTLQYNIYNVGSSAALDVELSDDSFPPEDFGIVSGMLNVKWDRIAPASNVSHTVVLRPLKAGYFNFTSATITYLAQEDGPVVIGSTSAPGQGGILAQREFDRRFSPHFLDWAAFGVMTLPSIGIPLLLWYSSKRKYDTPKTKKN

SEQ ID NO: 12852 - protein, 183 aa, Homo sapiens; identical to SEQ ID NO: 12851

SEQ ID NO: 12853 - protein, 133 aa, Homo sapiens
MRLLSFVVLALFAVTQAEEGARLLASKSLLNRYAVEGRDLTLQYNIYNVGSSAALDVELSDDSFPPEDFGIVSGMLNVKWDRIAPASNVSHTVVLRPLKAGYFNFTSATITYLAQEDGPVVNQPQDSLVLPGS

SEQ ID NO: 12854 - protein, 133 aa, Homo sapiens; identical to SEQ ID NO: 12853

SEQ ID NO: 12855 - protein, 93 aa, Homo sapiens
MRLLSFVVLALFAVTQAEEGARLLASKSLLNRYAVEGRDLTLQYNIYNVGSSAALDVELSDDSFPPEDFGIVSGMLNVKWDRIAPWTGQPLGS

SEQ ID NO: 12856 - protein, 90 aa, Homo sapiens
MRLLSFVVLALFAVTQAEEGARLLASKSLLNRYAVEGRDLTLQYNIYNVGSSAALDVELSDDSFPPEDFGIVSGMLNVKWDRIAPYPLGT

SEQ ID NO: 12857 - protein, 116 aa, Homo sapiens
MLSCRLQCALAALSIVLALGCVTGAPSDPRLRQFLQKSLAAAAGKQELAKYFLAELLSEPNQTENDALEPEDLSQAAEQDEMRLELQRSANSNPAMAPRERKAGCKNFFWKTFTSC

SEQ ID NO: 12858 - protein, 46 aa, Homo sapiens
MLEKRSVGCRRCAVVGNSGNLRESSYGPEIDSHDFVLRMNKAPTAG

SEQ ID NO: 12859 - protein, 97 aa, Homo sapiens
MLEKRSVGCRRCAVVGNSGNLRESSYGPEIDSHDFVLRMNKAPTAGFEADVGTKTTHHLVYPESFRELGDNVSMILVPFKTIDLEWVVSAITTGTIS

SEQ ID NO: 12860 - protein, 47 aa, Homo sapiens
MVTLRKRTLKVLTFLVLFIFLTSFFLNYSHTMVATTWFPKQMVLELS

SEQ ID NO: 12861 - protein, 49 aa, Homo sapiens
MVTLRKRTLKVLTFLVLFIFLTSFFLNYSHTMVATTWFPKQMVLELSEN

SEQ ID NO: 12862 - protein, 72 aa, Homo sapiens
MVTLRKRTLKVLTFLVLFIFLTSFFLNYSHTMVATTWFPKQMVLELSENLKRLIKHRPCTCTHCIGQRKLSA

SEQ ID NO: 12863 - protein, 340 aa, Homo sapiens
MVTLRKRTLKVLTFLVLFIFLTSFFLNYSHTMVATTWFPKQMVLELSENLKRLIKHRPCTCTHCIGQRKLSAWFDERFNQTMQPLLTAQNALLEDDTYRWWLRLQREKKPNNLNDTIKELFRVVPGNVDPMLEKRSVGCRRCAVVGNSGNLRESSYGPEIDSHDFVLRMNKAPTAGFEADVGTKTTHHLVYPESFRELGDNVSMILVPFKTIDLEWVVSAITTGTISHTYIPVPAKIRVKQDKILIYHPAFIKYVFDNWLQGHGRYPSTGILSVIFSMHVCDEVDLYGFGADSKGNWHHYWENNPSAGAFRKTGVHDADFESNVTATLASINKIRIFKGR

SEQ ID NO: 12864 - protein, 340 aa, Homo sapiens; identical to SEQ ID NO: 12863

SEQ ID NO: 12865 - protein, 340 aa, Homo sapiens; identical to SEQ ID NO: 12863

SEQ ID NO: 12866 - protein, 332 aa, Homo sapiens
MCPAGWKLLAMLALVLVVMVWYSISREDRYIELFYFPIPEKKEPCLQGEAESKASKLFGNYSRDQPIFLRLEDYFWVKTPSAYELPYGTKGSEDLLLRVLAITSSSIPKNIQSLRCRRCVVVGNGHRLRNSSLGDAINKYDVVIRLNNAPVAGYEGDVGSKTTMRLFYPESAHFDPKVENNPDTLLVLVAFKAMDFHWIETILSDKKRVRKGFWKQPPLIWDVNPKQIRILNPFFMEIAADKLLSLPMQQPRKIKQKPTTGLLAITLALHLCDLVHIAGFGYPDAYNKKQTIHYYEQITLKSMAGSGHNVSQEALAIKRMLEMGAIKNLTSF

SEQ ID NO: 12867 - protein, 328 aa, Homo sapiens
MCPAGWKLLAMLALVLVVMVWYSISREDSFYFPIPEKKEPCLQGEAESKASKLFGNYSRDQPIFLRLEDYFWVKTPSAYELPYGTKGSEDLLLRVLAITSSSIPKNIQSLRCRRCVVVGNGHRLRNSSLGDAINKYDVVIRLNNAPVAGYEGDVGSKTTMRLFYPESAHFDPKVENNPDTLLVLVAFKAMDFHWIETILSDKKRVRKGFWKQPPLIWDVNPKQIRILNPFFMEIAADKLLSLPMQQPRKIKQKPTTGLLAITLALHLCDLVHIAGFGYPDAYNKKQTIHYYEQITLKSMAGSGHNVSQEALAIKRMLEMGAIKNLTSF

SEQ ID NO: 12868 - protein, 322 aa, Homo sapiens
MLALVLVVMVWYSISREDRYIELFYFPIPEKKEPCLQGEAESKASKLFGNYSRDQPIFLRLEDYFWVKTPSAYELPYGTKGSEDLLLRVLAITSSSIPKNIQSLRCRRCVVVGNGHRLRNSSLGDAINKYDVVIRLNNAPVAGYEGDVGSKTTMRLFYPESAHFDPKVENNPDTLLVLVAFKAMDFHWIETILSDKKRVRKGFWKQPPLIWDVNPKQIRILNPFFMEIAADKLLSLPMQQPRKIKQKPTTGLLAITLALHLCDLVHIAGFGYPDAYNKKQTIHYYEQITLKSMAGSGHNVSQEALAIKRMLEMGAIKNLTSF

SEQ ID NO: 12869 - protein, 153 aa, Homo sapiens
MRLFYPESAHFDPKVENNPDTLLVLVAFKAMDFHWIETILSDKKRVRKGFWKQPPLIWDVNPKQIRILNPFFMEIAADKLLSLPMQQPRKIKQKPTTGLLAITLALHLCDLVHIAGFGYPDAYNKKQTIHYYEQITLKSMAGSGHNVSQEALA

SEQ ID NO: 12870 - protein, 47 aa, Homo sapiens
MSVLSGPGWTTGCPWPQNHPNPCHISGREVARGSRDDSSPQESCCLL

SEQ ID NO: 12871 - protein, 339 aa, Homo sapiens
MVSKSRWKLLAMLALVLVVMVWYSISREDRYIELFYFPIPEKKEPCLQGEAESKASKLFGKLSPLCSYSRDQPIFLRLEDYFWVKTPSAYELPYGTKGSEDLLLRVLAITSSSIPKNIQSLRCRRCVVVGNGHRLRNSSLGDAINKYDVVIRLNNAPVAGYEGDVGSKTTMRLFYPESAHFDPKVENNPDTLLVLVAFKAMDFHWIETILSDKKRVRKGFWKQPPLIWDVNPKQIRILNPFFMEIAADKLLSLPMQQPRKIKQKPTTGLLAITLALHLCDLVHIAGFGYPDAYNKKQTIHYYEQITLKSMAGSGHNVSQEALAIKRMLEMGAIKNLTSF

SEQ ID NO: 12872 - protein, 93 aa, Homo sapiens
MVSKSRWKLLAMLALVLVVMVWYSISREDRYIELFYFPIPEKKEPCLQGEAESKASKLFGNYSRDQPIFLRLEDYFWVKTPSAYELPYGTKGS

SEQ ID NO: 12873 - protein, 126 aa, Homo sapiens
MVSKSRWKLLAMLALVLVVMVWYSISREDRYIELFYFPIPEKKEPCLQGEAESKASKLFGNYSRDQPIFLRLEDYFWVKTPSAYELPYGTKGSASGAAAVWSWGTGTGCGTAHWEMPSTSTMWSSD

SEQ ID NO: 12874 - protein, 111 aa, Homo sapiens
MVSKSRWKLLAMLALVLVVMVWYSISREDRYIELFYFPIPEKKEPCLQGEAESKASKLFGNYSRDQPIFLRLEDYFWVKTPSAYELPYGTKGSEDLLLRVLAITSSSIPKN

SEQ ID NO: 12875 - protein, 209 aa, Homo sapiens
MVSKSRWKLLAMLALVLVVMVWYSISREDRYIELFYFPIPEKKEPCLQGEAESKASKLFGNYSRDQPIFLRLEDYFWVKTPSAYELPYGTKGSEDLLLRVLAITSSSIPKNIQSLRCRRCVVVGNGHRLRNSSLGDAINKYDVVIRLNNAPVAGYEGDVGSKTTMRLFYPESAHFDPKVENNPDTLLVLVAFKAMDFHWIETILSDKKR

SEQ ID NO: 12876 - protein, 333 aa, Homo sapiens
MVSKSRWKLLAMLALVLVVMVWYSISREDRYIELFYFPIPEKKEPCLQGEAESKASKLFGNYSRDQPIFLRLEDYFWVKTPSAYELPYGTKGSEDLLLRVLAITSSSIPKNIQSLRCRRCVVVGNGHRLRNSSLGDAINKYDVVIRLNNAPVAGYEGDVGSKTTMRLFYPESAHFDPKVENNPDTLLVLVAFKAMDFHWIETILSDKKRVRKGFWKQPPLIWDVNPKQIRILNPFFMEIAADKLLSLPMQQPRKIKQKPTTGLLAITLALHLCDLVHIAGFGYPDAYNKKQTIHYYEQITLKSMAGSGHNVSQEALAIKRMLEMGAIKNLTSF

SEQ ID NO: 12877 - protein, 333 aa, Homo sapiens; identical to SEQ ID NO: 12876

SEQ ID NO: 12878 - protein, 333 aa, Homo sapiens; identical to SEQ ID NO: 12876

SEQ ID NO: 12879 - protein, 333 aa, Homo sapiens; identical to SEQ ID NO: 12876

SEQ ID NO: 12880 - protein, 329 aa, Homo sapiens
MVSKSRWKLLAMLALVLVVMVWYSISREDSFYFPIPEKKEPCLQGEAESKASKLFGNYSRDQPIFLRLEDYFWVKTPSAYELPYGTKGSEDLLLRVLAITSSSIPKNIQSLRCRRCVVVGNGHRLRNSSLGDAINKYDVVIRLNNAPVAGYEGDVGSKTTMRLFYPESAHFDPKVENNPDTLLVLVAFKAMDFHWIETILSDKKRVRKGFWKQPPLIWDVNPKQIRILNPFFMEIAADKLLSLPMQQPRKIKQKPTTGLLAITLALHLCDLVHIAGFGYPDAYNKKQTIHYYEQITLKSMAGSGHNVSQEALAIKRMLEMGAIKNLTSF

SEQ ID NO: 12881 - protein, 329 aa, Homo sapiens; identical to SEQ ID NO: 12880

SEQ ID NO: 12882 - protein, 178 aa, Homo sapiens
LIPRLQKIWKNYLSMNKYKVSYKGPGPGIKFSAEALRCHLRDHVNVSMVEVTDFPFNTSEWEGYLPKESIRTKAGPWGRCAVVSSAGSLKSSQLGREIDDHDAVLRFNGAPTANFQQDVGTKTTIRLMNSQISVHHCARAARKVAHFPGYTTHPQESLSCCFLVGYHREALPQRQFVQ

SEQ ID NO: 12883 - protein, 25 aa, Homo sapiens
MIHTNLKKKFSCCVLVFLLFAVICV

SEQ ID NO: 12884 - protein, 42 aa, Homo sapiens
MIHTNLKKKFSCCVLVFLLFAVICVWKEKKKGSYYDSFKLQT

SEQ ID NO: 12885 - protein, 45 aa, Homo sapiens
MIHTNLKKKFSCCVLVFLLFAVICVWKEKKKGSYYDSFKLQTKEF

SEQ ID NO: 12886 - protein, 75 aa, Homo sapiens
MIHTNLKKKFSCCVLVFLLFAVICVWKEKKKGSYYDSFKLQTKEFQVLKSLGKLAMGSDSQSVSSSSTQDPHRGR

SEQ ID NO: 12887 - protein, 91 aa, Homo sapiens
MIHTNLKKKFSCCVLVFLLFAVICVWKEKKKGSYYDSFKLQTKEFQVLKSLGKLAMGSDSQSVSSSSTQDPHRGRQTLGSLRGLAKAKPEA

SEQ ID NO: 12888 - protein, 97 aa, Homo sapiens
MIHTNLKKKFSCCVLVFLLFAVICVWKEKKKGSYYDSFKLQTKEFQVLKSLGKLAMGSDSQSVSSSSTQDPHRGRQTLGSLRGLAKAKPEASFQVWN

SEQ ID NO: 12889 - protein, 98 aa, Homo sapiens
MIHTNLKKKFSCCVLVFLLFAVICVWKEKKKGSYYDSFKLQTKEFQVLKSLGKLAMGSDSQSVSSSSTQDPHRGRQTLGSLRGLAKAKPEASFQVWNK

SEQ ID NO: 12890 - protein, 113 aa, Homo sapiens
MIHTNLKKKFSCCVLVFLLFAVICVWKEKKKGSYYDSFKLQTKEFQVLKSLGKLAMGSDSQSVSSSSTQDPHRGRQTLGSLRGLAKAKPEASFQVWNKDSSSKNLIPRLQKIW

SEQ ID NO: 12891 - protein, 127 aa, Homo sapiens
MIHTNLKKKFSCCVLVFLLFAVICVWKEKKKGSYYDSFKLQTKEFQVLKSLGKLAMGSDSQSVSSSSTQDPHRGRQTLGSLRGLAKAKPEASFQVWNKDSSSKNLIPRLQKIWKNYLSMNKYKVSYK

SEQ ID NO: 12892 - protein, 406 aa, Homo sapiens
MIHTNLKKKFSCCVLVFLLFAVICVWKEKKKGSYYDSFKLQTKEFQVLKSLGKLAMGSDSQSVSSSSTQDPHRGRQTLGSLRGLAKAKPEASFQVWNKDSSSKNLIPRLQKIWKNYLSMNKYKVSYKGPGPGIKFSAEALRCHLRDHVNVSMVEVTDFPFNTSEWEGYLPKESIRTKAGPWGRCAVVSSAGSLKSSQLGREIDDHDAVLRFNGAPTANFQQDVGTKTTIRLMNSQLVTTEKRFLKDSLYNEGILIVWDPSVYHSDIPKWYQNPDYNFFNNYKTYRKLHPNQPFYILKPQMPWELWDILQEISPEEIQPNPPSSGMLGIIIMMTLCDQVDIYEFLPSKRKTDVCYYYQKFFDSACTMGAYHPLLYEKNLVKHLNQGTDEDIYLLGKATLPGFRTIHC

SEQ ID NO: 12893 - protein, 406 aa, Homo sapiens; identical to SEQ ID NO: 12892

SEQ ID NO: 12894 - protein, 21 aa, Homo sapiens
MNSQLVTTEKRFLKDSLYNEG

SEQ ID NO: 12895 - protein, 52 aa, Homo sapiens
MNSQLVTTEKRFLKDSLYNEGILIVWDPSVYHSDIPKWYQNPDYNFFNNYKT

SEQ ID NO: 12896 - protein, 115 aa, Homo sapiens
MNSQLVTTEKRFLKDSLYNEGILIVWDPSVYHSDIPKWYQNPDYNFFNNYKTYRKLHPNQPFYILKPQMPWELWDILQEISPEEIQPNPPSSGMLGIIIMMTLCDQVDIYEFLPS

SEQ ID NO: 12897 - protein, 175 aa, Homo sapiens
MNSQLVTTEKRFLKDSLYNEGILIVWDPSVYHSDIPKWYQNPDYNFFNNYKTYRKLHPNQPFYILKPQMPWELWDILQEISPEEIQPNPPSSGMLGIIIMMTLCDQVDIYEFLPSKRKTDVCYYYQKFFDSACTMGAYHPLLYEKNLVKHLNQGTDEDIYLLGKATLPGFRTIHC

SEQ ID NO: 12898 - protein, 212 aa, Homo sapiens
LSLLNGSESAKLFAPPRDTPPKCIRCAVVGNGGILNGSRQGPNIDAHDYVFRLNGAVIKGFERDVGTKTSFYGFTVNTMKNSLVSYWNLGFTSVPQGQDLQYIFIPSDIRDYVMLRSAILGVPVPEGLDKGDRFLKSKLINTHFGDLYMPSTGALMLLTALHTCDQVSAYGFITSNYWKFSDHYFERKMKPLIFYANHDLSLEAALWRDLHK

SEQ ID NO: 12899 - protein, 84 aa, Homo sapiens
MGLPRGSFFWLLLLLTAACSGLLFALYFSAVQRYPGPAAGARARPADTCFTWPFSGTPTSVACSISPFQCCCGGTSSPQRSGTA

SEQ ID NO: 12900 - protein, 374 aa, Homo sapiens
MGLPRGSFFWLLLLLTAACSGLLFALYFSAVQRYPGPAAGARDTTSFEAFFQSKASNSWTGKGQACRHLLHLAIQRHPHFRGLFNLSIPVLLWGDLFTPALWDRLSQHKAPYGWRGLSHQVIASTLSLLNGSESAKLFAPPRDTPPKCIRCAVVGNGGILNGSRQGPNIDAHDYVFRLNGAVIKGFERDVGTKTSFYGFTVNTMKNSLVSYWNLGFTSVPQGQDLQYIFIPSDIRDYVMLRSAILGVPVPEGLDKGDRPHAYFGPEASASKFKLLHPDFISYLTERFLKSKLINTHFGDLYMPSTGALMLLTALHTCDQVSAYGFITSNYWKFSDHYFERKMKPLIFYANHDLSLEAALWRDLHKAGILQLYQR

SEQ ID NO: 12901 - protein, 74 aa, Homo sapiens
MGLPRGSFFWLLLLLTAACSGLLFALYFSAVQRYPGPAAGASCQPRVPSTCGCWGEGRGLREAWPPFERGHHII

SEQ ID NO: 12902 - protein, 38 aa, Homo sapiens
  VARIANT 1: note = misc_feature - Xaa can be any naturally occurring amino acid
XDYVMLRSAILGVPVPEGLDKGDSPAPTAQGTAATPAP

SEQ ID NO: 12903 - protein, 336 aa, Homo sapiens
MKTLMRHGLAVCLALTTMCTSLLLVYSSLGGQKERPPQQQQQQQQQQQQASATGSSQPAAESSTQQRPGVPAGPRPLDGYLGVADHKPLKMHCRDCALVTSSGHLLHSRQGSQIDQTECVIRMNDAPTRGYGRDVGNRTSLRVIAHSSIQRILRNRHDLLNVSQGTVFIFWGPSSYMRRDGKGQVYNNLHLLSQVLPRLKAFMITRHKMLQFDELFKQETGKDRKISNTWLSTGWFTMTIALELCDRINVYGMVPPDFCRDPNHPSVPYHYYEPFGPDECTMYLSHERGRKGSHHRFITEKRVFKNWARTFNIHFFQPDWKPESLAINHPENKPVF

SEQ ID NO: 12904 - protein, 236 aa, Homo sapiens
MKTLMRHGLAVCLALTTMCTSLLLVYSSLGGQKERPPQQQQQQQQQQQQASATGSSQPAAESSTQQRPGVPAGPRPLDGYLGVADHKPLKMHCRDCALVTSSGHLLHSRQGSQIDQTECVIRMNDAPTRGYGRDVGNRTSLRVIAHSSIQRILRNRHDLLNVSQGTVFIFWGPSSYMRRDGKGQVYNNLHLLSQVLPRLKAFMITRHKMLQFDELFKQETGKDRYPTLGSALAGLQ

SEQ ID NO: 12905 - protein, 333 aa, Homo sapiens
MACSRPPSQCEPTSLPPGPPAGRRHLPLSRRRREMSSNKEQRSAVFVILFALITILILYSSNSANEVFHYGSLRGRSRRPVNLKKWSITDGYVPILGNKTLPSRCHQCVIVSSSSHLLGTKLGPEIERAECTIRMNDAPTTGYSADVGNKTTYRVVAHSSVFRVLRRPQEFVNRTPETVFIFWGPPSKMQKPQGSLVRVIQRAGLVFPNMEAYAVSPGRMRQFDDLFRGETGKDREKSHSWLSTGWFTMVIAVELCDHVHVYGMVPPNYCSQRPRLQRMPYHYYEPKGPDECVTYIQNEHSRKGNHHRFITEKRVFSSWAQLYGITFSHPSWT

SEQ ID NO: 12906 - protein, 333 aa, Homo sapiens; identical to SEQ ID NO: 12905

SEQ ID NO: 12907 - protein, 374 aa, Homo sapiens
MACSRPPSQCEPTSLPPGPPAGRRHLPLSRRRREMSSNKEQRSAVFVILFALITILILYSSNSANEVFHYGSLRGRSRRPVNLKKWSITDGYVPILGNKTLPSRCHQCVIVSSSSHLLGTKLGPEIERAECTIRMNDAPTTGYSADVGNKTTYRVVAHSSVFRVLRRPQEFVNRTPETVFIFWGPPSKMQKPQGSLVRVIQRAGLVFPNMEAYAVSPGRMRQFDDLFRGETGKDREKSHSWLSTGWFTMVIAVELCDHVHVYGMVPPNYCSGPASSACPTTTTSPRGRTNVSPTSRMSTVARATTTASSPRKGSSHRGPSCMASPSPTPPGPRPPSLWDLRRVRGEAASAQPLGQGPSSGQSRLAGVSPSQSGP

SEQ ID NO: 12908 - protein, 86 aa, Homo sapiens
MSSNKEQRSAVFVILFALITILILYSSNSANEVFHYGSLRGRSRRPVNLKKWSITDGYVPILGNKGEVSFVVEHRLVYHGDRGGVV

SEQ ID NO: 12909 - protein, 200 aa, Homo sapiens
MSSNKEQRSAVFVILFALITILILYSSNSANEVFHYGSLRGRSRRPVNLKKWSITDGYVPILGNKTLPSRCHQCVIVSSSSHLLGTKLGPEIERAECTIRMNDAPTTGYSADVGNKTTYRVVAHSSVFRVLRRPQEFVNRTPETVFIFWGPPSKMQKPQGSLVRVIQRAGLVFPNMEAYAVSPGRMRQFDDLFRGETGKD

SEQ ID NO: 12910 - protein, 299 aa, Homo sapiens
MSSNKEQRSAVFVILFALITILILYSSNSANEVFHYGSLRGRSRRPVNLKKWSITDGYVPILGNKTLPSRCHQCVIVSSSSHLLGTKLGPEIERAECTIRMNDAPTTGYSADVGNKTTYRVVAHSSVFRVLRRPQEFVNRTPETVFIFWGPPSKMQKPQGSLVRVIQRAGLVFPNMEAYAVSPGRMRQFDDLFRGETGKDREKSHSWLSTGWFTMVIAVELCDHVHVYGMVPPNYCSQRPRLQRMPYHYYEPKGPDECVTYIQNEHSRKGNHHRFITEKRVFSSWAQLYGITFSHPSWT

SEQ ID NO: 12911 - protein, 299 aa, Homo sapiens; identical to SEQ ID NO: 12910

SEQ ID NO: 12912 - protein, 299 aa, Homo sapiens; identical to SEQ ID NO: 12910

SEQ ID NO: 12913 - protein, 354 aa, Homo sapiens
MQLQFRSWMLAALTLLVVFLIFADISEIEEEIGAEVVINGSSSPAVVDRSNESIKHNIQPASSKWRHNQTLSLRIRKQILKFLDAEKDISVLKGTLKPGDIIHYIFDRDSTMNVSQNLYELLPRTSPLKNKHFGTCAIVGNSGVLLNSGCGQEIDAHSFVIRCNLAPVQEYARDVGLKTDLVTMNPSVIQRAFEDLVNATWREKLLQRLHSLNGSILWIPAFMARGGKERVEWVNELILKHHVNVRTAYPSLRLLHAVRGYWLTNKVHIKRPTTGLLMYTLATRFCKQIYLYGFWPFPLDQNQNPVKYHYYDSLKYGYTSQASPHTMPLEFKALKSLHEQGALKLTVGQCDGAT

SEQ ID NO: 12914 - protein, 375 aa, Homo sapiens
MQLQFRSWMLAALTLLVVFLIFADISEIEEEIGNSGGRGTIRSAVNSLHSKSNRAEVVINGSSSPAVVDRSNESIKHNIQPASSKWRHNQTLSLRIRKQILKFLDAEKDISVLKGTLKPGDIIHYIFDRDSTMNVSQNLYELLPRTSPLKNKHFGTCAIVGNSGVLLNSGCGQEIDAHSFVIRCNLAPVQEYARDVGLKTDLVTMNPSVIQRAFEDLVNATWREKLLQRLHSLNGSILWIPAFMARGGKERVEWVNELILKHHVNVRTAYPSLRLLHAVRGYWLTNKVHIKRPTTGLLMYTLATRFCKQIYLYGFWPFPLDQNQNPVKYHYYDSLKYGYTSQASPHTMPLEFKALKSLHEQGALKLTVGQCDGAT

SEQ ID NO: 12915 - protein, 332 aa, Homo sapiens
MQLQFRSWMLAALTLLVVFLIFADISEIEEEIGNSGGRGTIRSAVNSLHSKSNRKQILKFLDAEKDISVLKGTLKPGDIIHYIFDRDSTMNVSQNLYELLPRTSPLKNKHFGTCAIVGNSGVLLNSGCGQEIDAHSFVIRCNLAPVQEYARDVGLKTDLVTMNPSVIQRAFEDLVNATWREKLLQRLHSLNGSILWIPAFMARGGKERVEWVNELILKHHVNVRTAYPSLRLLHAVRGYWLTNKVHIKRPTTGLLMYTLATRFCKQIYLYGFWPFPLDQNQNPVKYHYYDSLKYGYTSQASPHTMPLEFKALKSLHEQGALKLTVGQCDGAT

SEQ ID NO: 12916 - protein, 46 aa, Homo sapiens
MRSIRKRWTICTISLLLIFYKTKEIARTEEHQETQLIGASGGGVDS

SEQ ID NO: 12917 - protein, 168 aa, Homo sapiens
MRSIRKRWTICTISLLLIFYKTKEIARTEEHQETQLIGDGELSLSRSLVNSSDKIIRKAGSSIFQHNVEGWKINSSLVLEIRKNILRFLDAERDVSVVKSSFKPGDVIHYVLDRRRTLNISHDLHSLLPEVSPMKNRRFKTCAVVGNSGILLDSECGKEIDSHNFVIR

SEQ ID NO: 12918 - protein, 359 aa, Homo sapiens
MRSIRKRWTICTISLLLIFYKTKEIARTEEHQETQLIGDGELSLSRSLVNSSDKIIRKAGSSIFQHNVEGWKINSSLVLEIRKNILRFLDAERDVSVVKSSFKPGDVIHYVLDRRRTLNISHDLHSLLPEVSPMKNRRFKTCAVVGNSGILLDSECGKEIDSHNFVIRCNLAPVVEFAADVGTKSDFITMNPSVVQRAFGGFRNESDREKFVHRLSMLNDSVLWIPAFMVKGGEKHVEWVNALILKNKLKVRTAYPSLRLIHAVRGYWLTNKVPIKRPSTGLLMYTLATRFCDEIHLYGFWPFPKDLNGKAVKYHYYDDLKYRYFSNASPHRMPLEFKTLNVLHNRGALKLTTGKCVKQ

SEQ ID NO: 12919 - protein, 398 aa, Homo sapiens
MRPGGALLALLASLLLLLLLRLLWCPADAPGRARILVEESREATHGTPAALRTLRSPATAVPRATNSTYLNEKSLQLTEKCKNLQYGIESFSNKTKGYSENDYLQIITDIQSCPWKRQAEEYANFRAKLASCCDAVQNFVVSQNNTPVGTNMSYEVESKKEIPIKKNIFHMFPVSQPFVDYPYNQCAVVGNGGILNKSLCGTEIDKSDFVFRCNLPPTTGDVSKDVGSKTNLVTINPSIITLKYGNLKEKKALFLEDIATYGDAFFLLPAFSFRANTGTSFKVYYTLEESKARQKVLFFHPKYLKDLALFWRTKGVTAYRLSTGLMITSVAVELCKNVKLYGFWPFSKTVEDIPVSHHYYDNKLPKHGFHQMPKEYSQILQLHMKGILKLQFSKCEVA

SEQ ID NO: 12920 - protein, 128 aa, Homo sapiens
  VARIANT 1: note = misc_feature - Xaa can be any naturally occurring amino acid
XYPYNQCAVVGNGGILNKSLCGTEIDKSDFVFRCNLPPTTGDVSKDVGSKTNLVTINPSIITLKYGNLKEKKALFLEDIATYGDAFFLLPAFSFRANTGTSFKVYYTLEESKARQKCKTKRKTINSIL

SEQ ID NO: 12921 - protein, 147 aa, Homo sapiens
MKRLEEMSNMFQSSGVQHHPPEPKAQTEGNEDSEGKEQRWEMVMDKKHFKLWRRPITGTHLYQYRVFGTYTDVTPRQFFNVQLDTEYRKKWDALVIKLEVIERDVVSGSEVLHWVTHFPYPMYSRDYVYVRRYSVDQENNMMVLVSR

SEQ ID NO: 12922 - protein, 370 aa, Homo sapiens
MLPRRLLAAWLAGTRGGGLLALLANQCRFVTGLRVRRAQQIAQLYGRLYSESSRRVLLGRLWRRLHGRPGHASALMAALAGVFVWDEERIQEEELQRSINEMKRLEEMSNMFQSSGVQHHPPEPKAQTEGNEDSEGKEQRWEMVMDKKHFKLWRRPITGTHLYQYRVFGTYTDVTPRQFFNVQLDTEYRKKWDALVIKLEVIERDVVSGSEVLHWVTHFPYPMYSRDYVYVRRYSVDQENNMMVLVSRAVEHPSVPESPEFVRVRSYESQMVIRPHKSFDENGFDYLLTYSDNPQTVFPRYCVSWMVSSGMPDFLEKLHMATLKAKNMEIKVKDYISAKPLEMSSEAKATSQSSERKNEGSCGPARIEYA

SEQ ID NO: 12923 - protein, 62 aa, Homo sapiens
MKFLVFAFILALMVSMIGADSSEEKFLRRIGRFGYGYGPYQPVPEQPLYPQPYQPQYQQYTF

SEQ ID NO: 12924 - protein, 62 aa, Homo sapiens; identical to SEQ ID NO: 12923

SEQ ID NO: 12925 - protein, 52 aa, Homo sapiens
MKFLVFAFILALMVSMIGADSSEEYGYGPYQPVPEQPLYPQPYQPQYQQYTF

SEQ ID NO: 12926 - protein, 247 aa, Homo sapiens
MLQNSAVLLVLVISASATHEAEQNDSVSPRKSRVAAQNSAEVVRCLNSALQVGCGAFACLENSTCDTDGMYDICKSFLYSAAKFDTQGKAFVKESLKCIANGVTSKVFLAIRRCSTFQRMIAEVQEECYSKLNVCSIAKRNPEAITEVVQLPNHFSNRYYNRLVRSLLECDEDTVSTIRDSLMEKIGPNMASLFHILQTDHCAQTHPRADFNRRRTNEPQKLKVLLRNLRGEEDSPSHIKRTSHESA

SEQ ID NO: 12927 - protein, 178 aa, Homo sapiens
MYDICKSFLYSAAKFDTQGKAFVKESLKCIANGVTSKVFLAIRRCSTFQRMIAEVQEECYSKLNVCSIAKRNPEAITEVVQLPNHFSNRYYNRLVRSLLECDEDTVSTIRDSLMEKIGPNMASLFHILQTDHCAQTHPRADFNRRRTNEPQKLKVLLRNLRGEEDSPSHIKRTSHESA

SEQ ID NO: 12928 - protein, 302 aa, Homo sapiens
MCAERLGQFMTLALVLATFDPARGTDATNPPEGPQDRSSQQKGRLSLQNTAEIQHCLVNAGDVGCGVFECFENNSCEIRGLHGICMTFLHNAGKFDAQGKSFIKDALKCKAHALRHRFGCISRKCPAIREMVSQLQRECYLKHDLCAAAQENTRVIVEMIHFKDLLLHEPYVDLVNLLLTCGEEVKEAITHSVQVQCEQNWGSLCSILSFCTSAIQKPPTAPPERQPQVDRTKLSRAHHGEAGHHLPEPSSRETGRGAKGERGSKSHPNAHARGRVGGLGAQGPSGSSEWEDEQSEYSDIRR

SEQ ID NO: 12929 - protein, 53 aa, Homo sapiens
MTFLHNAGKFDAQGKSFIKDALKCKAHALRHRFGCISRKCPAIREMVSQLQRE

SEQ ID NO: 12930 - protein, 123 aa, Homo sapiens
  VARIANT 1: note = misc_feature - Xaa can be any naturally occurring amino acid
XQNTAEIQHCLVNAGDVGCGVFECFENNSCEIRGLHGICMTFLHNAGKFDAQGKSFIKDALKCKAHALRHRFGCISRKCPAIREMVSQLQRECYLKHDLCAAAQENTRVIVEMIHFKDLLLHE

SEQ ID NO: 12931 - protein, 276 aa, Homo sapiens
MGCGPSQPAEDRRRVRAPKKGWKEEFKADVSVPHTGENCSPRMEAALTKNTVDIAEGLEQVQMGSLPGTISENSPSPSERNRRVNSDLVTNGLINKPQSLESRERQKSSDILEELIVQGIIQSHSKVFRNGESYDVTLTTTEKPLRKPPSRLKKLKIKKQVKDFTMKDIEEKMEAAEERRKTKEEEIRKRLRSDRLLPSANHSDSAELDGAEVAFAKGLQRVRSAGFEPSDLQGGKPLKRKKSKCDATLIDRNESDESFGVVESDMSYNQADDIVY

SEQ ID NO: 12932 - protein, 200 aa, Homo sapiens
MHVFFVFLSLLETLRRLPVADVSVPHTGENCSPRMEAALTKNTVDIAEGLEQVQMGSLPGTISENSPSPSERNRRVNSDLVTNGLINKPQSLESRERQKSSDILEELIVQGIIQSHSKVFRNGESYDVTLTTTEKPLRKPPSRLKKLKIKKQVKDFTMKDIEEKMEAAEERRKTKEEEIRKRLRSDRLLPSANHSDSAEL

SEQ ID NO: 12933 - protein, 45 aa, Homo sapiens
MLQFLLGFTLGNVVGMYLAQNYDGIGSPSVSQAGVQWWDLGSLQL

SEQ ID NO: 12934 - protein, 47 aa, Homo sapiens
MLQFLLGFTLGNVVGMYLAQNYDIPNLAKKLEEIKKDLDAKKKPPSA

SEQ ID NO: 12935 - protein, 310 aa, Homo sapiens
MLARAARGTGALLLRGLNILIPVLDRIRYVQSLKEIVINVPEQSAVTLDNVTLQIDGVLYLRIMDPYKASYGVEDPEYAVTQLAQTTMRSELGKLSLDKVFRERESLNASIVDAINQAADCWGIRCLRYEIKDIHVPPRVKESMQMQVEAERRKRATVLESEGTRESAINVAEGKKQAQILASEAEKAEQINQAAGEASAVLAKAKAKAEAIRILAAALTQHNGDAAASLTVAEQYVSAFSKLAKDSNTILLPSNPGDVTSMVAQAMGVYGALTKAPVPGTPDSLSSGSSRDVQGTDASLDEELDRVKMS

SEQ ID NO: 12936 - protein, 356 aa, Homo sapiens
MLARAARGTGALLLRGSLLASGRAPRRASSGLPRNTVVLFVPQQEAWVVERMGRFHRILEPGLNILIPVLDRIRYVQSLKEIVINVPEQSAVTLDNVTLQIDGVLYLRIMDPYKASYGVEDPEYAVTQLAQTTMRSELGKLSLDKVFRERESLNASIVDAINQAADCWGIRCLRYEIKDIHVPPRVKESMQMQVEAERRKRATVLESEGTRESAINVAEGKKQAQILASEAEKAEQINQAAGEASAVLAKAKAKAEAIRILAAALTQHNGDAAASLTVAEQYVSAFSKLAKDSNTILLPSNPGDVTSMVAQAMGVYGALTKAPVPGTPDSLSSGSSRDVQGTDASLDEELDRVKMS

SEQ ID NO: 12937 - protein, 311 aa, Homo sapiens
MLARAARGTGALLLRGSLLASGRAPRRASSGLPRNTVVLFVPQQEAWVVERMGRFHRILEPGLNILIPVLDRIRYVQSLKEIVINVPEQSAVTLDNVTLQIDGVLYLRIMDPYKASYGVEDPEYAVTQLAQTTMRSELGKLSLDKVFRVEAERRKRATVLESEGTRESAINVAEGKKQAQILASEAEKAEQINQAAGEASAVLAKAKAKAEAIRILAAALTQHNGDAAASLTVAEQYVSAFSKLAKDSNTILLPSNPGDVTSMVAQAMGVYGALTKAPVPGTPDSLSSGSSRDVQGTDASLDEELDRVKMS

SEQ ID NO: 12938 - protein, 101 aa, Homo sapiens
MQMQVEAERRKRATVLESEGTRESAINVAEGKKQAQILASEAEKAEQINQAAGEASAVLAKAKAKAEAIRILAAALTQHVRGPWVGMGTGIDSGRGSLIYA

SEQ ID NO: 12939 - protein, 169 aa, Homo sapiens
MARPVQLAPGSLALVLCRLEAQKAAGAAEEPGGRAVFRAFRRANARCFWNARLARAASRLAFQGWLRRGVLLVRAPPACLQVLRDAWRRRALRPPRGFRIRAVGDVFPVQMNPITQSQFVPLGEVLCCAISDMNTAQIVVTQESLLERLMKHYPGHRVWDLIIQSFWMD

SEQ ID NO: 12940 - protein, 227 aa, Homo sapiens
MARPVQLAPGSLALVLCRLEAQKAAGAAEEPGGRAVFRAFRRANARCFWNARLARAASRLAFQGWLRRGVLLVRAPPACLQVLRDAWRRRALRPPRGFRIRAVGDVFPVQMNPITQSQFVPLGEVLCCAISDMNTAQIVVTQESLLERLMKHYPGIAIPSEDILYTTLGTLIKERKIYHTGEGYFIVTPQTYFITNTTTQENKRMLPSDESRLMPASMTYLDTESGI

SEQ ID NO: 12941 - protein, 989 aa, Homo sapiens
MARPVQLAPGSLALVLCRLEAQKAAGAAEEPGGRAVFRAFRRANARCFWNARLARAASRLAFQGWLRRGVLLVRAPPACLQVLRDAWRRRALRPPRGFRIRAVGDVFPVQMNPITQSQFVPLGEVLCCAISDMNTAQIVVTQESLLERLMKHYPGIAIPSEDILYTTLGTLIKERKIYHTGEGYFIVTPQTYFITNTTTQENKRMLPSDESRLMPASMTYLVSMESCAESAQENAAPISHCQSCQCFRDMHTQDVQEAPVAAEVTRKSHRGLGESVSWVQNGAVSVSAEHHICESTKPLPYTRDKEKGKKFGFSLLWRSLSRKEKPKTEHSSFSAQFPPEEWPVRDEDDLDNIPRDVEHEIIKRINPILTVDNLIKHTVLMQKYEEQKKYNSQGTSTDMLTIGHKYPSKEGVKKRQGLSAKPQGQGHSRRDRHKARNQGSEFQPGSIRLEKHPKLPATQPIPRIKSPNEMVGQKPLGEITTVLGSHLIYKKRISNPFQGLSHRGSTISKGHKIQKTSDLKPSQTGPKEKPFQKPRSLDSSRIFDGKAKEPYAEQPNDKMEAESIYINDPTVKPINDDFRGHLFSHPQQSMLQNDGKCCPFMESMLRYEVYGGENEVIPEVLRKSHSHFDKLGETKQTPHSLPSRGASFSDRTPSACRLVDNTIHQFQNLGLLDYPVGVNPLRQAARQDKDSEELLRKGFVQDAETTSLENEQLSNDDQALYQNEVEDDDGACSSLYLEEDDISENDDLRQMLPGHSQYSFTGGSQGNHLGKQKVIERSLTEYNSTMERVESQVLKRNECYKPTGLHATPGESQEPNLSAESCGLNSGAQFGFNYEEEPSVAKCVQASAPADERIFDYYSARKASFEAEVIQDTIGDTGKKPASWSQSPQNQEMRKHFPQKFQLFNTSHMPVLAQDVQYEHSHLEGTENHSMAGDSGIDSPRTQSLGSNNSVILDGLKRRQNFLQNVEGTKSSQPLTSNSLLPLTPVINV

SEQ ID NO: 12942 - protein, 989 aa, Homo sapiens; identical to SEQ ID NO: 12941

SEQ ID NO: 12943 - protein, 1101 aa, Homo sapiens
MARPVQLAPGSLALVLCRLEAQKAAGAAEEPGGRAVFRAFRRANARCFWNARLARAASRLAFQGWLRRGVLLVRAPPACLQVLRDAWRRRALRPPRGFRIRAVGECGTRRGGASRPVQLAPGSLALVLCRLEAQKAAGAAEEPGGRAVFRAFRRANARCFWNARLARAASRLAFQGWLRRGVLLVRAPPACLQVLRDAWRRRALRPPRGFRIRAVGDVFPVQMNPITQSQFVPLGEVLCCAISDMNTAQIVVTQESLLERLMKHYPGIAIPSEDILYTTLGTLIKERKIYHTGEGYFIVTPQTYFITNTTTQENKRMLPSDESRLMPASMTYLVSMESCAESAQENAAPISHCQSCQCFRDMHTQDVQEAPVAAEVTRKSHRGLGESVSWVQNGAVSVSAEHHICESTKPLPYTRDKEKGKKFGFSLLWRSLSRKEKPKTEHSSFSAQFPPEEWPVRDEDDLDNIPRDVEHEIIKRINPILTVDNLIKHTVLMQKYEEQKKYNSQGTSTDMLTIGHKYPSKEGVKKRQGLSAKPQGQGHSRRDRHKARNQGSEFQPGSIRLEKHPKLPATQPIPRIKSPNEMVGQKPLGEITTVLGSHLIYKKRISNPFQGLSHRGSTISKGHKIQKTSDLKPSQTGPKEKPFQKPRSLDSSRIFDGKAKEPYAEQPNDKMEAESIYINDPTVKPINDDFRGHLFSHPQQSMLQNDGKCCPFMESMLRYEVYGGENEVIPEVLRKSHSHFDKLGETKQTPHSLPSRGASFSDRTPSACRLVDNTIHQFQNLGLLDYPVGVNPLRQAARQDKDSEELLRKGFVQDAETTSLENEQLSNDDQALYQNEVEDDDGACSSLYLEEDDISENDDLRQMLPGHSQYSFTGGSQGNHLGKQKVIERSLTEYNSTMERVESQVLKRNECYKPTGLHATPGESQEPNLSAESCGLNSGAQFGFNYEEEPSVAKCVQASAPADERIFDYYSARKASFEAEVIQDTIGDTGKKPASWSQSPQNQEMRKHFPQKFQLFNTSHMPVLAQDVQYEHSHLEGTENHSMAGDSGIDSPRTQSLGSNNSVILDGLKRRQNFLQNVEGTKSSQPLTSNSLLPLTPVINV

SEQ ID NO: 12944 - protein, 969 aa, Homo sapiens
MALSLWPLLLLLLLLLLLSFAVTLAPTGPHSLDPGLSFLKSLLSTLDQAPQGSLSRSRFFTFLANISSSFEPGRMGEGPVGEPPPLQPPALRLHDFLVTLRGSPDWEPMLGLLGDMLALLGQEQTPRDFLVHQAGVLGGLVEVLLGALVPGGPPTPTRPPCTRDGPSDCVLAADWLPSLLLLLEGTRWQALVQVQPSVDPTNATGLDGREAAPHFLQGLLGLLTPTGELGSKEALWGGLLRTVGAPLYAAFQEGLLRVTHSLQDEVFSILGQPEPDTNGQCQGGNLQQLLLWGVRHNLSWDVQALGFLSGSPPPPPALLHCLSTGVPLPRASQPSAHISPRQRRAITVEALCENHLGPAPPYSISNFSIHLLCQHTKPATPQPHPSTTAICQTAVWYAVSWAPGAQGWLQACHDQFPDEFLDAICSNLSFSALSGSNRRLVKRLCAGLLPPPTSCPEGLPPVPLTPDIFWGCFLENETLWAERLCGEASLQAVPPSNQAWVQHVCQGPTPDVTASPPCHIGPCGERCPDGGSFLVMVCANDTMYEVLVPFWPWLAGQCRISRGGNDTCFLEGLLGPLLPSLPPLGPSPLCLTPGPFLLGMLSQLPRCQSSVPALAHPTRLHYLLRLLTFLLGPGAGGAEAQGMLGRALLLSSLPDNCSFWDAFRPEGRRSVLRTIGEYLEQDEEQPTPSGFEPTVNPSSGISKMELLACFSPVLWDLLQREKSVWALQILVQAYLHMPPENLQQLVLSAEREAAQGFLTLMLQGKLQGKLQVPPSEEQALGRLTALLLQRYPRLTSQLFIDLSPLIPFLAVSDLMRFPPSLLANDSVQQGYRGSEENSLEEDKGLRPMTPRSLAAIRDYSPGMRPEQKEALAKRLLAPELFGEVPAWPQELLWAVLPLLPHLPLENFLQLSPHQIQALEDSWPAAGLGPGHARHVLRSLVNQSVQDGEEQVRRWHMNFWVCCAHLEERC

SEQ ID NO: 12945 - protein, 351 aa, Homo sapiens
MALSLWPLLLLLLLLLLLSFAVTLAPTGPHSLDPGLSFLKSLLSTLDQAPQGSLSRSRFFTFLANISSSFEPGRMGEGPVGEPPPLQPPALRLHDFLVTLRGSPDWEPMLGLLGDMLALLGQEQTPRDFLVHQAGVLGGLVEVLLGALVPGGPPTPTRPPCTRDGPSDCVLAADWLPSLLLLLEGTRWQALVQVQPSVDPTNATGLDGREAAPHFLQGLLGLLTPTGELGSKEALWGGLLRTVGAPLYAAFQEGLLRVTHSLQDEVFSILGQPEPDTNGQCQGGNLQQLLLWGVRHNLSWDVQALGFLSGSPPPPPALLHCLSTGVPLPRASQPSAHISPRQRRAITVEAL

SEQ ID NO: 12946 - protein, 1775 aa, Homo sapiens
MALSLWPLLLLLLLLLLLSFAVTLAPTGPHSLDPGLSFLKSLLSTLDQAPQGSLSRSRFFTFLANISSSFEPGRMGEGPVGEPPPLQPPALRLHDFLVTLRGSPDWEPMLGLLGDMLALLGQEQTPRDFLVHQAGVLGGLVEVLLGALVPGGPPTPTRPPCTRDGPSDCVLAADWLPSLLLLLEGTRWQALVQVQPSVDPTNATGLDGREAAPHFLQGLLGLLTPTGELGSKEALWGGLLRTVGAPLYAAFQEGLLRVTHSLQDEVFSILGQPEPDTNGQCQGGNLQQLLLWGVRHNLSWDVQALGFLSGSPPPPPALLHCLSTGVPLPRASQPSAHISPRQRRAITVEALCENHLGPAPPYSISNFSIHLLCQHTKPATPQPHPSTTAICQTAVWYAVSWAPGAQGWLQACHDQFPDEFLDAICSNLSFSALSGSNRRLVKRLCAGLLPPPTSCPEGLPPVPLTPDIFWGCFLENETLWAERLCGEASLQAVPPSNQAWVQHVCQGPTPDVTASPPCHIGPCGERCPDGGSFLVMVCANDTMYEVLVPFWPWLAGQCRISRGGNDTCFLEGLLGPLLPSLPPLGPSPLCLTPGPFLLGMLSQLPRCQSSVPALAHPTRLHYLLRLLTFLLGPGAGGAEAQGMLGRALLLSSLPDNCSFWDAFRPEGRRSVLRTIGEYLEQDEEQPTPSGFEPTVNPSSGISKMELLACFSPVLWDLLQREKSVWALQILVQAYLHMPPENLQQLVLSAEREAAQGFLTLMLQGKLQGKLQVPPSEEQALGRLTALLLQRYPRLTSQLFIDLSPLIPFLAVSDLMRFPPSLLANDSVLAAIRDYSPGMRPEQKEALAKRLLAPELFGEVPAWPQELLWAVLPLLPHLPLENFLQLSPHQIQALEDSWPAAGLGPGHARHVLRSLVNQSVQDGEEQVRRLGPLACFLSPEELQSLVPLSDPTGPVERGLLECAANGTLSPEGRVAYELLGVLRSSGGAVLSPRELRVWAPLFSQLGLRFLQELSEPQLRAMLPVLQGTSVTPAQAVLLLGRLLPRHDLSLEELCSLHLLLPGLSPQTLQAIPRRVLVGACSCLAPELSRLSACQTAALLQTFRVKDGVKNMGTTGAGPAVCIPGQPIPTTWPDCLLPLLPLKLLQLDSLALLANRRRYWELPWSEQQAQFLWKKMQVPTNLTLRNLQALGTLAGGMSCEFLQQINSMVDFLEVVHMIYQLPTRVRGSLRACIWAELQRRMAMPEPEWTTVGPELNGLDSKLLLDLPIQLMDRLSNESIMLVVELVQRAPEQLLALTPLHQAALAERALQNLAPKETPVSGEVLETLGPLVGFLGTESTRQIPLQILLSHLSQLQGFCLGETFATELGWLLLQESVLGKPELWSQDEVEQAGRLVFTLSTEAISLIPREALGPETLERLLEKQQSWEQSRVGQLCREPQLAAKKAALVAGVVRPAAEDLPEPVPNCADVRGTFPAAWSATQIAEMELSDFEDCLTLFAGDPGLGPEELRAAMGKAKQLWGPPRGFRPEQILQLGRLLIGLGDRELQELILVDWGVLSTLGQIDGWSTTQLRIVVSSFLRQSGRHVSHLDFVHLTALGYTLCGLRPEELQHISSWEFSQAALFLGTLHLQCSEEQLEVLAHLLVLPGGFGPISNWGPEIFTEIGTIAAGIPDLALSALLRGQIQGVTPLAISVIPPPKFAVVFSPIQLSSLTSAQAVAVTPEQMAFLSPEQRRAVAWAQHEGKESPEQQGRSTAWGLQDWSRPSWSLVLTISFLGHLL

SEQ ID NO: 12947 - protein, 1002 aa, Homo sapiens
MELLACFSPVLWDLLQREKSVWALQILVQAYLHMPPENLQQLVLSAEREAAQGFLTLMLQGKLQGKLQVPPSEEQALGRLTALLLQRYPRLTSQLFIDLSPLIPFLAVSDLMRFPPSLLANDSVQQGYRGSEENSLEEDKGLRPMTPRSLAAIRDYSPGMRPEQKEALAKRLLAPELFGEVPAWPQELLWAVLPLLPHLPLENFLQLSPHQIQALEDSWPAAGLGPGHARHVLRSLVNQSVQDGEEQVRRLGPLACFLSPEELQSLVPLSDPTGPVERGLLECAANGTLSPEGRVAYELLGVLRSSGGAVLSPRELRVWAPLFSQLGLRFLQELSEPQLRAMLPVLQGTSVTPAQAVLLLGRLLPRHDLLQLDSLALLANRRRYWELPWSEQQAQFLWKKMQVPTNLTLRNLQALGTLAGGMSCEFLQQINSMVDFLEVVHMIYQLPTRVRGSLRACIWAELQRRMAMPEPEWTTVGPELNGLDSKLLLDLPIQLMDRLSNESIMLVVELVQRAPEQLLALTPLHQAALAERALQNLAPKETPVSGEVLETLGPLVGFLGTESTRQIPLQILLSHLSQLQGFCLGETFATELGWLLLQESVLGKPELWSQDEVEQAGRLVFTLSTEAISLIPREALGPETLERLLEKQQSWEQSRVGQLCREPQLAAKKAALVAGVVRPAAEDLPEPVPNCADVRGTFPAAWSATQIAEMELSDFEDCLTLFAGDPGLGPEELRAAMGKAKQLWGPPRGFRPEQILQLGRLLIGLGDRELQELILVDWGVLSTLGQIDGWSTTQLRIVVSSFLRQSGRHVSHLDFVHLTALGYTLCGLRPEELQHISSWEFSQAALFLGTLHLQCSEEQLEVLAHLLVLPGGFGPISNWGPEIFTEIGTIAAGIPDLALSALLRGQIQGVTPLAISVIPPPKFAVVFSPIQLSSLTSAQAVAVTPEQMAFLSPEQRRAVAWAQHEGKESPEQQGRSTAWGLQDWSRPSWSLVLTISFLGHLL

SEQ ID NO: 12948 - protein, 663 aa, Homo sapiens
TFLANISSSFEPGRMGEGPVGEPPPLQPPALRLHDFLVTLRGSPDWEPMLGLLGDMLALLGQEQTPRDFLVHQAGVLGGLVEVLLGALVPGGPPTPTRPPCTRDGPSDCVLAADWLPSLLLLLEGTRWQALVQVQPSVDPTNATGLDGREAAPHFLQGLLGLLTPTGELGSKEALWGGLLRTVGAPLYAAFQEGLLRVTHSLQDEVFSILGQPEPDTNGQCQGGNLQQLLLWGVRHNLSWDVQALGFLSGSPPPPPALLHCLSTGVPLPRASQPSAHISPRQRRAITVEALCENHLGPAPPYSISNFSIHLLCQHTKPATPQPHPSTTAICQTAVWYAVSWAPGAQGWLQACHDQFPDEFLDAICSNLSFSALSGSNRRLVKRLCAGLLPPPTSCPEGLPPVPLTPDIFWGCFLENETLWAERLCGEASLQAVPPSNQAWVQHVCQGPTPDVTASPPCHIGPCGERCPDGGSFLVMVCANDTMYEVLVPFWPWLAGQCRISRGGNDTCFLEGLLGPLLPSLPPLGPSPLCLTPGPFLLGMLSQLPRCQSSVPALAHPTRLHYLLRLLTFLLGPGAGGAEAQGMLGRALLLSSLPDNCSFWDAFRPEGRRSVLRTIGEYLEQDEEQPTPSGFEPTVNPSSGISKMELLACFSVSALPEGKLLEQ

SEQ ID NO: 12949 - protein, 119 aa, Homo sapiens
  VARIANT 1: note = misc_feature - Xaa can be any naturally occurring amino acid
XSLAAIRDYSPGMRPEQKEALAKRLLAPELFGEVPAWPQELLWAVLPLLPHLPLENFLQLSPHQIQALEDSWPAAGLGPGHARHVLRSLVNQSVQDGEEQVRRWHMNFWVCCAHLEERC

SEQ ID NO: 12950 - protein, 346 aa, Homo sapiens
MTATLAAAADIATMVSGSSGLAAARLLSRSFLLPQNGIRHCSYTASRQHLYVDKNTKIICQGFTGKQGTFHSQQALEYGTKLVGGTTPGKGGQTHLGLPVFNTVKEAKEQTGATASVIYVPPPFAAAAINEAIEAEIPLVVCITEGIPQQDMVRVKHKLLRQEKTRLIGPNCPGVINPGECKIGIMPGHIHKKGRIGIVSRSGTLTYEAVHQTTQVGLGQSLCVGIGGDPFNGTDFIDCLEIFLNDSATEGIILIGEIGGNAEENAAEFLKQHNSGPNSKPVVSFIAGLTAPPGRRMGHAGAIIAGGKGGAKEKISALQSAGVVVSMSPAQLGTTIYKEFEKRKML

SEQ ID NO: 12951 - protein, 105 aa, Homo sapiens
  VARIANT 1: note = misc_feature - Xaa can be any naturally occurring amino acid
XTLAAAADIATMVSGSSGLAAARLLSRSFLLPQNGIRHCSYTASRQHLYVDKNTKIICQGFTGKQELLLLTRHLSQPAGIGIWHQTRWRNHSRERRPDTSGLTCL

SEQ ID NO: 12952 - protein, 328 aa, Homo sapiens
MSAAGLLAPAPAQAGAPPAPEYYPEEDEELESAEDDERSCRGRESDEDTEDASETDLAKHDEEDYVEMKEQMYQDKLASLKRQLQQLQEGTLQEYQKRMKKLDQQYKERIRNAELFLQLETEQVERNYIKEKKAAVKEFEDKKVELKENLIAELEEKKKMIENEKLTMELTGDSMEVKPIMTRKLRRRPNDPVPIPDKRRKPAPAQLNYLLTDEQIMEDLRTLNKLKSPKRPASPSSPEHLPATPAESPAQRFEARIEDGKLYYDKRWYHKSQAIYLESKDNQKLSCVISSVGANEIWVRKTSDSTKMRIYLGQLQRGLFVIRRRSAA

SEQ ID NO: 12953 - protein, 29 aa, Homo sapiens
MKYSCCALVLAVLGTELLGSLCSTVRSPR

SEQ ID NO: 12954 - protein, 56 aa, Homo sapiens
MKYSCCALVLAVLGTELLGSLCSTVRSPRFRGRIQQERKNIRPNIILVLTDDQDVE

SEQ ID NO: 12955 - protein, 76 aa, Homo sapiens
MKYSCCALVLAVLGTELLGSLCSTVRSPRFRGRIQQERKNIRPNIILVLTDDQDVELGSLQVMNKTRKIMEHGGAT

SEQ ID NO: 12956 - protein, 85 aa, Homo sapiens
MKYSCCALVLAVLGTELLGSLCSTVRSPRFRGRIQQERKNIRPNIILVLTDDQDVELGSLQVMNKTRKIMEHGGATFINAFVTTP

SEQ ID NO: 12957 - protein, 172 aa, Homo sapiens
MKYSCCALVLAVLGTELLGSLCSTVRSPRFRGRIQQERKNIRPNIILVLTDDQDVELGSLQVMNKTRKIMEHGGATFINAFVTTPMCCPSRSSMLTGKYVHNHNVYTNNENCSSPSWQAMHEPRTFAVYLNNTGYRTAFFGKYLNEYNGSYIPPGWREWLGLIKNSRFYNYT

SEQ ID NO: 12958 - protein, 871 aa, Homo sapiens
MKYSCCALVLAVLGTELLGSLCSTVRSPRFRGRIQQERKNIRPNIILVLTDDQDVELGSLQVMNKTRKIMEHGGATFINAFVTTPMCCPSRSSMLTGKYVHNHNVYTNNENCSSPSWQAMHEPRTFAVYLNNTGYRTAFFGKYLNEYNGSYIPPGWREWLGLIKNSRFYNYTVCRNGIKEKHGFDYAKDYFTDLITNESINYFKMSKRMYPHRPVMMVISHAAPHGPEDSAPQFSKLYPNASQHITPSYNYAPNMDKHWIMQYTGPMLPIHMEFTNILQRKRLQTLMSVDDSVERLYNMLVETGELENTYIIYTADHGYHIGQFGLVKGKSMPYDFDIRVPFFIRGPSVEPGSIVPQIVLNIDLAPTILDIAGLDTPPDVDGKSVLKLLDPEKPGNRFRTNKKAKIWRDTFLVERGKFLRKKEESSKNIQQSNHLPKYERVKELCQQARYQTACEQPGQKWQCIEDTSGKLRIHKCKGPSDLLTVRQSTRNLYARGFHDKDKECSCRESGYRASRSQRKSQRQFLRNQGTPKYKPRFVHTRQTRSLSVEFEGEIYDINLEEEEELQVLQPRNIAKRHDEGHKGPRDLQASSGGNRGRMLADSSNAVGPPTTVRVTHKCFILPNDSIHCERELYQSARAWKDHKAYIDKEIEALQDKIKNLREVRGHLKRRKPEECSCSKQSYYNKEKGVKKQEKLKSHLHPFKEAAQEVDSKLQLFKENNRRRKKERKEKRRQRKGEECSLPGLTCFTHDNNHWQTAPFWNLGSFCACTSSNNNTYWCLRTVNETHNFLFCEFATGFLEYFDMNTDPYQLTNTVHTVERGILNQLHVQLMELRSCQGYKQCNPRPKNLDVGNKDGGSYDLHRGQLWDGWEG

SEQ ID NO: 12959 - protein, 871 aa, Homo sapiens; identical to SEQ ID NO: 12958

SEQ ID NO: 12960 - protein, 871 aa, Homo sapiens; identical to SEQ ID NO: 12958

SEQ ID NO: 12961 - protein, 871 aa, Homo sapiens; identical to SEQ ID NO: 12958

SEQ ID NO: 12962 - protein, 669 aa, Homo sapiens
MVISHAAPHGPEDSAPQFSKLYPNASQHITPSYNYAPNMDKHWIMQYTGPMLPIHMEFTNILQRKRLQTLMSVDDSVERLYNMLVETGELENTYIIYTADHGYHIGQFGLVKGKSMPYDFDIRVPFFIRGPSVEPGSIVPQIVLNIDLAPTILDIAGLDTPPDVDGKSVLKLLDPEKPGNRFRTNKKAKIWRDTFLVERGKFLRKKEESSKNIQQSNHLPKYERVKELCQQARYQTACEQPGQKWQCIEDTSGKLRIHKCKGPSDLLTVRQSTRNLYARGFHDKDKECSCRESGYRASRSQRKSQRQFLRNQGTPKYKPRFVHTRQTRSLSVEFEGEIYDINLEEEEELQVLQPRNIAKRHDEGHKGPRDLQASSGGNRGRMLADSSNAVGPPTTVRVTHKCFILPNDSIHCERELYQSARAWKDHKAYIDKEIEALQDKIKNLREVRGHLKRRKPEECSCSKQSYYNKEKGVKKQEKLKSHLHPFKEAAQEVDSKLQLFKENNRRRKKERKEKRRQRKGEECSLPGLTCFTHDNNHWQTAPFWNLGSFCACTSSNNNTYWCLRTVNETHNFLFCEFATGFLEYFDMNTDPYQLTNTVHTVERGILNQLHVQLMELRSCQGYKQCNPRPKNLDVGNKDGGSYDLHRMLLFLVPCSAPLTSRAMVSDASF

SEQ ID NO: 12963 - protein, 131 aa, Homo sapiens
  VARIANT 1: note = misc_feature - Xaa can be any naturally occurring amino acid
XREVRGHLKRRKPEECSCSKQSYYNKEKGVKKQEKLKSHLHPFKEAAQEVDSKLQLFKENNRRRKKERKEKRRQRKGEECSLPGLTCFTHDNNHWQTAPFWNPHKYSAHGRTRHFESATRTTNGAQKLSRI

SEQ ID NO: 12964 - protein, 189 aa, Homo sapiens
MGPPSLVLCLLSATVFSLLGGSSAFLSHHRLKGRFQRDRRNIRPNIILVLTDDQDVELGSMQVMNKTRRIMEQGGAHFINAFVTTPMCCPSRSSILTGKYVHNHNTYTNNENCSSPSWQAQHESRTFAVYLNSTGYRTAFFGKYLNEYNGSYVPPGWKEWVGLLKNSRFYNYTLCRNGVKEKHGSDYSK

SEQ ID NO: 12965 - protein, 870 aa, Homo sapiens
MGPPSLVLCLLSATVFSLLGGSSAFLSHHRLKGRFQRDRRNIRPNIILVLTDDQDVELGSMQVMNKTRRIMEQGGAHFINAFVTTPMCCPSRSSILTGKYVHNHNTYTNNENCSSPSWQAQHESRTFAVYLNSTGYRTAFFGKYLNEYNGSYVPPGWKEWVGLLKNSRFYNYTLCRNGVKEKHGSDYSKDYLTDLITNDSVSFFRTSKKMYPHRPVLMVISHAAPHGPEDSAPQYSRLFPNASQHITPSYNYAPNPDKHWIMRYTGPMKPIHMEFTNMLQRKRLQTLMSVDDSMETIYNMLVETGELDNTYIVYTADHGYHIGQFGLVKGKSMPYEFDIRVPFYVRGPNVEAGCLNPHIVLNIDLAPTILDIAGLDIPADMDGKSILKLLDTERPVNRFHLKKKMRVWRDSFLVERGKLLHKRDNDKVDAQEENFLPKYQRVKDLCQRAEYQTACEQLGQKWQCVEDATGKLKLHKCKGPMRLGGSRALSNLVPKYYGQGSEACTCDSGDYKLSLAGRRKKLFKKKYKASYVRSRSIRSVAIEVDGRVYHVGLGDAAQPRNLTKRHWPGAPEDQDDKDGGDFSGTGGLPDYSAANPIKVTHRCYILENDTVQCDLDLYKSLQAWKDHKLHIDHEIETLQNKIKNLREVRGHLKKKRPEECDCHKISYHTQHKGRLKHRGSSLHPFRKGLQEKDKVWLLREQKRKKKLRKLLKRLQNNDTCSMPGLTCFTHDNQHWQTAPFWTLGPFCACTSANNNTYWCMRTINETHNFLFCEFATGFLEYFDLNTDPYQLMNAVNTLDRDVLNQLHVQLMELRSCKGYKQCNPRTRNMDLGLKDGGSYEQYRQFQRRKWPEMKRPSSKSLGQLWEGWEG

SEQ ID NO: 12966 - protein, 870 aa, Homo sapiens; identical to SEQ ID NO: 12965

SEQ ID NO: 12967 - protein, 867 aa, Homo sapiens
MGPPSLVLCLLSATVFSLLGGSSAFLSHHRLKGRFQRDRRNIRPNIILVLTDDQDVELGSMQVMNKTRRIMEQGGAHFINAFVTTPMCCPSRSSILTGKYVHNHNTYTNNENCSSPSWQAQHESRTFAVYLNSTGYRTAFFGKYLNEYNGSYVPPGWKEWVGLLKNSRFYNYTLCRNGVKEKHGSDYSKDYLTDLITNDSVSFFRTSKKMYPHRPVLMVISHAAPHGPEDSAPQYSRLFPNASQHITPSYNYAPNPDKHWIMRYTGPMKPIHMEFTNMLQRKRLQTLMSVDDSMETIYNMLVETGELDNTYIVYTADHGYHIGQFGLVKGKSMPYEFDIRVPFYVRGPNVEAGCLNPHIVLNIDLAPTILDIAGLDIPADMDGKSILKLLDTERPVNRFHLKKKMRVWRDSFLVERGKLLHKRDNDKVDAQEENFLPKYQRVKDLCQRAEYQTACEQLGQKWQCVEDATGKLKLHKCKGPMRLGGSRALSNLVPKYYGQGSEACTCDSGDYKLSLAGRRKKLFKKKYKASYVRSRSIRSVAIEVDGRVYHVGLGDAAQPRNLTKRHWPGAPEDQDDKDGGDFSGTGGLPDYSAANPIKVTHRCYILENDTVQCDLDLYKSLQAWKDHKLHIDHEIETLQNKIKNLREVRGHLKKKRPEECDCHKISYHTQHKGRLKHRGSSLHPFRKGLQEKDKVWLLREQKRKKKLRKLLKRLQNNDTCSMPGLTCFTHDNQHWQTAPFWTLGPFCACTSANNNTYWCMRTINETHNFLFCEFATGFLEYFDLNTDPYQLMNAVNTLDRDVLNQLHVQLMELRSCKGYKQCNPRTRNMDLDGGSYEQYRQFQRRKWPEMKRPSSKSLGQLWEGWEG

SEQ ID NO: 12968 - protein, 207 aa, Homo sapiens
  VARIANT 1: note = misc_feature - Xaa can be any naturally occurring amino acid
XEVRGHLKKKRPEECDCHKISYHTQHKGRLKHRGSSLHPFRKGLQEKDKVWLLREQKRKKKLRKLLKRLQNNDTCSMPGLTCFTHDNQHWQTAPFWTLGPFCACTSANNNTYWCMRTINETHNFLFCEFATGFLEYFDLNTDPYQLMNAVNTLDRDVLNQLHVQLMELRSCKGYKQCNPRTRNMDLGLKDGGSYEQYRGQLWEGWEG

SEQ ID NO: 12969 - protein, 374 aa, Homo sapiens
MAAPALGLVCGRCPELGLVLLLLLLSLLCGAAGSQEAGTGAGAGSLAGSCGCGTPQRPGAHGSSAAAHRYSREANAPGPVPGERQLAHSKMVPIPAGVFTMGTDDPQIKQDGEAPARRVTIDAFYMDAYEVSNTEFEKFVNSTGYLTEAEKFGDSFVFEGMLSEQVKTNIQQAVAAAPWWLPVKGANWRHPEGPDSTILHRPDHPVLHVSWNDAVAYCTWAGKRLPTEAEWEYSCRGGLHNRLFPWGNKLQPKGQHYANIWQGEFPVTNTGEDGFQGTAPVDAFPPNGYGLYNIVGNAWEWTSDWWTVHHSVEETLNPKGPPSGKDRVKKGGSYMCHRSYCYRYRCAARSQNTPDSSASNLGFRCAADRLPTMD

SEQ ID NO: 12970 - protein, 354 aa, Homo sapiens
MAAPALGLVCGRCPELGLVLLLLLLSLLCGAAGSQEAGTGAGAGSLAGSCGCGTPQRPGAHGSSAAAHRYSREANAPGPVPGERQLAHSKMVPIPAGVFTMGTDDPQIKQDGEAPARRVTIDAFYMDAYEVSNTEFEKFVNSTGYLTEAEKFGDSFVFEGMLSEQVKTNIQQAVAAAPWWLPVKGANWRHPEGPDSTILHRPDHPVLHVSWNDAVAYCTWAGKRLPTEAEWEYSCRGGLHNRLFPWGNKLQPKGQHYANIWQGEFPVTNTGEDGFQGTAPVDAFPPNGYGLYNIVGNAWEWTSDWWTVHHSVEETLNPSYCYRYRCAARSQNTPDSSASNLGFRCAADRLPTMD

SEQ ID NO: 12971 - protein, 426 aa, Homo sapiens
MAAPALGLVCGRCPELGLVLLLLLLSLLCGAAGSQEAGTGAGAGSLAGSCGCGTPQRPGAHGSSAAAHRYSREANAPGPVPGERQLAHSKMVPIPAGVFTMGTDDPQIKQDGEAPARRVTIDAFYMDAYEVSNTEFEKFVNSTGYLTEAEKFGDSFVFEGMLSEQVKTNIQQAVAAAPWWLPVKGANWRHPEGPDSTILHRPDHPVLHVSWNDAVAYCTWAGKRLPTEAEWEYSCRGGLHNRLFPWGNKLQPKGQHYANIWQGEFPVTNTGEDGFQGTAPVDAFPPNGYGLYNIVGNAWEWTSDWWTVHHSVEETLNPKGPPSGKDRVKKGGSYMCHRSQEYYDPYFQDVASEMLRRHTASRWKAFSSLEPCCSIRRHQQYAAIERLTCGKFELRCASLRKIDCLNTNIACSYSMRQDGPRLHCVD

SEQ ID NO: 12972 - protein, 349 aa, Homo sapiens
MAAPALGLVCGRCPELGLVLLLLLLSLLCGAAGSQEAGTGAGAGSLAGSCGCGTPQRPGAHGSSAAAHRYSREANAPGPVPGERQLAHSKMVPIPAGVFTMGTDDPQIKQDGEAPARRVTIDAFYMDAYEVSNTEFEKFVNSTGYLTEVAAAPWWLPVKGANWRHPEGPDSTILHRPDHPVLHVSWNDAVAYCTWAGKRLPTEAEWEYSCRGGLHNRLFPWGNKLQPKGQHYANIWQGEFPVTNTGEDGFQGTAPVDAFPPNGYGLYNIVGNAWEWTSDWWTVHHSVEETLNPKGPPSGKDRVKKGGSYMCHRSYCYRYRCAARSQNTPDSSASNLGFRCAADRLPTMD

SEQ ID NO: 12973 - protein, 242 aa, Homo sapiens
MAAPALGLVCGRCPELGLVLLLLLLSLLCGAAGSQEAGTGAGAGSLAGSCGCGTPQRPGAHGSSAAAHRYSREANAPGPVPGERQLAHSKMVPIPAGVFTMGTDDPQIKQDGEAPARRVTIDAFYMDAYEVSNTEFEKFVNSTGYLTEVDAFPPNGYGLYNIVGNAWEWTSDWWTVHHSVEETLNPKGPPSGKDRVKKGGSYMCHRSYCYRYRCAARSQNTPDSSASNLGFRCAADRLPTMD

SEQ ID NO: 12974 - protein, 304 aa, Homo sapiens
HGLPLLPLLSLLVGAWLKLGNGQATSMVQLQGGRFLMGTNSPDSRDGDGPVREATVKPFAIDIFPVTNKDFRDFVREKKYRTEAEMFGWSFVFEDFVSDELRNKATQPMKSGRCLCWAGASCSRSPSFSQSVLWWLPVEKAFWRQPAGPGSGIRERLEHPVLHVSWNDARAYCAWRGKRLPTEEEWEFAARGGLKGQVYPWGNWFQPNRTNLWQGKFPKGDKAEDGFHGVSPVNAFPAQNNYGLYDLLGNVWEWTASPYQAAEQDMRVLRGASWIDTADGSANHRARVTTRMGNTPDSASDNLG

SEQ ID NO: 12975 - protein, 51 aa, Homo sapiens
MARHGLPLLPLLSLLVGAWLKLGILSGRKSIGQKLRCLDGALSLRTLSLMS

SEQ ID NO: 12976 - protein, 232 aa, Homo sapiens
MARHGLPLLPLLSLLVGAWLKLGNGQATSMVQLQGGRFLMGTNSPDSRDGDGPVREATVKPFAIDIFPVTNKDFRDFVREKKYRTEAEMFGWSFVFEDFVSDELRNKATQPMKSVLWWLPVEKAFWRQGKFPKGDKAEDGFHGVSPVNAFPAQNNYGLYDLLGNVWEWTASPYQAAEQDMRVLRGASWIDTADGSANHRARVTTRMGNTPDSASDNLGFRCAADAGRPPGEL

SEQ ID NO: 12977 - protein, 183 aa, Homo sapiens
MARHGLPLLPLLSLLVGAWLKLGNGQATSMVQLQGGRFLMGTNSPDSRDGDGPVREATVKPFAIDIFPVTNKDFRDFVREKKYRTEAEMFGWSFVFEDFVSDELRNKATQPMKSVLWWLPVEKAFWRQPAGPGSGIRERLEHPVLHVKFTHGGTGSSQTAPTCGRESSPRETKLRMASMESPQ

SEQ ID NO: 12978 - protein, 352 aa, Homo sapiens
MARHGLPLLPLLSLLVGAWLKLGNGQATSMVQLQGGRFLMGTNSPDSRDGDGPVREATVKPFAIDIFPVTNKDFRDFVREKKYRTEAEMFGWSFVFEDFVSDELRNKATQPMKSVLWWLPVEKAFWRQPAGPGSGIRERLEHPVLHVSWNDARAYCAWRGKRLPTEEEWEFAARGGLKGQVYPWGNWFQPNRTNLWQGKFPKGDKAEDGFHGVSPVNAFPAQNNYGLYDLLGNVWEWTASPYQAAEQDMRVLRGASWIDTADGSANHRARVTTRVLLCCPGWSAVAQSQLTTASNCQALAILPPQLLKYLGLQDGQHSRFSLRQPRFPLCCRRRPAARGAVSSRVVTRRKAF

SEQ ID NO: 12979 - protein, 165 aa, Homo sapiens
MARHGLPLLPLLSLLVGAWLKLGNGQATSMVQLQGGRFLMGTNSPDSRDGDGPVREATVKPFAIDIFPVTNKDFRDFVREKKYRTEAEMFGWSFVFEDFVSDELRNKATQPMKSVLWWLPVEKAFWRQVKFTHGGTGSSQTAPTCGRESSPRETKLRMASMESPQ

SEQ ID NO: 12980 - protein, 150 aa, Homo sapiens
MARHGLPLLPLLSLLVGAWLKLGNGQATSMVQLQGGRFLMGTNSPDSRDGDGPVREATVKPFAIDIFPVTNKDFRDFVREKKYRTEAEMFGWSFVFEDFVSDELRNKATQPMKVKFTHGGTGSSQTAPTCGRESSPRETKLRMASMESPQ

SEQ ID NO: 12981 - protein, 102 aa, Homo sapiens
MARHGLPLLPLLSLLVGAWLKLGNGQATSMVQLQGGRFLMGTNSPDSRDGDGPVREATVKPFAIDIFPVTNKDFRSSLPMGELVPAKPHQPVAGKVPQGRQS

SEQ ID NO: 12982 - protein, 213 aa, Homo sapiens
MFGWSFVFEDFVSDELRNKATQPMKSVLWWLPVEKAFWRQPAGPGSGIRERLEHPVLHVSWNDARAYCAWRGKRLPTEEEWEFAARGGLKGQVYPWGNWFQPNRTNLWQGKFPKGDKAEDGFHGVSPVNAFPAQNNYGLYDLLGNVWEWTASPYQAAEQDMRVLRGASWIDTADGSANHRARVTTRMGNTPDSASDNLGFRCAADAGRPPGEL

SEQ ID NO: 12983 - protein, 236 aa, Homo sapiens
MRAHAQRGRGCTRRSAAVLMARHGLPLLPLLSLLVGAWLKLGNGQATSMVQLQGGRFLMGTNSPDSRDGDGPVREATVKPFAIDIFPVTNKDFRDFVREKKYRTEAEMFGWSFVFEDFVSDELRNKATQPMKGKFPKGDKAEDGFHGVSPVNAFPAQNNYGLYDLLGNVWEWTASPYQAAEQDMRVLRGASWIDTADGSANHRARVTTRMGNTPDSASDNLGFRCAADAGRPPGEL

SEQ ID NO: 12984 - protein, 305 aa, Homo sapiens
MRAHAQRGRGCTRRSAAVLMARHGLPLLPLLSLLVGAWLKLGNGQATSMVQLQGGRFLMGTNSPDSRDGDGPVREATVKPFAIDIFPVTNKDFRDFVREKKYRTEAEMFGWSFVFEDFVSDELRNKATQPMKPAGPGSGIRERLEHPVLHVSWNDARAYCAWRGKRLPTEEEWEFAARGGLKGQVYPWGNWFQPNRTNLWQGKFPKGDKAEDGFHGVSPVNAFPAQNNYGLYDLLGNVWEWTASPYQAAEQDMRVLRGASWIDTADGSANHRARVTTRMGNTPDSASDNLGFRCAADAGRPPGEL

SEQ ID NO: 12985 - protein, 320 aa, Homo sapiens
MRAHAQRGRGCTRRSAAVLMARHGLPLLPLLSLLVGAWLKLGNGQATSMVQLQGGRFLMGTNSPDSRDGDGPVREATVKPFAIDIFPVTNKDFRDFVREKKYRTEAEMFGWSFVFEDFVSDELRNKATQPMKSVLWWLPVEKAFWRQPAGPGSGIRERLEHPVLHVSWNDARAYCAWRGKRLPTEEEWEFAARGGLKGQVYPWGNWFQPNRTNLWQGKFPKGDKAEDGFHGVSPVNAFPAQNNYGLYDLLGNVWEWTASPYQAAEQDMRVLRGASWIDTADGSANHRARVTTRMGNTPDSASDNLGFRCAADAGRPPGEL

SEQ ID NO: 12986 - protein, 358 aa, Homo sapiens
MRAHAQRGRGCTRRSAAVLMARHGLPLLPLLSLLVGAWLKLGNGQATSMVQLQGGRFLMGTNSPDSRDGDGPVREATVKPFAIDIFPVTNKDFRDFVREKKYRTEAEMFGWSFVFEDFVSDELRNKATQPMKSVLWWLPVEKAFWRQPAGPGSGIRERLEHPVLHVSWNDARAYCAWRGKRLPTEEEWEFAARGGLKGQVYPWGNWFQPNRTNLWQGKFPKGDKAEDGFHGVSPVNAFPAQNNYGWATLQIQPQTTSVSAVLQTQAGRQGSCKQPGGDKEKSLLGSLSFPGHVANSAIPSSRASASGKNFPFPVSHPSVAGASHQGRRGLSLLCFGEGAQCVLTMAGGQVFLLEAKYY

SEQ ID NO: 12987 - protein, 294 aa, Homo sapiens
MRAHAQRGRGCTRRSAAVLMARHGLPLLPLLSLLVGAWLKLGNGQATSMVQLQGGRFLMGTNSPDSRDGDGPVREATVKPFAIDIFPVTNKDFRYIRDFVREKKYRTEAEMFGWSFVFEDFVSDELRNKATQPMKSVLWWLPVEKAFWRQPAGPGSGIRERLEHPVLHVSWNDARAYCAWRGKRLPTEEEWEFAARGGLKGQVYPWGNWFQPNRTNLWQGKFPKGDKAEDGFHGVSPVNAFPAQNNYGLYDLLGNVWEWTASPYQAAEQDMRVLRGASWIDTADGSANHRARVT

SEQ ID NO: 12988 - protein, 747 aa, Homo sapiens
MGRGPWDAGPSRRLLPLLLLLGLARGAAGAPGPDGLDVCATCHEHATCQQREGKKICICNYGFVGNGRTQCVDKNECQFGATLVCGNHTSCHNTPGGFYCICLEGYRATNNNKTFIPNDGTFCTDIDECEVSGLCRHGGRCVNTHGSFECYCMDGYLPRNGPEPFHPTTDATSCTEIDCGTPPEVPDGYIIGNYTSSLGSQVRYACREGFFSVPEDTVSSCTGLGTWESPKLHCQEINCGNPPEMRHAILVGNHSSRLGGVARYVCQEGFESPGGKITSVCTEKGTWRESTLTCTEILTKINDVSLFNDTCVRWQINSRRINPKISYVISIKGQRLDPMESVREETVNLTTDSRTPEVCLALYPGTNYTVNISTAPPRRSMPAVIGFQTAEVDLLEDDGSFNISIFNETCLKLNRRSRKVGSEHMYQFTVLGQRWYLANFSHATSFNFTTREQVPVVCLDLYPTTDYTVNVTLLRSPKRHSVQITIATPPAVKQTISNISGFNETCLRWRSIKTADMEEMYLFHIWGQRWYQKEFAQEMTFNISSSSRDPEVCLDLRPGTNYNVSLRALSSELPVVISLTTQITEPPLPEVEFFTVHRGPLPRLRLRKAKEKNGPISSYQVLVLPLALQSTFSCDSEGASSFFSNASDADGYVAAELLAKDVPDDAMEIPIGDRLYYGEYYNAPLKRGSDYCIILRITSEWNKVRRHSCAVWAQVKDSSLMLLQMAGVGLGSLAVVIILTFLSFSAV

SEQ ID NO: 12989 - protein, 757 aa, Homo sapiens
MGRGPWDAGPSRRLLPLLLLLGLARGAAGAPGPDGLDVCATCHEHATCQQREGKKICICNYGFVGNGRTQCVDKNECQFGATLVCGNHTSCHNTPGGFYCICLEGYRATNNNKTFIPNDGTFCTDIDECEVSGLCRHGGRCVNTHGSFECYCMDGYLPRNGPEPFHPTTDATSCTEIDCGTPPEVPDGYIIGNYTSSLGSQVRYACREGFFSVPEDTVSSCTGLGTWESPKLHCQEINCGNPPEMRHAILVGNHSSRLGGVARYVCQEGFESPGGKITSVCTEKGTWRESTLTCTEILTKINDVSLFNDTCVRWQINSRRINPKISYVISIKGQRLDPMESVREETVNLTTDSRTPEVCLALYPGTNYTVNISTAPPRRSMPAVIGFQTAEVDLLEDDGSFNISIFNETCLKLNRRSRKVGSEHMYQFTVLGQRWYLANFSHATSFNFTTREQVPVVCLDLYPTTDYTVNVTLLRSPKRHSVQITIATPPAVKQTISNISGFNETCLRWRSIKTADMEEMYLFHIWGQRWYQKEFAQEMTFNISSSSRDPEVCLDLRPGTNYNVSLRALSSELPVVISLTTQITEPPLPEVEFFTVHRGPLPRLRLRKAKEKNGPISSYQVLVLPLALQSTFSCDSEGASSFFSNASDADGYVAAELLAKDVPDDAMEIPIGDRLYYGEYYNAPLKRGSDYCIILRITSEWNKVRRHSCAVWAQVKEIPCNCNFLRLHIHRANSGDTQIRHSCCCRWRVLDWVPWLL

SEQ ID NO: 12990 - protein, 722 aa, Homo sapiens
MGRGPWDAGPSRRLLPLLLLLGLARGAAGAPGPDGLDVCATCHEHATCQQREGKKICICNYGFVGNGRTQCVDKNECQFGATLVCGNHTSCHNTPGGFYCICLEGYRATNNNKTFIPNDGTFCTDIDECEVSGLCRHGGRCVNTHGSFECYCMDGYLPRNGPEPFHPTTDATSCTEIDCGTPPEVPDGYIIGNYTSSLGSQVRYACREGFFSVPEDTVSSCTGLGTWESPKLHCQEINCGNPPEMRHAILVGNHSSRLGGVARYVCQEGFESPGGKITSVCTEKGTWRESTLTCTEILTKINDVSLFNDTCVRWQINSRRINPKISYVISIKGQRLDPMESVREETVNLTTDSRTPEVCLALYPGTNYTVNISTAPPRRSMPAVIGFQTAEVDLLEDDGSFNISIFNETCLKLNRRSRKVGSEHMYQFTVLGQRWYLANFSHATSFNFTTREQVPVVCLDLYPTTDYTVNVTLLRSPKRHSVQITIATPPAVKQTISNISGFNETCLRWRSIKTADMEEMYLFHIWGQRWYQKEFAQEMTFNISSSSRDPEVCLDLRPGTNYNVSLRALSSELPVVISLTTQITEPPLPEVEFFTVHRGPLPRLRLRKAKEKNGPISSYQVLVLPLALQSTFSCDSEGASSFFSNASDADGYVAAELLAKDVPDDAMEIPIGDRLYYGEYYNAPLKRGSDYCIILRITSEWNKIRHSCCCRWRVLDWVPWLL

SEQ ID NO: 12991 - protein, 45 aa, Homo sapiens
VITALYYESQVNGISIKFILMRSVYIIVTGDQNPIHTTLSKELHS

SEQ ID NO: 12992 - protein, 281 aa, Homo sapiens
  VARIANT 1: note = misc_feature - Xaa can be any naturally occurring amino acid
XGYIIGNYTSSLGSQVRYACREGFFSVPEDTVSSCTGLGTWESPKLHCQEINCGNPPEMRHAILVGNHSSRLGGVARYVCQEGFESPGGKITSVCTEKGTWRESTLTCTEILTKINDVSLFNDTCVRWQINSRRINPKISYVISIKGQRLDPMESVREETVNLTTDSRTPEVCLALYPGTNYTVNISTAPPRRSMPAVIGFQTAGSRNSHGRNTHIKEVDLLEDDGSFNISIFNETCLKLNRRSRKVGSEHMYQFTVLGQRWYLANFSHATSFNFTTREQV

SEQ ID NO: 12993 - protein, 706 aa, Homo sapiens
  VARIANT 1: note = misc_feature - Xaa can be any naturally occurring amino acid
XLLLLGLARGAAGAPGPDGLDVCATCHEHATCQQREGKKICICNYGFVGNGRTQCVDKNECQFGATLVCGNHTSCHNTPGGFYCICLEGYRATNNNKTFIPNDGTFCTDIDECEVSGLCRHGGRCVNTHGSFECYCMDGYLPRNGPEPFHPTTDATSCTEIDCGTPPEVPDGYIIGNYTSSLGSQVRYACREGFFSVPEDTVSSCTGLGTWESPKLHCQEINCGNPPEMRHAILVGNHSSRLGGVARYVCQEGFESPGGKITSVCTEKGTWRESTLTCTEILTKINDVSLFNDTCVRWQINSRRINPKISYVISIKGQRLDPMESVREETVNLTTDSRTPEVCLALYPGTNYTVNISTAPPRRSMPAVIGFQTAEVDLLEDDGSFNISIFNETCLKLNRRSRKVGSEHMYQFTVLGQRWYLANFSHATSFNFTTREQVPVVCLDLYPTTDYTVNVTLLRSPKRHSVQITIATPPAVKQTISNISGFNETCLRWRSIKTADMEEMYLFHIWGQRWYQKEFAQEMTFNISSSSRDPEVCLDLRPGTNYNVSLRALSSELPVVISLTTQITEPPLPEVEFFTVHRGPLPRLRLRKAKEKNGPISSYQVLVLPLALQSTFSCDSEGASSFFSNASDADGYVAAELLAKDVPDDAMEIPIGDRLYYGEYYNAPLKRGSDYCIILRITSEWNKIRHSCCCRWRVLDWVPWLL

SEQ ID NO: 12994 - protein, 629 aa, Homo sapiens
MTAEGPSPPARWHRRLPGLWAAALLLLGLPRLSVRADGKFFVLESQNGSQGLQLEAARLSCKSRGAHLASADELRRVVQDCSFAVCTTGWLADGTLGTTVCSKGSGEQQIMRAVDVRIESNPVPGGTYSALCIKDEEKPCGDPPSFPHTILQGRTGLEMGDELLYVCAPGHIMGHRETAFTLLCNSCGEWYGLVQACGKDEAEAHIDYEDNFPDDRSVSFRELMEDSRTEADEDRGQGDSSEEAPKQDRLVSISVGRENIARDKVFVPTTGLPGAGSSVPADSPGSRLLQKHLFWFPAEAFHKPGLEKEVDDDTKKQFSAGDNHSGVKLVPGEPETKVIYGNTDGPSGPFVGKNDSKAGDPVVSSSDESWLDGYPVTEGAWRKTEAEEEEDGDRGDGSVGLDENVLVTPDQPILVEVKKPKSSTLTPSEGMTHSSVLPSQMLDVEALALRPVNASETEGIGDGDLTKYQSTLPWRFITEESPMATLSYELTSSTLEILTVNTVKQTPNHIPSTIMATTQPPVETTVPEIQDSFPYLLSEDFFGQEGPGPGASEELHPTLESCVGDGCPGLSRGPVIATIVTVLCLLLLLAGVGMVWGYRKCQHKSSVYKLNVGQRQARHYHQQIEMEKV

SEQ ID NO: 12995 - protein, 243 aa, Homo sapiens
  VARIANT 1: note = misc_feature - Xaa can be any naturally occurring amino acid
XAEGPSPPARWHRRLPGLWAAALLLLGLPRLSVRADGKFFVLESQNGSQGLQLEAARLSCKSRGAHLASADELRRVVQDCSFAVCTTGWLADGTLGTTVCSKGSGEQQIMRAVDVRIESNPVPGGTYSALCIKDEDEAEAHIDYEDNFPDDRSVSFRELMEDSRTEADEDRGQGDSSEEAPKQDRLVSISVGRENIARDKVFVPTTGLPGAGSSVPADSPGSRLLQKHLFWFPAEAFHKPGLE

SEQ ID NO: 12996 - protein, 3571 aa, Homo sapiens
MWPRLAFCCWGLALVSGWATFQQMSPSRNFSFRLFPETAPGAPGSIPAPPAPGDEAAGSRVERLGQAFRRRVRLLRELSERLELVFLVDDSSSVGEVNFRSELMFVRKLLSDFPVVPTATRVAIVTFSSKNYVVPRVDYISTRRARQHKCALLLQEIPAISYRGGGTYTKGAFQQAAQILLHARENSTKVVFLITDGYSNGGDPRPIAASLRDSGVEIFTFGIWQGNIRELNDMASTPKEEHCYLLHSFEEFEALARRALHEDLPSGSFIQDDMVHCSYLCDEGKDCCDRMGSCKCGTHTGHFECICEKGYYGKGLQYECTACPSGTYKPEGSPGGISSCIPCPDENHTSPPGSTSPEDCVCREGYRASGQTCELVHCPALKPPENGYFIQNTCNNHFNAACGVRCHPGFDLVGSSIILCLPNGLWSGSESYCRVRTCPHLRQPKHGHISCSTREMLYKTTCLVACDEGYRLEGSDKLTCQGNSQWDGPEPRCVERHCSTFQMPKDVIISPHNCGKQPAKFGTICYVSCRQGFILSGVKEMLRCTTSGKWNVGVQAAVCKDVEAPQINCPKDIEAKTLEQQDSANVTWQIPTAKDNSGEKVSVHVHPAFTPPYLFPIGDVAIVYTATDLSGNQASCIFHIKVIDAEPPVIDWCRSPPPVQVSEKVHAASWDEPQFSDNSGAELVITRSHTQGDLFPQGETIVQYTATDPSGNNRTCDIHIVIKGSPCEIPFTPVNGDFICTPDNTGVNCTLTCLEGYDFTEGSTDKYYCAYEDGVWKPTYTTEWPDCAKKRFANHGFKSFEMFYKAARCDDTDLMKKFSEAFETTLGKMVPSFCSDAEDIDCRLEENLTKKYCLEYNYDYENGFAIGPGGWGAANRLDYSYDDFLDTVQETATSIGNAKSSRIKRSAPLSDYKIKLIFNITASVPLPDERNDTLEWENQQRLLQTLETITNKLKRTLNKDPMYSFQLASEILIADSNSLETKKASPFCRPGSVLRGRMCVNCPLGTYYNLEHFTCESCRIGSYQDEEGQLECKLCPSGMYTEYIHSRNISDCKAQCKQGTYSYSGLETCESCPLGTYQPKFGSRSCLSCPENTSTVKRGAVNISACGVPCPEGKFSRSGLMPCHPCPRDYYQPNAGKAFCLACPFYGTTPFAGSRSITECSSFSSTFSAAEESVVPPASLGHIKKRHEISSQVFHECFFNPCHNSGTCQQLGRGYVCLCPLGYTGLKCETDIDECSPLPCLNNGVCKDLVGEFICECPSGYTGQRCEENINECSSSPCLNKGICVDGVAGYRCTCVKGFVGLHCETEVNECQSNPCLNNAVCEDQVGGFLCKCPPGFLGTRCGKNVDECLSQPCKNGATCKDGANSFRCLCAAGFTGSHCELNINECQSNPCRNQATCVDELNSYSCKCQPGFSGKRCETEQSTGFNLDFEVSGIYGYVMLDGMLPSLHALTCTFWMKSSDDMNYGTPISYAVDNGSDNTLLLTDYNGWVLYVNGREKITNCPSVNDGRWHHIAITWTSANGIWKVYIDGKLSDGGAGLSVGLPIPGGGALVLGQEQDKKGEGFSPAESFVGSISQLNLWDYVLSPQQVKSLATSCPEELSKGNVLAWPDFLSGIVGKVKIDSKSIFCSDCPRLGGSVPHLRTASEDLKPGSKVNLFCDPGFQLVGNPVQYCLNQGQWTQPLPHCERISCGVPPPLENGFHSADDFYAGSTVTYQCNNGYYLLGDSRMFCTDNGSWNGVSPSCLDVDECAVGSDCSEHASCLNVDGSYICSCVPPYTGDGKNCAEPIKCKAPGNPENGHSSGEIYTVGAEVTFSCQEGYQLMGVTKITCLESGEWNHLIPYCKAVSCGKPAIPENGCIEELAFTFGSKVTYRCNKGYTLAGDKESSCLANSSWSHSPPVCEPVKCSSPENINNGKYILSGLTYLSTASYSCDTGYSLQGPSIIECTASGIWDRAPPACHLVFCGEPPAIKDAVITGNNFTFRNTVTYTCKEGYTLAGLDTIECLADGKWSRSDQQCLAVSCDEPPIVDHASPETAHRLFGDIAFYYCSDGYSLADNSQLLCNAQGKWVPPEGQDMPRCIAHFCEKPPSVSYSILESVSKAKFAAGSVVSFKCMEGFVLNTSAKIECMRGGQWNPSPMSIQCIPVRCGEPPSIMNGYASGSNYSFGAMVAYSCNKGFYIKGEKKSTCEATGQWSSPIPTCHPVSCGEPPKVENGFLEHTTGRIFESEVRYQCNPGYKSVGSPVFVCQANRHWHSESPLMCVPLDCGKPPPIQNGFMKGENFEVGSKVQFFCNEGYELVGDSSWTCQKSGKWNKKSNPKCMPAKCPEPPLLENQLVLKELTTEVGVVTFSCKEGHVLQGPSVLKCLPSQQWNDSFPVCKIVLCTPPPLISFGVPIPSSALHFGSTVKYSCVGGFFLRGNSTTLCQPDGTWSSPLPECVPVECPQPEEIPNGIIDVQGLAYLSTALYTCKPGFELVGNTTTLCGENGHWLGGKPTCKAIECLKPKEILNGKFSYTDLHYGQTVTYSCNRGFRLEGPSALTCLETGDWDVDAPSCNAIHCDSPQPIENGFVEGADYSYGAIIIYSCFPGFQVAGHAMQTCEESGWSSSIPTCMPIDCGLPPHIDFGDCTKLKDDQGYFEQEDDMMEVPYVTPHPPYHLGAVAKTWENTKESPATHSSNFLYGTMVSYTCNPGYELLGNPVLICQEDGTWNGSAPSCISIECDLPTAPENGFLRFTETSMGSAVQYSCKPGHILAGSDLRLCLENRKWSGASPRCEAISCKKPNPVMNGSIKGSNYTYLSTLYYECDPGYVLNGTERRTCQDDKNWDEDEPICIPVDCSSPPVSANGQVRGDEYTFQKEIEYTCNEGFLLEGARSRVCLANGSWSGATPDCVPVRCATPPQLANGVTEGLDYGFMKEVTFHCHEGYILHGAPKLTCQSDGNWDAEIPLCKPVNCGPPEDLAHGFPNGFSFIHGGHIQYQCFPGYKLHGNSSRRCLSNGSWSGSSPSCLPCRCSTPVIEYGTVNGTDFDCGKAARIQCFKGFKLLGLSEITCEADGQWSSGFPHCEHTSCGSLPMIPNAFISETSSWKENVITYSCRSGYVIQGSSDLICTEKGVWSQPYPVCEPLSCGSPPSVANAVATGEAHTYESEVKLRCLEGYTMDTDTDTFTCQKDGRWFPERISCSPKKCPLPENITHILVHGDDFSVNRQVSVSCAEGYTFEGVNISVCQLDGTWEPPFSDESCSPVSCGKPESPEHGFVVGSKYTFESTIIYQCEPGYELEGNRERVCQENRQWSGGVAICKETRCETPLEFLNGKADIENRTTGPNVVYSCNRGYSLEGPSEAHCTENGTWSHPVPLCKPNPCPVPFVIPENALLSEKEFYVDQNVSIKCREGFLLQGHGIITCNPDETWTQTSAKCEKISCGPPAHVENAIARGVHYQYGDMITYSCYSGYMLEGFLRSVCLENGTWTSPPICRAVCRFPCQNGGICQRPNACSCPEGWMGRLCEEPICILPCLNGGRCVAPYQCDCPPGWTGSRCHTAVCQSPCLNGGKCVRPNRCHCLSSWTGHNCSRKRRTGF

SEQ ID NO: 12997 - protein, 868 aa, Homo sapiens
MWPRLAFCCWGLALVSGWATFQQMSPSRNFSFRLFPETAPGAPGSIPAPPAPGDEAAGSRVERLGQAFRRRVRLLRELSERLELVFLVDDSSSVGEVNFRSELMFVRKLLSDFPVVPTATRVAIVTFSSKNYVVPRVDYISTRRARQHKCALLLQEIPAISYRGGGTYTKGAFQQAAQILLHARENSTKVVFLITDGYSNGGDPRPIAASLRDSGVEIFTFGIWQGNIRELNDMASTPKEEHCYLLHSFEEFEALARRALHEDLPSGSFIQDDMVHCSYLCDEGKDCCDRMGSCKCGTHTGHFECICEKGYYGKGLQYECTACPSGTYKPEGSPGGISSCIPCPDENHTSPPGSTSPEDCVCREGYRASGQTCELVHCPALKPPENGYFIQNTCNNHFNAACGVRCHPGFDLVGSSIILCLPNGLWSGSESYCRVRTCPHLRQPKHGHISCSTREMLYKTTCLVACDEGYRLEGSDKLTCQGNSQWDGPEPRCVERHCSTFQMPKDVIISPHNCGKQPAKFGTICYVSCRQGFILSGVKEMLRCTTSGKWNVGVQAAVCKDVEAPQINCPKDIEAKTLEQQDSANVTWQIPTAKDNSGEKVSVHVHPAFTPPYLFPIGDVAIVYTATDLSGNQASCIFHIKVIDAEPPVIDWCRSPPPVQVSEKVHAASWDEPQFSDNSGAELVITRSHTQGDLFPQGETIVQYTATDPSGNNRTCDIHIVIKGSPCEIPFTPVNGDFICTPDNTGVNCTLTCLEGYDFTEGSTDKYYCAYEDGVWKPTYTTEWPDCAKKRFANHGFKSFEMFYKAARCDDTDLMKKFSEAFETTLGKMVPSFCSDAEDIDCRLEENLTKKYCLEYNYDYENGFAIGN

SEQ ID NO: 12998 - protein, 3574 aa, Homo sapiens
MWPRLAFCCWGLALVSGWATFQQMSPSRNFSFRLFPETAPGAPGSIPAPPAPGDEAAGSRVERLGQAFRRRVRLLRELSERLELVFLVDDSSSVGEVNFRSELMFVRKLLSDFPVVPTATRVAIVTFSSKNYVVPRVDYISTRRARQHKCALLLQEIPAISYRGGGTYTKGAFQQAAQILLHARENSTKVVFLITDGYSNGGDPRPIAASLRDSGVEIFTFGIWQGNIRELNDMASTPKEEHCYLLHSFEEFEALARRALHEDLPSGSFIQDDMVHCSYLCDEGKDCCDRMGSCKCGTHTGHFECICEKGYYGKGLQYECTACPSGTYKPEGSPGGISSCIPCPDENHTSPPGSTSPEDCVCREGYRASGQTCELVHCPALKPPENGYFIQNTCNNHFNAACGVRCHPGFDLVGSSIILCLPNGLWSGSESYCRVRTCPHLRQPKHGHISCSTREMLYKTTCLVACDEGYRLEGSDKLTCQGNSQWDGPEPRCVERHCSTFQMPKDVIISPHNCGKQPAKFGTICYVSCRQGFILSGVKEMLRCTTSGKWNVGVQAAVCKDVEAPQINCPKDIEAKTLEQQDSANVTWQIPTAKDNSGEKVSVHVHPAFTPPYLFPIGDVAIVYTATDLSGNQASCIFHIKVIDAEPPVIDWCRSPPPVQVSEKVHAASWDEPQFSDNSGAELVITRSHTQGDLFPQGETIVQYTATDPSGNNRTCDIHIVIKGSPCEIPFTPVNGDFICTPDNTGVNCTLTCLEGYDFTEGSTDKYYCAYEDGVWKPTYTTEWPDCAKKRFANHGFKSFEMFYKAARCDDTDLMKKFSEAFETTLGKMVPSFCSDAEDIDCRLEENLTKKYCLEYNYDYENGFAIGPGGWGAANRLDYSYDDFLDTVQETATSIGNAKSSRIKRSAPLSDYKIKLIFNITASVPLPDERNDTLEWENQQRLLQTLETITNKLKRTLNKDPMYSFQLASEILIADSNSLETKKASPFCRPGSVLRGRMCVNCPLGTYYNLEHFTCESCRIGSYQDEEGQLECKLCPSGMYTEYIHSRNISDCKAQCKQGTYSYSGLETCESCPLGTYQPKFGSRSCLSCPENTSTVKRGAVNISACGVPCPEGKFSRSGLMPCHPCPRDYYQPNAGKAFCLACPFYGTTPFAGSRSITECSSFSSTFSAAEESVVPPASLGHIKKRHEISSQVFHECFFNPCHNSGTCQQLGRGYVCLCPLGYTGLKCETDIDECSPLPCLNNGVCKDLVGEFICECPSGYTGQRCEENINECSSSPCLNKGICVDGVAGYRCTCVKGFVGLHCETEVNECQSNPCLNNAVCEDQVGGFLCKCPPGFLGTRCGKNVDECLSQPCKNGATCKDGANSFRCLCAAGFTGSHCELNINECQSNPCRNQATCVDELNSYSCKCQPGFSGKRCETEQSTGFNLDFEVSGIYGYVMLDGMLPSLHALTCTFWMKSSDDMNYGTPISYAVDNGSDNTLLLTDYNGWVLYVNGREKITNCPSVNDGRWHHIAITWTSANGIWKVYIDGKLSDGGAGLSVGLPIPGMLGGGALVLGQEQDKKGEGFSPAESFVGSISQLNLWDYVLSPQQVKSLATSCPEELSKGNVLAWPDFLSGIVGKVKIDSKSIFCSDCPRLGGSVPHLRTASEDLKPGSKVNLFCDPGFQLVGNPVQYCLNQGQWTQPLPHCERISCGVPPPLENGFHSADDFYAGSTVTYQCNNGYYLLGDSRMFCTDNGSWNGVSPSCLDVDECAVGSDCSEHASCLNVDGSYICSCVPPYTGDGKNCAEPIKCKAPGNPENGHSSGEIYTVGAEVTFSCQEGYQLMGVTKITCLESGEWNHLIPYCKAVSCGKPAIPENGCIEELAFTFGSKVTYRCNKGYTLAGDKESSCLANSSWSHSPPVCEPVKCSSPENINNGKYILSGLTYLSTASYSCDTGYSLQGPSIIECTASGIWDRAPPACHLVFCGEPPAIKDAVITGNNFTFRNTVTYTCKEGYTLAGLDTIECLADGKWSRSDQQCLAVSCDEPPIVDHASPETAHRLFGDIAFYYCSDGYSLADNSQLLCNAQGKWVPPEGQDMPRCIAHFCEKPPSVSYSILESVSKAKFAAGSVVSFKCMEGFVLNTSAKIECMRGGQWNPSPMSIQCIPVRCGEPPSIMNGYASGSNYSFGAMVAYSCNKGFYIKGEKKSTCEATGQWSSPIPTCHPVSCGEPPKVENGFLEHTTGRIFESEVRYQCNPGYKSVGSPVFVCQANRHWHSESPLMCVPLDCGKPPPIQNGFMKGENFEVGSKVQFFCNEGYELVGDSSWTCQKSGKWNKKSNPKCMPAKCPEPPLLENQLVLKELTTEVGVVTFSCKEGHVLQGPSVLKCLPSQQWNDSFPVCKIVLCTPPPLISFGVPIPSSALHFGSTVKYSCVGGFFLRGNSTTLCQPDGTWSSPLPECVPVECPQPEEIPNGIIDVQGLAYLSTALYTCKPGFELVGNTTTLCGENGHWLGGKPTCKAIECLKPKEILNGKFSYTDLHYGQTVTYSCNRGFRLEGPSALTCLETGDWDVDAPSCNAIHCDSPQPIENGFVEGADYSYGAIIIYSCFPGFQVAGHAMQTCEESGWSSSIPTCMPIDCGLPPHIDFGDCTKLKDDQGYFEQEDDMMEVPYVTPHPPYHLGAVAKTWENTKESPATHSSNFLYGTMVSYTCNPGYELLGNPVLICQEDGTWNGSAPSCISIECDLPTAPENGFLRFTETSMGSAVQYSCKPGHILAGSDLRLCLENRKWSGASPRCEAISCKKPNPVMNGSIKGSNYTYLSTLYYECDPGYVLNGTERRTCQDDKNWDEDEPICIPVDCSSPPVSANGQVRGDEYTFQKEIEYTCNEGFLLEGARSRVCLANGSWSGATPDCVPVRCATPPQLANGVTEGLDYGFMKEVTFHCHEGYILHGAPKLTCQSDGNWDAEIPLCKPVNCGPPEDLAHGFPNGFSFIHGGHIQYQCFPGYKLHGNSSRRCLSNGSWSGSSPSCLPCRCSTPVIEYGTVNGTDFDCGKAARIQCFKGFKLLGLSEITCEADGQWSSGFPHCEHTSCGSLPMIPNAFISETSSWKENVITYSCRSGYVIQGSSDLICTEKGVWSQPYPVCEPLSCGSPPSVANAVATGEAHTYESEVKLRCLEGYTMDTDTDTFTCQKDGRWFPERISCSPKKCPLPENITHILVHGDDFSVNRQVSVSCAEGYTFEGVNISVCQLDGTWEPPFSDESCSPVSCGKPESPEHGFVVGSKYTFESTIIYQCEPGYELEGNRERVCQENRQWSGGVAICKETRCETPLEFLNGKADIENRTTGPNVVYSCNRGYSLEGPSEAHCTENGTWSHPVPLCKPNPCPVPFVIPENALLSEKEFYVDQNVSIKCREGFLLQGHGIITCNPDETWTQTSAKCEKISCGPPAHVENAIARGVHYQYGDMITYSCYSGYMLEGFLRSVCLENGTWTSPPICRAVCRFPCQNGGICQRPNACSCPEGWMGRLCEEPICILPCLNGGRCVAPYQCDCPPGWTGSRCHTAVCQSPCLNGGKCVRPNRCHCLSSWTGHNCSRKRRTGF

SEQ ID NO: 12999 - protein, 229 aa, Homo sapiens
MPAAGPPLLLLGTPGSGKTALLFAAALEAAGEGQGPVLFLTRRPLQSMPRGTGTTLDPMRLQKIRFQYPPSTRELFRLLCSAHEAPGPAPSLLLLDGLEEYLAEDPEPQEAAYLIALLLDTAAHFSHRLGPGRDCGLMVALQTQEEAGSGDVLHLALLQRYFPAQCWLQPDAPGPGEHGLRACLEPGGLGPRTEWWVTFRSDGEMMIAPWPTQAGDPSSGKGSSSGGQP

SEQ ID NO: 13000 - protein, 352 aa, Homo sapiens
MFRGLSSWLGLQQPVAGGGQPNGDAPPEQPSETVAESAEEELQQAGDQELLHQAKDFGNYLFNFASAATKKITESVAETAQTIKKSVEEGKIDGIIDKTIIGDFQKEQKKFVEEQHTKKSEAAVPPWVDTNDEETIQQQILALSADKRNFLRDPPAGVQFNFDFDQMYPVALVMLQEDELLSKMRFALVPKLVKEEVFWRNYFYRVSLIKQSAQLTALAAQQQAAGKEEKSNGREQDLPLAEAVRPKTPPVVIKSQLKTQEDEEEISTSPGVSEFVSDAFDACNLNQEDLRKEMEQLVLDKKQEETAVLEEDSADWEKELQQELQEYEVVTESEKRDENWDKEIEKMLQEEN

SEQ ID NO: 13001 - protein, 134 aa, Homo sapiens
MSPLRPLLLALALASVPCAQGACPASADLKHSDGTRTCAKLYDKSDPYYENCCGGAELSLESGADLPYLPSNWANTASSLVVAPRCELTVWSRQGKAGKTHKFSAGTYPRLEEYRRGILGDWSNAISALYCRCS

SEQ ID NO: 13002 - protein, 111 aa, Homo sapiens
MKILVALAVFFLVSTQLFAEEIGANDDLNYWSDWYDSDQIKEELPEPFEHLLQRIARRPKPQQFFGLMGKRDADSSIEKQVALLKALYGHGQISHKMAYERSAMQNYERRR

SEQ ID NO: 13003 - protein, 129 aa, Homo sapiens
MKILVALAVFFLVSTQLFAEEIGANDDLNYWSDWYDSDQIKEELPEPFEHLLQRIARRPKPQQFFGLMGKRDADSSIEKQVALLKALYGHGQISHKRHKTDSFVGLMGKRALNSVAYERSAMQNYERRR

SEQ ID NO: 13004 - protein, 114 aa, Homo sapiens
MKILVALAVFFLVSTQLFAEEIGANDDLNYWSDWYDSDQIKEELPEPFEHLLQRIARRPKPQQFFGLMGKRDAGHGQISHKRHKTDSFVGLMGKRALNSVAYERSAMQNYERRR

SEQ ID NO: 13005 - protein, 103 aa, Homo sapiens
MRIMLLFTAILAFSLAQSFGAVCKEPQEEVVPGGGRSKRDPDLYQLLQRLFKSHSSLEGLLKALSQASTDPKESTSPEKHSPTDVNQENVPSFGILKYPPRAE

SEQ ID NO: 13006 - protein, 103 aa, Homo sapiens; identical to SEQ ID NO: 13005

SEQ ID NO: 13007 - protein, 103 aa, Homo sapiens; identical to SEQ ID NO: 13005

SEQ ID NO: 13008 - protein, 121 aa, Homo sapiens
MRIMLLFTAILAFSLAQSFGAVCKEPQEEVVPGGGRSKRDPDLYQLLQRLFKSHSSLEGLLKALSQASTDPKESTSPEKRDMHDFFVGLMGKRSVQPDSPTDVNQENVPSFGILKYPPRAE

SEQ ID NO: 13009 - protein, 121 aa, Homo sapiens; identical to SEQ ID NO: 13008

SEQ ID NO: 13010 - protein, 121 aa, Homo sapiens; identical to SEQ ID NO: 13008

SEQ ID NO: 13011 - protein, 121 aa, Homo sapiens; identical to SEQ ID NO: 13008

SEQ ID NO: 13012 - protein, 135 aa, Homo sapiens
MRIMLLFTAILAFSLAQSFGAVCKEPQEEVVPGGGRSKRDPDLYQLLQRLFKSHSSLEGLLKALSQASTDPKESTSPEKRDMHDFFVGLMGKRSVQPEGKTGPFLPSVRVPRPLHPNQLGSTGKSSLGTEEQRPL

SEQ ID NO: 13013 - protein, 135 aa, Homo sapiens; identical to SEQ ID NO: 13012

SEQ ID NO: 13014 - protein, 135 aa, Homo sapiens; identical to SEQ ID NO: 13012

SEQ ID NO: 13015 - protein, 96 aa, Homo sapiens
MLPCLALLLLMELSVCTVAGDGGEEQTLSTEAETWEGAGPSIQLQLQEVKTGKASQFFGLMGKRVGAYQLEHTFQGLLGKRSLFTEGREDEAQGSE

SEQ ID NO: 13016 - protein, 76 aa, Homo sapiens
MLPCLALLLLMELSVCTVAGDGGEEQTLSTEAETWEGAGPSIQLQLQEVKTGKASQFFGLMGKRVGGREDEAQGSE

SEQ ID NO: 13017 - protein, 107 aa, Homo sapiens
MLPCLALLLLMELSVCTVAGDGGEEQTLSTEAETWEGAGPSIQLQLQEVKTGKASQFFGLMGKRVGGRPLIQPRRKKAYQLEHTFQGLLGKRSLFTEGREDEAQGSE

SEQ ID NO: 13018 - protein, 87 aa, Homo sapiens
MLPCLALLLLMELSVCTVAGDGGEEQTLSTEAETWEGAGPSIQLQLQEVKTGKASQFFGLMGKRVGGRPLIQPRRKKGREDEAQGSE

SEQ ID NO: 13019 - protein, 113 aa, Homo sapiens
MLPCLALLLLMELSVCTVAGDGGEEQTLSTEAETWVIVALEEGAGPSIQLQLQEVKTGKASQFFGLMGKRVGGRPLIQPRRKKAYQLEHTFQGLLGKRSLFTEGREDEAQGSE

SEQ ID NO: 13020 - protein, 53 aa, Homo sapiens
MLPCLALLLLMELSVCTVAGDGGEEQTLSTEAETWVIVALEVLLGRGSDEGRG

SEQ ID NO: 13021 - protein, 187 aa, Homo sapiens
MANRGPAYGLSREVQQKIEKQYDADLEQILIQWITTQCRKDVGRPQPGRENFQNWLKDGTVLCELINALYPEGQAPVKKIQASTMAFKQMEQISQFLQAAERYGINTTDIFQTVDLWEGKNMACVQRTLMNLGGLAVARDDGLFSGDPNWFPKKSKENPRNFSDNQLQEGKNVIGLQMGTNRGASQA

SEQ ID NO: 13022 - protein, 199 aa, Homo sapiens
MANRGPAYGLSREVQQKIEKQYDADLEQILIQWITTQCRKDVGRPQPGRENFQNWLKDGTVLCELINALYPEGQAPVKKIQASTMAFKQMEQISQFLQAAERYGINTTDIFQTVDLWEGKNMACVQRTLMNLGGLAVARDDGLFSGDPNWFPKKSKENPRNFSDNQLQEGKNVIGLQMGTNRGASQAGMTGYGMPRQIL

SEQ ID NO: 13023 - protein, 199 aa, Homo sapiens; identical to SEQ ID NO: 13022

SEQ ID NO: 13024 - protein, 220 aa, Homo sapiens
MSAFSLALALVSSPQPPPPIGMANRGPAYGLSREVQQKIEKQYDADLEQILIQWITTQCRKDVGRPQPGRENFQNWLKDGTVLCELINALYPEGQAPVKKIQASTMAFKQMEQISQFLQAAERYGINTTDIFQTVDLWEGKNMACVQRTLMNLGGLAVARDDGLFSGDPNWFPKKSKENPRNFSDNQLQEGKNVIGLQMGTNRGASQAGMTGYGMPRQIL

SEQ ID NO: 13025 - protein, 192 aa, Homo sapiens
MKSLSLLLAVALDPAGALQAAFRRYPRGAPAPHCEMSRFVPLPASAKWASGLTPAQNCPRALDGAWLMVSISSPVLSLSSLLRPQPEPQQEPVLITMATVVLTVLTHTPAPRVRLGQDALLDLSFAYMPPTSEAASSLAPGPPPFGLEWRRQHLGKGHLLLAATPGLNGQMPAAQEGAVAFAAWDDDEPWGP

SEQ ID NO: 13026 - protein, 156 aa, Homo sapiens
MKSLSLLLAVALGLATAVSAGPAVIECWFVEDASGKGLAKRPGALLLRQGPGEPPPRPDLDPELYLSVHDPAGALQAAFRRYPRGAPAPHCEMSRFVPLPASAKWASGLTPAQNCPRALDGAWLMVSISSMGHAMPVEFTIPACLPRGAALRSPWR

SEQ ID NO: 13027 - protein, 466 aa, Homo sapiens
MKSLSLLLAVALGLATAVSAGPAVIECWFVEDASGKGLAKRPGALLLRQGPGEPPPRPDLDPELYLSVHDPAGALQAAFRRYPRGAPAPHCEMSRFVPLPASAKWASGLTPAQNCPRALDGAWLMVSISSPVLSLSSLLRPQPEPQQEPVLITMATVEMGFHHVGQAALELLTSVVLTVLTHTPAPRVRLGQDALLDLSFAYMPPTSEAASSLAPGPPPFGLEWRRQHLGKGHLLLAATPGLNGQMPAAQEGAVAFAAWDDDEPWGPWTGNGTFWLPTVQPFQEGTYLATIHLPYLQGQVTLELAVYKPPKVSLMPATLARAAPGEAPPELLCLVSHFYPSGGLEVEWELRGGPGGRSQKAEGQRWLSALRHHSDGSVSLSGHLQPPPVTTEQHGARYACRIHHPSLPASGRSAEVTLEVAGLSGPSLEDSVGLFLSAFLLLGLFKALGWAAVYLSTCKDSKKKAE

SEQ ID NO: 13028 - protein, 504 aa, Homo sapiens
MKSLSLLLAVALGLATAVSAGPAVIECWFVEDASGKGLAKRPGALLLRQGPGEPPPRPDLDPELYLSVHDPAGALQAAFRRYPRGAPAPHCEMSRFVPLPASAKWASGLTPAQNCPRALDGAWLMVSISSPVLSLSSLLRPQPEPQQEPVLITMATVVLTVLTHTPAPRVRLGQDALLDLSFAYMPPTSEAASSLAPGPPPFGLEWRRQHLGKGHLLLAATPGLNGQMPAAQEGAVAFAAWDDDEPWGPWTGNGTFWLPTVQPFQEGTYLATIHLPYLQGQVTLELAVYKPPKVSLMPATLARAAPGEAPPELLCLVSHFYPSGGLEVEWELRGGPGGRSQKAEGQRWLSALRHHSDGSVSLSGHLQPPPVTTEQHGARYACRIHHPSLPASGRSAEVTLEVAGLSGPSLEDSVGLFLSAFLLLGLFKALGWAAVYLSTCKDSKKVQCSTSLYLSLVTLSPHPISKPMEGGCWCGRQNLGLEFTLIWVKTWHYILTVGLFEHAT

SEQ ID NO: 13029 - protein, 448 aa, Homo sapiens
MKSLSLLLAVALGLATAVSAGPAVIECWFVEDASGKGLAKRPGALLLRQGPGEPPPRPDLDPELYLSVHDPAGALQAAFRRYPRGAPAPHCEMSRFVPLPASAKWASGLTPAQNCPRALDGAWLMVSISSPVLSLSSLLRPQPEPQQEPVLITMATVVLTVLTHTPAPRVRLGQDALLDLSFAYMPPTSEAASSLAPGPPPFGLEWRRQHLGKGHLLLAATPGLNGQMPAAQEGAVAFAAWDDDEPWGPWTGNGTFWLPTVQPFQEGTYLATIHLPYLQGQVTLELAVYKPPKVSLMPATLARAAPGEAPPELLCLVSHFYPSGGLEVEWELRGGPGGRSQKAEGQRWLSALRHHSDGSVSLSGHLQPPPVTTEQHGARYACRIHHPSLPASGRSAEVTLEVAGLSGPSLEDSVGLFLSAFLLLGLFKALGWAAVYLSTCKDSKKKAE

SEQ ID NO: 13030 - protein, 361 aa, Homo sapiens
MKSLSLLLAVALGLATAVSAGPAVIECWFVEDASGKGLAKRPGALLLRQGPGEPPPRPDLDPELYLSVHVVLTVLTHTPAPRVRLGQDALLDLSFAYMPPTSEAASSLAPGPPPFGLEWRRQHLGKGHLLLAATPGLNGQMPAAQEGAVAFAAWDDDEPWGPWTGNGTFWLPTVQPFQEGTYLATIHLPYLQGQVTLELAVYKPPKVSLMPATLARAAPGEAPPELLCLVSHFYPSGGLEVEWELRGGPGGRSQKAEGQRWLSALRHHSDGSVSLSGHLQPPPVTTEQHGARYACRIHHPSLPASGRSAEVTLEVAGLSGPSLEDSVGLFLSAFLLLGLFKALGWAAVYLSTCKDSKKKAE

SEQ ID NO: 13031 - protein, 468 aa, Homo sapiens
MGTQEGWCLLLCLALSGAAETKPHPAEGQWRAVDVVLDCFLAKDGAHRGALASSEDRARASLVLKQVPVLDDGSLEDFTDFQGGTLAQDDPPIIFEASVDLVQIPQAEALLHADCSGKEVTCEISRYFLQMTETTVKTAAWFMANMQVSGGGPSISLVMKTPRVTKNEALWHPTLNLPLSPQGTVRTAVEFQVMTQTQSLSFLLGSSASLDCGFSMAPGLDLISVEWRLQHKGRGQLVYSWTAGQGQAVRKGATLEPAQLGMARDASLTLPGLTIQDEGTYICQITTSLYRAQQIIQLNIQASPKVRLSLANEALLPTLICDIAGYYPLDVVVTWTREELGGSPAQVSGASFSSLRQSVAGTYSISSSLTAEPGSAGATYTCQVTHISLEEPLGASTQVVPPERRTALGVIFASSLFLLALMFLGLQRRQAPTGLGLLQAERWETTSCADTQSSHLHEDRTARVSQPS

SEQ ID NO: 13032 - protein, 185 aa, Homo sapiens
MGTQEGWCLLLCLALSGAAETMDLVQIPQAEALLHADCSGKEVTCEISRYFLQMTETTVKTAAWFMANMQVSGGGPSISLVMKTPRVTKNEALWHPTLNLPLSPQGTVRTAVEFQVMTQTQSLSFLLGSSASLDCGFSMAPGLDLISVEWRLQHKGRGRGDLHLPDHHLSVPSSADHPAQHPSFP

SEQ ID NO: 13033 - protein, 96 aa, Homo sapiens
MDFSSNGKYLATCADDRTIRIWSTKDFLQREHRSMRANVELDHATLVRFSPDCRAFIVWLANGDTLRVFKMTKREDGGYTFTATPEDFPKKHKAPV

SEQ ID NO: 13034 - protein, 43 aa, Homo sapiens
MELSQMSELMGLSVLLGLLALMATAAVARGWLRAGEERSGRPA

SEQ ID NO: 13035 - protein, 43 aa, Homo sapiens; identical to SEQ ID NO: 13034

SEQ ID NO: 13036 - protein, 46 aa, Homo sapiens
MELSQMSELMGLSVLLGLLALMATAAVARGWLRAGEERSGRPACGQ

SEQ ID NO: 13037 - protein, 107 aa, Homo sapiens
MELSQMSELMGLSVLLGLLALMATAAVARGWLRAGEERSGRPACQKANGFPPDKSSGSKKQKQYQRIRKEKPQQHNFTHRLLAAALKMIAPSASGAPRTSCSESTAA

SEQ ID NO: 13038 - protein, 176 aa, Homo sapiens
MELSQMSELMGLSVLLGLLALMATAAVARGWLRAGEERSGRPACQKANGFPPDKSSGSKKQKQYQRIRKEKPQQHNFTHRLLAAALKSHSGNISCMDFSSNGKYLATCADDRTIRIWSTKDFLQREHRSMRANVELDHATLSLHRLAGQRGHPPCLQDDQAGGWGLHLHSHPRGLP

SEQ ID NO: 13039 - protein, 447 aa, Homo sapiens
MELSQMSELMGLSVLLGLLALMATAAVARGWLRAGEERSGRPACQKANGFPPDKSSGSKKQKQYQRIRKEKPQQHNFTHRLLAAALKSHSGNISCMDFSSNGKYLATCADDRTIRIWSTKDFLQREHRSMRANVELDHATLVRFSPDCRAFIVWLANGDTLRVFKMTKREDGGYTFTATPEDFPKKHKAPVIDIGIANTGKFIMTASSDTTVLIWSLKGQVLSTINTNQMNNTHAAVSPCGRFVASCGFTPDVKVWEVCFGKKGEFQEVVRAFELKGHSAAVHSFAFSNDSRRMASVSKDGTWKLWDTDVEYKKKQDPYLLKTGRFEEAAGAAPCRLALSPNAQVLALASGSSIHLYNTRRGEKEECFERVHGECIANLSFDITGRFLASCGDRAVRLFHNTPGHRAMVEEMQGHLKRASNESTRQRLQQQLTQAQETLKSLGALKK

SEQ ID NO: 13040 - protein, 446 aa, Homo sapiens [sequence omitted]

SEQ ID NO: 13041 - protein, 75 aa, Homo sapiens
MELSQMSELMGLSVLLGLLALMATAAVARGWLRAGEERSGRPAWPRSFFPVGIGEHLQSFTTCQLCDSIKYLLQK

SEQ ID NO: 13042 - protein, 54 aa, Homo sapiens
MELSQMSELMGLSVLLGLLALMATAAVARGWLRAGEERSGRPAWSCSVTQDGMQ

SEQ ID NO: 13043 - protein, 64 aa, Homo sapiens
MGLSFSSGNVSFASRDGDPPCRAKKQMDFHLTNLRDPRSRNNISGFGRRSLNNTTSPTASWLQL

SEQ ID NO: 13044 - protein, 39 aa, Homo sapiens
MGLSFSSGPRSFFPVGIGEHLQSFTTCQLCDSIKYLLQK

SEQ ID NO: 13045 - protein, 411 aa, Homo sapiens
MGLSFSSGQKANGFPPDKSSGSKKQKQYQRIRKEKPQQHNFTHRLLAAALKSHSGNISCMDFSSNGKYLATCADDRTIRIWSTKDFLQREHRSMRANVELDHATLVRFSPDCRAFIVWLANGDTLRVFKMTKREDGGYTFTATPEDFPKKHKAPVIDIGIANTGKFIMTASSDTTVLIWSLKGQVLSTINTNQMNNTHAAVSPCGRFVASCGFTPDVKVWEVCFGKKGEFQEVVRAFELKGHSAAVHSFAFSNDSRRMASVSKDGTWKLWDTDVEYKKKQDPYLLKTGRFEEAAGAAPCRLALSPNAQVLALASGSSIHLYNTRRGEKEECFERVHGECIANLSFDITGRFLASCGDRAVRLFHNTPGHRAMVEEMQGHLKRASNESTRQRLQQQLTQAQETLKSLGALKK

SEQ ID NO: 13046 - protein, 385 aa, Homo sapiens
MAAFLSAGLGILAPSETYPLPTTSSGWEPRLGSPFPSGPCTSSTGAQAVAEPTGQGPKNPRVSRVTVQLEMKPLWEEFNQLGTEMIVTKAGRRMFPPFQVKILGMDSLADYALLMDFIPLDDKRYRYAFHSSAWLVAGKADPATPGRVHFHPDSPAKGAQWMRQIVSFDKLKLTNNLLDDNGHIILNSMHRYQPRFHVVFVDPRKDSERYAQENFKSFIFTETQFTAVTAYQNHRITQLKIASNPFAKGFRESDLDSWPVAPRPLLSVPARSHSSLSPCVLKGATDREKDPNKASASTSKTPAWLHHQLLPPPEVLLAPATYRPVTYQSLYSGAPSHLGIPRTRPAPYPLPNIRADRDQGGLPLPAGLGLLSPTVVCLGPGQDSQ

SEQ ID NO: 13047 - protein, 446 aa, Homo sapiens
MGKRYMHHPQIQMISTVNLLVIHLLSHQPVCSLALSLCKSYPPHSVSPTDINTSLPPMSSFHRGSTSSSPYVAASHTPPINGSDSILGTRGNAAGSSQTGDALGKALASIYSPDHTSSSFPSNPSTPVGSPSPLTGTSQWPRPGGQAPSSPSYENSLHSLQSRMEDRLDRLDDAIHVLRNHAVGPSTSLPAGHSDIHSLLGPSHNAPIGSLNSNYGGSSLVASSRSASMVGTHREDSVSLNGNHSVLSSTVTTSSTDLNHKTQENYRGGLQSQSGTVVTTEIKTENKEKDENLHEPPSSDDMKSDDESSQKDIKVSSRGRTSSTNEDEDLNPEQKIEREKERRMANNARERLRVRDINEAFKELGRMCQLHLKSEKPQTKLLILHQAVAVILSLEQQVRERNLNPKAACLKRREEEKVSAVSAEPPTTLPGTHPGLSETTNPMGHM

SEQ ID NO: 13048 - protein, 58 aa, Homo sapiens
MNPQQQRMAAIGTDKELSDLLDFSAMFSPPVNSGKTRPTTLGSSQFSGSGFYRQPSLQ

SEQ ID NO: 13049 - protein, 157 aa, Homo sapiens
MNPQQQRMAAIGTDKELSDLLDFSAMFSPPVNSGKTRPTTLGSSQFSGSGIDERGGTTSWGTSGQPSPSYDSSRGFTDSPHYSDHLNDSRLGAHEGLSPTPFMNSNLMGKTSERGSFSLYSRDTGLPGCQSSLLRQDLGLGSPAQLSSSGKPGTAYY

SEQ ID NO: 13050 - protein, 682 aa, Homo sapiens
MNPQQQRMAAIGTDKELSDLLDFSAMFSPPVNSGKTRPTTLGSSQFSGSGIDERGGTTSWGTSGQPSPSYDSSRGFTDSPHYSDHLNDSRLGAHEGLSPTPFMNSNLMGKTSERGSFSLYSRDTGLPGCQSSLLRQDLGLGSPAQLSSSGKPGTAYYSFSATSSRRRPLHDSAALDPLQAKKVRKVPPGLPSSVYAPSPNSDDFNRESPSYPSPKPPTSMFASTFFMQDGTHNSSDLWSSSNGMSQPGFGGILGTSTSHMSQSSSYGNLHSHDRLSYPPHSVSPTDINTSLPPMSSFHRGSTSSSPYVAASHTPPINGSDSILGTRGNAAGSSQTGDALGKALASIYSPDHTSSSFPSNPSTPVGSPSPLTGTSQWPRPGGQAPSSPSYENSLHSLQSRMEDRLDRLDDAIHVLRNHAVGPSTSLPAGHSDIHSLLGPSHNAPIGSLNSNYGGSSLVASSRSASMVGTHREDSVSLNGNHSVLSSTVTTSSTDLNHKTQENYRGGLQSQSGTVVTTEIKTENKEKDENLHEPPSSDDMKSDDESSQKDIKVSSRGRTSSTNEDEDLNPEQKIEREKERRMANNARERLRVRDINEAFKELGRMCQLHLKSEKPQTKLLILHQAVAVILSLEQQVRERNLNPKAACLKRREEEKVSAVSAEPPTTLPGTHPGLSETTNPMGHM

SEQ ID NO: 13051 - protein, 706 aa, Homo sapiens
MNPQQQRMAAIGTDKELSDLLDFSAMFSPPVNSGKTRPTTLGSSQFSGSGIDERGGTTSWGTSGQPSPSYDSSRGFTDSPHYSDHLNDSRLGAHEGLSPTPFMNSNLMGKTSERGSFSLYSRDTGLPGCQSSLLRQDLGLGSPAQLSSSGKPGTAYYSFSATSSRRRPLHDSAALDPLQAKKVRKVPPGLPSSVYAPSPNSDDFNRESPSYPSPKPPTSMFASTFFMQDGTHNSSDLWSSSNGMSQPGFGGILGTSTSHMSQSSSYGNLHSHDRLSYPPHSVSPTDINTSLPPMSSFHRGSTSSSPYVAASHTPPINGSDSILGTRGNAAGSSQTGDALGKALASIYSPDHTSSSFPSNPSTPVGSPSPLTGTSQWPRPGGQAPSSPSYENSLHSLKNRVEQQLHEHLQDAMSFLKDVCEQSRMEDRLDRLDDAIHVLRNHAVGPSTSLPAGHSDIHSLLGPSHNAPIGSLNSNYGGSSLVASSRSASMVGTHREDSVSLNGNHSVLSSTVTTSSTDLNHKTQENYRGGLQSQSGTVVTTEIKTENKEKDENLHEPPSSDDMKSDDESSQKDIKVSSRGRTSSTNEDEDLNPEQKIEREKERRMANNARERLRVRDINEAFKELGRMCQLHLKSEKPQTKLLILHQAVAVILSLEQQVRERNLNPKAACLKRREEEKVSAVSAEPPTTLPGTHPGLSETTNPMGHM

SEQ ID NO: 13052 - protein, 706 aa, Homo sapiens; identical to SEQ ID NO: 13051

SEQ ID NO: 13053 - protein, 682 aa, Homo sapiens; identical to SEQ ID NO: 13050

SEQ ID NO: 13054 - protein, 666 aa, Homo sapiens
MNPQQQRMAAIGTDKELSDLLDFSAMFSPPVNSGKTRPTTLGSSQFSGSGTIHEMKQLNSKARQKGQRIKGFTDSPHYSDHLNDSRLGAHEGLSPTPFMNSNLMGKTSERGSFSLYSRDTGLPGCQSSLLRQDLGLGSPAQLSSSGKPGTAYYSFSATSSRRRPLHDSAALDPLQAKKVRKVPPGLPSSVYAPSPNSDDFNRESPSYPSPKPPTSMFASTFFMQDGTHNSSDLWSSSNGMSQPGFGGILGTSTSHMSQSSSYGNLHSHDRLSYPPHSVSPTDINTSLPPMSSFHRGSTSSSPYVAASHTPPINGSDSILGTRGNAAGSSQTGDALGKALASIYSPDHTSSSFPSNPSTPVGSPSPLTGTSQWPRPGGQAPSSPSYENSLHSLKNRVEQQLHEHLQDAMSFLKDVCEQSRMEDRLDRLDDAIHVLRNHAVGPSTSLPAGHSDIHSLLGPSHNAPIGSLNSNYGGSSLVASSRSASMVGTHREDSVSLNGNHSVLSSTVTTSSTDLNHKTQENYRGGLQSQSGTVVTTEIKTENKEKDENLHEPPSSDDMKSDDESSQKDIKVSSRGRTSSTNEDEDLNPEQKIEREKERRMANNARERLRVRDINEAFKELGRMCQLHLKSEKPQTKLLILHQAVAVILSLEQQVRERNLNPKAACL

SEQ ID NO: 13055 - protein, 339 aa, Homo sapiens
MSSNSSTSQWPRPGGQAPSSPSYENSLHSLKNRVEQQLHEHLQDAMSFLKDVCEQSRMEDRLDRLDDAIHVLRNHAVGPSTSLPAGHSDIHSLLGPSHNAPIGSLNSNYGGSSLVASSRSASMVGTHREDSVSLNGNHSVLSSTVTTSSTDLNHKTQENYRGGLQSQSGTVVTTEIKTENKEKDENLHEPPSSDDMKSDDESSQKDIKVSSRGRTSTNEDEDLNPEQKIEREKERRMANNARERLRVRDINEAFKELGRMCQLHLKSEKPQTKLLILHQAVAVILSLEQQVRERNLNPKAACLKRREEEKVSAVSAEPPTTLPGTHPGLSETTNPMGHM

SEQ ID NO: 13056 - protein, 316 aa, Homo sapiens
MSSNSSTSQWPRPGGQAPSSPSYENSLHSLQSRMEDRLDRLDDAIHVLRNHAVGPSTSLPAGHSDIHSLLGPSHNAPIGSLNSNYGGSSLVASSRSASMVGTHREDSVSLNGNHSVLSSTVTTSSTDLNHKTQENYRGGLQSQSGTVVTTEIKTENKEKDENLHEPPSSDDMKSDDESSQKDIKVSSRGRTSSTNEDEDLNPEQKIEREKERRMANNARERLRVRDINEAFKELGRMCQLHLKSEKPQTKLLILHQAVAVILSLEQQVRERNLNPKAACLKRREEEKVSAVSAEPPTTLPGTHPGLSETTNPMGHM

SEQ ID NO: 13057 - protein, 536 aa, Homo sapiens
MYCAYPVPGMGSNSLMYYYNGKTVYAPSPNSDDFNRESPSYPSPKPPTSMFASTFFMQDGTHNSSDLWSSSNGMSQPGFGGILGTSTSHMSQSSSYGNLHSHDRLSYPPHSVSPTDINTSLPPMSSFHRGSTSSSPYVAASHTPPINGSDSILGTRGNAAGSSQTGDALGKALASIYSPDHTSSSFPSNPSTPVGSPSPLTGTSQWPRPGGQAPSSPSYENSLHSLKNRVEQQLHEHLQDAMSFLKDVCEQSRMEDRLDRLDDAIHVLRNHAVGPSTSLPAGHSDIHSLLGPSHNAPIGSLNSNYGGSSLVASSRSASMVGTHREDSVSLNGNHSVLSSTVTTSSTDLNHKTQENYRGGLQSQSGTVVTTEIKTENKEKDENLHEPPSSDDMKSDDESSQKDIKVSSRGRTSSTNEDEDLNPEQKIEREKERRMANNARERLRVRDINEAFKELGRMCQLHLKSEKPQTKLLILHQAVAVILSLEQQVRERNLNPKAACLKRREEEKVSAVSAEPPTTLPGTHPGLSETTNPMGHM

SEQ ID NO: 13058 - protein, 512 aa, Homo sapiens
MYCAYPVPGMGSNSLMYYYNGKTVYAPSPNSDDFNRESPSYPSPKPPTSMFASTFFMQDGTHNSSDLWSSSNGMSQPGFGGILGTSTSHMSQSSSYGNLHSHDRLSYPPHSVSPTDINTSLPPMSSFHRGSTSSSPYVAASHTPPINGSDSILGTRGNAAGSSQTGDALGKALASIYSPDHTSSSFPSNPSTPVGSPSPLTGTSQWPRPGGQAPSSPSYENSLHSLQSRMEDRLDRLDDAIHVLRNHAVGPSTSLPAGHSDIHSLLGPSHNAPIGSLNSNYGGSSLVASSRSASMVGTHREDSVSLNGNHSVLSSTVTTSSTDLNHKTQENYRGGLQSQSGTVVTTEIKTENKEKDENLHEPPSSDDMKSDDESSQKDIKVSSRGRTSSTNEDEDLNPEQKIEREKERRMANNARERLRVRDINEAFKELGRMCQLHLKSEKPQTKLLILHQAVAVILSLEQQVRERNLNPKAACLKRREEEKVSAVSAEPPTTLPGTHPGLSETTNPMGHM

SEQ ID NO: 13059 - protein, 48 aa, Homo sapiens
  VARIANT 1: note = misc_feature - Xaa can be any naturally occurring amino acid
XERNLNPKAACLKRREEEKVSAVSAEPPTTLPGTHPGLSETTNPMGHM

SEQ ID NO: 13060 - protein, 44 aa, Homo sapiens
  VARIANT 1: note = misc_feature - Xaa can be any naturally occurring amino acid
XNPKAACLKRREEEKVSAVSAEPPTTLPGTHPGLSETTNPMGHM

SEQ ID NO: 13061 - protein, 433 aa, Homo sapiens
MRQSHQLPLVGLLLFSFIPSQLCEICEVSEENYIRLKPLLNTMIQSNYNRGTSAVNVVLSLKLVGIQIQTLMQKMIQQIKYNVKSRLSDVSSGELALIILALGVCRNAEENLIYDYHLIDKLENKFQAEIENMEAHNGTPLTNYYQLSLDVLALCLFNGNYSTAEVVNHFTPENKNYYFGSQFSVDTGAMAVLALTCVKKSLINGQIKADEGSLKNISIYTKSLVEKILSEKKENGLIGNTFSTGEAMQALFVSSDYYNENDWNCQQTLNTVLTEISQGAFSNPNAAAQVLPALMGKTFLDINKDSSCVSASGNFNISADEPITVTPPDSQSYISVNYSVRINETYFTNVTVLNGSVFLSVMEKAQKMNDTIFGFTMEERSWGPYITCIQGLCANNNDRTYWELLSGGEPLSQGAGSYVVRNGENLEVRWSKY

SEQ ID NO: 13062 - protein, 402 aa, Homo sapiens
MDSHLVEKLGQHLLPWMDRLSLEHLNPSIYVGLRLSSLQAGTKEDLYLHSLKLGYQQCLLGSAFSEDDGDCQGKPSMGQLALYLLALRANCEFVRGHKGDRLVSQLKWFLEDEKRAIGHDHKGHPHTSYYQYGLGILALCLHQKRVHDSVVDKLLYAVEPFHQGHHSVDTAAMAGLAFTCLKRSNFNPGRRQRITMAIRTVREEILKAQTPEGHFGNVYSTPLALQFLMTSPMRGAELGTACLKARVALLASLQDGAFQNALMISQLLPVLNHKTYIDLIFPDCLAPRVMLEPAAETIPQTQEIISVTLQVLSLLPPYRQSISVLAGSTVEDVLKKAHELGGFTYETQASLSGPYLTSVMGKAAGEREFWQLLRDPNTPLLQGIADYRPKDGETIELRLVSW

SEQ ID NO: 13063 - protein, 423 aa, Homo sapiens
MRHLGAFLFLLGVLGALTEMCEIPEMDSHLVEKLGQHLLPWMDRLSLEHLNPSIYVGLRLSSLQAGTKEDLYLHSLKLGYQQCLLGEDDGDCQGKPSMGQLALYLLALRANCEFVRGHKGDRLVSQLKWFLEDEKRAIGHDHKGHPHTSYYQYGLGILALCLHQKRVHDSVVDKLLYAVEPFHQGHHSVDTAAMAGLAFTCLKRSNFNPGRRQRITMAIRTVREEILKAQTPEGHFGNVYSTPLALQFLMTSPMRGAELGTACLKARVALLASLQDGAFQNALMISQLLPVLNHKTYIDLIFPDCLAPRVMLEPAAETIPQTQEIISVTLQVLSLLPPYRQSISVLAGSTVEDVLKKAHELGGFTYETQASLSGPYLTSVMGKAAGEREFWQLLRDPNTPLLQGIADYRPKDGETIELRLVSW

SEQ ID NO: 13064 - protein, 427 aa, Homo sapiens
MRHLGAFLFLLGVLGALTEMCEIPEMDSHLVEKLGQHLLPWMDRLSLEHLNPSIYVGLRLSSLQAGTKEDLYLHSLKLGYQQCLLGSAFSEDDGDCQGKPSMGQLALYLLALRANCEFVRGHKGDRLVSQLKWFLEDEKRAIGHDHKGHPHTSYYQYGLGILALCLHQKRVHDSVVDKLLYAVEPFHQGHHSVDTAAMAGLAFTCLKRSNFNPGRRQRITMAIRTVREEILKAQTPEGHFGNVYSTPLALQFLMTSPMRGAELGTACLKARVALLASLQDGAFQNALMISQLLPVLNHKTYIDLIFPDCLAPRVMLEPAAETIPQTQEIISVTLQVLSLLPPYRQSISVLAGSTVEDVLKKAHELGGFTYETQASLSGPYLTSVMGKAAGEREFWQLLRDPNTPLLQGIADYRPKDGETIELRLVSW

SEQ ID NO: 13065 - protein, 400 aa, Homo sapiens
MRHLGAFLFLLGVLGALTEMCEIPEMDSHLVEKLGQHLLPWMDRLSLEHLNPSIYVGLRLSSLQAGTKEDLYLHSLKLGYQQCLLGSAFSEDDGDCQGKPSMGQLALYLLALRANWHDHKGHPHTSYYQYGLGILALCLHQKRVHDSVVDKLLYAVEPFHQGHHSVDTAAMAGLAFTCLKRSNFNPGRRQRITMAIRTVREEILKAQTPEGHFGNVYSTPLALQFLMTSPMRGAELGTACLKARVALLASLQDGAFQNALMISQLLPVLNHKTYIDLIFPDCLAPRVMLEPAAETIPQTQEIISVTLQVLSLLPPYRQSISVLAGSTVEDVLKKAHELGGFTYETQASLSGPYLTSVMGKAAGEREFWQLLRDPNTPLLQGIADYRPKDGETIELRLVSW

SEQ ID NO: 13066 - protein, 94 aa, Homo sapiens
DTDVLQPTLVNAGHFSLCVNVVLETDWSSPVSARSTEGEEPAVGPGLPRLRGPFWKFPGPGHAGLGAHPLHHPVIQQEGFLPAPRGFGYRSEVD

SEQ ID NO: 13067 - protein, 483 aa, Homo sapiens [sequence omitted]

SEQ ID NO: 13068 - protein, 73 aa, Homo sapiens
MKGRFLFPLRLLLWMCLHLQRQASELHQPSMPGCPLTSSSRLFDNAQMHQFLNIHVKFENCTFGEIKFYIQLA

SEQ ID NO: 13069 - protein, 88 aa, Homo sapiens
MRPRGLPPLLVVLLGCWASVSAQTDATPAVTTEGLNSTEAALATFGTFPSTRPPGTPRAPGPSSGPRPTPVTDGATASFVVKKQSSIH

SEQ ID NO: 13070 - protein, 88 aa, Homo sapiens; identical to SEQ ID NO: 13069

SEQ ID NO: 13071 - protein, 75 aa, Homo sapiens
MRPRGLPPLLVVLLGCWASVSAQTDATPAVTTEGLNSTEAALATFGTFPSTRPPGTPRAPGPSSGPRPTPVTDGG

SEQ ID NO: 13072 - protein, 100 aa, Homo sapiens
MRPRGLPPLLVVLLGCWASVSAQTDATPAVTTEGLNSTEAALATFGTFPSTRPPGTPRAPGPSSGPRPTPVTDGGYHVPAPGVHSDPTSRGQPRCCSLCL

SEQ ID NO: 13073 - protein, 100 aa, Homo sapiens; identical to SEQ ID NO: 13072

SEQ ID NO: 13074 - protein, 100 aa, Homo sapiens; identical to SEQ ID NO: 13072

SEQ ID NO: 13075 - protein, 106 aa, Homo sapiens
MRPRGLPPLLVVLLGCWASVSAQTDATPAVTTEGLNSTEAALATFGTFPSTRPPGTPRAPGPSSGPRPTPVTDGHATCRYRSRRLTVSGELDGKLQVASGSVGGEE

SEQ ID NO: 13076 - protein, 83 aa, Homo sapiens
MRPRGLPPLLVVLLGCWASVSAQTDATPAVTTEGLNSTEAALATFGTFPSTRPPGTPRAPGPSSGPRPTPVTDGSHSVTQAGV

SEQ ID NO: 13077 - protein, 162 aa, Homo sapiens
MRPRGLPPLLVVLLGCWASVSAQTDATPAVTTEGLNSTEAALATFGTFPSTRPPGTPRAPGPSSGPRPTPVTDVAVLCVCDLSPAQCDINCCCDPDCSSVDFSVFSACSVPVVTGDSQFCSQKAVIYSLNFTANPPQRVFELVDQINPSIFCIHITNCRCSV

SEQ ID NO: 13078 - protein, 179 aa, Homo sapiens
MRPRGLPPLLVVLLGCWASVSAQTDATPAVTTEGLNSTEAALATFGTFPSTRPPGTPRAPGPSSGPRPTPVTDVAVLCVCDLSPAQCDINCCCDPDCSSVDFSVFSACSVPVVTGDSQFCSQKAVIYSLNFTANPPQRVFELVDQINPSIFCIHITNSHFTPGLSRWLCESRSRILSFP

SEQ ID NO: 13079 - protein, 245 aa, Homo sapiens
MRPRGLPPLLVVLLGCWASVSAQTDATPAVTTEGLNSTEAALATFGTFPSTRPPGTPRAPGPSSGPRPTPVTDVAVLCVCDLSPAQCDINCCCDPDCSSVDFSVFSACSVPVVTGDSQFCSQKAVIYSLNFTANPPQRVFELVDQINPSIFCIHITNYKPALSFINPEVPDENNFDTLMKTSDGFTLNAESYVSFTTKLDIPTAAKYEVSLNLIDSFHPITNIFPCKLIFKVTRKTGFLETELIL

SEQ ID NO: 13080 - protein, 592 aa, Homo sapiens
MRPRGLPPLLVVLLGCWASVSAQTDATPAVTTEGLNSTEAALATFGTFPSTRPPGTPRAPGPSSGPRPTPVTDVAVLCVCDLSPAQCDINCCCDPDCSSVDFSVFSACSVPVVTGDSQFCSQKAVIYSLNFTANPPQRVFELVDQINPSIFCIHITNYKPALSFINPEVPDENNFDTLMKTSDGFTLNAESYVSFTTKLDIPTAAKYEYGVPLQTSDSFLRFPSSLTSSLCTDNNPAAFLVNQAVKCTRKINLEQCEEIEALSMAFYSSPEILRVPDSRKKVPITVQSIVIQSLNKTLTRREDTDVLQPTLVNAGHFSLCVNVVLEVKYSLTYTDAGEVTKADLSFVLGTVSSVVVPLQQKFEIHFLQENTQPVPLSGNPGYVVGLPLAAGFQPHKGSGIIQTTNRYGQLTILHSTTEQDCLALEGVRTPVLFGYTMQSGCKLRLTGALPCQLVAQKVKSLLWGQGFPDYVAPFGNSQAQDMLDWVPIHFITQSFNRKHFVLQDSCQLPGALVIEVKWTKYGSLLNPQAKIVNVTANLISSSFPEANSGNERTILISTAVTFVDVSAPAEAGFRAPPAINARLPFNFFFPFV

SEQ ID NO: 13081 - protein, 587 aa, Homo sapiens
MRPRGLPPLLVVLLGCWASVSAQTDATPAVTTEGLNSTEAALATFGTFPSTRPPGTPRAPGPSSGPRPTPVTDVAVLCVCDLSPAQCDINCCCDPDCSSVDFSVFSACSVPVVTGDSQFCSQKAVIYSLNFTANPPQRVFELVDQINPSIFCIHITNYKPALSFINPEVPDENNFDTLMKTSDGFTLNAESYVSFTTKLDIPTAAKYEYGVPLQTSDSFLRFPSSLTSSLCTDNNPAAFLVNQAVKCTRKINLEQCEEIEALSMAFYSSPEILRVPDSRKKVPITVQSIVIQSLNKTLTRREDTDVLQPTLVNAGHFSLCVNVVLEVKYSLTYTDAGEVTKADLSFVLGTVSSVVVPLQQKFEIHFLQENTQPVPLSGNPGYVVGLPLAAGFQPHKGSGIIQTTNRYGQLTILHSTTEQDCLALEGVRTPVLFGYTMQSGCKLRLTGALPCQLVAQKVKSLLWGQGFPDYVAPFGNSQAQDMLDWVPIHFITQSFNRKDSCQLPGALVIEVKWTKYGSLLNPQAKIVNVTANLISSSFPEANSGNERTILISTAVTFVDVSAPAEAGFRAPPAINARLPFNFFFPFV

SEQ ID NO: 13082 - protein, 573 aa, Homo sapiens
MRPRGLPPLLVVLLGCWASVSAQTDATPAVTTEGLNSTEAALATFGTFPSTRPPGTPRAPGPSSGPRPTPVTDVAVLCVCDLSPAQCDINCCCDPDCSSVDFSVFSACSVPVVTGDSQFCSQKAVIYSLNFTANPPQRVFELVDQINPSIFCIHITNYKPALSFINPEVPDENNFDTLMKTSDGFTLNAESYVSFTTKLDIPTAAKYEYGVPLQTSDSFLRFPSSLTSSLCTDNNPAGQAYWFTPVIPALWEAEARGSLEVPDSRKKVPITVQSIVIQSLNKTLTRREDTDVLQPTLVNAGHFSLCVNVVLEVKYSLTYTDAGEVTKADLSFVLGTVSSVVVPLQQKFEIHFLQENTQPVPLSGNPGYVVGLPLAAGFQPHKGSGIIQTTNRYGQLTILHSTTEQDCLALEGVRTPVLFGYTMQSGCKLRLTGALPCQLVAQKVKSLLWGQGFPDYVAPFGNSQAQDMLDWVPIHFITQSFNRKDSCQLPGALVIEVKWTKYGSLLNPQAKIVNVTANLISSSFPEANSGNERTILISTAVTFVDVSAPAEAGFRAPPAINARLPFNFFFPFV

SEQ ID NO: 13083 - protein, 263 aa, Homo sapiens
MRPRGLPPLLVVLLGCWASVSAQTDATPAVTTEGLNSTEAALATFGTFPSTRPPGTPRAPGPSSGPRPTPVTDVAVLCVCDLSPAQCDINCCCDPDCSSVDFSVFSACSVPVVTGDSQFCSQKAVIYSLNFTANPPQRVFELVDQINPSIFCIHITNYKPALSFINPEVPDENNFDTLMKTSDGFTLNAESYVSFTTKLDIPTAAKYEYGVPLQTSDSFLRFPSSLTSSLCTDNNPAGQAYWFTPVIPALWEAEARGSLERFW

SEQ ID NO: 13084 - protein, 573 aa, Homo sapiens [sequence omitted]

SEQ ID NO: 13085 - protein, 625 aa, Homo sapiens
MRLETAEAYVGPGGPECPMRTPQLALLQVFFLVFPDGVRPQPSSSPSGAVPTSLELQRGTDGGTLQSPSEATATRPAVPGLPTVVPTLVTPSAPGNRTVDLFPVLPICVCDLTPGACDINCCCDRDCYLLHPRTVFSFCLPGSVRSSSWVCVDNSVIFRSNSPFPSRVFMDSNGIRQFCVHVNNSNLNYFQKLQKVNATNFQALAAEFGGESFTSTFQTQSPPSFYRAGDPILTYFPKWSVISLLRQPAGVGAGGLCAESNPAGFLESKSTTCTRFFKNLASSCTLDSALNAASYYNFTVLKVPRSMTDPQNMEFQVPVILTSQANAPLLAGNTCQNVVSQVTYEIETNGTFGIQKVSVSLGQTNLTVEPGASLQQHFILRFRAFQQSTAASLTSPRSGNPGYIVGKPLLALTDDISYSMTLLQSQGNGSCSVKRHEVQFGVNAISGCKLRLKKADCSHLQQEIYQTLHGRPRPEYVAIFGNADPAQKGGWTRILNRHCSISAINCTSCCLIPVSLEIQVLWAYVGLLSNPQAHVSGVRFLYQCQSIQDSQQVTEVSLTTLVNFVDITQKPQPPRGQPKMDWKWPFDFFPFKVAFSRGVFSQKCSVSPILILCLLLLGVLNLETM

SEQ ID NO: 13086 - protein, 459 aa, Homo sapiens
MRTPQLALLQVFFLVFPDGVRPQPSSSPSGAVPTSLELQRGTDGGTLQSPSEATATRPAVPGLPTVVPTLVTPSAPGNRTVDLFPVLPICVCDLTPGACDINCCCDRDCYLLHPRTVFSFCLPGSVRSSSWVCVDNSVIFRSNSPFPSRVFMDSNGIRQFCVHVNNCFLESKSTTCTRFFKNLASSCTLDSALNAASYYNFTVLKVPRSMTDPQNMEAFQQSTAASLTSPRSGNPGYIVGKPLLALTDDISYSMTLLQSQGNGSCSVKRHEVQFGVNAISGCKLRLKKADCSHLQQEIYQTLHGRPRPEYVAIFGNADPAQKGGWTRILNRHCSISAINCTSCCLIPVSLEIQVLWAYVGLLSNPQAHVSGVRFLYQCQSIQDSQQVTEVSLTTLVNFVDITQKPQPPRGQPKMDWKWPFDFFPFKVAFSRGVFSQKCSVSPILILCLLLLGVLNLETM

SEQ ID NO: 13087 - protein, 443 aa, Homo sapiens
MRTPQLALLQVFFLVFPDGVRPQPSSSPSGAVPTSLELQRGTDGGTLQSPSEATATRPAVPGLPTVVPTLVTPSAPGNRTVDLFPVLPICVCDLTPGACDINCCCDRDCYLLHPRTVFSFCLPGSVRSSSWVCVDNSVIFRSNSPFPSRVFMDSNGIRQFCVHVNNSNLNYFQKLQKVNATNFQALAAEFGGESFTSTFQTQSPPSFYRAGDPILTYFPKWSVISLLRQPAGVGAGGLCAESNPAGFLESKSTTCTRFFKNLASSCTLDSALNAASYYNFTVLKVPRSMTDPQNMEFQVPVILTSQANAPLLAGNTCQNVVSQVTYEIETNGTFGIQKVSVSLGQTNLTVEPGASLQQHFILRFRAFQQSTAASLTSPRSGNPGYIVGKPLLALTDDISYSVSFLELGGLLQPNEKSCKGFQTYVRLAKGEEFFVHYNEVLIY

SEQ ID NO: 13088 - protein, 607 aa, Homo sapiens
MRTPQLALLQVFFLVFPDGVRPQPSSSPSGAVPTSLELQRGTDGGTLQSPSEATATRPAVPGLPTVVPTLVTPSAPGNRTVDLFPVLPICVCDLTPGACDINCCCDRDCYLLHPRTVFSFCLPGSVRSSSWVCVDNSVIFRSNSPFPSRVFMDSNGIRQFCVHVNNSNLNYFQKLQKVNATNFQALAAEFGGESFTSTFQTQSPPSFYRAGDPILTYFPKWSVISLLRQPAGVGAGGLCAESNPAGFLESKSTTCTRFFKNLASSCTLDSALNAASYYNFTVLKVPRSMTDPQNMEFQVPVILTSQANAPLLAGNTCQNVVSQVTYEIETNGTFGIQKVSVSLGQTNLTVEPGASLQQHFILRFRAFQQSTAASLTSPRSGNPGYIVGKPLLALTDDISYSMTLLQSQGNGSCSVKRHEVQFGVNAISGCKLRLKKADCSHLQQEIYQTLHGRPRPEYVAIFGNADPAQKGGWTRILNRHCSISAINCTSCCLIPVSLEIQVLWAYVGLLSNPQAHVSGVRFLYQCQSIQDSQQVTEVSLTTLVNFVDITQKPQPPRGQPKMDWKWPFDFFPFKVAFSRGVFSQKCSVSPILILCLLLLGVLNLETM

SEQ ID NO: 13089 - protein, 607 aa, Homo sapiens; identical to SEQ ID NO: 13088

SEQ ID NO: 13090 - protein, 304 aa, Homo sapiens
MATWKSPCFLYCLFILGPRLTGQNNSVDLTNEETTDSTTSKISPSEDTQQENGSMFSLITWNIDGLDLNNLSERARGVCSYLALYSPDVIFLQEVIPPYYSYLKKRSSNYEIITGHEEGYFTAIMLKKSRVKLKSQEIIPFPSTKMMRNLLCVHVNVSGNELCLMTSHLESTRGHAAERMNQLKMVLKKMQEAPESATVIFAGDTNLRDREVTRCGGLPNNIVDVWEFLGKPKHCQYTWDTQMNSNLGITAACKLRFDRIFFRAAAEEGHIIPRSLDLLGLEKLDCGRFPSDHWGLLCNLDIIL

SEQ ID NO: 13091 - protein, 362 aa, Homo sapiens
MELGSCLEGGREAAEEEGEPEVKKRRLLCVEFASVASCDAAVAQCFLAENDWEMERALNSYFEPPVEESALERRPETISEPKTYVDLTNEETTDSTTSKISPSEDTQQENGSMFSLITWNIDGLDLNNLSERARGVCSYLALYSPDVIFLQEVIPPYYSYLKKRSSNYEIITGHEEGYFTAIMLKKSRVKLKSQEIIPFPSTKMMRNLLCVHVNVSGNELCLMTSHLESTRGHAAERMNQLKMVLKKMQEAPESATVIFAGDTNLRDREVTRCGGLPNNIVDVWEFLGKPKHCQYTWDTQMNSNLGITAACKLRFDRIFFRAAAEEGHIIPRSLDLLGLEKLDCGRFPSDHWGLLCNLDIIL

SEQ ID NO: 13092 - protein, 426 aa, Homo sapiens
MGRRRQRVDPAAGARAGALPEAIAALSRSLPSGPSPEIFRRAKFDRPEATSALWQLLFRVLSPLPAGNALASLALEVQARLVKSALCSQGYPRLALAQLPEDGSQGSRELLLALSWLLARGPVPEQMLAQARVPLGDEMTVCQCEALASPGPPAPHMEAEGPVDVRHVQWLMGKLRFRWRQLVSSQQEQCALLSKIHLYTRGCHSDQSLSHLSVTEAEMLRDPEGGQQLLRTLERENQRLEAVLAWRRSELVFWRWMDTVLGTCAPEVPAAASQPTFLPWVPERGGGELDLVVRELQALEEELREAAERRRAAWEAKAGGCGRGPEWSAARRASREAVEKELGALQQCWERDGGPAQPHGPHRLVRREDGAAGDRDLRAAVVIRTLRSQEACLEAVLRRLQGQCRQELARLVGARPGLIWIPPPGR

SEQ ID NO: 13093 - protein, 495 aa, Homo sapiens
MGRRRQRVDPAAGARAGALPEAIAALSRSLPSGPSPEIFRRAKFDRPEATSALWQLLFRVLSPLPAGNALASLALEVQARLVKSALCSQGYPRLALAQLPEDGSQGSRELLLALSWLLARGPVPEQMLAQARVPLGDEMTVCQCEALASPGPPAPHMEAEGPVDVRHVQWLMGKLRFRWRQLVSSQQEQCALLSKIHLYTRGCHSDQSLSHLSVTEAEMLRDPEGGQQVSGAGAAQNLDLAYPKCLHSFCTPGMGPRTFWNDLWLVCEQPGLLPGDWAAPLDPGGASACSLLSPFRALLRTLERENQRLEAVLAWRRSELVFWRWMDTVLGTCAPEVPAAASQPTFLPWVPERGGGELDLVVRELQALEEELREAAERRRAAWEAKAGGCGRGPEWSAARRASREAVEKELGALQQCWERDGGPAQPHGPHRLVRREDGAAGDRDLRAAVVIRTLRSQEACLEAVLRRLQGQCRQELARLVGARPGLIWIPPPGR

SEQ ID NO: 13094 - protein, 393 aa, Homo sapiens
MGRRRQRVDPAAGARAGALPEAIAALSRSLPSGPSPEIFRRAKFDRPEATSALWQLLFRVLSPLPAGNALASLALEVQARLVKSALCSQGYPRLALAQLPEDGSQGSRELLLALSWLLARGPVPEQMLAQARVPLGDEMTVCQCEALASPGPPAPHMEAEGPVDVRHVQWLMGKLRFRWRQLVSSQQEQCALLSKLLRTLERENQRLEAVLAWRRSELVFWRWMDTVLGTCAPEVPAAASQPTFLPWVPERGGGELDLVVRELQALEEELREAAERRRAAWEAKAGGCGRGPEWSAARRASREAVEKELGALQQCWERDGGPAQPHGPHRLVRREDGAAGDRDLRAAVVIRTLRSQEACLEAVLRRLQGQCRQELARLVGARPGLIWIPPPGR

SEQ ID NO: 13095 - protein, 119 aa, Homo sapiens
MGRRRQRVDPAAGARAGALPEAIAALSRSLPSGPSPEIFRRAKFDRPEATSALWQLLFRVLSPLPAGNALATRGWHWHNYLRMARRAVGSCCWLCPGSWPEDLCPSRCWPRPECLWVTR

SEQ ID NO: 13096 - protein, 54 aa, Homo sapiens
MLAQARVPLGDEMTVCQCEALASPGPPAPHMEAEGPVDVRHVQWLMGKLRFRWR

SEQ ID NO: 13097 - protein, 157 aa, Homo sapiens
MLAQARVPLGDEMTVCQCEALASPGPPAPHMEAEGPVDVRHVQWLMGKLRFRWRQLVSSQQEQCALLSKIHLYTRGCHSDQSLSHLSVTEAEMLRDPEGGQQLLRTLERENQRLEAVLAWRRSELVFWRWMDTVLGTCAPEVPAAASQPTFLPWVPE

SEQ ID NO: 13098 - protein, 248 aa, Homo sapiens
MLAQARVPLGDEMTVCQIHLYTRGCHSDQSLSHLSVTEAEMLRDPEGGQQLLRTLERENQRLEAVLAWRRSELVFWRWMDTVLGTCAPEVPAAASQPTFLPWVPERGGGELDLVVRELQALEEELREAAERRRAAWEAKAGGCGRGPEWSAARRASREAVEKELGALQQCWERDGGPAQPHGPHRLVRREDGAAGDRDLRAAVVIRTLRSQEACLEAVLRRLQGQCRQELARLVGARPGLIWIPPPGR

SEQ ID NO: 13099 - protein, 248 aa, Homo sapiens; identical to SEQ ID NO: 13098

SEQ ID NO: 13100 - protein, 80 aa, Homo sapiens
MSGQRGDWTSALWQLLFRVLSPLPAGNALASLALEVQARLVKSALCSQGYPRLALAQLPEDGSQGSRELLLALSWLLARG

SEQ ID NO: 13101 - protein, 110 aa, Homo sapiens
MSGQRGDWTSALWQLLFRVLSPLPAGNALASLALEVQARLVKSALCSQGYPRLALAQLPEDGSQGSRELLLALSWLLARGPVPEQMLAQARVPLGDEMTVCQCEALASPG

SEQ ID NO: 13102 - protein, 216 aa, Homo sapiens
MSGQRGDWTSALWQLLFRVLSPLPAGNALASLALEVQARLVKSALCSQGYPRLALAQLPEDGSQGSRELLLALSWLLARGPVPEQMLAQARVPLGDEMTVCQCEALASPGPPAPHMEAEGPVDVRHVQWLMGKLRFRWRQLVSSQQEQCALLSKIHLYTRGCHSDQSLSHLSVTEAEMLRDPEGGQQLLRTLERENQRLEAVLAWRRSELVFWRWM

SEQ ID NO: 13103 - protein, 303 aa, Homo sapiens [sequence omitted]

SEQ ID NO: 13104 - protein, 352 aa, Homo sapiens
MSGQRGDWTSALWQLLFRVLSPLPAGNALASLALEVQARLVKSALCSQGYPRLALAQLPEDGSQGSRELLLALSWLLARGPVPEQMLAQARVPLGDEMTVCQCEALASPGPPAPHMEAEGPVDVRHVQWLMGKLRFRWRQLVSSQQEQCALLSKLLRTLERENQRLEAVLAWRRSELVFWRWMDTVLGTCAPEVPAAASQPTFLPWVPERGGGELDLVVRELQALEEELREAAERRRAAWEAKAGGCGRGPEWSAARRASREAVEKELGALQQCWERDGGPAQPHGPHRLVRREDGAAGDRDLRAAVVIRTLRSQEACLEAVLRRLQGQCRQELARLVGARPGLIWIPPPGR

SEQ ID NO: 13105 - protein, 354 aa, Homo sapiens
MSGQRGDWVQTSALWQLLFRVLSPLPAGNALASLALEVQARLVKSALCSQGYPRLALAQLPEDGSQGSRELLLALSWLLARGPVPEQMLAQARVPLGDEMTVCQCEALASPGPPAPHMEAEGPVDVRHVQWLMGKLRFRWRQLVSSQQEQCALLSKLLRTLERENQRLEAVLAWRRSELVFWRWMDTVLGTCAPEVPAAASQPTFLPWVPERGGGELDLVVRELQALEEELREAAERRRAAWEAKAGGCGRGPEWSAARRASREAVEKELGALQQCWERDGGPAQPHGPHRLVRREDGAAGDRDLRAAVVIRTLRSQEACLEAVLRRLQGQCRQELARLVGARPGLIWIPPPGR

SEQ ID NO: 13106 - protein, 976 aa, Homo sapiens
MDSLASLVLCGVSLLLSASFLPATLTMTVDKGDNVNISFKKVLIKEEDAVIYKNGSFIHSVPRHEVPDILEVHLPHAQPQDAGVYSARYIGGNLFTSAFTRLIVRRCEAQKWGPECNHLCTACMNNGVCHEDTGECICPPGFMGRTCEKACELHTFGRTCKERCSGQEGCKSYVFCLPDPYGCSCATGWKGLQCNEGIQRMTPKIVDLPDHIEVNSGKFNPICKASGWPLPTNEEMTLVKPDGTVLHPKDFNHTDHFSVAIFTIHRILPPDSGVWVCSVNTVAGMVEKPFNISVKVLPKPLNAPNVIDTGHNFAVINISSEPYFGDGPIKSKKLLYKPVNHYEAWQHIQVTNEIVTLNYLEPRTEYELCVQLVRRGEGGEGHPGPVRRFTTASIGLPPPRGLNLLPKSQTTLNLTWQPIFPSSEDDFYVEVERRSVQKSDQQNIKVPGNLTSVLLNNLHPREQYVVRARVNTKAQGEWSEDLTAWTLSDILPPQPENIKISNITHSSAVISWTILDGYSISSITIRYKVQGKNEDQHVDVKIKNATITQYQLKGLEPETAYQVDIFAENNIGSSNPAFSHELVTLPESQAPADLGGGKMLLIAILGSAGMTCLTVLLAFLIILQLKRANVQRRMAQAFQNREEPAVQFNSGTLALNRKVKNNPDPTIYPVLDWNDIKFQDVIGEGNFGQVLKARIKKDGLRMDAAIKRMKEYASKDDHRDFAGELEVLCKLGHHPNIINLLGACEHRGYLYLAIEYAPHGNLLDFLRKSRVLETDPAFAIANSTASTLSSQQLLHFAADVARGMDYLSQKQFIHRDLAARNILVGENYVAKIADFGLSRGQEVYVKKTMGRLPVRWMAIESLNYSVYTTNSDVWSYGVLLWEIVSLGGTPYCGMTCAELYEKLPQGYRLEKPLNCDDEVYDLMRQCWREKPYERPSFAQILVSLNRMLEERKTYVNTTLYEKFTYAGIDCSAEEAA

SEQ ID NO: 13107 - protein, 1124 aa, Homo sapiens
MDSLASLVLCGVSLLLSGTVEGAMDLILINSLPLVSDAETSLTCIASGWRPHEPITIGRDFEALMNQHQDPLEVTQDVTREWAKKVVWKREKASKINGAYFCEGRVRGEAIRIRTMKMRQQASFLPATLTMTVDKGDNVNISFKKVLIKEEDAVIYKNGSFIHSVPRHEVPDILEVHLPHAQPQDAGVYSARYIGGNLFTSAFTRLIVRRCEAQKWGPECNHLCTACMNNGVCHEDTGECICPPGFMGRTCEKACELHTFGRTCKERCSGQEGCKSYVFCLPDPYGCSCATGWKGLQCNEACHPGFYGPDCKLRCSCNNGEMCDRFQGCLCSPGWQGLQCEREGIQRMTPKIVDLPDHIEVNSGKFNPICKASGWPLPTNEEMTLVKPDGTVLHPKDFNHTDHFSVAIFTIHRILPPDSGVWVCSVNTVAGMVEKPFNISVKVLPKPLNAPNVIDTGHNFAVINISSEPYFGDGPIKSKKLLYKPVNHYEAWQHIQVTNEIVTLNYLEPRTEYELCVQLVRRGEGGEGHPGPVRRFTTASIGLPPPRGLNLLPKSQTTLNLTWQPIFPSSEDDFYVEVERRSVQKSDQQNIKVPGNLTSVLLNNLHPREQYVVRARVNTKAQGEWSEDLTAWTLSDILPPQPENIKISNITHSSAVISWTILDGYSISSITIRYKVQGKNEDQHVDVKIKNATITQYQLKGLEPETAYQVDIFAENNIGSSNPAFSHELVTLPESQAPADLGGGKMLLIAILGSAGMTCLTVLLAFLIILQLKRANVQRRMAQAFQNVREEPAVQFNSGTLALNRKVKNNPDPTIYPVLDWNDIKFQDVIGEGNFGQVLKARIKKDGLRMDAAIKRMKEYASKDDHRDFAGELEVLCKLGHHPNIINLLGACEHRGYLYLAIEYAPHGNLLDFLRKSRVLETDPAFAIANSTASTLSSQQLLHFAADVARGMDYLSQKQFIHRDLAARNILVGENYVAKIADFGLSRGQEVYVKKTMGRLPVRWMAIESLNYSVYTTNSDVWSYGVLLWEIVSLGGTPYCGMTCAELYEKLPQGYRLEKPLNCDDEVYDLMRQCWREKPYERPSFAQILVSLNRMLEERKTYVNTTLYEKFTYAGIDCSAEEAA

SEQ ID NO: 13108 - protein, 1081 aa, Homo sapiens
MDSLASLVLCGVSLLLSGTVEGAMDLILINSLPLVSDAETSLTCIASGWRPHEPITIGRDFEALMNQHQDPLEVTQDVTREWAKKVVWKREKASKINGAYFCEGRVRGEAIRIRTMKMRQQASFLPATLTMTVDKGDNVNISFKKVLIKEEDAVIYKNGSFIHSVPRHEVPDILEVHLPHAQPQDAGVYSARYIGGNLFTSAFTRLIVRRCEAQKWGPECNHLCTACMNNGVCHEDTGECICPPGFMGRTCEKACELHTFGRTCKERCSGQEGCKSYVFCLPDPYGCSCATGWKGLQCNEGIQRMTPKIVDLPDHIEVNSGKFNPICKASGWPLPTNEEMTLVKPDGTVLHPKDFNHTDHFSVAIFTIHRILPPDSGVWVCSVNTVAGMVEKPFNISVKVLPKPLNAPNVIDTGHNFAVINISSEPYFGDGPIKSKKLLYKPVNHYEAWQHIQVTNEIVTLNYLEPRTEYELCVQLVRRGEGGEGHPGPVRRFTTASIGLPPPRGLNLLPKSQTTLNLTWQPIFPSSEDDFYVEVERRSVQKSDQQNIKVPGNLTSVLLNNLHPREQYVVRARVNTKAQGEWSEDLTAWTLSDILPPQPENIKISNITHSSAVISWTILDGYSISSITIRYKVQGKNEDQHVDVKIKNATITQYQLKGLEPETAYQVDIFAENNIGSSNPAFSHELVTLPESQAPADLGGGKMLLIAILGSAGMTCLTVLLAFLIILQLKRANVQRRMAQAFQNVREEPAVQFNSGTLALNRKVKNNPDPTIYPVLDWNDIKFQDVIGEGNFGQVLKARIKKDGLRMDAAIKRMKEYASKDDHRDFAGELEVLCKLGHHPNIINLLGACEHRGYLYLAIEYAPHGNLLDFLRKSRVLETDPAFAIANSTASTLSSQQLLHFAADVARGMDYLSQKQFIHRDLAARNILVGENYVAKIADFGLSRGQEVYVKKTMGRLPVRWMAIESLNYSVYTTNSDVWSYGVLLWEIVSLGGTPYCGMTCAELYEKLPQGYRLEKPLNCDDEVYDLMRQCWREKPYERPSFAQILVSLNRMLEERKTYVNTTLYEKFTYAGIDCSAEEAA

SEQ ID NO: 13109 - protein, 468 aa, Homo sapiens
MDSLASLVLCGVSLLLSGTVEGAMDLILINSLPLVSDAETSLTCIASGWRPHEPITIGRDFEALMNQHQDPLEVTQDVTREWAKKVVWKREKASKINGAYFCEGRVRGEAIRIRTMKMRQQASFLPATLTMTVDKGDNVNISFKKVLIKEEDAVIYKNGSFIHSVPRHEVPDILEVHLPHAQPQDAGVYSARYIGGNLFTSAFTRLIVRRCEAQKWGPECNHLCTACMNNGVCHEDTGECICPPGFMGRTCEKACELHTFGRTCKERCSGQEGCKSYVFCLPDPYGCSCATGWKGLQCNEGIQRMTPKIVDLPDHIEVNSGKFNPICKASGWPLPTNEEMTLVKPDGTVLHPKDFNHTDHFSVAIFTIHRILPPDSGVWVCSVNTVAGMVEKPFNISVKVLPKPLNAPNVIDTGHNFAVINISSEPYFGDGPIKSKKLLYKPVNHYEAWQHIQVSMEKQRLTKANSDK

SEQ ID NO: 13110 - protein, 468 aa, Homo sapiens
MDSLASLVLCGVSLLLSVPRHEVPDILEVHLPHAQPQDAGVYSARYIGGNLFTSAFTRLIVRRCEAQKWGPECNHLCTACMNNGVCHEDTGECICPPGFMGRTCEKACELHTFGRTCKERCSGQEGCKSYVFCLPDPYGCSCATGWKGLQCNEGIQRMTPKIVDLPDHIEVNSGKFNPICKASGWPLPTNEEMTLVKPDGTVLHPKDFNHTDHFSVAIFTIHRILPPDSGVWVCSVNTVAGMVEKPFNISVKVLPKPLNAPNVIDTGHNFAVINISSEPYFGDGPIKSKKLLYKPVNHYEAWQHIQVTNEIVTLNYLEPRTEYELCVQLVRRGEGGEGHPGPVRRFTTASIGLPPPRGLNLLPKSQTTLNLTWQPIFPSSEDDFYVEVERRSVQKSDQQNIKVPGNLTSVLLNNLHPREQYVVRARVNTKAQGEWSEDLTAWTLSDILPPQPENIKISNITHSSAVIS

SEQ ID NO: 13111 - protein, 298 aa, Homo sapiens
MGIVCAQCSFILLLSIIRARPPPFLFCPLSSQRTESPYKPVHLGLGPTDKVAAIAMARIIDLVPWDDGSTHVYASPAILLPMERQRNQLAGVKQQLYHPALPTLRHMDRDTVKACLPDEHCQSTTYCRKDEFDNAHFTLLGVPNKPLQCLDITATGQKLRNRYHEGKLAPIAPGINRVDWPCFTRAIEDWSHFVSSAGEFKLPCLRKRAEGLSGYAVRYLKPDVTQTWRQEALCGAWAGRPCSPDSPRPYPCCPPQYCLSQNPSLDRYGQKPLPFDSLNTFRSFGSSYSRVNYLTPWH

SEQ ID NO: 13112 - protein, 271 aa, Homo sapiens
MGIVCAQCSFILLLSIIRARPPPFLFCPLSSQRTESPYKPVHLGLGPTDKVAAIAMARIIDLVPWDDGSTHVYASPAILLPMERQRNQLAGVKQQLYHPALPTLRHMDRDTVKACLPDEHCQSTTYCRKDEFDNAHFTLLGVPNKPLQCLDITATGQKLRNRYHEGKLAPIAPGINRVDWPCFTRAIEDWSHFVSSAGEFKLPCLRKRAEGLSGYAVRYLKPDVTQTWRYCLSQNPSLDRYGQKPLPFDSLNTFRSFGSSYSRVNYLTPWH

SEQ ID NO: 13113 - protein, 267 aa, Homo sapiens
MGARQIQTSSSQTSPEEAMGTPRIQHLLILLVLGASLLTSGLELYCQKGLSMTVEADPANMFNWTTEEVETCDKGALCQETILIIKAGTETAILATKGCIPEGEEAITIVQHSSPPGLIVTSYSNYCEDSFCNDKDSLSQFWEFSETTASTVSTTLHCPTCVALGTCFSAPSLPCPNGTTRCYQGKLEITGGGIESSVEVKGCTAMIGCRLMSGILAVGPMFVREACPHQLLTQPRKTENGATCLPIPVWGLQLLLPLLLPSFIHFS

SEQ ID NO: 13114 - protein, 249 aa, Homo sapiens
MGTPRIQHLLILLVLGASLLTSGLELYCQKGLSMTVEADPANMFNWTTEEVETCDKGALCQETILIIKAGTETAILATKGCIPEGEEAITIVQHSSPPGLIVTSYSNYCEDSFCNDKDSLSQFWEFSETTASTVSTTLHCPTCVALGTCFSAPSLPCPNGTTRCYQGKLEITGGGIESSVEVKGCTAMIGCRLMSGILAVGPMFVREACPHQLLTQPRKTENGATCLPIPVWGLQLLLPLLLPSFIHFS

SEQ ID NO: 13115 - protein, 239 aa, Homo sapiens
MSDLLLLGLIGGLTLLLLLTLLAFAGYSGLLAGVEVSAGSPPIRNVTVAYKFHMGLYGETGRLFTESCSISPKLRSIAVYYDNPHMERKLCAYPRLEIYQEDQIHFMCPLARQGDFYVPEMKETEWKWRGLVEAIDTQVDGTGADTMSDTSSVSLEVSPGSRETSAATLSPGASSRGWDDGDTRSEHSYSESGASGSSFEELDLEGEGPLGESRLDPGTEPLGTTKWLWEPTAPEKGKE

SEQ ID NO: 13116 - protein, 104 aa, Homo sapiens
MSDLLLLGLIGGLTLLLLLTLLAFAGYSGLLAGVEVSAGSPPIRNVTVAYKFHMGLYGETGRLFTESCSISPKLRSIAVYYDNPHMVPPDKCRCAVGSILSEGE

SEQ ID NO: 13117 - protein, 140 aa, Homo sapiens
MSDLLLLGLIGGLTLLLLLTLLAFAGYSGLLAGVEVSAGSPPIRNVTVAYKFHMGLYGETGRLFTESCSISPKLRSIAVYYDNPHMVPPDKCRCAVGSILSEGEESPSPELIDLYQKFGFKVFSFPAPSHVVTATFPYTT

SEQ ID NO: 13118 - protein, 151 aa, Homo sapiens
MSDLLLLGLIGGLTLLLLLTLLAFAGYSGLLAGVEVSAGSPPIRNVTVAYKFHMGLYGETGRLFTESCSISPKLRSIAVYYDNPHMVPPDKCRCAVGSILSEGEESPSPELIDLYQKFGFKVFSFPAPSHVVTATFPYTTILSIWLATRRV

SEQ ID NO: 13119 - protein, 216 aa, Homo sapiens
MSDLLLLGLIGGLTLLLLLTLLAFAGYSGLLAGVEVSAGSPPIRNVTVAYKFHMGLYGETGRLFTESCSISPKLRSIAVYYDNPHMVPPDKCRCAVGSILSEGEESPSPELIDLYQKFGFKVFSFPAPSHVVTATFPYTTILSIWLATRRVHPALDTYIKERKLCAYPRLEIYQEDQIHFMCPLARQGDFYVPEMKETEWKWRGLVEAIDTQVDGT

SEQ ID NO: 13120 - protein, 217 aa, Homo sapiens
MSDLLLLGLIGGLTLLLLLTLLAFAGYSGLLAGVEVSAGSPPIRNVTVAYKFHMGLYGETGRLFTESCSISPKLRSIAVYYDNPHMVPPDKCRCAVGSILSEGEESPSPELIDLYQKFGFKVFSFPAPSHVVTATFPYTTILSIWLATRRVHPALDTYIKERKLCAYPRLEIYQEDQIHFMCPLARQGDFYVPEMKETEWKWRGLVEAIDTQVDGTG

SEQ ID NO: 13121 - protein, 313 aa, Homo sapiens
MSDLLLLGLIGGLTLLLLLTLLAFAGYSGLLAGVEVSAGSPPIRNVTVAYKFHMGLYGETGRLFTESCSISPKLRSIAVYYDNPHMVPPDKCRCAVGSILSEGEESPSPELIDLYQKFGFKVFSFPAPSHVVTATFPYTTILSIWLATRRVHPALDTYIKERKLCAYPRLEIYQEDQIHFMCPLARQGDFYVPEMKETEWKWRGLVEAIDTQVDGTGADTMSDTSSVSLEVSPGSRETSAATLSPGASSRGWDDGDTRSEHSYSESGASGSSFEELDLEGEGPLGESRLDPGTEPLGTTKWLWEPTAPEKGKE

SEQ ID NO: 13122 - protein, 313 aa, Homo sapiens; identical to SEQ ID NO: 13121

SEQ ID NO: 13123 - protein, 313 aa, Homo sapiens; identical to SEQ ID NO: 13121

SEQ ID NO: 13124 - protein, 313 aa, Homo sapiens; identical to SEQ ID NO: 13121

SEQ ID NO: 13125 - protein, 313 aa, Homo sapiens; identical to SEQ ID NO: 13121

SEQ ID NO: 13126 - protein, 313 aa, Homo sapiens; identical to SEQ ID NO: 13121

SEQ ID NO: 13127 - protein, 121 aa, Homo sapiens
MSLHGILASAGTIGAVAAWLMSYKPALFGFLFLLLLLSNWLVKYEHKLTLPEPQQDEILQRLLFSEMKMKVLENQMFIIWNKMNHHGRSSRHRNFPMKKHRMRRHESICPTLSDCTSSSPS

SEQ ID NO: 13128 - protein, 121 aa, Homo sapiens
RSLHGILASAGTIGAVAAWLMSYKPALFGFLFLLLLLSNWLVKYEHKLTLPEPQQDEILQRLLFSEMKMKVLENQMFIIWNKMNHHGRSSRHRNFPMKKHRMRRHESICPTLSDCTSSSPS

SEQ ID NO: 13129 - protein, 147 aa, Homo sapiens
  VARIANT 1: note = misc_feature - Xaa can be any naturally occurring amino acid
XSAGTIGAVAAWLMSYKPALFGFLFLLLLLSNWLVKYEHKLTLPEPQQEEEKPKTSENDSKNSKAVNTKEVNRTHACFALQDEILQRLLFSEMKMKVLENQMFIIWNKMNHHGRSSRHRNFPMKKHRMRRHESICPTLSDCTSSSPS

SEQ ID NO: 13130 - protein, 76 aa, Homo sapiens
MKSVIPSDGPSVACVKKASYLDCIRAIAANEADAVTLDAGLVYDAYLAPNNLKPVVAEFYGSKEDPQTFYYAVAVV

SEQ ID NO: 13131 - protein, 134 aa, Homo sapiens
MNQLRGKKSCHTGLGRSAGWNIPIGLLYCDLPEPRKPLEKAVANFFSGSCAPCADGTDFPQLCQLCPGCGCSTLNQYFGYSGAFKCLKDGAGDVAFVKHSTIFENLANKADRDQYELLCLDNTRKPVDEYKDCH

SEQ ID NO: 13132 - protein, 102 aa, Homo sapiens
MRLAVGALLVCAVLGLCLAVPDKTVRWCAVSEHEATKCQSFRDHMKSVIPSDGPFSYRRGPKYGRQGGLDLGASQPGPGTFWQRQIKRIPTIQLSSWEGPAV

SEQ ID NO: 13133 - protein, 120 aa, Homo sapiens
MRLAVGALLVCAVLGLCLAVPDKTVRWCAVSEHEATKCQSFRDHMKSVIPSDGPSVACVKKASYLDCIRAIAANEADAVTLDAGLVYDAYLAPNNLKPVVAEFYGSKEDFLLCCCCGEEG

SEQ ID NO: 13134 - protein, 698 aa, Homo sapiens
MRLAVGALLVCAVLGLCLAVPDKTVRWCAVSEHEATKCQSFRDHMKSVIPSDGPSVACVKKASYLDCIRAIAANEADAVTLDAGLVYDAYLAPNNLKPVVAEFYGSKEDPQTFYYAVAVVKKDSGFQMNQLRGKKSCHTGLGRSAGWNIPIGLLYCDLPEPRKPLEKAVANFFSGSCAPCADGTDFPQLCQLCPGCGCSTLNQYFGYSGAFKCLKDGAGDVAFVKHSTIFENLANKADRDQYELLCLDNTRKPVDEYKDCHLAQVPSHTVVARSMGGKEDLIWELLNQAQEHFGKDKSKEFQLFSSPHGKDLLFKDSAHGFLKVPPRMDAKMYLGYEYVTAIRNLREGTCPEAPTDECKPVKWCALSHHERLKCDEWSVNSVGKIECVSAETTEDCIAKIMNGEADAMSLDGGFVYIAGKCGLVPVLAENYNKSDNCEDTPEAGYFAIAVVKKSASDLTWDNLKGKKSCHTAVGRTAGWNIPMGLLYNKINHCRFDEFFSEGCAPGSKKDSSLCKLCMGSGLNLCEPNNKEGYYGYTGAFRCLVEKGDVAFVKHQTVPQNTGGKNPDPWAKNLNEKDYELLCLDGTRKPVEEYANCHLARAPNHAVVTRKDKEACVHKILRQQQHLFGSNVTDCSGNFCLFRSETKDLLFRDDTVCLAKLHDRNTYEKYLGEEYVKAVGNLRKCSTSSLLEACTFRRP

SEQ ID NO: 13135 - protein, 115 aa, Homo sapiens
MRLAVGALLVCAVLGLCLAVPDKTVRWCAVSEHEATKCQSFRDHMKSVIPSDGPSVACVKKASYLDCIRAIAVSRCCLKESGRKPYFLCFQSLWNNSLLTGKRSGCCDTGCRFGV

SEQ ID NO: 13136 - protein, 143 aa, Homo sapiens
  VARIANT 1: note = misc_feature - Xaa can be any naturally occurring amino acid
XYFAIAVVKKSASDLTWDNLKGKKSCHTAVGRTAGWNIPMGLLYNKINHCRFDEFFSEGCAPGSKKDSSLCKLCMGSGLNLCEPNNKEGYYGYTGAFRCLVEKGDVAFVKHQTVPQNTGETIQKRRGKGAEMGYRPVSHRKKP

SEQ ID NO: 13137 - protein, 214 aa, Homo sapiens
MAFLRSMWGVLSALGRSGAELCTGCGSRLRSPFSFVYLPRWFSSVLASCPKKPVSSYLRFSKEQLPIFKAQNPDAKTTELIRRIAQRWRELPDSKKKIYQDAYRAEWQVYKEEISRFKEQLTPSQIMSLEKEIMDKHLKRKAMTKKKEKLKTVKENWKNLSDSEKELYIQHAKEDETRYHNEMKSWEEQMIEVGRKDLLRRTIKKQRKYGAEEC

SEQ ID NO: 13138 - protein, 246 aa, Homo sapiens
MAFLRSMWGVLSALGRSGAELCTGCGSRLRSPFSFVYLPRWFSSVLASCPKKPVSSYLRFSKEQLPIFKAQNPDAKTTELIRRIAQRWRELPDSKKKIYQDAYRAEWQVYKEEISRFKEQLTPSQIMSLEKEIMDKHLKRKAMTKKKELTLLGKPKRPRSAYNVYVAERFQEAKGDSPQEKLKTVKENWKNLSDSEKELYIQHAKEDETRYHNEMKSWEEQMIEVGRKDLLRRTIKKQRKYGAEEC

SEQ ID NO: 13139 - protein, 219 aa, Homo sapiens
  VARIANT 1: note = misc_feature - Xaa can be any naturally occurring amino acid
XELCTGCGSRLRSPFSFVYLPRWFSSVLASCPKKPVSSYLRFSKEQLPIFKAQNPDAKTTELIRRIAQRWRELPDSKKKIYQDAYRAEWQVYKEEISRFKEQLTPSQIMSLEKEIMDKHLKRKAMTKKKELTLLGKPKRPRSAYNVYVAERFQEAKGDSPQEKLKTVKENWKNLSDSEKEVSITVVSLKCLLRISVRECIRARLDSCEDNLVLLIIQVF

SEQ ID NO: 13140 - protein, 84 aa, Homo sapiens
MATMENKVICALVLVSMLALGTLAEAQTETCTVAPRERQNCGFPGVTPSQCANKGCCFDDTVRGVPWCFYPNTIDVPPEEECEF

SEQ ID NO: 13141 - protein, 129 aa, Homo sapiens
MGRRDAQLLAALLVLGLCALAGSEKPSPCQCSRLSPHNRTNCGFPGITSDQCFDNGCCFDSSVTGVPWCFHPLPKQESDQCVMEVSDRRNCGYPGISPEECASRKCCFSNFIFEVPWCFFPKSVEDCHY

SEQ ID NO: 13142 - protein, 94 aa, Homo sapiens
MKRVLSCVPEPTVVMAARALCMLGLVLALLSSSSAEEYVGLSANQCAVPAKDRVDCGYPHVTPKECNNRGCCFDSRIPGVPWCFKPLQEAECTF

SEQ ID NO: 13143 - protein, 74 aa, Homo sapiens [sequence omitted]

SEQ ID NO: 13144 - protein, 125 aa, Homo sapiens
  VARIANT 1: note = misc_feature - Xaa can be any naturally occurring amino acid
XALLSSSSAEEYVGLSQQGLWQLTGLCLGQLQTSVPCQPRTGWTAATPMSPPRSATTGAAALTPGSLECLGVSSPCRKQNAPSEAPPAAPGRGMRGSEHPCPAVIAARHCSSQLFCPFAPGKRFC

SEQ ID NO: 13145 - protein, 61 aa, Homo sapiens
MIYTMKKVHALWASVCLLLNLAPAPLNADSEEDEEHTIITDTELPPLKLMHSFCAFKADDG

SEQ ID NO: 13146 - protein, 76 aa, Homo sapiens
MIYTMKKVHALWASVCLLLNLAPAPLNADSEEDEEHTIITDTELPPLKLMHSFCAFKADDGPCKAIMKRFFFNIFT

SEQ ID NO: 13147 - protein, 105 aa, Homo sapiens
MIYTMKKVHALWASVCLLLNLAPAPLNADSEEDEEHTIITDTELPPLKLMHSFCAFKADDGPCKAIMKRFFFNIFTRQCEEFIYGGCEGNQNRFESLEECKKMCT

SEQ ID NO: 13148 - protein, 106 aa, Homo sapiens
MIYTMKKVHALWASVCLLLNLAPAPLNADSEEDEEHTIITDTELPPLKLMHSFCAFKADDGPCKAIMKRFFFNIFTRQCEEFIYGGCEGNQNRFESLEECKKMCTR

SEQ ID NO: 13149 - protein, 106 aa, Homo sapiens; identical to SEQ ID NO: 13148

SEQ ID NO: 13150 - protein, 304 aa, Homo sapiens
MIYTMKKVHALWASVCLLLNLAPAPLNADSEEDEEHTIITDTELPPLKLMHSFCAFKADDGPCKAIMKRFFFNIFTRQCEEFIYGGCEGNQNRFESLEECKKMCTRDNANRIIKTTLQQEKPDFCFLEEDPGICRGYITRYFYNNQTKQCERFKYGGCLGNMNNFETLEECKNICEDGPNGFQVDNYGTQLNAVNNSLTPQSTKVPSLFEFHGPSWCLTPADRGLCRANENRFYYNSVIGKCRPFKYSGCGGNENNFTSKQECLRACKKGFIQRISKGGLIKTKRKRKKQRVKIAYEEIFVKNM

SEQ ID NO: 13151 - protein, 304 aa, Homo sapiens; identical to SEQ ID NO: 13150

SEQ ID NO: 13152 - protein, 251 aa, Homo sapiens
MIYTMKKVHALWASVCLLLNLAPAPLNADSEEDEEHTIITDTELPPLKLMHSFCAFKADDGPCKAIMKRFFFNIFTRQCEEFIYGGCEGNQNRFESLEECKKMCTRDNANRIIKTTLQQEKPDFCFLEEDPGICRGYITRYFYNNQTKQCERFKYGGCLGNMNNFETLEECKNICEDGPNGFQVDNYGTQLNAVNNSLTPQSTKVPSLFVTKEGTNDGWKNAAHIYQVFLNAFCIHASMFFLGLDSISCLC

SEQ ID NO: 13153 - protein, 251 aa, Homo sapiens; identical to SEQ ID NO: 13152

SEQ ID NO: 13154 - protein, 215 aa, Homo sapiens
MIYTMKKVHALWASVCLLLNLAPAPLNADSEEDEEHTIITDTELPPLKLMHSFCAFKADDGPCKAIMKRFFFNIFTRQCEEFIYGGCEGNQNRFESLEECKKMCTREKPDFCFLEEDPGICRGYITRYFYNNQTKQCERFKYGGCLGNMNNFETLEECKNICEDGPNGFQVDNYGTQLNAVNNSLTPQSTKVPSLFEFHGPSWCLTPADRGLCRA

SEQ ID NO: 13155 - protein, 107 aa, Homo sapiens
EACDDACWRIEKVPKVCRLQVSVDDQCEGSTEKYFFNLSSMTCEKFFSGGCHRNRIENRFPDEATCMGFCAPKKNTEPVMLSPILAVEGMTITLLAGRIANVHVQKL

SEQ ID NO: 13156 - protein, 235 aa, Homo sapiens
MDPARPLGLSILLLFLTEAALGDAAQEPTGNNAEICLLPLDYGPCRALLLRYYYDRYTQSCRQFLYGGCEGNANNFYTWEACDDACWRIEKVPKVCRLQVSVDDQCEGSTEKYFFNLSSMTCEKFFSGGCHRNRIENRFPDEATCMGFCAPKKIPSFCYSPKDEGLCSANVTRYYFNPRYRTCDAFTYTGCGGNDNNFVSREDCKRACAKALKKKKKMPKLRFASRIRKIRKKQF

SEQ ID NO: 13157 - protein, 59 aa, Homo sapiens
MALVLEIFTLLASICWVSANIFEYQVDAQPLRPCELQRETAFLKQADYVPQCAEDGSFQ

SEQ ID NO: 13158 - protein, 2768 aa, Homo sapiens
MALVLEIFTLLASICWVSANIFEYQVDAQPLRPCELQRETAFLKQADYVPQCAEDGSFQTVQCQNDGRSCWCVGANGSEVLGSRQPGRPVACLSFCQLQKQQILLSGYINSTDTSYLPQCQDSGDYAPVQCDVQQVQCWCVDAEGMEVYGTRQLGRPKRCPRSCEIRNRRLLHGVGDKSPPQCSAEGEFMPVQCKFVNTTDMMIFDLVHSYNRFPDAFVTFSSFQRRFPEVSGYCHCADSQGRELAETGLELLLDEIYDTIFAGLDLPSTFTETTLYRILQRRFLAVQSVISGRFRCPTKCEVERFTATSFGHPYVPSCRRNGDYQAVQCQTEGPCWCVDAQGKEMHGTRQQGEPPSCAEGQSCASERQQALSRLYFGTSGYFSQHDLFSSPEKRWASPRVARFATSCPPTIKELFVDSGLLRPMVEGQSQQFSVSENLLKEAIRAIFPSRGLARLALQFTTNPKRLQQNLFGGKFLVNVGQFNLSGALGTRGTFNFSQFFQQLGLASFLNGGRQEDLAKPLSVGLDSNSSTGTPEAAKKDGTMNKPTVGSFGFEINLQENQNALKFLASLLELPEFLLFLQHAISVPEDVARDLGDVMETVLSSQTCEQTPERLFVPSCTTEGSYEDVQCFSGECWCVNSWGKELPGSRVRGGQPRCPTDCEKQRARMQSLMGSQPAGSTLFVPACTSEGHFLPVQCFNSECYCVDAEGQAIPGTRSAIGKPKKCPTPCQLQSEQAFLRTVQALLSNSSMLPTLSDTYIPQCSTDGQWRQVQCNGPPEQVFELYQRWEAQNKGQDLTPAKLLVKIMSYREAASGNFSLFIQSLYEAGQQDVFPVLSQYPSLQDVPLAALEGKRPQPRENILLEPYLFWQILNGQLSQYPGSYSDFSTPLAHFDLRNCWCVDEAGQELEGMRSEPSKLPTCPGSCEEAKLRVLQFIRETEEIVSASNSSRFPLGESFLVAKGIRLRNEDLGLPPLFPPREAFAEQFLRGSDYAIRLAAQSTLSFYQRRRFSPDDSAGASALLRSGPYMPQCDAFGSWEPVQCHAGTGHCWCVDEKGGFIPGSLTARSLQIPQCPTTCEKSRTSGLLSSWKQARSQENPSPKDLFVPACLETGEYARLQASGAGTWCVDPASGEELRPGSSSSAQCPSLCNVLKSGVLSRRVSPGYVPACRAEDGGFSPVQCDQAQGSCWCVMDSGEEVPGTRVTGGQPACESPRCPLPFNASEVVGGTILCETISGPTGSAMQQCQLLCRQGSWSVFPPGPLICSLESGRWESQLPQPRACQRPQLWQTIQTQGHFQLQLPPGKMCSADYADLLQTFQVFILDELTARGFCQIQVKTFGTLVSIPVCNNSSVQVGCLTRERLGVNVTWKSRLEDIPVASLPDLHDIERALVGKDLLGRFTDLIQSGSFQLHLDSKTFPAETIRFLQGDHFGTSPRTWFGCSEGFYQVLTSEASQDGLGCVKCPEGSYSQDEECIPCPVGFYQEQAGSLACVPCPVGRTTISAGAFSQTHCVTDCQRNEAGLQCDQNGQYRASQKDRGSGKAFCVDGEGRRLPWWETEAPLEDSQCLMMQKFEKVPESKVIFDANAPVAVRSKVPDSEFPVMQCLTDCTEDEACSFFTVSTTEPEISCDFYAWTSDNVACMTSDQKRDALGNSKATSFGSLRCQVKVRSHGQDSPAVYLKKGQGSTTTLQKRFEPTGFQNMLSGLYNPIVFSASGANLTDAHLFCLLACDRDLCCDGFVLTQVQGGAIICGLLSSPSVLLCNVKDWMDPSEAWANATCPGVTYDQESHQVILRLGDQEFIKSLTPLEGTQDTFTNFQQVYLWKDSDMGSRPESMGCRKDTVPRPASPTEAGLTTELFSPVDLNQVIVNGNQSLSSQKHWLFKHLFSAQQANLWCLSRCVQEHSFCQLAEITESASLYFTCTLYPEAQVCDDIMESNAQGCRLILPQMPKALFRKKVILEDKVKNFYTRLPFQKLMGISIRNKVPMSEKSISNGFFECERRCDADPCCTGFGFLNVSQLKGGEVTCLTLNSLGIQMCSEENGGAWRILDCGSPDIEVHTYPFGWYQKPIAQNNAPSFCPLVVLPSLTEKVSLDSWQSLALSSVVVDPSIRHFDVAHVSTAATSNFSAVRDLCLSECSQHEACLITTLQTQPGAVRCMFYADTQSCTHSLQGQNCRLLLREEATHIYRKPGISLLSYEASVPSVPISTHGRLLGRSQAIQVGTSWKQVDQFLGVPYAAPPLAERRFQAPEPLNWTGSWDASKPRASCWQPGTRTSTSPGVSEDCLYLNVFIPQNVAPNASVLVFFHNTMDREESEGWPAIDGSFLAAVGNLIVVTASYRVGVFGFLSSGSGEVSGNWGLLDQVAALTWVQTHIRGFGGDPRRVSLAADRGGADVASIHLLTARATNSQLFRRAVLMGGSALSPAAVISHERAQQQAIALAKEVSCPMSSSQEVVSCLRQKPANVLNDAQTKLLAVSGPFHYWGPVIDGHFLREPPARALKRSLWVEVDLLIGSSQDDGLINRAKAVKQFEESRGRTSSKTAFYQALQNSLGGEDSDARVEAAATWYYSLEHSTDDYASFSRALENATRDYFIICPIIDMASAWAKRARGNVFMYHAPENYGHGSLELLADVQFALGLPFYPAYEGQFSLEEKSLSLKIMQYFSHFIRSGNPNYPYEFSRKVPTFATPWPDFVPRAGGENYKEFSELLPNRQGLKKADCSFWSKYISSLKTSADGAKGGQSAESEEEELTAGSGLREDLLSLQEPGSKTYSK

SEQ ID NO: 13159 - protein, 901 aa, Homo sapiens
MLPGLTTELFSPVDLNQVIVNGNQSLSSQKHWLFKHLFSAQQANLWCLSRCVQEHSFCQLAEITESASLYFTCTLYPEAQVCDDIMESNAQGCRLILPQMPKALFRKKVILEDKVKNFYTRLPFQKLMGISIRNKVPMSEKSISNGFFECERRCDADPCCTGFGFLNVSQLKGGEVTCLTLNSLGIQMCSEENGGAWRILDCGSPDIEVHTYPFGWYQKPMSLDSWQSLALSSVVVDPSIRHFDVAHVSTAATSNFSAVRDLCLSECSQHEACLITTLQTQPGAVRCMFYADTQSCTHSLQGQNCRLLLREEATHIYRKPGISLLSYEASVPSVPISTHGRLLGRSQAIQVGTSWKQVDQFLGVPYAAPPLAERRFQAPEPLNWTGSWDASKPRASCWQPGTRTSTSPGVSEDCLYLNVFIPQNVAPNASVLVFFHNTMDREESEGWPAIDGSFLAAVGNLIVVTASYRVGVFGFLSSGSGEVSGNWGLLDQVAALTWVQTHIRGFGGDPRRVSLAADRGGADVASIHLLTARATNSQLFRRAVLMGGSALSPAAVISHERAQQQAIALAKEVSCPMSSSQEVVSCLRQKPANVLNDAQTKLLAVSGPFHYWGPVIDGHFLREPPARALKRSLWVEVDLLIGSSQDDGLINRAKAVKQFEESRGRTSSKTAFYQALQNSLGGEDSDARVEAAATWYYSLEHSTDDYASFSRALENATRDYFIICPIIDMASAWAKRARGNVFMYHAPENYGHGSLELLADVQFALGLPFYPAYEGQFSLEEKSLSLKIMQYFSHFIRSGNPNYPYEFSRKVPTFATPWPDFVPRAGGENYKEFSELLPNRQGLKKADCSFWSKYISSLKTSADGAKGGQSAESEEEELTAGSGLREDLLSLQEPGSKTYSK

SEQ ID NO: 13160 - protein, 172 aa, Homo sapiens
SDARVEAAATWYYSLEHSTDDYASFSRALENATRDYFIICPIIDMASAWAKRARGNVFMYHAPENYGHGRNPNYPYEFSRKVPTFATPWPDFVPRAGGENYKEFSELLPNRQGLKKADCSFWSKYISSLKTSADGAKGGQSAESEEEELTAGSGLREDLLSLQEPGSKTYSK

SEQ ID NO: 13161 - protein, 74 aa, Homo sapiens
  VARIANT 1: note = misc_feature - Xaa can be any naturally occurring amino acid
XGIQMCSEENGGAWRILDCGSPDIEVHTYPFGWYQKPIAQNNAPSFCPLVVLPSLTEKVFKVREVRGTQLKRME

SEQ ID NO: 13162 - protein, 226 aa, Homo sapiens
  VARIANT 1: note = misc_feature - Xaa can be any naturally occurring amino acid
XGSWEPVQCHAGTGHCWCVDEKGGFIPGSLTARSLQIPQCPTTCEKSRTSGLLSSWKQARSQENPSPKDLFVPACLETGEYARLQASGAGTWCVDPASGEELRPGSSSSAQSCRAEDGGFSPVQCDQAQGSCWCVMDSGEEVPGTRVTGGQPACESPRCPLPFNASEVVGGTILCETISGPTGSAMQQCQLLCRQGSWSVFPPGPLICSLESGRWESQLPQPRACQ

SEQ ID NO: 13163 - protein, 194 aa, Homo sapiens
  VARIANT 1: note = misc_feature - Xaa can be any naturally occurring amino acid
XHSECQWREHSLRPLPFLTPFSSLSQQESLCSAMRHLYLLCPFPPMAGCWAGPRPSRASCWQPGTRTSTSPGVSEDCLYLNVFIPQNVAPNASVLVFFHNTMDREESEGWPAIDGSFLAAVGNLIVVTASYRVGVFGFLSSGSGEVSGNWGLLDQVAALTWVQTHIRGFGGDPRRVSLAADRGGADVASIHLLT

SEQ ID NO: 13164 - protein, 1224 aa, Homo sapiens
  VARIANT 1: note = misc_feature - Xaa can be any naturally occurring amino acid
XQEQAGSLACVPCPVGRTTISAGAFSQTHCVTDCQRNEAGLQCDQNGQYRASQKDRGSGKAFCVDGEGRRLPWWETEAPLEDSQCLMMQKFEKVPESKVIFDANAPVAVRSKVPDSEFPVMQCLTDCTEDEACSFFTVSTTEPEISCDFYAWTSDNVACMTSDQKRDALGNSKATSFGSLRCQVKVRSHGQDSPAVYLKKGAIICGLLSSPSVLLCNVKDWMDPSEAWANATCPGVTYDQESHQVILRLGDQEFIKSLTPLEGTQDTFTNFQQVYLWKDSDMGSRPESMGCRKDTVPRPASPTEAGLTTELFSPVDLNQVIVNGNQSLSSQKHWLFKHLFSAQQANLWCLSRCVQEHSFCQLAEITESASLYFTCTLYPEAQVCDDIMESNAQGCRLILPQMPKALFRKKVILEDKVKNFYTRLPFQKLMGISIRNKVPMSEKSISNGFFECERRCDADPCCTGFGFLNVSQLKGGEVTCLTLNSLGIQMCSEENGGAWRILDCGSPDIEVHTYPFGWYQKPIAQNNAPSFCPLVVLPSLTEKVSLDSWQSLALSSVVVDPSIRHFDVAHVSTAATSNFSAVRDLCLSECSQHEACLITTLQTQPGAVRCMFYADTQSCTHSLQGQNCRLLLREEATHIYRKPGISLLSYEASVPSVPISTHGRLLGRSQAIQVGTSWKQVDQFLGVPYAAPPLAERRFQAPEPLNWTGSWDASKPRASCWQPGTRTSTSPGVSEDCLYLNVFIPQNVAPNASVLVFFHNTMDREESEGWPAIDGSFLAAVGNLIVVTASYRVGVFGFLSSGSGEVSGNWGLLDQVAALTWVQTHIRGFGGDPRRVSLAADRGGADVASIHLLTARATNSQLFRRAVLMGGSALSPAAVISHERAQQQAIALAKEVSCPMSSSQEVVSCLRQKPANVLNDAQTKLLAVSGPFHYWGPVIDGHFLREPPARALKRSLWVEVDLLIGSSQDDGLINRAKAVKQFEESRGRTSSKTAFYQALQNSLGGEDSDARVEAAATWYYSLEHSTDDYASFSRALENATRDYFIICPIIDMASAWAKRARGNVFMYHAPENYGHGSLELLADVQFALGLPFYPAYEGQFSLEEKSLSLKIMQYFSHFIRSGNPNYPYEFSRKVPTFATPWPDFVPRAGGENYKEFSELLPNRQGLKKADCSFWSKYISSLKTSADGAKGGQSAESEEEELTAGSGLREDLLSLQEPGSKTYSK

SEQ ID NO: 13165 - protein, 147 aa, Homo sapiens
  VARIANT 1: note = misc_feature - Xaa can be any naturally occurring amino acid
XSAGASALLRSGPYMPQCDAFGSWEPVQCHAGTGHCWCVDEKGGFIPGSLTARSLQIPQCPTTCEKSRTSGLLSSWKQARSQENPSPKDLFVPACLEARGVRCHSTRRRWLVEQSCVRQSRAPQALPCSSANCCAARAPGACFHQGH

SEQ ID NO: 13166 - protein, 62 aa, Homo sapiens
  VARIANT 1: note = misc_feature - Xaa can be any naturally occurring amino acid
XSDMGSRPESMGCRKDTVPRPASPTEAGCVQEHSFCQLAEITESASLYFTCTLYPEAQVCDD

SEQ ID NO: 13167 - protein, 390 aa, Homo sapiens
MPPSGLRLLPLLLPLLWLLVLTPGRPAAGLSTCKTIDMELVKRKRIEAIRGQILSKLRLASPPSQGEVPPGPLPEAVLALYNSTRDRVAGESAEPEPEPEADYYAKEVTRVLMVETHNEIYDKFKQSTHSIYMFFNTSELREAVPEPVLLSRAELRLLRLKLKVEQHVELYQKYSNNSWRYLSNRLLAPSDSPEWLSFDVTGVVRQWLSRGGEIEGFRLSAHCSCDSRDNTLQVDINGFTTGRRGDLATIHGMNRPFLLLMATPLERAQHLQSSRHRRALDTNYCFSSTEKNCCVRQLYIDFRKDLGWKWIHEPKGYHANFCLGPCPYIWSLDTQYSKVLALYNQHNPGASAAPCCVPQALEPLPIVYYVGRKPKVEQLSNMIVRSCKCS

SEQ ID NO: 13168 - protein, 120 aa, Homo sapiens
  VARIANT 1: note = misc_feature - Xaa can be any naturally occurring amino acid
XFTTGRRGDLATIHGMNRPFLLLMATPLERAQHLQSSRHRRALDTNYCFSSTEKNCCVRQLYIDFRKDLGWKWIHEPKGYHANFCLGPCPYIWSLDTQYSKLNEQNLIQEVPNIWQREVG

SEQ ID NO: 13169 - protein, 414 aa, Homo sapiens
MHYCVLSAFLILHLVTVALSLSTCSTLDMDQFMRKRIEAIRGQILSKLKLTSPPEDYPEPEEVPPEVISIYNSTRDLLQEKASRRAAACERERSDEEYYAKEVYKIDMPPFFPSENAIPPTFYRPYFRIVRFDVSAMEKNASNLVKAEFRVFRLQNPKARVPEQRIELYQILKSKDLTSPTQRYIDSKVVKTRAEGEWLSFDVTDAVHEWLHHKDRNLGFKISLHCPCCTFVPSNNYIIPNKSEELEARFAGIDGTSTYTSGDQKTIKSTRKKNSGKTPHLLLMLLPSYRLESQQTNRRKKRALDAAYCFRNVQDNCCLRPLYIDFKRDLGWKWIHEPKGYNANFCAGACPYLWSSDTQHSRVLSLYNTINPEASASPCCVSQDLEPLTILYYIGKTPKIEQLSNMIVKSCKCS

SEQ ID NO: 13170 - protein, 442 aa, Homo sapiens
MHYCVLSAFLILHLVTVALSLSTCSTLDMDQFMRKRIEAIRGQILSKLKLTSPPEDYPEPEEVPPEVISIYNSTRDLLQEKASRRAAACERERSDEEYYAKEVYKIDMPPFFPSETVCPVVTTPSGSVGSLCSRQSQVLCGYLDAIPPTFYRPYFRIVRFDVSAMEKNASNLVKAEFRVFRLQNPKARVPEQRIELYQILKSKDLTSPTQRYIDSKVVKTRAEGEWLSFDVTDAVHEWLHHKDRNLGFKISLHCPCCTFVPSNNYIIPNKSEELEARFAGIDGTSTYTSGDQKTIKSTRKKNSGKTPHLLLMLLPSYRLESQQTNRRKKRALDAAYCFRNVQDNCCLRPLYIDFKRDLGWKWIHEPKGYNANFCAGACPYLWSSDTQHSRVLSLYNTINPEASASPCCVSQDLEPLTILYYIGKTPKIEQLSNMIVKSCKCS

SEQ ID NO: 13171 - protein, 412 aa, Homo sapiens
MKMHLQRALVVLALLNFATVSLSLSTCTTLDFGHIKKKRVEAIRGQILSKLRLTSPPEPTVMTHVPYQVLALYNSTRELLEEMHGEREEGCTQENTESEYYAKEIHKFDMIQGLAEHNELAVCPKGITSKVFRFNVSSVEKNRTNLFRAEFRVLRVPNPSSKRNEQRIELFQILRPDEHIAKQRYIGGKNLPTRGTAEWLSFDVTDTVREWLLRRESNLGLEISIHCPCHTFQPNGDILENIHEVMEIKFKGVDNEDDHGRGDLGRLKKQKDHHNPHLILMMIPPHRLDNPGQGGQRKKRALDTNYCFRNLEENCCVRPLYIDFRQDLGWKWVHEPKGYYANFCSGPCPYLRSADTTHSTVLGLYNTLNPEASASPCCVPQDLEPLTILYYVGRTPKVEQLSNMVVKSCKCS

SEQ ID NO: 13172 - protein, 309 aa, Homo sapiens
MKMHLQRALVVLALLNFATVSLSLSTCTTLDFGHIKKKRVEAIRGQILSKLRLTSPPEPTVMTHVPYQVLALYNSTRELLEEMHGEREEGCTQENTESEYYAKEIHKFDMIQGLAEHNELAVCPKGITSKVFRFNVSSVEKNRTNLFRAEFRVLRVPNPSSKRNEQRIELFQILRPDEHIAKQRYIGGKNLPTRGTAEWLSFDVTDTVREWLLRRESNLGLEISIHCPCHTFQPNGDILENIHEVMEIKFKGVDNEDDHGRGDLGRLKKQKDHHNPHLILMMIPPHRLDNPGQGGQRKKRALDTNYCFR

SEQ ID NO: 13173 - protein, 683 aa, Homo sapiens
MALFVRLLALALALALGPAATLAGPAKSPYQLVLQHSRLRGRQHGPNVCAVQKVIGTNRKYFTNCKQWYQRKICGKSTVISYECCPGYEKVPGEKGCPAALPLSNLYETLGVVGSTTTQLYTDRTEKLRPEMEGPGSFTIFAPSNEAWASLPAEVLDSLVSNVNIELLNALRYHMVGRRVLTDELKHGMTLTSMYQNSNIQIHHYPNGIVTVNCARLLKADHHATNGVVHLIDKVISTITNNIQQIIEIEDTFETLRAAVAASGLNTMLEGNGQYTLLAPTNEAFEKIPSETLNRILGDPEALRDLLNNHILKSAMCAEAIVAGLSVETLEGTTLEVGCSGDMLTINGKAIISNKDILATNGVIHYIDELLIPDSAKTLFELAAESDVSTAIDLFRQAGLGNHLSGSERLTLLAPLNSVFKDGTPPIDAHTRNLLRNHIIKDQLASKYLYHGQTLETLGGKKLRVFVYRNSLCIENSCIAAHDKRGRYGTLFTMDRVLTPPMGTVMDVLKGDNRFSMLVAAIQSAGLTETLNREGVYTVFAPTNEAFRALPPRERSRLLGDAKELANILKYHIGDEILVSGGIGALVRLKSLQGDKLEVSLKNNVVSVNKEPVAEPDIMATNGVVHVITNVLQPPANRPQERGDELADSALEIFKQASAFSRASQRSVRLAPVYQKLLERMKH

SEQ ID NO: 13174 - protein, 65 aa, Homo sapiens
MATNGVVHVITNVLQPPANRPQERGDELADSALEIFKQASAFSRASQRSVRLAPVYQKLLERMKH

SEQ ID NO: 13175 - protein, 219 aa, Homo sapiens
RAAVAASGLNTMLEGNGQYTLLAPTNEAFEKIPSETLNRILGDPEALRDLLNNHILKSAMCAEAIVAGLSVETLEGTTLEVGCSGDMLTINGKAIISNKDILATNGVIHYIDELLIPDSAKTLFELAAESDVSTAIDLFRQAGLGNHLSGSERLTLLAPLNSVFKDGTPPIDAHTRNLLRNHIIKDQLASKYLYHGQTLETLGGKKLRVFVYRNVSSGS

SEQ ID NO: 13176 - protein, 366 aa, Homo sapiens
  VARIANT 1: note = misc_feature - Xaa can be any naturally occurring amino acid
XAFEKIPSETLNRILGDPEALRDLLNNHILKSAMCAEAIVAGLSVETLEGTTLEVGCSGDMLTINGKAIISNKDILATNGVIHYIDELLIPDSAKTLFELAAESDVSTAIDLFRQAGLGNHLSGSERLTLLAPLNSVFKDGTPPIDAHTRNLLRNHIIKDQLASKYLYHGQTLETLGGKKLRVFVYRNSLCIENSCIAAHDKRGRYGTLFTMDRVLTPPMGTVMDVLKGDNRFSMLVAAIQSAGLTETLNREGVYTVFAPTNEAFRALPPRERSRLLGDAKELANILKYHIGDEILVSGGIGALVRLKSLQGDKLEVSLKNNVVSVNKEPVAEPDIMATNGVVHVITNVLQPPAPVYQKLLERMKH

SEQ ID NO: 13177 - protein, 59 aa, Homo sapiens
  VARIANT 1: note = misc_feature - Xaa can be any naturally occurring amino acid
XKTLFELAAESDVSTAIDLFRQAGLGNHLSGSERLTLLAPLNSVFKGAHLSGPNHHPFL

SEQ ID NO: 13178 - protein, 194 aa, Homo sapiens
  VARIANT 1: note = misc_feature - Xaa can be any naturally occurring amino acid
XNGVVHLIDKVISTITNNIQQIIEIEDTFETLRAAVAASGLNTMLEGNGQYTLLAPTNEAFEKIPSETLNRILGDPEALRDMLTINGKAIISNKDILATNGVIHYIDELLIPDSAKTLFELAAESDVSTAIDLFRQAGLGNHLSGSERLTLLAPLNSVFKDGTPPIDAHTRNLLRNHIIKDQLASKYLYHGQTL

SEQ ID NO: 13179 - protein, 128 aa, Homo sapiens
  VARIANT 1: note = misc_feature - Xaa can be any naturally occurring amino acid
XPYQLVLQHSRLRGRQHGPNVCAVQKVIGTNRKYFTNCKQWYQRKICGKSTVISYECCPGYEKVPGEKGCPAALPLSNLYETLGVVGSTTTQLYTDRTEKLRPEMEGPGSFTIFAPSNEAWASLPAVR

SEQ ID NO: 13180 - protein, 78 aa, Homo sapiens
  VARIANT 1: note = misc_feature - Xaa can be any naturally occurring amino acid
XQGDKLEVSLKNNVVSVNKEPVAEPDIMATNGVVHVITNVLQPPANRPQERGDELADSALEIFKQASAFSRPLSIKSY

SEQ ID NO: 13181 - protein, 114 aa, Homo sapiens
MCIAEIDLIPRDRPFVCAPSSKTGSVTTTYCCNQDHCNKIELPTTGLPLLVQRTIARTIVLQESIGKGRFGEVWRGKWRGEEVAVKIFSSREERSWFREAEIYQTVMLRHENIL

SEQ ID NO: 13182 - protein, 114 aa, Homo sapiens
MCIAEIDLIPRDRPFVCAPSSKTGSVTTTYCCNQDHCNKIELPTTGPFSVKSSPGLGPVELAAVIAGPVCFVCISLMLMVYICHNRTVIHHRVPNEEDPSLDRPFISEGTTLKD

SEQ ID NO: 13183 - protein, 126 aa, Homo sapiens
MCIAEIDLIPRDRPFVCAPSSKTGSVTTTYCCNQDHCNKIELPTTGPFSVKSSPGLGPVELAAVIAGPVCFVCISLMLMVYICHNRTVIHHRVPNEEDPSLDRPFISEGTTLKDLIYDMTTSGSGS

SEQ ID NO: 13184 - protein, 118 aa, Homo sapiens
MCIAEIDLIPRDRPFVCAPSSKTGSVTTTYCCNQDHCNKIELPTTVKSSPGLGPVELAAVIAGPVCFVCISLMLMVYICHNRTVIHHRVPNEEDPSLDRPFISEGTTLKDLIYDMTTS

SEQ ID NO: 13185 - protein, 122 aa, Homo sapiens
MCIAEIDLIPRDRPFVCAPSSKTGSVTTTYCCNQDHCNKIELPTTVKSSPGLGPVELAAVIAGPVCFVCISLMLMVYICHNRTVIHHRVPNEEDPSLDRPFISEGTTLKDLIYDMTTSGSGS

SEQ ID NO: 13186 - protein, 434 aa, Homo sapiens
MCIAEIDLIPRDRPFVCAPSSKTGSVTTTYCCNQDHCNKIELPTTVKSSPGLGPVELAAVIAGPVCFVCISLMLMVYICHNRTVIHHRVPNEEDPSLDRPFISEGTTLKDLIYDMTTSGSGSGLPLLVQRTIARTIVLQESIGKGRFGEVWRGKWRGEEVAVKIFSSREERSWFREAEIYQTVMLRHENILGFIAADNKDNGTWTQLWLVSDYHEHGSLFDYLNRYTVTVEGMIKLALSTASGLAHLHMEIVGTQGKPAIAHRDLKSKNILVKKNGTCCIADLGLAVRHDSATDTIDIAPNHRVGTKRYMAPEVLDDSINMKHFESFKRADIYAMGLVFWEIARRCSIGGIHEDYQLPYYDLVPSDPSVEEMRKVVCEQKLRPNIPNRWQSCEALRVMAKIMRECWYANGAARLTALRIKKTLSQLSQQEGIKM

SEQ ID NO: 13187 - protein, 426 aa, Homo sapiens
MEAAVAAPRPRLLLLVLAAAAAAAAALLPGATALQCFCHLCTKDNFTCVTDGLCFVSVTETTDKVIHNSMCIAEIDLIPRDRPFVCAPSSKTGSVTTTYCCNQDHCNKIELPTTGLPLLVQRTIARTIVLQESIGKGRFGEVWRGKWRGEEVAVKIFSSREERSWFREAEIYQTVMLRHENILGFIAADNKDNGTWTQLWLVSDYHEHGSLFDYLNRYTVTVEGMIKLALSTASGLAHLHMEIVGTQGKPAIAHRDLKSKNILVKKNGTCCIADLGLAVRHDSATDTIDIAPNHRVGTKRYMAPEVLDDSINMKHFESFKRADIYAMGLVFWEIARRCSIGGIHEDYQLPYYDLVPSDPSVEEMRKVVCEQKLRPNIPNRWQSCEALRVMAKIMRECWYANGAARLTALRIKKTLSQLSQQEGIKM

SEQ ID NO: 13188 - protein, 383 aa, Homo sapiens
MEAAVAAPRPRLLLLVLAAAAAAAAALLPGATALQCFCHLCTKDNFTCVTDGLCFVSVTETTDKVIHNSMCIAEIDLIPRDRPFVCAPSSKTGSVTTTYCCNQDHCNKIELPTTGPFSVKSSPGLGPVELAAVIAGPVCFVCISLMLMVYICHNRTVIHHRVPNEEDPSLDRPFISEGTTLKDLIYDMTTSGSGSGLPLLVQRTIARTIVLQESIGKGRFGEVWRGKWRGEEVAVKIFSSREERSWFREAEIYQTVMLRHENILGFIAADNKDNGTWTQLWLVSDYHEHGSLFDYLNRYTVTVEGMIKLALSTASGLAHLHMEIVGTQGKPAIAHRDLKSKNILVKKNGTCCIADLGLAVRHDSATDTIDIAPNHRVGTKRNS

SEQ ID NO: 13189 - protein, 507 aa, Homo sapiens
MEAAVAAPRPRLLLLVLAAAAAAAAALLPGATALQCFCHLCTKDNFTCVTDGLCFVSVTETTDKVIHNSMCIAEIDLIPRDRPFVCAPSSKTGSVTTTYCCNQDHCNKIELPTTGPFSVKSSPGLGPVELAAVIAGPVCFVCISLMLMVYICHNRTVIHHRVPNEEDPSLDRPFISEGTTLKDLIYDMTTSGSGSGLPLLVQRTIARTIVLQESIGKGRFGEVWRGKWRGEEVAVKIFSSREERSWFREAEIYQTVMLRHENILGFIAADNKDNGTWTQLWLVSDYHEHGSLFDYLNRYTVTVEGMIKLALSTASGLAHLHMEIVGTQGKPAIAHRDLKSKNILVKKNGTCCIADLGLAVRHDSATDTIDIAPNHRVGTKRYMAPEVLDDSINMKHFESFKRADIYAMGLVFWEIARRCSIGGIHEDYQLPYYDLVPSDPSVEEMRKVVCEQKLRPNIPNRWQSCEALRVMAKIMRECWYANGAARLTALRIKKTLSQLSQQEGIKM

SEQ ID NO: 13190 - protein, 503 aa, Homo sapiens
MEAAVAAPRPRLLLLVLAAAAAAAAALLPGATALQCFCHLCTKDNFTCVTDGLCFVSVTETTDKVIHNSMCIAEIDLIPRDRPFVCAPSSKTGSVTTTYCCNQDHCNKIELPTTVKSSPGLGPVELAAVIAGPVCFVCISLMLMVYICHNRTVIHHRVPNEEDPSLDRPFISEGTTLKDLIYDMTTSGSGSGLPLLVQRTIARTIVLQESIGKGRFGEVWRGKWRGEEVAVKIFSSREERSWFREAEIYQTVMLRHENILGFIAADNKDNGTWTQLWLVSDYHEHGSLFDYLNRYTVTVEGMIKLALSTASGLAHLHMEIVGTQGKPAIAHRDLKSKNILVKKNGTCCIADLGLAVRHDSATDTIDIAPNHRVGTKRYMAPEVLDDSINMKHFESFKRADIYAMGLVFWEIARRCSIGGIHEDYQLPYYDLVPSDPSVEEMRKVVCEQKLRPNIPNRWQSCEALRVMAKIMRECWYANGAARLTALRIKKTLSQLSQQEGIKM

SEQ ID NO: 13191 - protein, 35 aa, Homo sapiens
MTSHYVIAIFALMSSCLATAGPEPGALCELSPVSA

SEQ ID NO: 13192 - protein, 89 aa, Homo sapiens
MTSHYVIAIFALMSSCLATAGPEPGALCELSPVSASHPVQALMESFTVLSGCASRGTTGLPQEVHVLNLRTAGQGPGQLQREACSMNHY

SEQ ID NO: 13193 - protein, 851 aa, Homo sapiens
MTSHYVIAIFALMSSCLATAGPEPGALCELSPVSASHPVQALMESFTVLSGCASRGTTGLPQEVHVLNLRTAGQGPGQLQREVTLHLNPISSVHIHHKSVVFLLNSPHPLVWHLKTERLATGVSRLFLVSEGSVVQFSSANFSLTAETEERNFPHGNEHLLNWARKEYGAVTSFTELKIARNIYIKVGEDQVFPPKCNIGKNFLSLNYLAEYLQPKAAEGCVMSSQPQNEEVHIIELITPNSNPYSAFQVDITIDIRPSQEDLEVVKNLILILKCKKSVNWVIKSFDVKGSLKIIAPNSIGFGKESERSMTMTKSIRDDIPSTQGNLVKWALDNGYSPITSYTMAPVANRFHLRLENNAEEMGDEEVHTIPPELRILLDPGALPALQNPPIRGGEGQNGGLPFPFPDISRRVWNEEGEDGLPRPKDPVIPSIQLFPGLREPEEVQGSVDIALSVKCDNEKMIVAVEKDSFQASGYSGMDVTLLDPTCKAKMNGTHFVLESPLNGCGTRPRWSALDGVVYYNSIVIQVPALGDSSGWPDGYEDLESGDNGFPGDMDEGDASLFTRPEIVVFNCSLQQVRNPSSFQEQPHGNITFNMELYNTDLFLVPSQGVFSVPENGHVYVEVSVTKAEQELGFAIQTCFISPYSNPDRMSHYTIIENICPKDESVKFYSPKRVHFPIPQADMDKKRFSFVFKPVFNTSLLFLQCELTLCTKMEKHPQKLPKCVPPDEACTSLDASIIWAMMQNKKTFTKPLAVIHHEAESKEKGPSMKEPNPISPPIFHGLDTLTVMGIAFAAFVIGALLTGALWYIYSHTGETAGRQQVPTSPPASENSSAAHSIGSTQSTPCSSSSTA

SEQ ID NO: 13194 - protein, 850 aa, Homo sapiens
MTSHYVIAIFALMSSCLATAGPEPGALCELSPVSASHPVQALMESFTVLSGCASRGTTGLPQEVHVLNLRTAGQGPGQLQREVTLHLNPISSVHIHHKSVVFLLNSPHPLVWHLKTERLATGVSRLFLVSEGSVVQFSSANFSLTAETEERNFPHGNEHLLNWARKEYGAVTSFTELKIARNIYIKVGEDQVFPPKCNIGKNFLSLNYLAEYLQPKAAEGCVMSSQPQNEEVHIIELITPNSNPYSAFQVDITIDIRPSQEDLEVVKNLILILKCKKSVNWVIKSFDVKGSLKIIAPNSIGFGKESERSMTMTKSIRDDIPSTQGNLVKWALDNGYSPITSYTMAPVANRFHLRLENNEEMGDEEVHTIPPELRILLDPGALPALQNPPIRGGEGQNGGLPFPFPDISRRVWNEEGEDGLPRPKDPVIPSIQLFPGLREPEEVQGSVDIALSVKCDNEKMIVAVEKDSFQASGYSGMDVTLLDPTCKAKMNGTHFVLESPLNGCGTRPRWSALDGVVYYNSIVIQVPALGDSSGWPDGYEDLESGDNGFPGDMDEGDASLFTRPEIVVFNCSLQQVRNPSSFQEQPHGNITFNMELYNTDLFLVPSQGVFSVPENGHVYVEVSVTKAEQELGFAIQTCFISPYSNPDRMSHYTIIENICPKDESVKFYSPKRVHFPIPQADMDKKRFSFVFKPVFNTSLLFLQCELTLCTKMEKHPQKLPKCVPPDEACTSLDASIIWAMMQNKKTFTKPLAVIHHEAESKEKGPSMKEPNPISPPIFHGLDTLTVMGIAFAAFVIGALLTGALWYIYSHTGETAGRQQVPTSPPASENSSAAHSIGSTQSTPCSSSSTA

SEQ ID NO: 13195 - protein, 850 aa, Homo sapiens; identical to SEQ ID NO: 13194

SEQ ID NO: 13196 - protein, 851 aa, Homo sapiens; identical to SEQ ID NO: 13193

SEQ ID NO: 13197 - protein, 49 aa, Homo sapiens
MTSHYVIAIFALMSSCLATAGWSAMARSWLTATSASRVQAILLPQPPEY

SEQ ID NO: 13198 - protein, 94 aa, Homo sapiens
MGLAWGLGVLFLMHVCGTNRIPESGGDNSVFDIFELTGAARKGSGRRLVKGPDPSSPAFRIEDANLIPPVPDDKFQDLVDAVRAEKGFLLLASL

SEQ ID NO: 13199 - protein, 1170 aa, Homo sapiens
MGLAWGLGVLFLMHVCGTNRIPESGGDNSVFDIFELTGAARKGSGRRLVKGPDPSSPAFRIEDANLIPPVPDDKFQDLVDAVRAEKGFLLLASLRQMKKTRGTLLALERKDHSGQVFSVVSNGKAGTLDLSLTVQGKQHVVSVEEALLATGQWKSITLFVQEDRAQLYIDCEKMENAELDVPIQSVFTRDLASIARLRIAKGGVNDNFQGVLQNVRFVFGTTPEDILRNKGCSSSTSVLLTLDNNVVNGSSPAIRTNYIGHKTKDLQAICGISCDELSSMVLELRGLRTIVTTLQDSIRKVTEENKELANELRRPPLCYHNGVQYRNNEEWTVDSCTECHCQNSVTICKKVSCPIMPCSNATVPDGECCPRCWPSDSADDGWSPWSEWTSCSTSCGNGIQQRGRSCDSLNNRCEGSSVQTRTCHIQECDKRFKQDGGWSHWSPWSSCSVTCGDGVITRIRLCNSPSPQMNGKPCEGEARETKACKKDACPINGGWGPWSPWDICSVTCGGGVQKRSRLCNNPTPQFGGKDCVGDVTENQICNKQDCPIDGCLSNPCFAGVKCTSYPDGSWKCGACPPGYSGNGIQCTDVDECKEVPDACFNHNGEHRCENTDPGYNCLPCPPRFTGSQPFGQGVEHATANKQVCKPRNPCTDGTHDCNKNAKCNYLGHYSDPMYRCECKPGYAGNGIICGEDTDLDGWPNENLVCVANATYHCKKDNCPNLPNSGQEDYDKDGIGDACDDDDDNDKIPDDRDNCPFHYNPAQYDYDRDDVGDRCDNCPYNHNPDQADTDNNGEGDACAADIDGDGILNERDNCQYVYNVDQRDTDMDGVGDQCDNCPLEHNPDQLDSDSDRIGDTCDNNQDIDEDGHQNNLDNCPYVPNANQADHDKDGKGDACDHDDDNDGIPDDKDNCRLVPNPDQKDSDGDGRGDACKDDFDHDSVPDIDDICPENVDISETDFRRFQMIPLDPKGTSQNDPNWVVRHQGKELVQTVNCDPGLAVGYDEFNAVDFSGTFFINTERDDDYAGFVFGYQSSSRFYVVMWKQVTQSYWDTNPTRAQGYSGLSVKVVNSTTGPGEHLRNALWHTGNTPGQVRTLWHDPRHIGWKDFTAYRWRLSHRPKTGFIRVVMYEGKKIMADSGPIYDKTYAGGRLGLFVFSQEMVFFSDLKYECRDP

SEQ ID NO: 13200 - protein, 83 aa, Homo sapiens
MVWRLVLLALWVWPSTQAGHQDKDTTFDLFSISNINRKTIGAKQFRGPDPGVPAYRFVRFDYIPPVNADDLSKITKIMRQKEG

SEQ ID NO: 13201 - protein, 1172 aa, Homo sapiens
MVWRLVLLALWVWPSTQAGHQDKDTTFDLFSISNINRKTIGAKQFRGPDPGVPAYRFVRFDYIPPVNADDLSKITKIMRQKEGFFLTAQLKQDGKSRGTLLALEGPGLSQRQFEIVSNGPADTLDLTYWIDGTRHVVSLEDVGLADSQWKNVTVQVAGETYSLHVGCDLIDSFALDEPFYEHLQAEKSRMYVAKGSARESHFRGLLQNVHLVFENSVEDILSKKGCQQGQGAEINAISENTETLRLGPHVTTEYVGPSSERRPEVCERSCEELGNMVQELSGLHVLVNQLSENLKRVSNDNQFLWELIGGPPKTRNMSACWQDGRFFAENETWVVDSCTTCTCKKFKTICHQITCPPATCASPSFVEGECCPSCLHSVDGEEGWSPWAEWTQCSVTCGSGTQQRGRSCDVTSNTCLGPSIQTRACSLSKCDTRIRQDGGWSHWSPWSSCSVTCGVGNITRIRLCNSPVPQMGGKNCKGSGRETKACQGAPCPIDGRWSPWSPWSACTVTCAGGIRERTRVCNSPEPQYGGKACVGDVQERQMCNKRSCPVDGCLSNPCFPGAQCSSFPDGSWSCGSCPVGFLGNGTHCEDLDECALVPDICFSTSKVPRCVNTQPGFHCLPCPPRYRGNQPVGVGLEAAKTEKQVCEPENPCKDKTHNCHKHAECIYLGHFSDPMYKCECQTGYAGDGLICGEDSDLDGWPNLNLVCATNATYHCIKDNCPHLPNSGQEDFDKDGIGDACDDDDDNDGVTDEKDNCQLLFNPRQADYDKDEVGDRCDNCPYVHNPAQIDTDNNGEGDACSVDIDGDDVFNERDNCPYVYNTDQRDTDGDGVGDHCDNCPLVHNPDQTDVDNDLVGDQCDNNEDIDDDGHQNNQDNCPYISNANQADHDRDGQGDACDPDDDNDGVPDDRDNCRLVFNPDQEDLDGDGRGDICKDDFDNDNIPDIDDVCPENNAISETDFRNFQMVPLDPKGTTQIDPNWVIRHQGKELVQTANSDPGIAVGFDEFGSVDFSGTFYVNTDRDDDYAGFVFGYQSSSRFYVVMWKQVTQTYWEDQPTRAYGYSGVSLKVVNSTTGTGEHLRNALWHTGNTPGQVRTLWHDPRNIGWKDYTAYRWHLTHRPKTGYIRVLVHEGKQVMADSGPIYDQTYAGGRLGLFVFSQEMVYFSDLKYECRDI

SEQ ID NO: 13202 - protein, 1172 aa, Homo sapiens; identical to SEQ ID NO: 13201

SEQ ID NO: 13203 - protein, 485 aa, Homo sapiens
MDNNKHCKQDNCLLTPNSGQEDADNDGVGDQCDDDADGDGIKNVEDNCRLFPNKDQQNSDTDSFGDACDNCPNVPNNDQKDTDGNGEGDACDNDVDGDGIPNGLDNCPKVPNPLQTDRDEDGVGDACDSCPEMSNPTQTDADSDLVGDVCDTNEDSDGDGHQDTKDNCPQLPNSSQLDSDNDGLGDECDGDDDNDGIPDYVPPGPDNCRLVPNPNQKDSDGNGVGDVCEDDFDNDAVVDPLDVCPESAEVTLTDFRAYQTVVLDPEGDAQIDPNWVVLNQGMEIVQTMNSDPGLAVGYTAFNGVDFEGTFHVNTVTDDDYAGFLFSYQDSGRFYVVMWKQTEQTYWQATPFRAVAQPGLQLKAVTSVSGPGEHLRNALWHTGHTPDQVRLLWTDPRNVGWRDKTSYRWQLLHRPQVGYIRVKLYEGPQLVADSGVIIDTSMRGGRLGVFCFSQENIIWSNLQYRCNDTVPEDFEPFRRQLLQGRV

SEQ ID NO: 13204 - protein, 947 aa, Homo sapiens
METQELRGALALLLLCFFTSASQDLQVIDLLTVGESRQMVAVAEKIRTALLTAGDIYLLSTFRLPPKQGGVLFGLYSRQDNTRWLEASVVGKINKVLVRYQREDGKVHAVNLQQAGLADGRTHTVLLRLRGPSRPSPALHLYVDCKLGDQHAGLPALAPIPPAEVDGLEIRTGQKAYLRMQGFVESMKIILGGSMARVGALSECPFQGDESIHSAGEQTKALVTQLTLFNQILVELRDDIRDQVKEMSLIRNTIMECQVCGFHEQRSHCSPNPCFRGVDCMEVYEYPGYRCGPCPPGLQGNGTHCSDINECAHADPCFPGSSCINTMPGFHCEACPRGYKGTQVSGVGIDYARASKQVCNDIDECNDGNNGGCDPNSICTNTVGSFKCGPCRLGFLGNQSQGCLPARTCHSPAHSPCHIHAHCLFERNGAVSCQCNVGWAGNGNVCGTDTDIDGYPDQALPCMDNNKHCKQDNCLLTPNSGQEDADNDGVGDQCDDDADGDGIKNVEDNCRLFPNKDQQNSDTDSFGDACDNCPNVPNNDQKDTDGNGEGDACDNDVDGDGIPNGLDNCPKVPNPLQTDRDEDGVGDACDSCPEMSNPTQTDADSDLVGDVCDTNEDSDGDGHQDTKDNCPQLPNSSQLDSDNDGLGDECDGDDDNDGIPDYVPPGPDNCRLVPNPNQKDSDGNGVGDVCEDDFDNDAVVDPLDVCPESAEVTLTDFRAYQTVVLDPEGDAQIDPNWVVLNQGMEIVQTMNSDPGLAVGYTAFNGVDFEGTFHVNTVTDDDYAGFLFSYQDSGRFYVVMWKQTEQTYWQATPFRAVAQPGLQLKAVTSVSGPGEHLRNALWHTGHTPDQVRLLWTDPRNVGWRDKTSYRWQLLHRPQVGYIRVKLYEGPQLVADSGVIIDTSMRGGRLGVFCFSQENIIWSNLQYRCNDTVPEDFEPFRRQLLQGRV

SEQ ID NO: 13205 - protein, 956 aa, Homo sapiens
METQELRGALALLLLCFFTSASQDLQVIDLLTVGESRQMVAVAEKIRTALLTAGDIYLLSTFRLPPKQGGVLFGLYSRQDNTRWLEASVVGKINKVLVRYQREDGKVHAVNLQQAGLADGRTHTVLLRLRGPSRPSPALHLYVDCKLGDQHAGLPALAPIPPAEVDGLEIRTGQKAYLRMQGFVESMKIILGGSMARVGALSECPFQGDESIHSAVTNALHSILGEQTKALVTQLTLFNQILVELRDDIRDQVKEMSLIRNTIMECQVCGFHEQRSHCSPNPCFRGVDCMEVYEYPGYRCGPCPPGLQGNGTHCSDINECAHADPCFPGSSCINTMPGFHCEACPRGYKGTQVSGVGIDYARASKQVCNDIDECNDGNNGGCDPNSICTNTVGSFKCGPCRLGFLGNQSQGCLPARTCHSPAHSPCHIHAHCLFERNGAVSCQCNVGWAGNGNVCGTDTDIDGYPDQALPCMDNNKHCKQDNCLLTPNSGQEDADNDGVGDQCDDDADGDGIKNVEDNCRLFPNKDQQNSDTDSFGDACDNCPNVPNNDQKDTDGNGEGDACDNDVDGDGIPNGLDNCPKVPNPLQTDRDEDGVGDACDSCPEMSNPTQTDADSDLVGDVCDTNEDSDGDGHQDTKDNCPQLPNSSQLDSDNDGLGDECDGDDDNDGIPDYVPPGPDNCRLVPNPNQKDSDGNGVGDVCEDDFDNDAVVDPLDVCPESAEVTLTDFRAYQTVVLDPEGDAQIDPNWVVLNQGMEIVQTMNSDPGLAVGYTAFNGVDFEGTFHVNTVTDDDYAGFLFSYQDSGRFYVVMWKQTEQTYWQATPFRAVAQPGLQLKAVTSVSGPGEHLRNALWHTGHTPDQVRLLWTDPRNVGWRDKTSYRWQLLHRPQVGYIRVKLYEGPQLVADSGVIIDTSMRGGRLGVFCFSQENIIWSNLQYRCNDTVPEDFEPFRRQLLQGRV

SEQ ID NO: 13206 - protein, 400 aa, Homo sapiens
METQELRGALALLLLCFFTSASQDLQVIDLLTVGESRQMVAVAEKIRTALLTAGDIYLLSTFRLPPKQGGVLFGLYSRQDNTRWLEASVVGKINKVTNALHSILGEGNVPDPKHHYGVSGFHEQRSHCSPNPCFRGVDCMEVYEYPGYRCGPCPPGLQGNGTHCSDINECAHADPCFPGSSCINTMPGFHCEACPRGYKGTQVSGVGIDYARASKQVCNDIDECNDGNNGGCDPNSICTNTVGSFKCGPCRLGFLGNQSQGCLPARTCHSPAHSPCHIHAHCLFERNGAVSCQCNVGWAGNGNVCGTDTDIDGYPDQALPCMDNNKHCKQDNCLLTPNSGQEDADNDGVGDQCDDDADGDGIKNVEASPMDWTIALKSPTHYRQTGMRTGWEMLATAALK

SEQ ID NO: 13207 - protein, 836 aa, Homo sapiens
METQELRGALALLLLCFFTSASQDLQVIDLLTVGESRQMVAVAEKIRTALLTAGDIYLLSTFRLPPKQGGVLFGLYSRQDNTRWLEASVVGKINKVTNALHSILGEQTKALVTQLTLFNQILVELRDDIRDQVKEMSLIRNTIMECQVCGFHEQRSHCSPNPCFRGVDCMEVYEYPGYRCGPCPPGLQGNGTHCSDINECAHADPCFPGSSCINTMPGFHCEACPRGYKGTQVSGVGIDYARASKQVCNDIDECNDGNNGGCDPNSICTNTVGSFKCGPCRLGFLGNQSQGCLPARTCHSPAHSPCHIHAHCLFERNGAVSCQCNVGWAGNGNVCGTDTDIDGYPDQALPCMDNNKHCKQDNCLLTPNSGQEDADNDGVGDQCDDDADGDGIKNVEDNCRLFPNKDQQNSDTDSFGDACDNCPNVPNNDQKDTDGNGEGDACDNDVDGDGIPNGLDNCPKVPNPLQTDRDEDGVGDACDSCPEMSNPTQTDADSDLVGDVCDTNEDSDGDGHQDTKDNCPQLPNSSQLDSDNDGLGDECDGDDDNDGIPDYVPPGPDNCRLVPNPNQKDSDGNGVGDVCEDDFDNDAVVDPLDVCPESAEVTLTDFRAYQTVVLDPEGDAQIDPNWVVLNQGMEIVQTMNSDPGLAVGYTAFNGVDFEGTFHVNTVTDDDYAGFLFSYQDSGRFYVVMWKQTEQTYWQATPFRAVAQPGLQLKAVTSVSGPGEHLRNALWHTGHTPDQVRLLWTDPRNVGWRDKTSYRWQLLHRPQVGYIRVKLYEGPQLVADSGVIIDTSMRGGRLGVFCFSQENIIWSNLQYRCNDTVPEDFEPFRRQLLQGRV

SEQ ID NO: 13208 - protein, 870 aa, Homo sapiens
MGRLNKAILRYLKNDGKVHLVVFNNLQLADGRRHRILLRLSNLQRGAGSLELYLDCIQVDSVHNLPRAFAGPSQKPETIELRTFQRKPQDFLEELKLVVRGSLFQVASLQDCFLQQSEPLAATGTGDFNRQFLGQMTQLNQLLGEVKDLLRQQVKETSFLRNTIAECQACGPLKFQSPTPSTVVPPAPPAPPTRPPRRCDSNPCFRGVQCTDSRDGFQCGPCPEGYTGNGITCIDVDECKYHPCYPGVHCINLSPGFRCDACPVGFTGPMVQGVGISFAKSNKQVCTDIDECRNGACVPNSICVNTLGSYRCGPCKPGYTGDQIRGCKAERNCRNPELNPCSVNAQCIEERQGDVTCVCGVGWAGDGYICGKDVDIDSYPDEELPCSARNCKKDNCKYVPNSGQEDADRDGIGDACDEDADGDGILNEQDNCVLIHNVDQRNSDKDIFGDACDNCLSVLNNDQKDTDGDGRGDACDDDMDGDGIKNILDNCPKFPNRDQRDKDGDGVGDACDSCPDVSNPNQSDVDNDLVGDSCDTNQDSDGDGHQDSTDNCPTVINSAQLDTDKDGIGDECDDDDDNDGIPDLVPPGPDNCRLVPNPAQEDSNSDGVGDICESDFDQDQVIDRIDVCPENAEVTLTDFRAYQTVVLDPEGDAQIDPNWVVLNQGMEIVQTMNSDPGLAVGYTAFNGVDFEGTFHVNTQTDDDYAGFIFGYQDSSSFYVVMWKQTEQTYWQATPFRAVAEPGIQLKAVKSKTGPGEHLRNSLWHTGDTSDQVRLLWKDSRNVGWKDKVSYRWFLQHRPQVGYIRVRFYEGSELVADSGVTIDTTMRGGRLGVFCFSQENIIWSNLKYRCNDTIPEDFQEFQTQNFDRFDN

SEQ ID NO: 13209 - protein, 961 aa, Homo sapiens
MLAPRGAAVLLLHLVLQRWLAAGAQATPQVFDLLPSSSQRLNPGALLPVLTDPALNDLYVISTFKLQTKSSATIFGLYSSTDNSKYFEFTVMGRLNKAILRYLKNDGKVHLVVFNNLQLADGRRHRILLRLSNLQRGAGSLELYLDCIQVDSVHNLPRAFAGPSQKPETIELRTFQRKPQDFLEELKLVVRGSLFQVASLQDCFLQQSEPLAATGTGDFNRQFLGQMTQLNQLLGEVKDLLRQQVKETSFLRNTIAECQACGPLKFQSPTPSTVVPPAPPAPPTRPPRRCDSNPCFRGVQCTDSRDGFQCGPCPEGYTGNGITCIDVDECKYHPCYPGVHCINLSPGFRCDACPVGFTGPMVQGVGISFAKSNKQVCTDIDECRNGACVPNSICVNTLGSYRCGPCKPGYTGDQIRGCKAERNCRNPELNPCSVNAQCIEERQGDVTCVCGVGWAGDGYICGKDVDIDSYPDEELPCSARNCKKDNCKYVPNSGQEDADRDGIGDACDEDADGDGILNEQDNCVLIHNVDQRNSDKDIFGDACDNCLSVLNNDQKDTDGDGRGDACDDDMDGDGIKNILDNCPKFPNRDQRDKDGDGVGDACDSCPDVSNPNQSDVDNDLVGDSCDTNQDSDGDGHQDSTDNCPTVINSAQLDTDKDGIGDECDDDDDNDGIPDLVPPGPDNCRLVPNPAQEDSNSDGVGDICESDFDQDQVIDRIDVCPENAEVTLTDFRAYQTVVLDPEGDAQIDPNWVVLNQGMEIVQTMNSDPGLAVGYTAFNGVDFEGTFHVNTQTDDDYAGFIFGYQDSSSFYVVMWKQTEQTYWQATPFRAVAEPGIQLKAVKSKTGPGEHLRNSLWHTGDTSDQVRLLWKDSRNVGWKDKVSYRWFLQHRPQVGYIRVRFYEGSELVADSGVTIDTTMRGGRLGVFCFSQENIIWSNLKYRCNDTIPEDFQEFQTQNFDRFDN

SEQ ID NO: 13210 - protein, 57 aa, Homo sapiens
HDGKMLASASEDHFIDIAEVETVQQTHSASQKAAGPLAKRPVCSIVIIPPSLLPFES

SEQ ID NO: 13211 - protein, 105 aa, Homo sapiens
MAVPAAAMGPSALGQSGPGSMAPWCSVSSGPSRYVLGMQELFRGHSKTREFLAHSAKVHSVAWSCDGRRLASGSFDKTASVFLLEKDRLGRTLISAGVLMGRPLL

SEQ ID NO: 13212 - protein, 105 aa, Homo sapiens; identical to SEQ ID NO: 13211

SEQ ID NO: 13213 - protein, 351 aa, Homo sapiens
MAVPAAAMGPSALGQSGPGSMAPWCSVSSGPSRYVLGMQELFRGHSKTREFLAHSAKVHSVAWSCDGRRLASGSFDKTASVFLLEKDRLVKENNYRGHGDSVDQLCWHPSNPDLFVTASGDKTIRIWDVRTTKCIATVNTKGENINICWSPDGQTIAVGNKDDVVTFIDAKTHRSKAEEQFKFEVNEISWNNDNNMFFLTNGNGCINILSYPELKPVQSINAHPSNCICIKFDPMGKYFATGSADALVSLWDVDELVCVRCFSRLDWPVRTLSFSHDGKMLASASEDHFIDIAEVETGDKLWEVQCESPTFTVAWHPKRPLLAFACDDKDGKYDSSREAGTVKLFGLPNDS

SEQ ID NO: 13214 - protein, 327 aa, Homo sapiens
MAVPAAAMGPSALGQSGPGSMAPWCSVSSGPSRYVLGMQELFRGHSKTREFLAHSAKVHSVAWSCDGRRLASGSFDKTASVFLLEKDRLVKENNYRGHGDSVDQLCWHPSNPDLFVTASGDKTIRIWDVRTTKCIATVNTKGENINICWSPDGQTIAVGNKDDVVTFIDAKTHRSKAEEQFKFEVNEISWNNDNNMFFLTNGNGCINILSYPELKPVQSINAHPSNCICIKFDPMGKYFATGSADALVSLWDVDELVCVRCFSRLDWPVRTLSFSHDGKMLASASEDHFIDIAEVETGNFMRIYRLSPLAVRTSLVISSLHVTTSPA

SEQ ID NO: 13215 - protein, 166 aa, Homo sapiens
MAWLCGSLPVVVAVTAMETAARQECYPELKPVQSINAHPSNCICIKFDPMGKYFATGSADALVSLWDVDELVCVRCFSRLDWPVRTLSFSHDGKMLASASEDHFIDIAEVETGDKLWEVQCESPTFTVAWHPKRPLLAFACDDKDGKYDSSREAGTVKLFGLPNDS

SEQ ID NO: 13216 - protein, 13 aa, Homo sapiens
VAVTAMETAARQE

SEQ ID NO: 13217 - protein, 55 aa, Homo sapiens
VVVAVTAMETAARQEWSKKTIIGDMGIVWTSFVGIQVILTYLLRRPEIKPFASGM

SEQ ID NO: 13218 - protein, 56 aa, Homo sapiens
  VARIANT 1: note = misc_feature - Xaa can be any naturally occurring amino acid
XQSINAHPSNCICIKFDPMGKYFATGSADALVSLWDVDELVCVRCFSRGQTMGGTV

SEQ ID NO: 13219 - protein, 75 aa, Homo sapiens
  VARIANT 1: note = misc_feature - Xaa can be any naturally occurring amino acid
XVSLWDVDELVCVRCFSRLDWPVRTLSFSHDGKMLASASEDHFIDIAEVETDRVSFCHPAWCAVVQAILLPQPPK

SEQ ID NO: 13220 - protein, 349 aa, Homo sapiens
MELTELLLVVMLLLTARLTLSSPAPPACDLRVLSKLLRDSHVLHSRLSQCPEVHPLPTPVLLPAVDFSLGEWKTQMEETKAQDILGAVTLLLEGVMAARGQLGPTCLSSLLGQLSGQVRLLLGALQSLLGTQGRTTAHKDPNAIFLSFQHLLRGKVRFLMLVGGSTLCVRRAPPTTAVPSRTSLVLTLNELPNRTSGLLETNFTASARTTGSGLLKWQQGFRAKIPGLLNQTSRSLDQIPGYLNRIHELLNGTRGLFPGPSRRTLGAPDISSGTSDTGSLPPNLQPGYSPSPTHPPTGQYTLFPLPPTLPTPVVQLHPLLPDPSAPTPTPTSPLLNTSYTHSQNLSQEG

SEQ ID NO: 13221 - protein, 286 aa, Homo sapiens
MELTELLLVVMLLLTARLTLSSPAPPACDLRVLSKLLRDSHVLHSRLSQCPEVHPLPTPVLLPAVDFSLGEWKTQMEETKAQDILGAVTLLLEGVMAARGQLGPTCLSSLLGQLSGQVRLLLGALQSLLGTQLPPQGRTTAHKDPNAIFLSFQHLLRGKDFWIVGDKLHCLSQNYWLWASEVAAGIQSQDSWSAEPNLQVPGPNPRIPEQDTRTLEWNSWTLSWTLTQDPRSPGHFLRNIRHRLPATQPPAWIFSFPNPSSYWTVYALPSSTHLAHPCGPAPPPAS

SEQ ID NO: 13222 - protein, 353 aa, Homo sapiens
MELTELLLVVMLLLTARLTLSSPAPPACDLRVLSKLLRDSHVLHSRLSQCPEVHPLPTPVLLPAVDFSLGEWKTQMEETKAQDILGAVTLLLEGVMAARGQLGPTCLSSLLGQLSGQVRLLLGALQSLLGTQLPPQGRTTAHKDPNAIFLSFQHLLRGKVRFLMLVGGSTLCVRRAPPTTAVPSRTSLVLTLNELPNRTSGLLETNFTASARTTGSGLLKWQQGFRAKIPGLLNQTSRSLDQIPGYLNRIHELLNGTRGLFPGPSRRTLGAPDISSGTSDTGSLPPNLQPGYSPSPTHPPTGQYTLFPLPPTLPTPVVQLHPLLPDPSAPTPTPTSPLLNTSYTHSQNLSQEG

SEQ ID NO: 13223 - protein, 353 aa, Homo sapiens; identical to SEQ ID NO: 13222

SEQ ID NO: 13224 - protein, 353 aa, Homo sapiens; identical to SEQ ID NO: 13222

SEQ ID NO: 13225 - protein, 12 aa, Homo sapiens
  VARIANT 1: note = misc_feature - Xaa can be any naturally occurring amino acid
XQSLLGTQTREA

SEQ ID NO: 13226 - protein, 219 aa, Homo sapiens
MFVSYLILTLLHVQTAVLARPGGESIGCDDYLGSDKVVDKCGVCGGDNTGCQVVSGVFKHALTSLGYHRVVEIPEGATKINITEMYKSNKKKSHLKPATRGSQFSSVKVCSVPAACKLLGTPGRARQPVPAPRELEHDKNSPHCAYLSLYLTSLAQSSWRVFSLFSYVLIYLFSKYLAFNTLFALKRMALQRDRKEKTRAWCIFIKLCGREIQILPGPV

SEQ ID NO: 13227 - protein, 658 aa, Homo sapiens
MFVSYLILTLLHVQTAVLARPGGESIGCDDYLGSDKVVDKCGVCGGDNTGCQVVSGVFKHALTSLGYHRVVEIPEGATKINITEMYKSNNYLALRSRSGRSIINGNWAIDRPGKYEGGGTMFTYKRPNEISSTAGESFLAEGPTNEILDVYMIHQQPNPGVHYEYVIMGTNAISPQVPPHRRPGEPFNGQMVTEGRSQEEGEQKGRNEEKEDLRGEAPEMFTSESAQTFPVRHPDRFSPHRPDNLVPPAPQPPRRSRDHNWKQLGTTECSTTCGKGSQYPIFRCVHRSTHEEAPESYCDSSMKPTPEEEPCNIFPCPAFWDIGEWSECSKTCGLGMQHRQVLCRQVYANRSLTVQPYRCQHLEKPETTSTCQLKICSEWQIRTDWTSCSVPCGVGQRTRDVKCVSNIGDVVDDEECNMKLRPNDIENCDMGPCAKSWFLTEWSERCSAECGAGVRTRSVVCMTNHVSSLPLEGCGNNRPAEATPCDNGPCTGKVEWFAGSWSQCSIECGSGTQQREVICVRKNADTFEVLDPSECSFLEKPPSQQSCHLKPCGAKWFSTEWSMCSKSCQGGFRVREVRCLSDDMTLSNLCDPQLKPEERESCNPQDCVPEVDENCKDKYYNCNVVVQARLCVYNYYKTACCASCTRVANRQTGFLGSR

SEQ ID NO: 13228 - protein, 101 aa, Homo sapiens
MVSHFMGSLSVLCFLLLLGFQFVCPQPSTQHRKVPQRMAAEGAPEDDGGGGAPGVWGAWGPWSACSRSCSGGVMEQTRPCLPRSYRLRGGQRPGAPARAFA

SEQ ID NO: 13229 - protein, 1018 aa, Homo sapiens
MVSHFMGSLSVLCFLLLLGFQFVCPQPSTQHRKVPQRMAAEGAPEDDGGGGAPGVWGAWGPWSACSRSCSGGVMEQTRPCLPRSYRLRGGQRPGAPARAFADHVVSAVRTSVPLHRSRDETPALAGTDASRQGPTVLRGSRHPQPQGLEVTGDRRSRTRGTIGPGKYGYGKAPYILPLQTDTAHTPQRLRRQKLSSRHSRSQGASSARHGYSSPAHQVPQHGPLYQSDSGPRSGLQAAEAPIYQLPLTHDQGYPAASSLFHSPETSNNHGVGTHGATQSFSQPARSTAISCIGAYRQYKLCNTNVCPESSRSIREVQCASYNNKPFMGRFYEWEPFAEVKGNRKCELNCQAMGYRFYVRQAEKVIDGTPCDQNGTAICVSGQCKSIGCDDYLGSDKVVDKCGVCGGDNTGCQVVSGVFKHALTSLGYHRVVEIPEGATKINITEMYKSNNYLALRSRSGRSIINGNWAIDRPGKYEGGGTMFTYKRPNEISSTAGESFLAEGPTNEILDVYMIHQQPNPGVHYEYVIMGTNAISPQVPPHRRPGEPFNGQMVTEGRSQEEGEQKGRNEEKEDLRGEAPEMFTSESAQTFPVRHPDRFSPHRPDNLVPPAPQPPRRSRDHNWKQLGTTECSTTCGKGSQYPIFRCVHRSTHEEAPESYCDSSMKPTPEEEPCNIFPCPAFWDIGEWSECSKTCGLGMQHRQVLCRQVYANRSLTVQPYRCQHLEKPETTSTCQLKICSEWQIRTDWTSCSVPCGVGQRTRDVKCVSNIGDVVDDEECNMKLRPNDIENCDMGPCAKSWFLTEWSERCSAECGAGVRTRSVVCMTNHVSSLPLEGCGNNRPAEATPCDNGPCTGKVEWFAGSWSQCSIECGSGTQQREVICVRKNADTFEVLDPSECSFLEKPPSQQSCHLKPCGAKWFSTEWSMCSKSCQGGFRVREVRCLSDDMTLSNLCDPQLKPEERESCNPQDCVPEVDENCKDKYYNCNVVVQARLCVYNYYKTACCASCTRVANRQTGFLGSR

SEQ ID NO: 13230 - protein, 37 aa, Homo sapiens
MNLAISIALLLTGLPRAEGDQPNGLPSGPEPSSGLPP

SEQ ID NO: 13231 - protein, 144 aa, Homo sapiens
MNLAISIALLLTVDQSLRLDCRHENTSSSPIQYEFSLTRETKKHVLFGTVGVPEHTYRSRTNFTSKYNMKVLYLSAFTSKDEGTYTCALHHSGHSPPISSQNVTVLRDKLVKCEGISLLAQNTSWLLLLLLSLSLLQATDFMSL

SEQ ID NO: 13232 - protein, 153 aa, Homo sapiens
MNLAISIALLLTVLQVSRGQKVTSLTACLVDQSLRLDCRHENTSSSPIQYEFSLTRETKKHVLFGTVGVPEHTYRSRTNFTSKYNMKVLYLSAFTSKDEGTYTCALHHSGHSPPISSQNVTVLRDKLVKCEGISLLAQNTSWLLLLLLSLSLL

SEQ ID NO: 13233 - protein, 161 aa, Homo sapiens
MNLAISIALLLTVLQVSRGQKVTSLTACLVDQSLRLDCRHENTSSSPIQYEFSLTRETKKHVLFGTVGVPEHTYRSRTNFTSKYNMKVLYLSAFTSKDEGTYTCALHHSGHSPPISSQNVTVLRDKLVKCEGISLLAQNTSWLLLLLLSLSLLQATDFMSL

SEQ ID NO: 13234 - protein, 161 aa, Homo sapiens; identical to SEQ ID NO: 13233

SEQ ID NO: 13235 - protein, 165 aa, Homo sapiens
MNLAISIALLLTVLQVSRGQKVTSLTACLVDQSLRLDCRHENTSSSPIQYEFSLTRETKKHVLFGTVGVPEHTYRSRTNFTSKYNMKVLYLSAFTSKDEGTYTCALHHSGHSPPISSQNVTVLRGHGFHVPVTGGAHGGDRKPQVPVQRSYFSESADPLPPIPQT

SEQ ID NO: 13236 - protein, 1138 aa, Homo sapiens
MVWRVPPFLLPILFLASHVGAAVDLTLLANLRLTDPQRFFLTCVSGEAGAGRGSDAWGPPLLLEKDDRIVRTPPGPPLRLARNGSHQVTLRGFSKPSDLVGVFSCVGGAGARRTRVIYVHNSPGAHLLPDKVTHTVNKGDTAVLSARVHKEKQTDVIWKSNGSYFYTLDWHEAQDGRFLLQLPNVQPPSSGIYSATYLEASPLGSAFFRLIVRGCGAGRWGPGCTKECPGCLHGGVCHDHDGECVCPPGFTGTRCEQACREGRFGQSCQEQCPGISGCRGLTFCLPDPYGCSCGSGWRGSQCQEACAPGHFGADCRLQCQCQNGGTCDRFSGCVCPSGWHGVHCEKSDRIPQILNMASELEFNLETMPRINCAAAGNPFPVRGSIELRKPDGTVLLSTKAIVEPEKTTAEFEVPRLVLADSGFWECRVSTSGGQDSRRFKVNVKVPPVPLAAPRLLTKQSRQLVVSPLVSFSGDGPISTVRLHYRPQDSTMDWSTIVVDPSENVTLMNLRPKTGYSVRVQLSRPGEGGEGAWGPPTLMTTDCPEPLLQPWLEGWHVEGTDRLRVSWSLPLVPGPLVGDGFLLRLWDGTRGQERRENVSSPQARTALLTGLTPGTHYQLDVQLYHCTLLGPASPPAHVLLPPSGPPAPRHLHAQALSDSEIQLTWKHPEALPGPISKYVVEVQVAGGAGDPLWIDVDRPEETSTIIRGLNASTRYLFRMRASIQGLGDWSNTVEESTLGNGLQAEGPVQESRAAEEGLDQQLILAVVGSVSATCLTILAALLTLVCIRRSCLHRRRTFTYQSGSGEETILQFSSGTLTLTRRPKLQPEPLSYPVLEWEDITFEDLIGEGNFGQVIRAMIKKDGLKMNAAIKMLKEYASENDHRDFAGELEVLCKLGHHPNIINLLGACKNRGYLYIAIEYAPYGNLLDFLRKSRVLETDPAFAREHGTASTLSSRQLLRFASDAANGMQYLSEKQFIHRDLAARNVLVGENLASKIADFGLSRGEEVYVKKTMGRLPVRWMAIESLNYSVYTTKSDVWSFGVLLWEIVSLGGTPYCGMTCAELYEKLPQGYRMEQPRNCDDEVYELMRQCWRDRPYERPPFAQIALQLGRMLEARKAYVNMSLFENFTYAGIDATAEEA

SEQ ID NO: 13237 - protein, 379 aa, Homo sapiens
MVWRVPPFLLPILFLASHVGAAVDLTLLANLRLTDPQRFFLTCVSGEAGAGRGSDAWGPPLLLEKDDRIVRTPPGPPLRLARNGSHQVTLRGFSKPSDLVGVFSCVGGAGARRTRVIYVHNSPGAHLLPDKVTHTVNKGDTAVLSARVHKEKQTDVIWKSNGSYFYTLDWHEAQDGRFLLQLPNVQPPSSGIYSATYLEASPLGSAFFRLIVRGCGAGRWGPGCTKECPGCLHGGVCHDHDGECVCPPGFTGTRCEQACREGRFGQSCQEQCPGISGCRGLTFCLPDPYGCSCGSGWRGSQCQEACAPGHFGADCRLQCQCQNGGTCDRFSGCVCPSGWHGVHCEKSGWRDWVDTSTEKQNTDEGRFGGHVSAPVGAPG

SEQ ID NO: 13238 - protein, 71 aa, Homo sapiens
MEVPPPAPRSFLCRALCLFPRVFAAEAVTADSEVLEERQKRLPYVPEPYYPESGWDRLRELFGKDCHGKSF

SEQ ID NO: 13239 - protein, 175 aa, Homo sapiens
MEVPPPAPRSFLCRALCLFPRVFAAEAVTADSEVLEERQKRLPYVPEPYYPESGWDRLRELFGKDEQQRISKDLANICKTAATAGIIGWVYGGIPAFIHAKQQYIEQSQAEIYHNRFDAVQSAHRAATRGFIRYGWRWGWRTAVFVTIFNTVNTSLNVYRNKDALSHFVIAGALL

SEQ ID NO: 13240 - protein, 285 aa, Homo sapiens
MEVPPPAPRSFLCRALCLFPRVFAAEAVTADSEVLEERQKRLPYVPEPYYPESGWDRLRELFGKDEQQRISKDLANICKTAATAGIIGWVYGGIPAFIHAKQQYIEQSQAEIYHNRFDAVQSAHRAATRGFIRYGWRWGWRTAVFVTIFNTVNTSLNVYRNKDALSHFVIAGAVTGSLFRINVGLRGLVAGGIIGALLGTPVGGLLMAFQKYSGETVQERKQKDRKALHELKLEEWKGRLQVTEHLPEKIESSLQEDEPENDAKKIEALLNLPRNPSVIDKQDKD

SEQ ID NO: 13241 - protein, 90 aa, Homo sapiens
MEVPPPAPRSFLCRALCLFPRVFAAEAVTADSEVLEERQKRLPYVPEPYYPESGWDRLRELFGKDNLHIVLPHEASFVMAGAGVGELQCL

SEQ ID NO: 13242 - protein, 151 aa, Homo sapiens
MEVPPPAPRSFLCRALCLFPRVFAAEAVTADSEVLEERQKRLPYVPEPYYPESGWDRLRELFGKDTPVGGLLMAFQKYSGETVQERKQKDRKALHELKLEEWKGRLQVTEHLPEKIESSLQEDEPENDAKKIEALLNLPRNPSVIDKQDKD

SEQ ID NO: 13243 - protein, 150 aa, Homo sapiens
MEVPPPAPRSFLCRALCLFPRVFAAEAVTADSEVLEERQKRLPYVPEPYYPESGWDRLRELFGKDTVNTSLNVYRNKDALSHFVIAGAVTGSLFRINVGLRGLVAGGIIGALLGTPVGGLLMAFQKYSGETVQERKQKDRKALHELKLEE

SEQ ID NO: 13244 - protein, 65 aa, Homo sapiens
MEVPPPAPRSFLCRALCLFPRVFAAEAVTADSEVLEERQKRLPYVPEPYYPESGWDRLRELFGKE

SEQ ID NO: 13245 - protein, 38 aa, Homo sapiens
  VARIANT 1: note = misc_feature - Xaa can be any naturally occurring amino acid
XTADSEVLEERQKRLPYVPEPYYPESGWDRLRELFGKE

SEQ ID NO: 13246 - protein, 136 aa, Homo sapiens
MAPFEPLASGILLLLWLIAPSRACTCVPPHPQTAFCNSDLVIRAKFVGTPEVNQTTLYQRYEIKMTKMYKGFQALGDAADIRFVYTPAMESVCGYFHRSHNRSEEFLIAGEAPSPRPVPHQPVPGARPSNHEGARL

SEQ ID NO: 13247 - protein, 207 aa, Homo sapiens
MAPFEPLASGILLLLWLIAPSRACTCVPPHPQTAFCNSDLVIRAKFVGTPEVNQTTLYQRYEIKMTKMYKGFQALGDAADIRFVYTPAMESVCGYFHRSHNRSEEFLIAGKLQDGLLHITTCSFVAPWNSLSLAQRRGFTKTYTVGCEECTVFPCLSIPCKLQSGTHCLWTDQLLQGSEKGFQSRHLACLPREPGLCTWQSLRSQIA

SEQ ID NO: 13248 - protein, 96 aa, Homo sapiens [sequence omitted]

SEQ ID NO: 13249 - protein, 143 aa, Homo sapiens
MTKMYKGFQALGDAADIRFVYTPAMESVCGYFHRSHNRSEEFLIAGKLQDGLLHITTCSFVAPWNSLSLAQRRGFTKTYTVGCEECTVFPCLSIPCKLQSGTHCLWTDQLLQGSEKGFQSRHLACLPREPGLCTWQSLRSQIA

SEQ ID NO: 13250 - protein, 165 aa, Homo sapiens
  VARIANT 1: note = misc_feature - Xaa can be any naturally occurring amino acid
XPRALCHTNQSLGRGLATTRGRGSDGNGPTGNGDHPNFSLSEGRAFGSLAAQPITSCLSVPAPPFSLGKLQDGLLHITTCSFVAPWNSLSLAQRRGFTKTYTVGCEECTVFPCLSIPCKLQSGTHCLWTDQLLQGSEKGFQSRHLACLPREPGLCTWQSLRSQIA

SEQ ID NO: 13251 - protein, 143 aa, Homo sapiens
MFKGPEKDIEFIYTAPSSAVCGVSLDVGGKKEYLIAGKAEGDGKMHITLCDFIVPWDTLSTTQKKSLNHRYQMGCECKITRCPMIPCYISSPDECLWMDWVTEKNINGHQAKFFACIKRSDGSCAWYRGAAPPKQEFLDIEDP

SEQ ID NO: 13252 - protein, 143 aa, Homo sapiens; identical to SEQ ID NO: 13251

SEQ ID NO: 13253 - protein, 143 aa, Homo sapiens; identical to SEQ ID NO: 13251

SEQ ID NO: 13254 - protein, 109 aa, Homo sapiens
MFKGPEKDIEFIYTAPSSAVCGVSLDVGGKKEYLIAGKAEGDGKMHITLCDFIVPWDTLSTTQKKSLNHRYQMGCECKVSRSCLCWSIASSQCLQMDGRDFDPWLSRTR

SEQ ID NO: 13255 - protein, 220 aa, Homo sapiens
MGAAARTLRLALGLLLLATLLRPADACSCSPVHPQQAFCNADVVIRAKAVSEKEVDSGNDIYGNPIKRIQYEIKQIKMFKGPEKDIEFIYTAPSSAVCGVSLDVGGKKEYLIAGKAEGDGKMHITLCDFIVPWDTLSTTQKKSLNHRYQMGCECKITRCPMIPCYISSPDECLWMDWVTEKNINGHQAKFFACIKRSDGSCAWYRGAAPPKQEFLDIEDP

SEQ ID NO: 13256 - protein, 211 aa, Homo sapiens
MTPWLGLIVLLGSWSLGDWGAEACTCSPSHPQDAFCNSDIVIRAKVVGKKLVKEGPFGTLVYTIKQMKMYRGFTKMPHVQYIHTEASESLCGLKLEVNKYQYLLTGRVYDGKMYTGLCNFVERWDQLTLSQRKGLNYRYHLGCNCKIKSCYYLPCFVTSKNECLWTDMLSNFGYPGYQSKHYACIRQKGGYCSWYRGWAPPDKSIINATDP

SEQ ID NO: 13257 - protein, 224 aa, Homo sapiens
MPGSPRPAPSWVLLLRLLALLRPPGLGEACSCAPAHPQQHICHSALVIRAKISSEKVVPASADPADTEKMLRYEIKQIKMFKGFEKVKDVQYIYTPFDSSLCGVKLEANSQKQYLLTGQVLSDGKVFIHLCNYIEPWEDLSLVQRESLNHHYHLNCGCQITTCYTVPCTISAPNECLWTDWLLERKLYGYQAQHYVCMKHVDGTCSWYRGHLPLRKEFVDIVQP

SEQ ID NO: 13258 - protein, 362 aa, Homo sapiens
MHGGRIYPVLGTYWDNCNRCTCQENRQWQCDQEPCLVDPDMIKAINQGNYGWQAGNHSAFWGMTLDEGIRYRLGTIRPSSSVMNMHEIYTVLNPGEVLPTAFEASEKWPNLIHEPLDQGNCAGSWAFSTAAVASDRVSIHSLGHMTPVLSPQNLLSCDTHQQQGCRGGRLDGAWWFLRRRGVVSDHCYPFSGRERDEAGPAPPCMMHSRAMGRGKRQATAHCPNSYVNNNDIYQVTPVYRLGSNDKEIMKELMENGPVQALMEVHEDFFLYKGGIYSHTPVSLGRPERYRRHGTHSVKITGWGEETLPDGRTLKYWTAANSWGPAWGERGHFRIVRGVNECDIESFVLGVWGRVGMEDMGHH

SEQ ID NO: 13259 - protein, 467 aa, Homo sapiens
MWRCPLGLLLLLPLAGHLALGAQQGRGRRELAPGLHLRGIRDAGGRYCQEQDLCCRGRADDCALPYLGAICYCDLFCNRTVSDCCPDFWDFCLGVPPPFPPIQGCMHGGRIYPVLGTYWDNCNRCTCQENRQWQCDQEPCLVDPDMIKAINQGNYGWQAGNHSAFWGMTLDEGIRYRLGTIRPSSSVMNMHEIYTVLNPGEVLPTAFEASEKWPNLIHEPLDQGNCAGSWAFSTAAVASDRVSIHSLGHMTPVLSPQNLLSCDTHQQQGCRGGRLDGAWWFLRRRGVVSDHCYPFSGRERDEAGPAPPCMMHSRAMGRGKRQATAHCPNSYVNNNDIYQVTPVYRLGSNDKEIMKELMENGPVQALMEVHEDFFLYKGGIYSHTPVSLGRPERYRRHGTHSVKITGWGEETLPDGRTLKYWTAANSWGPAWGERGHFRIVRGVNECDIESFVLGVWGRVGMEDMGHH

SEQ ID NO: 13260 - protein, 436 aa, Homo sapiens
MWRCPLGLLLLLPLAGHLALGAQQGRGRRELAPGLHLRGIRDAGGRYCQEQDLCCRGRADDCALPYLGAICYCDLFCNRTVSDCCPDFWDFCLGVPPPFPPIQGCMHGGRIYPVLGTYWDNCNRCWQAGNHSAFWGMTLDEGIRYRLGTIRPSSSVMNMHEIYTVLNPGEVLPTAFEASEKWPNLIHEPLDQGNCAGSWAFSTAAVASDRVSIHSLGHMTPVLSPQNLLSCDTHQQQGCRGGRLDGAWWFLRRRGVVSDHCYPFSGRERDEAGPAPPCMMHSRAMGRGKRQATAHCPNSYVNNNDIYQVTPVYRLGSNDKEIMKELMENGPVQALMEVHEDFFLYKGGIYSHTPVSLGRPERYRRHGTHSVKITGWGEETLPDGRTLKYWTAANSWGPAWGERGHFRIVRGVNECDIESFVLGVWGRVGMEDMGHH

SEQ ID NO: 13261 - protein, 85 aa, Homo sapiens
GGRALKENPVDLPATEQKENCLDCYMDPLRLSLLPPRARKPVCPPSLCSSVITIGDLVLDSDEEENGQGEGKVSGKEQKAGKGDG

SEQ ID NO: 13262 - protein, 71 aa, Homo sapiens
MATPLVAGPAALRFAAAASWQVVRGRCVEHFPRVLEFLRSLRAVAPGLVRYRHHERLCMGLKAKSALLLTQ

SEQ ID NO: 13263 - protein, 416 aa, Homo sapiens
MATPLVAGPAALRFAAAASWQVVRGRCVEHFPRVLEFLRSLRAVAPGLVRYRHHERLCMGLKAKTKQDLRKILEAQETFYQQVKQLSEAPVDLASKLQELEQEYGEPFLAAMEKLLFEYLCQLEKALPTPQAQQLQDVLSWMQPGVSITSSLAWRQYGVDMGWLLPECSVTDSVNLAEPMEQNPPQQQRLALHNPLPKAKPGTHLPQGPSSRTHPEPLAGRHFNLAPLGRRRVQSQWASTRGGHKERPTVMLFPFRNLGSPTQVISKPESKEEHAIYTADLAMGTRAASTGKSKSPCQTLGGRALKENPVDLPATEQKENCLDCYMDPLRLSLLPPRARKPVCPPSLCSSVITIGDLVLDSDEEENGQGEGKESLENYQKTKFDTLIPTLCEYLPPSGHGAIPVSSCDCRDSSRPL

SEQ ID NO: 13264 - protein, 451 aa, Homo sapiens
MATPLVAGPAALRFAAAASWQVVRGRCVEHFPRVLEFLRSLRAVAPGLVRYRHHERLCMGLKAKVVVELILQGRPWAQVLKALNHHFPESGPIVRDPKATKQDLRKILEAQETFYQQVKQLSEAPVDLASKLQELEQEYGEPFLAAMEKLLFEYLCQLEKALPTPQAQQLQDVLSWMQPGVSITSSLAWRQYGVDMGWLLPECSVTDSVNLAEPMEQNPPQQQRLALHNPLPKAKPGTHLPQGPSSRTHPEPLAGRHFNLAPLGRRRVQSQWASTRGGHKERPTVMLFPFRNLGSPTQVISKPESKEEHAIYTADLAMGTRAASTGKSKSPCQTLGGRALKENPVDLPATEQKENCLDCYMDPLRLSLLPPRARKPVCPPSLCSSVITIGDLVLDSDEEENGQGEGKESLENYQKTKFDTLIPTLCEYLPPSGHGAIPVSSCDCRDSSRPL

SEQ ID NO: 13265 - protein, 354 aa, Homo sapiens
MATPLVAGPAALRFAAAASWQVVRGRCVEHFPRVLEFLRSLRAVAPGLVRYRHHERLCMGLKAKVVVELILQGRPWAQVLKALNHHFPESGPIVRDPKATKQDLRKILEAQETFYQQVKQLSEAPVDLASKLQELEQEYGEPFLAAMEKLLFEYLCQLEKALPTPQAQQLQDVLSWMQPGVSITSSLAWRQYGVDMGWLLPECSVTDSVNLAEPMEQNPPQQQRLALHNPLPKAKPGTHLPQGPSSRTHPEPLAGRHFNLAPLGRRRVQSQWASTRGGHKERPTVMLFPFRNLGSPTQVISKPESKEEHAIYTADLAMGTRAASTGKSKSPCQTLGGRALKENPVDLPATEQKE

SEQ ID NO: 13266 - protein, 451 aa, Homo sapiens; identical to SEQ ID NO: 13264

SEQ ID NO: 13267 - protein, 290 aa, Homo sapiens
MATPLVAGPAALRFAAAASWQVVRGRCVEHFPRVLEFLRSLRAVAPGLVRYRHHERLCMGLKAKVVVELILQGRPWAQVLKALNHHFPESGPIVRDPKATKQDLRKILEAQETFYQQVKQLSEAPVDLASKLQLQDVLSWMQPGVSITSSLAWRQYGVDMGWLLPECSVTDSVNLAEPMEQNPPQQQRLALHNPLPKAKPGTHLPQGPSSRTHPEPLAGRHFNLAPLGRRRVQSQWASTRGGHKERPTVMLFPFRNLGSPTQVISKPESKEEHAIYTADLAMGTRAASTG

SEQ ID NO: 13268 - protein, 140 aa, Homo sapiens
MATPLVAGPAALRFAAAASWQVVRGRCVEHFPRVLEFLRSLRAVAPGLVRYRHHERLCMGLKAKVVVELILQGRPWAQVLKALNHHFPESGPIVRDPKATKQDLRKILEAQETFYQQVKQLSEAPVDLASKLQSALLLTQ

SEQ ID NO: 13269 - protein, 140 aa, Homo sapiens; identical to SEQ ID NO: 13268

SEQ ID NO: 13270 - protein, 146 aa, Homo sapiens
MEKLLFEYLCQLEKALPTPQAQQLQDVLSWMQPGVSITSSLAWRQYGVDMGWLLPECSVTDSVNLAEPMEQNPPQQQRLALHNPLPKAKPGTHLPQGPSSRTHPEPLAGRHFNLAPLGRRRVQSQWASTRGGHKERPTVMLFPFRN

SEQ ID NO: 13271 - protein, 1015 aa, Homo sapiens
MPRATALGALVSLLLLLPLPRGAGGLGERPDATADYSELDGEEGTEQQLEHYHDPCKAAVFWGDIALDEDDLKLFHIDKARDWTKQTVGATGHSTGGLEEQASESSPDTTAMDTGTKEAGKDGRENTTLLHSPGTLHAAAKTFSPRVRRATTSRTERIWPGGVIPYVIGGNFTGSQRAIFKQAMRHWEKHTCVTFIERTDEESFIVFSYRTCGCCSYVGRRGGGPQAISIGKNCDKFGIVAHELGHVVGFWHEHTRPDRDQHVTIIRENIQPGQEYNFLKMEAGEVSSLGETYDFDSIMHYARNTFSRGVFLDTILPRQDDNGVRPTIGQRVRLSQGDIAQARKLYKCPACGETLQDTTGNFSAPGFPNGYPSYSHCVWRISVTPGEKIVLNFTSMDLFKSRLCWYDYVEVRDGYWRKAPLLGRFCGDKIPEPLVSTDSRLWVEFRSSSNILGKGFFAAYEATCGGDMNKDAGQIQSPNYPDDYRPSKECVWRITVSEGFHVGLTFQAFEIERHDSCAYDYLEVRDGPTEESALIGHFCGYEKPEDVKSSSNRLWMKFVSDGSINKAGFAANFFKEVDECSWPDHGGCEHRCVNTLGSYKCACDPGYELAADKKMCEVACGGFITKLNGTITSPGWPKEYPTNKNCVWQVVAPAQYRISLQFEVFELEGNDVCKYDFVEVRSGLSPDAKLHGRFCGSETPEVITSQSNNMRVEFKSDNTVSKRGFRAHFFSDKDECAKDNGGCQHECVNTFGSYLCRCRNGYWLHENGHDCKEAGCAHKISSVEGTLASPNWPDKYPSRRECTWNISSTAGHRVKLTFNEFEIEQHQECAYDHLEMYDGPDSLAPILGRFCGSKKPDPTVASGSSMFLRFYSDASVQRKGFQAVHSTECGGRLKAEVQTKELYSHAQFGDNNYPSEARCDWVIVAEDGYGVELTFRTFEVEEEADCGYDYMEAYDGYDSSAPRLGRFCGSGPLEEIYSAGDSLMIRFRTDDTINKKGFHARYTSTKFQDALHMKK

SEQ ID NO: 13272 - protein, 23 aa, Homo sapiens
MTSIFHFAIIFMLILQIRIQLSE

SEQ ID NO: 13273 - protein, 48 aa, Homo sapiens
MTSIFHFAIIFMLILQIRIQLSEESEFLVDRSKNGLIHVPKDLSQKTT

SEQ ID NO: 13274 - protein, 90 aa, Homo sapiens
MTSIFHFAIIFMLILQIRIQLSEESEFLVDRSKNGLIHVPKDLSQKTTILNISQNYISELWTSDILSLSKLRILIISHNRIQYLDISVFK

SEQ ID NO: 13275 - protein, 161 aa, Homo sapiens
MTSIFHFAIIFMLILQIRIQLSEESEFLVDRSKNGLIHVPKDLSQKTTILNISQNYISELWTSDILSLSKLRILIISHNRIQYLDISVFKFNQELEYLDLSHNKLVKISCHPTVNLKHLDLSFNAFDALPICKEFGNMSQLKFLGLSTTHLEKSSVLPIAH

SEQ ID NO: 13276 - protein, 786 aa, Homo sapiens
MTSIFHFAIIFMLILQIRIQLSEESEFLVDRSKNGLIHVPKDLSQKTTILNISQNYISELWTSDILSLSKLRILIISHNRIQYLDISVFKFNQELEYLDLSHNKLVKISCHPTVNLKHLDLSFNAFDALPICKEFGNMSQLKFLGLSTTHLEKSSVLPIAHLNISKVLLVLGETYGEKEDPEGLQDFNTESLHIVFPTNKEFHFILDVSVKTVANLELSNIKCVLEDNKCSYFLSILAKLQTNPKLSNLTLNNIETTWNSFIRILQLVWHTTVWYFSISNVKLQGQLDFRDFDYSGTSLKALSIHQVVSDVFGFPQSYIYEIFSNMNIKNFTVSGTRMVHMLCPSKISPFLHLDFSNNLLTDTVFENCGHLTELETLILQMNQLKELSKIAEMTTQMKSLQQLDISQNSVSYDEKKGDCSWTKSLLSLNMSSNILTDTIFRCLPPRIKVLDLHSNKIKSIPKQVVKLEALQELNVAFNSLTDLPGCGSFSSLSVLIIDHNSVSHPSADFFQSCQKMRSIKAGDNPFQCTCELGEFVKNIDQVSSEVLEGWPDSYKCDYPESYRGTLLKDFHMSELSCNITLLIVTIVATMLVLAVTVTSLCSYLDLPWYLRMVCQWTQTRRRARNIPLEELQRNLQFHAFISYSGHDSFWVKNELLPNLEKEGMQICLHERNFVPGKSIVENIITCIEKSYKSIFVLSPNFVQSEWCHYELYFAHHNLFHEGSNSLILILLEPIPQYSIPSSYHKLKSLMARRTYLEWPKEKSKRGLFWANLRAAINIKLTEQAKK

SEQ ID NO: 13277 - protein, 786 aa, Homo sapiens; identical to SEQ ID NO: 13276

SEQ ID NO: 13278 - protein, 627 aa, Homo sapiens
MLDLSYNNLNVVGNDSFAWLPQLEYFFLEYNNIQHLFSHSLHGLFNVRYLNLKRSFTKQSISLASLPKIDDFSFQWLKCLEHLNMEDNDIPGIKSNMFTGLINLKYLSLSNSFTSLRTLTNETFVSLAHSPLHILNLTKNKISKIESDAFSWLGHLEVLDLGLNEIGQELTGQEWRGLENIFEIYLSYNKYLQLTRNSFALVPSLQRLMLRRVALKNVDSSPSPFQPLRNLTILDLSNNNIANINDDMLEGLEKLEILDLQHNNLARLWKHANPGGPIYFLKGLSHLHILNLESNGFDEIPVEVFKDLFELKIIDLGLNNLNTLPASVFNNQVSLKSLNLQKNLITSVEKKVFGPAFRNLTELDMRFNPFDCTCESIAWFVNWINETHTNIPELSSHYLCNTPPHYHGFPVRLFDTSSCKDSAPFELFFMINTSILLIFIFIVLLIHFEGWRISFYWNVSVHRVLGFKEIDRQTEQFEYAAYIIHAYKDKDWVWEHFSSMEKEDQSLKFCLEERDFEAGVFELEAIVNSIKRSRKIIFVITHHLLKDPLCKRFKVHHAVQQAIEQNLDSIILVFLEEIPDYKLNHALCLRRGMFKSHCILNWPVQKERIGAFRHKLQVALGSKNSVH

SEQ ID NO: 13279 - protein, 904 aa, Homo sapiens
MRQTLPCIYFWGGLLPFGMLCASSTTKCTVSHEVADCSHLKLTQVPDDLPTNITVLNLTHNQLRRLPAANFTRYSQLTSLDVGFNTISKLEPELCQKLPMLKVLNLQHNELSQLSDKTFAFCTNLTELHLMSNSIQKIKNNPFVKQKNLITLDLSHNGLSSTKLGTQVQLENLQELLLSNNKIQALKSEELDIFANSSLKKLELSSNQIKEFSPGCFHAIGRLFGLFLNNVQLGPSLTEKLCLELANTSIRNLSLSNSQLSTTSNTTFLGLKWTNLTMLDLSYNNLNVVGNDSFAWLPQLEYFFLEYNNIQHLFSHSLHGLFNVRYLNLKRSFTKQSISLASLPKIDDFSFQWLKCLEHLNMEDNDIPGIKSNMFTGLINLKYLSLSNSFTSLRTLTNETFVSLAHSPLHILNLTKNKISKIESDAFSWLGHLEVLDLGLNEIGQELTGQEWRGLENIFEIYLSYNKYLQLTRNSFALVPSLQRLMLRRVALKNVDSSPSPFQPLRNLTILDLSNNNIANINDDMLEGLEKLEILDLQHNNLARLWKHANPGGPIYFLKGLSHLHILNLESNGFDEIPVEVFKDLFELKIIDLGLNNLNTLPASVFNNQVSLKSLNLQKNLITSVEKKVFGPAFRNLTELDMRFNPFDCTCESIAWFVNWINETHTNIPELSSHYLCNTPPHYHGFPVRLFDTSSCKDSAPFELFFMINTSILLIFIFIVLLIHFEGWRISFYWNVSVHRVLGFKEIDRQTEQFEYAAYIIHAYKDKDWVWEHFSSMEKEDQSLKFCLEERDFEAGVFELEAIVNSIKRSRKIIFVITHHLLKDPLCKRFKVHHAVQQAIEQNLDSIILVFLEEIPDYKLNHALCLRRGMFKSHCILNWPVQKERIGAFRHKLQVALGSKNSVH

SEQ ID NO: 13280 - protein, 351 aa, Homo sapiens
MRQTLPCIYFWGGLLPFGMLCASSTTKCTVSHEVADCSHLKLTQVPDDLPTNITVLNLTHNQLRRLPAANFTRYSQLTSLDVGFNTISKLEPELCQKLPMLKVLNLQHNELSQLSDKTFAFCTNLTELHLMSNSIQKIKNNPFVKQKNLITLDLSHNGLSSTKLGTQVQLENLQELLLSNNKIQALKSEELDIFANSSLKKLELSSNQIKEFSPGCFHAIGRLFGLFLNNVQLGPSLTEKLCLELANTSIRNLSLSNSQLSTTSNTTFLGLKWTNLTMLDLSYNNLNVWLKCLEHLNMEDNDIPGIKSNMFTGLINLKYLSLSNSFTSLRTLTNETFVSLAHSPLHILNLT

SEQ ID NO: 13281 - protein, 45 aa, Homo sapiens
MKKCLLPVLITCMQTAICKDRMMMIMILLVNYRPDEFIECEDPVD

SEQ ID NO: 13282 - protein, 121 aa, Homo sapiens
MKKCLLPVLITCMQTAICKDRMMMIMILLVNYRPDEFIECEDPVDHVGNATASQELGYGCLKFGGQAYSDVEHTSVQCHALDGIECASPRTFLRENKPCIKYTGHYFITTLLYSFFLGCFG

SEQ ID NO: 13283 - protein, 171 aa, Homo sapiens
MKKCLLPVLITCMQTAICKDRMMMIMILLVNYRPDEFIECEDPVDHVGNATASQELGYGCLKFGGQAYSDVEHTSVQCHALDGIECASPRTFLRENKPCIKYTGHYFITTLLYSFFLGCFGVDRFCLGHTGTAVGKLLTLGGLGIWWFVDLILLITGGLMPSDGSNWCTVY

SEQ ID NO: 13284 - protein, 171 aa, Homo sapiens; identical to SEQ ID NO: 13283

SEQ ID NO: 13285 - protein, 63 aa, Homo sapiens
MKKCLLPVLITCMQTAICKDRMMMIMILLVNYRPDEFIECEDPVDHVGNATASQELGYGCLKV

SEQ ID NO: 13286 - protein, 214 aa, Homo sapiens
MVLGGCPVSYLLLCGQAALLLGNLLLLHCVSRSHSQNATAEPELTSAGAAQPEGPGGAASWEYGDPHSPVILCSYLPDEFIECEDPVDHVGNATASQELGYGCLKFGGQAYSDVEHTSVQCHALDGIECASPRTFLRENKPCIKYTGHYFITTLLYSFFLGCFGVDRFCLGHTGTAVGKLLTLGGLGIWWFVDLILLITGGLMPSDGSNWCTVY

SEQ ID NO: 13287 - protein, 247 aa, Homo sapiens
MAGGVLPLRGLRALCRVLLFLSQFCILSGGEQSQALAQSIKDPGPTRTFTVVPRAAESTEIPPYVMKCPSNGLCSRLPADCIDCTTNFSCTYGKPVTFDCAVKPSVTCVDQDFKSQKNFIINMTCRFCWQLPETDYECTNSTSCMTVSCPRQRYPANCTVRDHVHCLGNRTFPKMLYCNWTGGYKWSTALALSITLGGFGADRFYLGQWREGLGKLFSFGGLGIWTLIDVLLIGVGYVGPADGSLYI

SEQ ID NO: 13288 - protein, 209 aa, Homo sapiens
MAGGVLPLRGLRALCRVLLFLSQFCILSGGEQSQALAQSIKDPGPTRTFTVVPRAAESTEIPPYVMKCPSNGLCSRLPADCIDCTTNFSCTYGKPVTFDCAVKPSVTCVDQDFKSQKNFIINMTCRFCWQLPETDYECTNSTSCMTVSCPRQRYPANCTVRDHVHCLGNRTFPKMLYCNWTGGYKWSTALALSLQAQVGLHVQLTVGLH

SEQ ID NO: 13289 - protein, 221 aa, Homo sapiens
MAGGVLPLRGLRALCRVLLFLSQFCILSGGESTEIPPYVMKCPSNGLCSRLPADCIDCTTNFSCTYGKPVTFDCAVKPSVTCVDQDFKSQKNFIINMTCRFCWQLPETDYECTNSTSCMTVSCPRQRYPANCTVRDHVHCLGNRTFPKMLYCNWTGGYKWSTALALSITLGGFGADRFYLGQWREGLGKLFSFGGLGIWTLIDVLLIGVGYVGPADGSLYI

SEQ ID NO: 13290 - protein, 183 aa, Homo sapiens
MAGGVLPLRGLRALCRVLLFLSQFCILSGGESTEIPPYVMKCPSNGLCSRLPADCIDCTTNFSCTYGKPVTFDCAVKPSVTCVDQDFKSQKNFIINMTCRFCWQLPETDYECTNSTSCMTVSCPRQRYPANCTVRDHVHCLGNRTFPKMLYCNWTGGYKWSTALALSLQAQVGLHVQLTVGLH

SEQ ID NO: 13291 - protein, 42 aa, Homo sapiens
MAGGVLPLRGLRALCRVLLFLSQFCILSGGGESKAGFSAGWG

SEQ ID NO: 13292 - protein, 182 aa, Homo sapiens
MKCPSNGLCSRLPADCIDCTTNFSCTYGKPVTFDCAVKPSVTCVDQDFKSQKNFIINMTCRFCWQLPETDYECTNSTSCMTVSCPRQRYPANCTVRDHVHCLGNRTFPKMLYCNWTGGYKWSTALALSITLGGFGADRFYLGQWREGLGKLFSFGGLGIWTLIDVLLIGVGYVGPADGSLYI

SEQ ID NO: 13293 - protein, 21 aa, Homo sapiens
  VARIANT 1: note = misc_feature - Xaa can be any naturally occurring amino acid
XQFCILSGGGESKAGFSAGWG

SEQ ID NO: 13294 - protein, 161 aa, Homo sapiens
  VARIANT 1: note = misc_feature - Xaa can be any naturally occurring amino acid
XSTEIPPYVMKCPSNGLCSRLPADCIDCTTNFSCTYGKPVTFDCAVKPSVTCVDQDFKSQKNFIINMTCRFCWQLPETDYECTNSTSCMTVSCPRQRYPANCTVRDHVHCLGNRTFPKMLYCNWTGGYKWSTALALRVGLFIDTVTTPLHSSLSHRARHCL

SEQ ID NO: 13295 - protein, 152 aa, Homo sapiens
ETTIKFAPANLGYARGVDPPPCDAGTDQDSRWRLQYDVYQYFLPENDLTEEMLLKHLQRMVSVPQVKASALKVVTLTANDKTSVSFSSLPGQGVIYNVIVWDPFLNTSAAYIPAHTYACSFEAGEGSCASLAVLYLLLCLSTSSPSFITGLF

SEQ ID NO: 13296 - protein, 81 aa, Homo sapiens
FYILITRLTPIKYDGNLKIFHDDGVFWVTFSCIAILIPVVFMGCLRILNILTCGVIGSYSVVLAIDSYWSTSLSYITLNVL

SEQ ID NO: 13297 - protein, 37 aa, Homo sapiens
MAILLSYSERDPVPGGCNLEFDLDIDPNIYLEYNFFE

SEQ ID NO: 13298 - protein, 66 aa, Homo sapiens
MAILLSYSERDPVPGGCNLEFDLDIDPNIYLEYNFFETTIKFAPANLGYARGVDPPPCDAGTDQDS

SEQ ID NO: 13299 - protein, 86 aa, Homo sapiens
MAILLSYSERDPVPGGCNLEFDLDIDPNIYLEYNFFETTIKFAPANLGYARGVDPPPCDAGTDQDSRWRLQYDVYQYFLPENDLTE

SEQ ID NO: 13300 - protein, 129 aa, Homo sapiens [sequence omitted]

SEQ ID NO: 13301 - protein, 49 aa, Homo sapiens
MGFLQLLVVAVLASEHRVAGAAEVFGNSSEDSPFQFLGNRHCQWTGFHP

SEQ ID NO: 13302 - protein, 570 aa, Homo sapiens
MGFLQLLVVAVLASEHRVAGAAEVFGNSSEGLIEFSVGKFRYFELNRPFPEEAILHDISSNVTFLIFQIHSQYQNTTVSFSPTLLSNSSETGTASGLVFILRPEQSTCTWYLGTSGIQPVQNMAILLSYSERDPVPGGCNLEFDLDIDPNIYLEYNFFETTIKFAPANLGYARGVDPPPCDAGTDQDSRWRLQYDVYQYFLPENDLTEEMLLKHLQRMVSVPQVKASALKVVTLTANDKTSVSFSSLPGQGVIYNVIVWDPFLNTSAAYIPAHTYACSFEAGEGSCASLGRVSSKVFFTLFALLGFFICFFGHRFWKTELFFIGFIIMGFFFYILITRLTPIKYDVNLILTAVTGSVGGMFLVAVWWRFGILSICMLCVGLVLGFLISSVTFFTPLGNLKIFHDDGVFWVTFSCIAILIPVVFMGCLRILNILTCGVIGSYSVVLAIDSYWSTSLSYITLNVLKRALNKDFHRAFTNVPFQTNDFIILAVWGMLAVSGITLQIRRERGRPFFPPHPYKLWKQERERRVTNILDPSYHIPPLRERLYGRLTQIKGLFQKEQPAGERTPLLL

SEQ ID NO: 13303 - protein, 116 aa, Homo sapiens
MGFLQLLVVAVLASEHRVAGAAEVFGNSSEVYLVVGLIEFSVGKFRYFELNRPFPEEAILHDISSNVTFLIFQIHSQYQNTTVSFSPTLLSNSSETGTASGLVFILRPEQSTCTWY

SEQ ID NO: 13304 - protein, 136 aa, Homo sapiens
MLLKHLQRMVSVPQVKASALKVVTLTANDKTSVSFSSLPGQGVIYNVIVWDPFLNTSAAYIPAHTYACSFEAGEGSCASLGRVSSKVFFTLFALLGFFICFFGHRFWKTELFFIGFIIMGFFFYILITRLTPIKYD

SEQ ID NO: 13305 - protein, 136 aa, Homo sapiens; identical to SEQ ID NO: 13304

SEQ ID NO: 13306 - protein, 115 aa, Homo sapiens
MSHRARPISGLIEFSVGKFRYFELNRPFPEEAILHDISSNVTFLIFQIHSQYQNTTVSFSPTLLSNSSETGTASGLVFILRPEQSTCTWYLGTSGIQPVQNMAILLSYSERDPVP

SEQ ID NO: 13307 - protein, 222 aa, Homo sapiens
VWDPFLNTSAAYIPAHTYACSFEAGEGSCASLELFFIGFIIMGFFFYILITRLTPIKYDVNLILTAVTGSVGGMFLVAVWWRFGILSICMLCVGLVLGFLISSVTFFTPLGNLKIFHDDGVFWVTFSCIAILIPVVFMGCLRILNILTCGVIGSYSVVLAIDSYWSTSLSYITLNVLKRALNKDFHRAFTNVPFQTNDFIILAVWGMLAVSGITLQIRRERG

SEQ ID NO: 13308 - protein, 200 aa, Homo sapiens
  VARIANT 1: note = misc_feature - Xaa can be any naturally occurring amino acid
XLLKHLQRMVSVPQVKASALKVVTLTANDKTSVSFSSLPGQGVIYNVIVWDPFLNTSAAYIPAHTYACSFEAGEGSCASLGRVSSKVFFTLFALLGFFICFFGHRFWKTELFFIGFIIMGFFFYILITRLTPIKYDVNLILTAVTGSVGGMFLVAVWWRFGILSICMLCVGLVLGFLISSVTFFTPLETGSLSVTHAGLQ

SEQ ID NO: 13309 - protein, 144 aa, Homo sapiens
  VARIANT 1: note = misc_feature - Xaa can be any naturally occurring amino acid
XVPQVKASALKVVTLTANDKTSVSFSSLPGQGVIYNVIVWDPFLNTSAAYIPAHTYACSFEAGEGSCASLGRVSSKVFFTLFALLGFFICFFGHRFWKTELFFIGFIIMGFFFYILITRLTPIKYDAEHTDLWSHWLLFGGFSH

SEQ ID NO: 13310 - protein, 208 aa, Homo sapiens
MAESLYEIRFRENVEKRILCHMQLSSAQVEQLRQAIEELYYFEFVVDDLPIRGFVGYMEESGFLPHSHKIGLWTHLDFHLEFHGDRIIFANVSVRDVKPHSLDGLRPDEFLGLTHTYSVRWSETSVERRSDRRRGDDGGFFPRTLEIHWLSIINSMVLVFLLVGFVAVILMRVLRNDLARYNLDEETTSAGSGDDFDQGDNGWKIIHT

SEQ ID NO: 13311 - protein, 519 aa, Homo sapiens
MAESLYEIRFRENVEKRILCHMQLSSAQVEQLRQAIEELYYFEFVVDDLPIRGFVGYMEESGFLPHSHKIGLWTHLDFHLEFHGDRIIFANVSVRDVKPHSLDGLRPDEFLGLTHTYSVRWSETSVERRSDRRRGDDGGFFPRTLEIHWLSIINSMVLVFLLVGFVAVILMRVLRNDLARYNLDEETTSAGSGDDFDQGDNGWKIIHTDVFRFPPYRGLLCAVLGVGAQFLALGTGIIVMALLGMFNVHRHGAINSAAILLYALTCCISGYVSSHFYRQIGGERWVWNIILTTSLFSVPFFLTWSVVNSVHWANGSTQALPATTILLLLTVWLLVGFPLTVIGGIFGKNNASPFDAPCRTKNIAREIPPQPWYKSTVIHMTVGGFLPFSAISVELYYIFATVWGREQYTLYGILFFVFAILLSVGACISIALTYFQLSGEDYRWWWRSVLSVGSTGLFIFLYSVFYYARRSNMSGAVQTVEFFGYSLLTGYVFFLMLGTISFFSSLKFIRYIYVNLKMD

SEQ ID NO: 13312 - protein, 133 aa, Homo sapiens
MTVVGNPRSWSCQWLPILILLLGTALVQVYCHPHDCWRLPAFQCHLCGAVLHLCHSMGSGAVHFVRHPLLCLRHPAECGGLHLHCTHLLPVVWGGLPLVVAICAECWLHRPLHLPLLSFLLCPALQHVWGSTD

SEQ ID NO: 13313 - protein, 210 aa, Homo sapiens
MTVVGNPRSWSCQWLPILILLLGTGHGPGVEGVTHYKAGDPVILYVNKVGPYHNPQETYHYYQLPVCCPEKIRHKSLSLGEVLDGDRMAESLYEIRFRENVEKRILCHMQLSSAQVEQLRQAIEELYYFEFVVDDLPIRGFVGYMEESGFLPHSHKIGLWTHLDFHLEFHGDRIIFANVSVRDVKPHSLDGLRPDEFLGLTHTYSVRWSE

SEQ ID NO: 13314 - protein, 242 aa, Homo sapiens
MTVVGNPRSWSCQWLPILILLLGTGHGPGVEGVTHYKAGDPVILYVNKVGPYHNPQETYHYYQLPVCCPEKIRHKSLSLGEVLDGDRMAESLYEIRFRENVEKRILCHMQLSSAQVEQLRQAIEELYYFEFVVDDLPIRGFVGYMEESGFLPHSHKIGLWTHLDFHLEFHGDRIIFANVSVRDVKPHSLDGLRPDEFLGLTHTYSVRWSETSVERRSDRRRGDDGGFFPRTLEIHWLSIINS

SEQ ID NO: 13315 - protein, 606 aa, Homo sapiens
MTVVGNPRSWSCQWLPILILLLGTGHGPGVEGVTHYKAGDPVILYVNKVGPYHNPQETYHYYQLPVCCPEKIRHKSLSLGEVLDGDRMAESLYEIRFRENVEKRILCHMQLSSAQVEQLRQAIEELYYFEFVVDDLPIRGFVGYMEESGFLPHSHKIGLWTHLDFHLEFHGDRIIFANVSVRDVKPHSLDGLRPDEFLGLTHTYSVRWSETSVERRSDRRRGDDGGFFPRTLEIHWLSIINSMVLVFLLVGFVAVILMRVLRNDLARYNLDEETTSAGSGDDFDQGDNGWKIIHTDVFRFPPYRGLLCAVLGVGAQFLALGTGIIVMALLGMFNVHRHGAINSAAILLYALTCCISGYVSSHFYRQIGGERWVWNIILTTSLFSVPFFLTWSVVNSVHWANGSTQALPATTILLLLTVWLLVGFPLTVIGGIFGKNNASPFDAPCRTKNIAREIPPQPWYKSTVIHMTVGGFLPFSAISVELYYIFATVWGREQYTLYGILFFVFAILLSVGACISIALTYFQLSGEDYRWWWRSVLSVGSTGLFIFLYSVFYYARRSNMSGAVQTVEFFGYSLLTGYVFFLMLGTISFFSSLKFIRYIYVNLKMD

SEQ ID NO: 13316 - protein, 489 aa, Homo sapiens
MTVVGNPRSWSCQWLPILILLLGTGHGPGVEGVTHYKAGDPVILYVNKVGPYHNPQETYHYYQLPVCCPEKIRHKSLSLGEVLDGDRMAESLYEIRFRENVEKRILCHMQLSSAQVEQLRQAIEELYYFEFVVDDLPIRGFVGYMEESGFLPHSHKIGLWTHLDFHLEFHGDRIIFANVSVRDVKPHSLDGLRPDEFLGLTHTYSVRWSETSVERRSDRRRGDDGGFFPRTLEIHWLSIINSMVLVFLLVGFVAVILMRVLRNDLARYNLDEETTSAGSGDDFDQGDNGWKIIHTDVFRFPPYRGLLCAVLGVGAQFLALGTGIIVMALLGMFNVHRHGAINSAAILLYALTCCISGYVSSHFYRQIGGERWVWNIILTTSLFSVPFFLTWSVVNSVHWANGSTQALPATTILLLLTVWLLVGFPLTVIGGIFGKNNASPFDAPCRTKNIAREIPPQPWYKSTVIHMTVGGFLPFRYPPFIPWLLLSGS

SEQ ID NO: 13317 - protein, 257 aa, Homo sapiens
MTVVGNPRSWSCQWLPILILLLGTGHGPGVEGVTHYKAGDPVILYVNKVGPYHNPQETYHYYQLPVCCPEKIRHKSLSLGEVLDGDRMAESLYEIRFRENVEKRILCHMQLSSAQVEQLRQAIEELYYFEFVVDDLPIRGFVGYMEESGFLPHSHKIGLWTHLDFHLEFHGDRIIFANVSVRDVKPHSLDGLRPDEFLGLTHTYSVRWSETSVERRSDRRRGDDGGFFPRTLEIHWLSIINSMVLVFLLVGFVAVIL

SEQ ID NO: 13318 - protein, 420 aa, Homo sapiens
MTVVGNPRSWSCQWLPILILLLGTGHGPGVEGVTHYKAGDPVILYVNKVGPYHNPQETYHYYQLPVCCPEKIRHKSLSLGEVLDGDRMAESLYEIRFRENVEKRILCHMQLSSAQVEQLRQAIEELYYFEFVVDDLPIRGFVGYMEESGFLPHSHKIGLWTHLDFHLEFHGDRIIFANVSVRDVKPHSLDGLRPDEFLGLTHTYSVRWSETSVERRSDRRRGDDGGFFPRTLEIHWLSIINSMVLVFLLVGFVAVILMRVLRNDLARYNLDEETTSAGSGDDFDQGDNGWKIIHTDVFRFPPYRGLLCAVLGVGAQFLALGTGIIVMALLGMFNVHRHGAINSAAILLYALTCCISGYVSSHFYRQIGGERWVWNIILTTSLFSGSASHNHPAASDGLAAGGLSPHCHWRHLWEEQRQPL

SEQ ID NO: 13319 - protein, 589 aa, Homo sapiens
MTVVGNPRSWSCQWLPILILLLGTGHGPGVEGVTHYKAGDPVILYVNKVGPYHNPQETYHYYQLPVCCPEKIRHKSLSLGEVLDGDRMAESLYEIRFRENVEKRILCHMQLSSAQVEQLRQAIEELYYFEFVVDDLPIRGFVGYMEESGFLPHSHKIGLWTHLDFHLEFHGDRIIFANVSVRDVKPHSLDGLRPDEFLGLTHTYSVRWSETSVERRSDRRRGDDGGFFPRTLEIHWLSIINSMVLVFLLVGFVAVILMRVLRNDLARYNLDEETTSAGSGDDFDQGDNGWKIIHTDVFRFPPYRGLLCAVLGVGAQFLALGTGIIVMALLGMFNVHRHGAINSAAILLYALTCCISGYVSSHFYRQIGGERWVWNIILTTSLFSVPFFLTWSVVNSVHWANGSTQALPATTILLLLTVWLLVGFPLTVIGGIFGKNNASPFDAPCRTKNIAREIPPQPCAISVELYYIFATVWGREQYTLYGILFFVFAILLSVGACISIALTYFQLSGEDYRWWWRSVLSVGSTGLFIFLYSVFYYARRSNMSGAVQTVEFFGYSLLTGYVFFLMLGTISFFSSLKFIRYIYVNLKMD

SEQ ID NO: 13320 - protein, 301 aa, Homo sapiens
MTVVGNPRSWSCQWLPILILLLGTGHGPGVEGVTHYKAGDPVILYVNKVGPYHNPQETYHYYQLPVCCPEKIRHKSLSLGEVLDGDRMAESLYEIRFRENVEKRILCHMQLSSAQVEQLRQAIEELYYFEFVVDDLPIRGFVGYMEESGFLPHSHKIGLWTHLDFHLEFHGDRIIFANVSVRDVKPHSLDGLRPDEFLGLTHTYSVRWSETSVERRSDRRRGDDGGFFPRTLEIHWLSIINSMVLVFLLVGFVAVILMRVLRNDLARYNLDEETTSAGSGDDFDQGDNGWKIIHTDVFRFP

SEQ ID NO: 13321 - protein, 57 aa, Homo sapiens
MRTLVGLLTSNQALLQLEAARCLHELSHSEQSTVAEACLPATSYLLTYLSSHSSDFI

SEQ ID NO: 13322 - protein, 499 aa, Homo sapiens
MWSRRQGRLRPTVCGVEELRRRRREREAALRKARREQQLVSKRLLRNDAPEEAGEGCVAAILGETEVQQFLRQAQRGTEEKEREGALVSLRRGLQHPETQQTFIRLEGSMRTLVGLLTSNQALLQLEAARCLHELSHSEQSTVAEACLPATSYLLTYLSSHSSDFIELCLYTLGNLIVESEAVRRQLLPQGIVPALAACIQSPHVAVLEALGYALSQLLQAEEAPEKIIPPASASSSILASTLPQHMLQMLQPGPKLNPGVAVEFAWCLHYIICSQVSNPLLIGHGALSTLGLLLLDLAGAVQKTEDAGLELLACPVLRCLSNLLTEAAVETVGGQMQLRDERVVAALFILLQFFFQKQPSLLPEGLWLLNNLTANSPSFCTSLLSLDLIEPLLQLLPVSNVVSVMVLTVLCNVAEKGPAYCQRLWPGPLLPALLHTLAFSDTEVVGQSLELLHLLFLYQPEAVQVFLQQSGLQALERHQEEAQLQDRVYALQQTALQG

SEQ ID NO: 13323 - protein, 493 aa, Homo sapiens
MWSRRQGRLRPTVCGVEELRRRRREREAALRKARREQQLVSKRLLRNDAPEEAGEGCVAAILGETEVQQFLRQAQRGTEEKEREGALVSLRRGLQHPETQQTFIRLEGSMRTLVGLLTSNQALLQLEAARCLHELSHSEQSTVAEACLPATSYLLTYLSSHSSDFIELCLYTLGNLIVESEAVRRQLLPQGIVPALAACIQSPHVAVLEALGYALSQLLQAEEAPEKIIPSILASTLPQHMLQMLQPGPKLNPGVAVEFAWCLHYIICSQVSNPLLIGHGALSTLGLLLLDLAGAVQKTEDAGLELLACPVLRCLSNLLTEAAVETVGGQMQLRDERVVAALFILLQFFFQKQPSLLPEGLWLLNNLTANSPSFCTSLLSLDLIEPLLQLLPVSNVVSVMVLTVLCNVAEKGPAYCQRLWPGPLLPALLHTLAFSDTEVVGQSLELLHLLFLYQPEAVQVFLQQSGLQALERHQEEAQLQDRVYALQQTALQG

SEQ ID NO: 13324 - protein, 101 aa, Homo sapiens
MWSRRQGRLRPTVCGVEELRRRRREREAALRKARREQQLVSKRLLRNDAPEEAGEGCVAAILGETEVRGQGAAVPAASPAGDRGKGERGGSGQPSSRLAAP

SEQ ID NO: 13325 - protein, 43 aa, Homo sapiens
MWSRRQGRLRPTVCGVEELRRRRREREHCGRRGGSSSWSARGC

SEQ ID NO: 13326 - protein, 43 aa, Homo sapiens; identical to SEQ ID NO: 13325

SEQ ID NO: 13327 - protein, 43 aa, Homo sapiens; identical to SEQ ID NO: 13325

SEQ ID NO: 13328 - protein, 43 aa, Homo sapiens; identical to SEQ ID NO: 13325

SEQ ID NO: 13329 - protein, 82 aa, Homo sapiens
MLDVKMEDIKESIETMRTRLERSIQMLTLLRAFEARDRNLQEGNLERVNFWSAVNVAVLLLVAVLQVCTLKRFFQDKRPVPT

SEQ ID NO: 13330 - protein, 74 aa, Homo sapiens
MMAAGAALALALWLLMPPVEVGGAGPPPIQDGEFTFLLPAGRKQCFYQSAPANASLETEYQGGANGGRGLQAVL

SEQ ID NO: 13331 - protein, 95 aa, Homo sapiens
MMAAGAALALALWLLMPPVEVGGAGPPPIQDGEFTFLLPAGRKQCFYQSAPANASLETEYQVIGGAGLDVDFTLESPQGVLLGGANGGRGLQAVL

SEQ ID NO: 13332 - protein, 185 aa, Homo sapiens
MMAAGAALALALWLLMPPVEVGGAGPPPIQDGEFTFLLPAGRKQCFYQSAPANASLETEYQVIGGAGLDVDFTLESPQGVLLVSESRKADGVHTSPLRPCGPGWSAASRCSRYCGPSRHVTATCKRATWSGSTSGQLSTWRCCCWWLCCRSARSSASSRTSARCPRSPCHGRKNGTKEGQQGVCI

SEQ ID NO: 13333 - protein, 191 aa, Homo sapiens
MMAAGAALALALWLLMPPVEVGGAGPPPIQDGEFTFLLPAGRKQCFYQSAPANASLETEYQVIGGAGLDVDFTLESPQGVLLVSESRKADGVHTTISEKLVFFELIFDSLQDDEEVEGWAEAVEPEEMLDVKMEDIKESIETMRTRLERSIQMLTLLRAFEARDRNLQEGNLERVNFWSAVNVAVLLLVAV

SEQ ID NO: 13334 - protein, 227 aa, Homo sapiens
MMAAGAALALALWLLMPPVEVGGAGPPPIQDGEFTFLLPAGRKQCFYQSAPANASLETEYQVIGGAGLDVDFTLESPQGVLLVSESRKADGVHTVEPTEAGDYKLCFDNSFSTISEKLVFFELIFDSLQDDEEVEGWAEAVEPEEMLDVKMEDIKESIETMRTRLERSIQMLTLLRAFEARDRNLQEGNLERVNFWSAVNVAVLLLVAVLQVCTLKRFFQDKRPVPT

SEQ ID NO: 13335 - protein, 65 aa, Homo sapiens
  VARIANT 1: note = misc_feature - Xaa can be any naturally occurring amino acid
XEVEGWAEAVEPEEMLDVKMEDIKVCPGCAGATPSRSLGFTWGAPLGLTQPPLRSCALQLNYRVH

SEQ ID NO: 13336 - protein, 116 aa, Homo sapiens
MDGTYKFCFSNRMSTMTPKIVMFTIDIGEAPKGQDMETEAHQNKLEEMINELAVAMTAVKHEQEYMEVRERIHRAINDNTNSRVVLWSFFEALVLVAMTLGQIYYLKRFFEVRRVV

SEQ ID NO: 13337 - protein, 201 aa, Homo sapiens
MVTLAELLVLLAALLATVSGYFVSIDAHAEECFFERVTSGTKMGLIFEVAEGGFLDIDVEITGPDNKGIYKGDRESSGKYTFAAHMDGTYKFCFSNRMSTMTPKIVMFTIDIGEAPKGQDMETEAHQNKLEEMINELAVAMTAVKHEQEYMEVRERIHRAINDNTNSRVVLWSFFEALVLVAMTLGQIYYLKRFFEVRRVV

SEQ ID NO: 13338 - protein, 166 aa, Homo sapiens
MVTLAELLVLLAALLATVSGYFVSIDAHAEECFFERVTSGTKMGLIFEVAEGGFLDIDVEITGPDNKGIYKGDRESSGKYTFAAHMDGTYKFCFSNRMSTMTPKIVMFTIDIGEAPKGQDMETEGGGDTWDAHQNKLEEMINELAVAMTAVKHEQEYMEVRERIHR

SEQ ID NO: 13339 - protein, 146 aa, Homo sapiens
MGSTVPRSASVLLLLLLLRRAEQPCGAELTFELPDNAKQCFHEEVEQGVKFSLDYQVITGGHYDVDCYVEDPQGNTIYRETKKQYDSFTYRAEVKGVYQFCFSNEFSTFSHKTVYFDFQVGDEPPILPDMGNRVTALTQGFRVFCL

SEQ ID NO: 13340 - protein, 155 aa, Homo sapiens
MGSTVPRSASVLLLLLLLRRAEQPCGAELTFELPDNAKQCFHEEVEQGVKFSLDYQVITGGHYDVDCYVEDPQGNTIYRETKKQYDSFTYRAEVKGVYQFCFSNEFSTFSHKTVYFDFQVGDEPPILPDMGNRVTALTQGPSASPTPTPPLRVPV

SEQ ID NO: 13341 - protein, 217 aa, Homo sapiens
MGSTVPRSASVLLLLLLLRRAEQPCGAELTFELPDNAKQCFHEEVEQGVKFSLDYQVITGGHYDVDCYVEDPQGNTIYRETKKQYDSFTYRAEVKGVYQFCFSNEFSTFSHKTVYFDFQVGDEPPILPDMGNRVTALTQMESACVTIHEALKTVIDSQTHYRLREAQDRARAEDLNSRVSYWSVGETIALFVVSFSQVLLLKSFFTEKRPISRAVHS

SEQ ID NO: 13342 - protein, 173 aa, Homo sapiens
MGSTVPRSASVLLLLLLLRRAEQPCGAELTFELPDNAKQCFHEEVEQGVKFSLDYQVITGGHYDVDCYVEDPQGNTIYRETKKQYDSFTYRAEVKGVYQFCFSNEFSTFSHKTVYFDFQVGDEPPILPDMGNRVTALTQRFRGAYWKEVDKMVDYMQPGGTPATEGLGRLAPS

SEQ ID NO: 13343 - protein, 186 aa, Homo sapiens
MAGVGAGPLRAMGRQALLLLALCATGAQGLYFHIGETEKRCFIEEIPDETMVIGNYRTQMWDKQKEVFLPSTPGLGMHVEVKDPDGKVVLSRQYGSEGRFTFTSHTPGDHQICLHSNSTRMALFAGGKLRVHLDIQVGEHANNYPEIAAKDKLTELQLRARQLLDQVEQIQKEQDYQRASAYLLVI

SEQ ID NO: 13344 - protein, 227 aa, Homo sapiens
MAGVGAGPLRAMGRQALLLLALCATGAQGLYFHIGETEKRCFIEEIPDETMVIGNYRTQMWDKQKEVFLPSTPGLGMHVEVKDPDGKVVLSRQYGSEGRFTFTSHTPGDHQICLHSNSTRMALFAGGKLRVHLDIQVGEHANNYPEIAAKDKLTELQLRARQLLDQVEQIQKEQDYQRYREERFRLTSESTNQRVLWWSIAQTVILILTGIWQMRHLKSFFEAKKLV

SEQ ID NO: 13345 - protein, 178 aa, Homo sapiens
MAGVGAGPLRAMGRQALLLLALCATGAQGLYFHIGETEKRCFIEEIPDETMVIGNYRTQMWDKQKEVFLPSTPGLGMHVEVKDPDGKVVLSRQYGSEGRFTFTSHTPGDHQICLHSNSTRMALFAGGKLYREERFRLTSESTNQRVLWWSIAQTVILILTGIWQMRHLKSFFEAKKLV

SEQ ID NO: 13346 - protein, 120 aa, Homo sapiens
MGDKIWLPFPVLLLAALPPVLLPGAAGFTPSLDSDFTFTLPAGQKECFYQPMPLKASLEIEYQVLDGAGLDIDFHLASPEGKTLVFEQRKSDGVHTCIRSKNGPGTAVHAYNPSTFRGQV

SEQ ID NO: 13347 - protein, 193 aa, Homo sapiens
MGDKIWLPFPVLLLAALPPVLLPGAAGFTPSLDSDFTFTLPAGQKECFYQPMPLKASLEIEYQVLDGAGLDIDFHLASPEGKTLVFEQRKSDGVHTVETEVGDYMFCFDNTFSTISEKVIFFELILDNMGEQAQEQEDWKKYITGTDILDMKLEDILDPIIKIASDVQIRLHLGIHQQHQVQTKQKWAHTNSA

SEQ ID NO: 13348 - protein, 229 aa, Homo sapiens
MGDKIWLPFPVLLLAALPPVLLPGAAGFTPSLDSDFTFTLPAGQKECFYQPMPLKASLEIEYQVLDGAGLDIDFHLASPEGKTLVFEQRKSDGVHTVETEVGDYMFCFDNTFSTISEKVIFFELILDNMGEQAQEQEDWKKYITGTDILDMKLEDILESINSIKSRLSKSGHIQTLLRAFEARDRNIQESNFDRVNFWSMVNLVVMVVVSAIQVYMLKSLFEDKRKSRT

SEQ ID NO: 13349 - protein, 162 aa, Homo sapiens
MGDKIWLPFPVLLLAALPPVLLPGAAGFTPSLDSDFTFTLPAGQKECFYQPMPLKASLEIEYQVLDGAGLDIDFHLASPEGKTLVFEQRKSDGVHTVETEVGDYMFCFDNTFSTISEKVIFFELILDNMGEQAQEQEDWKKYITGTDILDMKLEDILVSMVF

SEQ ID NO: 13350 - protein, 82 aa, Homo sapiens
MPRPGSAQRWAAVAGRWGCRLLALLLLVPGPGGASEITFELPDNAKQCFYEDIAQGTKCTLEFQVITGGHYDVDCRLEDPDG

SEQ ID NO: 13351 - protein, 224 aa, Homo sapiens
MPRPGSAQRWAAVAGRWGCRLLALLLLVPGPGGASEITFELPDNAKQCFYEDIAQGTKCTLEFQVITGGHYDVDCRLEDPDGKVLYKEMKKQYDSFTFTASKNGTYKFCFSNEFSTFTHKTVYFDFQVGEDPPLFPSENRVSALTQMESACVSIHEALKSVIDYQTHFRLREAQGRSRAEDLNTRVAYWSVGEALILLVVSIGQVFLLKSFFSDKRTTTTRVGS

SEQ ID NO: 13352 - protein, 188 aa, Homo sapiens
MPRPGSAQRWAAVAGRWGCRLLALLLLVPGPGGASEITFELPDNAKQCFYEDIAQGTKCTLEFQVITGGHYDVDCRLEDPDGKVLYKEMKKQYDSFTFTASKNGTYKFCFSNEFSTFTHKTVYFDFQVGEDPPLFPSENRVSALTQMESACVSIHEALKSVIDYQTHFRLREAQGRSRAEDLNTRVAY

SEQ ID NO: 13353 - protein, 404 aa, Homo sapiens
MPRPGSAQRWAAVAGRWGCRLLALLLLVPGPGGASEITFELPDNAKQCFYEDIAQGTKCTLEFQVITGGHYDVDCRLEDPDGKVLYKEMKKQYDSFTFTASKNGTYKFCFSNEFSTFTHKTVYFDFQVGEDPPLFPSENRVSALTQMESACVSIHEALKSVIDYQTHFRLREAQGRSRAEDLNTRVAYWHSVDTSPGYHESDSKKSEDLSLCNVAEHSNTTEGPTGKQEGAQSVEEMFEEEAEEEVFLKFVILHAEDDTDEALRVQNLLQDDFGIKPGIIFAEMPCGRQHLQNLDDAVNGSAWTILLLTENFLRDTWCNFQFYTSLMNSVNRQHKYNSVIPMRPLNNPLPRERTPFALQTINALEEESRGFPTQVERIFQESVYKTQQTIWKETRNMVQRQFIA

SEQ ID NO: 13354 - protein, 72 aa, Homo sapiens
MKRSLQALYCQLLSFLLILALTEALAFAIQEPSPRESLQVLPSGTPPGTMVTAPHSSTRHTSVVMLTPNPDG

SEQ ID NO: 13355 - protein, 149 aa, Homo sapiens
MKRSLQALYCQLLSFLLILALTEALAFAIQEPSPRESLQVLPSGTPPGTMVTAPHSSTRHTSVVMLTPNPDGPPSQAAAPMATPTPRAEGHPPTHTISTIAATVTAPHSESSLSTGPAPAAMATTSSKPEGRPRGQAAPTILLTKPPGA

SEQ ID NO: 13356 - protein, 153 aa, Homo sapiens
MKRSLQALYCQLLSFLLILALTEALAFAIQEPSPRESLQVLPSGTPPGTMVTAPHSSTRHTSVVMLTPNPDGPPSQAAAPMATPTPRAEGHPPTHTISTIAATVTAPHSESSLSTGPAPAAMATTSSKPEGRPRGQAAPTILLTKPPGATSRP

SEQ ID NO: 13357 - protein, 575 aa, Homo sapiens
MKRSLQALYCQLLSFLLILALTEALAFAIQEPSPRESLQVLPSGTPPGTMVTAPHSSTRHTSVVMLTPNPDGPPSQAAAPMATPTPRAEGHPPTHTISTIAATVTAPHSESSLSTGPAPAAMATTSSKPEGRPRGQAAPTILLTKPPGATSRPTTAPPRTTTRRPPRPPGSSRKGAGNSSRPVPPAPGGHSRSKEGQRGRNPSSTPLGQKRPLGKIFQIYKGNFTGSVEPEPSTLTPRTPLWGYSSSPQPQTVAATTVPSNTSWAPTTTSLGPAKDKPGLRRAAQGGGSTFTSQGGTPDATAASGAPVSPQAAPVPSQRPHHGDPQDGPSHSDSWLTVTPGTSRPLSTSSGVFTAATGPTPAAFDTSVSAPSQGIPQGASTTPQAPTHPSRVSESTISGAKEETVATLTMTDRVPSPLSTVVSTATGNFLNRLVPAGTWKPGTAGNISHVAEGDKPQHRATICLSKMDIAWVILAISVPISSCSVLLTVCCMKRKKKTANPENNLSYWNNTITMDYFNRHAVELPREIQSLETSEDQLSEPRSPANGDYRDTGMVLVNPFCQETLFVGNDQVSEI

SEQ ID NO: 13358 - protein, 575 aa, Homo sapiens; identical to SEQ ID NO: 13357

SEQ ID NO: 13359 - protein, 488 aa, Homo sapiens
MKRSLQALYCQLLSFLLILALTEALAFAIQEPSPRESLQVLPSGTPPGTMVTAPHSSTRHTSVVMLTPNPDGPPSQAAAPMATPTPRAEGHPPTHTISTIAATVTAPHSESSLSTGPAPAAMATTSSKPEGRPRGQAAPTILLTKPPGATSRPTTAPPRTTTRRPPRPPGSSRKGAGNSSRPVPPAPGGHSRSKEGQRGRNPSSTPLGQKRPLGKIFQIYKGNFTGSVEPEPSTLTPRTPLWGYSSSPQPQTVAATTVPSNTSWAPTTTSLGPAKDKPGLRRAAQGGGSTFTSQGGTPDATAASGAPVSPQAAPVPSQRPHHGDPQDGPSHSDSWLTVTPGTSRPLSTSSGVFTAATGPTPAAFDTSVSAPSQGIPQGASTTPQAPTHPSRVSESTISGAKEETVATLTMTDRVPSPLSTVVSTATGNFLNRLVPAGTWKPGTAGNISHVAEGDKPQHRATICLSKMDIAWVILAISVPISSCSDPIT

SEQ ID NO: 13360 - protein, 105 aa, Homo sapiens
MKRSLQALYCQLLTVLLTVCCMKRKKKTANPENNLSYWNNTITMDYFNRHAVELPREIQSLETSEDQLSEPRSPANGDYRDTGMVLVNPFCQETLFVGNDQVSEI

SEQ ID NO: 13361 - protein, 89 aa, Homo sapiens
MVTAPHSSTRHTSVVMLTPNPDGPPSQAAAPMATPTPRAEGHPPTHTISTIAATVTAPHSESSLSTGPAPAAMATTSSKPEGRPRGQAA

SEQ ID NO: 13362 - protein, 122 aa, Homo sapiens
MVTAPHSSTRHTSVVMLTPNPDGPPSQAAAPMATPTPRAEGHPPTHTISTIAATVTAPHSESSLSTGPAPAAMATTSSKPEGRPRGQAAPTILLTKPPGATSRPTTAPPRTTTRRPPRPPGS

SEQ ID NO: 13363 - protein, 51 aa, Homo sapiens
MATLSVIGSSSLIAYAVFHNIQKSPEIRPLFYLSFCDLLLGLCWLTETLLY

SEQ ID NO: 13364 - protein, 80 aa, Homo sapiens
MATLSVIGSSSLIAYAVFHNIQKSPEIRPLFYLSFCDLLLGLCWLTETLLYGASVANKDIICYNLQAVGQFWRLEGPRLR

SEQ ID NO: 13365 - protein, 80 aa, Homo sapiens; identical to SEQ ID NO: 13364

SEQ ID NO: 13366 - protein, 85 aa, Homo sapiens
MATLSVIGSSSLIAYAVFHNIQKSPEIRPLFYLSFCDLLLGLCWLTETLLYGASVANKDIICYNLQAVGQGRRGFAMFARLVLNA

SEQ ID NO: 13367 - protein, 106 aa, Homo sapiens
MATLSVIGSSSLIAYAVFHNIQKSPEIRPLFYLSFCDLLLGLCWLTETLLYGASVANKDIICYNLQAVGQIFYISSFLYTVNYIWYLYTELRMKHTQSGQSTSPLV

SEQ ID NO: 13368 - protein, 175 aa, Homo sapiens
MATLSVIGSSSLIAYAVFHNIQKSPEIRPLFYLSFCDLLLGLCWLTETLLYGASVANKDIICYNLQAVGQIFYISSFLYTVNYIWYLYTELRMKHTQSGQSTSPLVIDYTCRVCQMAFVFSSLIPLLLMTPVFCLGNTSECFQNFSQSHKCILMHSPPSAMAELPPSANTSVCST

SEQ ID NO: 13369 - protein, 337 aa, Homo sapiens
MATLSVIGSSSLIAYAVFHNIQKSPEIRPLFYLSFCDLLLGLCWLTETLLYGASVANKDIICYNLQAVGQIFYISSFLYTVNYIWYLYTELRMKHTQSGQSTSPLVIDYTCRVCQMAFVFSSLIPLLLMTPVFCLGNTSECFQNFSQSHKCILMHSPPSAMAELPPSANTSVCSTLYFYGIAIFLGSFVLSLLTIMVLLIRAQTLYKKFVKSTGFLGSEQWAVIHIVDQRVRFYPVAFFCCWGPAVILMIIKLTKPQDTKLHMALYVLQALTATSQGLLNCGVYGWTQHKFHQLKQEARRDADTQTPLLCSQKRFYSRGLNSLESTLTFPASTSTIF

SEQ ID NO: 13370 - protein, 302 aa, Homo sapiens
MATLSVIGSSSLIAYAVFHNIQKSPEIRPLFYLSFCDLLLGLCWLTETLLYGASVANKDIICYNLQAVGQVIDYTCRVCQMAFVFSSLIPLLLMTPVFCLGNTSECFQNFSQSHKCILMHSPPSAMAELPPSANTSVCSTLYFYGIAIFLGSFVLSLLTIMVLLIRAQTLYKKFVKSTGFLGSEQWAVIHIVDQRVRFYPVAFFCCWGPAVILMIIKLTKPQDTKLHMALYVLQALTATSQGLLNCGVYGWTQHKFHQLKQEARRDADTQTPLLCSQKRFYSRGLNSLESTLTFPASTSTIF

SEQ ID NO: 13371 - protein, 74 aa, Homo sapiens
MATLSVIGSSSLIAYAVFHNIQKSPEIRPLFYLSFCDLLLGLCWLTETLLYGASVANKDIICYNLQAVGQVSAT

SEQ ID NO: 13372 - protein, 151 aa, Homo sapiens
MFPKLQSEPQVLLIRAQTLYKKFVKSTGFLGSEQWAVIHIVDQRVRFYPVAFFCCWGPAVILMIIKLTKPQDTKLHMALYVLQALTATSQGLLNCGVYGWTQHKFHQLKQEARRDADTQTPLLCSQKRFYSRGLNSLESTLTFPASTSTIF

SEQ ID NO: 13373 - protein, 104 aa, Homo sapiens
MKHTQSGQSTSPLVIDYTCRVCQMAFVFSSLIPLLLMTPVFCLGNTSECFQNFSQSHKCILMHSPPSAMAELPPSANTSVCSTLYFYGIAIFLGSFVLSLLTIM

SEQ ID NO: 13374 - protein, 245 aa, Homo sapiens
MKHTQSGQSTSPLVIDYTCRVCQMAFVFSSLIPLLLMTPVFCLGNTSECFQNFSQSHKCILMHSPPSAMAELPPSANTSVCSTLYFYGIAIFLGSFVLSLLTIMVLLIRAQTLYKKFVKSTGFLGSEQWAVIHIVDQRVRFYPVAFFCCWGPAVILMIIKLTKPQDTKLHMALYVLQALTATSQGLLNCGVYGWTQHKFHQLKQEARRDADTQTPLLCSQKRFYSRGLNSLESTLTFPASTSTIF

SEQ ID NO: 13375 - protein, 28 aa, Homo sapiens
MVSAAAPSLLILLLLLLGSVPATDARSV

SEQ ID NO: 13376 - protein, 44 aa, Homo sapiens
MVSAAAPSLLILLLLLLGSVPATDARSVPLKATFLEDVAGSGEA

SEQ ID NO: 13377 - protein, 140 aa, Homo sapiens
MVSAAAPSLLILLLLLLGSVPATDARSVPLKATFLEDVAGSGEAEGSSASSPSLPPPWTPALSPTSMGPQPITLGGPSPPTNFLDGIVDFFRQYVMLIAVVGSLAFLLMFIVCAAVITRQKQKASAYYPSSFPKKKYVDQ

SEQ ID NO: 13378 - protein, 283 aa, Homo sapiens
MVSAAAPSLLILLLLLLGSVPATDARSVPLKATFLEDVAGSGEAEGSSASSPSLPPPWTPALSPTSMGPQPITLGGPSPPTNFLDGIVDFFRQYVMLIAVVGSLAFLLMFIVCAAVITRQKQKASAYYPSSFPKKKYVDQSDRAGGPRAFSEVPDRAPDSRPEEALDSSRQLQADILAATQNLKSPTRAALGGGDGARMVEGRGAEEEEKGSQEGDQEVQGHGVPVETPEAQEEPCSGVLEGAVVAGEGQGELEGSLLLAQEAQGPVGPPESPCACSSVHPSV

SEQ ID NO: 13379 - protein, 70 aa, Homo sapiens
MASDLIRTILAVALISKLGTAVDAELMPSGAILQNKRENLPRVCHALAFLGMARCQDLFLVRLQGWKLGT

SEQ ID NO: 13380 - protein, 130 aa, Homo sapiens
MASDLIRTILAVALISKLGTAVDAELMPSGAILQNKRENLPRVCHALAFLGMARCQDLFLVRLQGWKLGTRFQDGPRSTPQEEGGSPQRKRGMPVQIHFLLKSFLSSPITFAFISLARTVSLATAICKIV

SEQ ID NO: 13381 - protein, 130 aa, Homo sapiens; identical to SEQ ID NO: 13380

SEQ ID NO: 13382 - protein, 130 aa, Homo sapiens; identical to SEQ ID NO: 13380

SEQ ID NO: 13383 - protein, 258 aa, Homo sapiens
FFSLLATAILGAVSWQPTNGIFLSMFLIVLPLESMAHGLFHELGNCLGGTSVGYAIVIPTNFCSGHTHGTGEWALAGGDTLRLDTLIEWWREKNGSFCSRLIIVLDSENSTPWVKEVRKINDQYIAVQGAELIKTVDIEEADPPQLGDFTKDWVEYNCNSSNNICWTEKGRTVKAVYGVSKRWSDYTLHLPTGSDVAKHWMLHFPRITYPLVHLANWLCGLNLFWICKTCFRCLKRLKMSWFLPTVLDTGQGFKLVKS

SEQ ID NO: 13384 - protein, 697 aa, Homo sapiens
MCKSLRYCFSHCLYLAMTRLEEVNREVNMHSSVRYLGYLARINLLVAICLGLYVRWEKTANSLILVIFILGLFVLGIASILYYYFSMEAASLSLSNLWFGFLLGLLCFLDNSSFKNDVKEESTKYLLLTSIVLRILCSLVERISGYVRHRPTLLTTVEFLELVGFAIASTTMLVEKSLSVILLVVALAMLIIDLRMKSFLAIPNLVIFAVLLFFSSLETPKNPIAFACFFICLITDPFLDIYFSGLSVTERWKPFLYRGRICRRLSVVFAGMIELTFFILSAFKLRDTHLWYFVIPGFSIFGIFWMICHIIFLLTLWGFHTKLNDCHKVYFTHRTDYNSLDRIMASKGMRHFCLISEQLVFFSLLATAILGAVSWQPTNGIFLSMFLIVLPLESMAHGLFHELGNCLGGTSVGYAIVIPTNFCSPDGQPTLLPPEHVQELNLRSTGMLNAIQRFFAYHMIETYGCDYSTSGLSFDTLHSKLKAFLELRTVDGPRHDTYILYYSGHTHGTGEWALAGGDTLRLDTLIEWWREKNGSFCSRLIIVLDSENSTPWVKEVRKINDQYIAVQGAELIKTVDIEEADPPQLGDFTKDWVEYNCNSSNNICWTEKGRTVKAVYGVSKRWSDYTLHLPTGSDVAKHWMLHFPRITYPLVHLANWLCGLNLFWICKTCFRCLKRLKMSWFLPTVLDTGQGFKLVKS

SEQ ID NO: 13385 - protein, 697 aa, Homo sapiens; identical to SEQ ID NO: 13384

SEQ ID NO: 13386 - protein, 124 aa, Homo sapiens
MFLIVLPLESMAHGLFHELGNCLGGTSVGYAIVIPTNFCSPDGQPTLLPPEHVQELNLRSTGMLNAIQRFFAYHMIETYGCDYSTSGLSFDTLHSKLKAFLELRTVDGPRHDTYILYYSGHTHG

SEQ ID NO: 13387 - protein, 313 aa, Homo sapiens
MFLIVLPLESMAHGLFHELGNCLGGTSVGYAIVIPTNFCSPDGQPTLLPPEHVQELNLRSTGMLNAIQRFFAYHMIETYGCDYSTSGLSFDTLHSKLKAFLELRTVDGPRHDTYILYYSGHTHGTGEWALAGGDTLRLDTLIEWWREKNGSFCSRLIIVLDSENSTPWVKEVRKINDQYIAVQGAELIKTVDIEEADPPQLGDFTKDWVEYNCNSSNNICWTEKGRTVKAVYGVSKRWSDYTLHLPTGSDVAKHWMLHFPRITYPLVHLANWLCGLNLFWICKTCFRCLKRLKMSWFLPTVLDTGQGFKLVKS

SEQ ID NO: 13388 - protein, 112 aa, Homo sapiens
MRHFCLISEQLVFFSLLATAILGAVSWQPTNGIFLSMFLIVLPLESMAHGLFHELGNCLGGTSVGYAIVIPTNFCSPDGQPTLLPPEHVQELNLRSTGMLNAIQRFFAYHMI

SEQ ID NO: 13389 - protein, 111 aa, Homo sapiens
MEPRALVTALSLGLSLCSLGLLVTAIFTDHWYETDPRRHKESCERSRAGADPPDQKNRLMPLSHLLGPLEEVLLPGHRPGHRHPHPERYCAAMHGHQVPLFSAHPLAKHSF

SEQ ID NO: 13390 - protein, 297 aa, Homo sapiens
MEPRALVTALSLGLSLCSLGLLVTAIFTDHWYETDPRRHKESCERSRAGADPPDQKNRLMPLSHLPLRDSPPLGRRLLPGGPGRADPESWRSLLGLGGLDAECGRPLFATYSGLWRKCYFLGIDRDIDTLILKGIAQRCTAIKYHFSQPIRLRNIPFNLTKTIQQDEWHLLHLRRITAGFLGMAVAVLLCGCIVATVSFFWEESLTQHVAGLLFLMTGIFCTISLCTYAASISYDLNRLPKLIYSLPADVEHGYSWSIFCAWCSLGFIVAAGGLCIAYPFISRTKIAQLKSGRDSTV

SEQ ID NO: 13391 - protein, 233 aa, Homo sapiens
MALNNFLFAQCACYFLAFLFSFVVVVPLSENGHDFRGRCLLFTEGMWLSANLTVQERERFTVQEWGPPAACRFSLLASLLSLLLAAAHAWRTLFFLCKGHEGSFFSAFLNLLVSAFVVFLVFIASTIVSVGFTMWCDTITEKGTVPHSCEELQDIDLELGVDNSAFYDQFAIAQFGLWASWLAWLAITTLAFLKVYHNYRQEDLLDSLIHEKELLLARPSPRTSFQEEKSAVI

SEQ ID NO: 13392 - protein, 190 aa, Homo sapiens
MALNNFLFAQCACYFLAFLFSFVVVVPLSENGHDFRGRCLLFTEGMWLSANLTVQERERFTVQEWGPPAACRFSLLASLLSLLLAAAHAWRTLFFLCKGHEGSFFSAFLNLLVSAFVVFLVFIASTIVSVGFTMWCDTITEKGTVPHSCEELQDIDLELGVDNSAFYDQFAIAQGSLIDSHGVETPPGQS

SEQ ID NO: 13393 - protein, 197 aa, Homo sapiens
MALNNFLFAQCACYFLAFLFSFVVVVPLSENGHDFRGRCLLFTEGMWLSANLTVQERERFTVQEWGPPAACRFSLLASLLSLLLAAAHAWRTLFFLCKGHEGSFFSAFLNLLVSAFVVFLVFIASTIVSVGFTMWCDTITEKGTVPHSCEELQDIDLELGVDNSAFYDQFAIAQVGGSGQEGRLAMLGGGHLLLDIC

SEQ ID NO: 13394 - protein, 211 aa, Homo sapiens
MALNNFLFAQCACYFLAFLFSFVVVVPLSENGHDFRGRCLLFTEGMWLSANLTVQERERFTVQEWGPPAACRFSLLASLLSLLLAAAHAWRTLFFLCKGHEGSFFSAFLNLLVSAFVVFLVFIASTIVSVGFTMWCDTITEKGTVPHSCEELQDIDLELGVDNSAFYDQFAIAQVQFRTPGWPLKALAGRGWPEDASPGQEPSKGAGHGWA

SEQ ID NO: 13395 - protein, 182 aa, Homo sapiens
MCTPVRVSIVCVMGAVGAVWTAPLPLPWAPTPSIHLREEGAAFPFCRVCVLRPRRSKWRSWDVNLGPRRRGLLGCGPCPSGKPRVHLQRTRSGAGAEAGGLPTRGSMRGCPFLGSSAAKCSLLLRPPSRGEASPWLPEFMTHPVHHQQLACVSGWLGTSLLEATCLGPHGGSWWGHHPGSRE

SEQ ID NO: 13396 - protein, 78 aa, Homo sapiens
  VARIANT 1: note = misc_feature - Xaa can be any naturally occurring amino acid
XPDPREGAAAGPAVPTHLLPRGEERCHLGTVQAGGAGPDLPAALGGTGLPGEAAGGLCLGPGHMQPCVCPLDATCSEP

SEQ ID NO: 13397 - protein, 172 aa, Homo sapiens
MCTSGQIIGSLLVLSVLEIGLGVSSVAVGAVSFSLALREHKPQLGDSSPFLLCGICGILCAKKKSGLVMILFSACCICGLIGGILNFQFLRAVTKKTSSLYPLHLASMSLACIGIGGCTLSSWLTCRLASYEQRRMFSEREHSLHHSHEMAEKEITDNMSNGGPQLIFNGRV

SEQ ID NO: 13398 - protein, 179 aa, Homo sapiens
MCTSGQIIGSLLVLSVLEIGLGVSSVAVGAVSFSLALREHKPQLGDSSPFLLCGICGILCAKKKSGLVMILFSACCICGLIGGILNFQFLRAVTKKTSSLYPLHLASMSLACIGIGGCTLSSWLTCRLASYEQRRMFSEREHSLHHSHEMAEKRLRAIEITDLPSCPVVPPTPELPTRK

SEQ ID NO: 13399 - protein, 104 aa, Homo sapiens
MILFSACCICGLIGGILNFQFLRAVTKKTSSLYPLHLASMSLACIGIGGCTLSSWLTCRLASYEQRRMFSEREHSLHHSHEMAEKEITDNMSNGGPQLIFNGRV

SEQ ID NO: 13400 - protein, 89 aa, Homo sapiens
MILFSACCICGLIGGILNFQFLRAVTKKTSSLYPLHLASMSLACIGIGGCTLSSWLTCRLASYEQRRMFSEREHSLHHSHEMAEKIEGY

SEQ ID NO: 13401 - protein, 111 aa, Homo sapiens
MILFSACCICGLIGGILNFQFLRAVTKKTSSLYPLHLASMSLACIGIGGCTLSSWLTCRLASYEQRRMFSEREHSLHHSHEMAEKRLRAIEITDLPSCPVVPPTPELPTRK

SEQ ID NO: 13402 - protein, 34 aa, Homo sapiens
MASRVLAALIVASVVGLAELYVMVRAMEGELGEL

SEQ ID NO: 13403 - protein, 125 aa, Homo sapiens
MASSLLAGERLVRALGPGGELEPERLPRKLRAELEAALGKKHKGGDSSSGPQRLVSFRLIRDLHQHLRERDSKLYLHELLEGSEIYLPEVVKPPRNPELVARLEKIKIQLANEEYKRITRNVTCQ

SEQ ID NO: 13404 - protein, 208 aa, Homo sapiens
MASSLLAGERLVRALGPGGELEPERLPRKLRAELEAALGKKHKGGDSSSGPQRLVSFRLIRDLHQHLRERDSKLYLHELLEGSEIYLPEVVKPPRNPELVARLEKIKIQLANEEYKRITRNVTCQDTRHGGTLSDLGKQVRSLKALVITIFNFIVTVVAAFVCTYLGSQYIFTEMASRVLAALIVASVVGLAELYVMVRAMEGELGEL

SEQ ID NO: 13405 - protein, 89 aa, Homo sapiens
MASSLLAGERLVRALGPGGELEPERLPRKLRAELEAALGKKHKGGDSSSGPQRLVSFRLIRDLHQHLRERGEPQSPVREPRTSCPAGED

SEQ ID NO: 13406 - protein, 124 aa, Homo sapiens [sequence omitted]

SEQ ID NO: 13407 - protein, 88 aa, Homo sapiens
MEEGGNLGGLIKMVHLLVLSGAWGMQMWVTFVSGFLLFRSLPRHTFGLVQSKLFPFYFHISMGCAFINLCILASQHAWAQLTFWEASQ

SEQ ID NO: 13408 - protein, 107 aa, Homo sapiens
MEEGGNLGGLIKMVHLLVLSGAWGMQMWVTFVSGFLLFRSLPRHTFGLVQSKLFPFYFHISMGCAFINLCILASQHAWAQLTFWEASQLYLLFLSLTLATVNARWLE

SEQ ID NO: 13409 - protein, 170 aa, Homo sapiens
MEEGGNLGGLIKMVHLLVLSGAWGMQMWVTFVSGFLLFRSLPRHTFGLVQSKLFPFYFHISMGCAFINLCILASQHAWAQLTFWEASQLYLLFLSLTLATVNARWLEPRTTAAMWALQTVEKERGLGGEVPGSHQGPDPYRQLREKDPKYSALRQNFFRYHGLSSLCNLG

SEQ ID NO: 13410 - protein, 189 aa, Homo sapiens
MEEGGNLGGLIKMVHLLVLSGAWGMQMWVTFVSGFLLFRSLPRHTFGLVQSKLFPFYFHISMGCAFINLCILASQHAWAQLTFWEASQLYLLFLSLTLATVNARWLEPRTTAAMWALQTVEKERGLGGEVPGSHQGPDPYRQLREKDPKYSALRQNFFRYHGLSSLCNLGCVLSNGLCLAGLALEIRSL

SEQ ID NO: 13411 - protein, 189 aa, Homo sapiens; identical to SEQ ID NO: 13410

SEQ ID NO: 13412 - protein, 189 aa, Homo sapiens; identical to SEQ ID NO: 13410

SEQ ID NO: 13413 - protein, 189 aa, Homo sapiens; identical to SEQ ID NO: 13410

SEQ ID NO: 13414 - protein, 189 aa, Homo sapiens; identical to SEQ ID NO: 13410

SEQ ID NO: 13415 - protein, 189 aa, Homo sapiens; identical to SEQ ID NO: 13410

SEQ ID NO: 13416 - protein, 189 aa, Homo sapiens; identical to SEQ ID NO: 13410

SEQ ID NO: 13417 - protein, 189 aa, Homo sapiens; identical to SEQ ID NO: 13410

SEQ ID NO: 13418 - protein, 120 aa, Homo sapiens
MGCAFINLCILASQHAWAQLTFWEASQLYLLFLSLTLATVNARWLEPRTTAAMWALQTVEKERGLGGEVPGSHQGPDPYRQLREKDPKYSALRQNFFRYHGLSSLCNLGCVLSNGLCLAG

SEQ ID NO: 13419 - protein, 128 aa, Homo sapiens
MGCAFINLCILASQHAWAQLTFWEASQLYLLFLSLTLATVNARWLEPRTTAAMWALQTVEKERGLGGEVPGSHQGPDPYRQLREKDPKYSALRQNFFRYHGLSSLCNLGCVLSNGLCLAGLALEIRSL

SEQ ID NO: 13420 - protein, 106 aa, Homo sapiens
MQRLPAATRATLILSLAFASLHSACSAASSSNSSSLTAHHPDPGTLEQCLNVDFCPQAARCCRTGVDEYGWIAAAVGWSLWFLTLILLCVDKLMKLTPDEPKDLQA

SEQ ID NO: 13421 - protein, 83 aa, Homo sapiens
MQRLPAATRATLILSLAFASLHSACSADVDFCPQAARCCRTGVDEYGWIAAAVGWSLWFLTLILLCVDKLMKLTPDEPKDLQA

SEQ ID NO: 13422 - protein, 107 aa, Homo sapiens
MQRLPAATRATLILSLAFASLHSACSAEASSSNSSSLTAHHPDPGTLEQCLNVDFCPQAARCCRTGVDEYGWIAAAVGWSLWFLTLILLCVDKLMKLTPDEPKDLQA

SEQ ID NO: 13423 - protein, 105 aa, Homo sapiens
MQRLPAATRATLILSLAFASLHSACSAEASSSNSSSLTAHHPDPGTLEQCLRSGYLANLRGEADQLWKFCTVLCFWESRRSSSRIALMREAEEWPGWRSSVELVG

SEQ ID NO: 13424 - protein, 49 aa, Homo sapiens
MALPPGPAALRHTLLLLPALLSSAQYQPCLSPSQRPPAVFQVGGSWSHK

SEQ ID NO: 13425 - protein, 40 aa, Homo sapiens
MALPPGPAALRHTLLLLPALLSSGGPGTPRLAWYLDGQLQ

SEQ ID NO: 13426 - protein, 170 aa, Homo sapiens
MALPPGPAALRHTLLLLPALLSSGGPGTPRLAWYLDGQLQEASTSRLLSVGGEAFSGGTSTFTVTAHRAQHELNCSLQDPRSGRSANASVILNVQFKPEIAQVGAKYQEAQGPGLLVVLFALVRANPPANVTWIDQDGPVTVNTSDFLVLDAQNYPWLTNHTVQLQLRSL

SEQ ID NO: 13427 - protein, 37 aa, Homo sapiens
MALPPGPAALRHTLLLLPALLSSGPQKWPISQRLCHP

SEQ ID NO: 13428 - protein, 168 aa, Homo sapiens
MALPPGPAALRHTLLLLPALLSSGWGELEPQIDGQTWAERALRENERHAFTCRVAGGPGTPRLAWYLDGQLQEASTSRLLSVGGEAFSGGTSTFTVTAHRAQHELNCSLQDPRSGRSANASVILNVQCPSRHPSLISSDSNNLKLNNVRLPRENMSLPSNLQLNDLTP

SEQ ID NO: 13429 - protein, 138 aa, Homo sapiens
MALPPGPAALRHTLLLLPALLSSGWGELEPQIDGQTWAERALRENERHAFTCRVAGGPGTPRLAWYLDGQLQEASTSRLLSVGGEAFSGGTSTFTVTAHRAQHELNCSLQDPRSGRSANASVILNVQFKPEIAQVGAK

SEQ ID NO: 13430 - protein, 366 aa, Homo sapiens
MALPPGPAALRHTLLLLPALLSSGWGELEPQIDGQTWAERALRENERHAFTCRVAGGPGTPRLAWYLDGQLQEASTSRLLSVGGEAFSGGTSTFTVTAHRAQHELNCSLQDPRSGRSANASVILNVQFKPEIAQVGAKYQEAQGPGLLVVLFALVRANPPANVTWIDQDGPVTVNTSDFLVLDAQNYPWLTNHTVQLQLRSLAHNLSVVATNDVGVTSASLPAPGLLATRVEVPLLGIVVAAGLALGTLVGFSTLVACLVCRKEKKTKGPSRHPSLISSDSNNLKLNNVRLPRENMSLPSNLQLNDLTPDSRAVKPADRQMAQNNSRPELLDPEPGGLLTSQGFIRLPVLGYIYRVSSVSSDEIWL

SEQ ID NO: 13431 - protein, 351 aa, Homo sapiens
MALPPGPAALRHTLLLLPALLSSGWGELEPQIDGQTWAERALRENERHAFTCRVAGGPGTPRLAWYLDGQLQEASTSRLLSVGGEAFSGGTSTFTVTAHRAQHELNCSLQDPRSGRSANASVILNVQFKPEIAQVGAKYQEAQGPGLLVVLFALVRANPPANVTWIDQDGPVTVNTSDFLVLDAQNYPWLTNHTVQLQLRSLAHNLSVVATNDVGVTSASLPAPGLLATRVEVPLLGIVVAAGLALGTLVGFSTLVACLVCRKEKKTKGPSRHPSLISSDSNNLKLNNVRLPRENMSLPSNLQLNDLTPDSRAVKPADRQMAQNNSRPELLDPEPGGLLTSQGRRNQDKDA

SEQ ID NO: 13432 - protein, 381 aa, Homo sapiens
MALPPGPAALRHTLLLLPALLSSGWGELEPQIDGQTWAERALRENERHAFTCRVAGGPGTPRLAWYLDGQLQEASTSRLLSVGGEAFSGGTSTFTVTAHRAQHELNCSLQDPRSGRSANASVILNVQFKPEIAQVGAKYQEAQGPGLLVVLFALVRANPPANVTWIDQDGPVTVNTSDFLVLDAQNYPWLTNHTVQLQLRSLAHNLSVVATNDVGVTSASLPAPGLLATRVEVPLLGIVVAAGLALGTLVGFSTLVACLVCRKEKKTKGPSRHPSLISSDSNNLKLNNVRLPRENMSLPSNLQLNDLTPDSRVKPADRQMAQNNSRPELLDPEPGGLLTSQACLLHHGTPALTNPWLPHQQEGALPGGWSPQAHNSTVWKL

SEQ ID NO: 13433 - protein, 322 aa, Homo sapiens
MALPPGPAALRHTLLLLPALLSSGWGELEPQIDGQTWAERALRENERHAFTCRVAGGPGTPRLAWYLDGQLQEASTSRLLSVGGEAFSGGTSTFTVTAHRAQHELNCSLQDPRSGRSANASVILNVQFKPEIAQVGAKYQEAQGPGLLVVLFALVRANPPANVTWIDQDGPVTVNTSDFLVLDAQNYPWLTNHTVQLQLRSLAHNLSVVATNDVGVTSASLPAPGPSRHPSLISSDSNNLKLNNVRLPRENMSLPSNLQLNDLTPDSRAVKPADRQMAQNNSRPELLDPEPGGLLTSQGFIRLPVLGYIYRVSSVSSDEIWL

SEQ ID NO: 13434 - protein, 306 aa, Homo sapiens
MALPPGPAALRHTLLLLPALLSSGWGELEPQIDGQTWAERALRENERHAFTCRVAGGPGTPRLAWYLDGQLQEASTSRLLSVGGEAFSGGTSTFTVTAHRAQHELNCSLQDPRSGRSANASVILNVQFKPEIAQVGAKYQEAQGPGLLVVLFALVRANPPANVTWIDQDGPVTVNTSDFLVLDAQNYPWLTNHTVQLQLRSLAHNLSVVATNDVGVTSASLPAPGPSRHPSLISSDSNNLKLNNVRLPRENMSLPSNLQLNDLTPDSRVKPADRQMAQNNSRPELLDPEPGGLLTSQGRRNQDKDA

SEQ ID NO: 13435 - protein, 322 aa, Homo sapiens; identical to SEQ ID NO: 13433

SEQ ID NO: 13436 - protein, 322 aa, Homo sapiens; identical to SEQ ID NO: 13433

SEQ ID NO: 13437 - protein, 167 aa, Homo sapiens
MALPPGPAALRHTLLLLPALLSSGWGELEPQIDGQTWAERALRENERHAFTCRVAGGPGTPRLAWYLDGQLQEASTSRLLSVGGEAFSGGTSTFTVTAHRAQHELNCSLQDPRSGRSANASVILNVQWLLATRVEVPLLGIVVAAGLALGTLVGFSTLVACLVCRKE

SEQ ID NO: 13438 - protein, 218 aa, Homo sapiens
MALPPGPAALRHTLLLLPALLSSVKPEIAQVGAKYQEAQGPGLLVVLFALVRANPPANVTWIDQDGPVTVNTSDFLVLDAQNYPWLTNHTVQLQLRSLAHNLSVVATNDVGVTSASLPAPGPSRHPSLISSDSNNLKLNNVRLPRENMSLPSNLQLNDLTPDSRAVKPADRQMAQNNSRPELLDPEPGGLLTSQGFIRLPVLGYIYRVSSVSSDEIWL

SEQ ID NO: 13439 - protein, 200 aa, Homo sapiens
  VARIANT 1: note = misc_feature - Xaa can be any naturally occurring amino acid
XDQDGPVTVNTSDFLVLDAQNYPWLTNHTVQLQLRSLAHNLSVVATNDVGVTSASLPAPGLLATRVEVPLLGIVVAAGLALGTLVGFSTLVACLVCRKEKKTKGPSRHPSLISSDSNNLKLNNVRLPRENMSLPSNLQLNDLTPDSRVKPADRQMAQNNSRPELLDPEPGGLLTSQGFIRLPVLGYIYRVSSVSSDEIWL

SEQ ID NO: 13440 - protein, 195 aa, Homo sapiens
  VARIANT 1: note = misc_feature - Xaa can be any naturally occurring amino acid
XLLRRRSGREPVKPEIAQVGAKYQEAQGPGLLVVLFALVRANPPANVTWIDQDGPVTVNTSDFLVLDAQNYPWLTNHTVQLQLRSLAHNLSVVATNDVGVTSASLPAPGPSRHPSLISSDSNNLKLNNVRLPRENMSLPSNLQLNDLTPDSRAVKPADRQMAQNNSRPELLDPEPGGLLTSQGFIRLPVLGYIYR

SEQ ID NO: 13441 - protein, 113 aa, Homo sapiens
MEERAQHCLSRLLDNSALKQQELPIHRLYFTARRVLFVFFATGIFCLCMGIILILSARSTQEIEINYTRICANCAKLRENASNFDKECTCSIPFYLSGKMMVGEIQETRLTLH

SEQ ID NO: 13442 - protein, 291 aa, Homo sapiens
MDSPWDELALAFSRTSMFPFFDIAHYLVSVMAVKRQPGAAALAWKNPISSWFTAMLHCFGGGILSCLLLAEPPLKFLANHTNILLASSIWYITFFCPHDLVSQGYSYLPVQLLASGMKEVTRTWKIVGGVTHANSYYKNGWIVMIAIGWARGAGGTIITNFERLVKGDWKPEGDEWLKMSYPAKVTLLGSVIFTFQHTQHLAISKHNLMFLYTIFIVATKITMMTTQTSTMTFAPFEDTLSWMLFGWQQPFSSCEKKSEAKSPSNGVGSLASKPVDVASDNVKKKHTKKNE

SEQ ID NO: 13443 - protein, 35 aa, Homo sapiens
MLHCFGGGILSCLLLAEPPLKFLANHTNILLASSI

SEQ ID NO: 13444 - protein, 237 aa, Homo sapiens
MLHCFGGGILSCLLLAEPPLKFLANHTNILLASSIWYITFFCPHDLVSQGYSYLPVQLLASGMKEVTRTWKIVGGVTHANSYYKNGWIVMIAIGWARGAGGTIITNFERLVKGDWKPEGDEWLKMSYPAKVTLLGSVIFTFQHTQHLAISKHNLMFLYTIFIVATKITMMTTQTSTMTFAPFEDTLSWMLFGWQQPFSSCEKKSEAKSPSNGVGSLASKPVDVASDNVKKKHTKKNE

SEQ ID NO: 13445 - protein, 162 aa, Homo sapiens
  VARIANT 1: note = misc_feature - Xaa can be any naturally occurring amino acid
XSCLLLAEPPLKFLANHTNILLASSIWYITFFCPHDLVSQGYSYLPVQLLASGMKEVTRTWKIVGGVTHANSYYKNGWIVMIAIGWARGAGGTIITNFERLVKGDWKPEGDEWLKMSYPAKVTLLGSVIFTFQHTQHLAISKHNLMFLYTIFIVATKSLNWR

SEQ ID NO: 13446 - protein, 81 aa, Homo sapiens
  VARIANT 1: note = misc_feature - Xaa can be any naturally occurring amino acid
XWIVMIAIGWARGAGGTIITNFERLVKGDWKPEGDEWLKMSYPAKVTLLGSVIFTFQHTQHLAISKHNLMFLYTIFIVATK

SEQ ID NO: 13447 - protein, 197 aa, Homo sapiens
LRATPWFLTSLGRAALDLAIIFLSCVMKSKMRQALGFAKEARESPDTQALLTCAEKEEENQENLDWVPLTTLSHCKSLRTMTAISRYMELTIEPVQQAGCSATRLPGDGQTSAGDASLQDPPSYPPVQVIRARVSSGSSSEVSSINSDLEQKYWEALNSEQWDPEDVNLEGSKENVELLGSQVHQDSVRTAHLSDDD

SEQ ID NO: 13448 - protein, 150 aa, Homo sapiens
MFILFPVCGSKFKSNSDREARERKRRRQLRASVFALALPLSLGPCWALWVAVPKASATIRGPQRRLLASLLQENTEILGYLLGSVAAFGSWASRIPPLSRIMESRCVAQAGVQWRDLGSLQPSPPNFKQFSCLSLPSSWDYSCQWSCRSC

SEQ ID NO: 13449 - protein, 113 aa, Homo sapiens
MFILFPVCGSKFKSNSDREARERKRRRQLRASVFALALPLSLGPCWALWVAVPKASATIRGPQRRLLASLLQENTEILGYLLGSVAAFGSWASRIPPLSRIVRPGVGMGLWVT

SEQ ID NO: 13450 - protein, 121 aa, Homo sapiens
MGEAPSPAPALWDWDYLDRCFARHRVCISFGLWICASSCWIAAHALLLYLRCAQKPRQDQSALCAACCLLTSLCDTVGALLARQLTIQSVDPNSSLIQIGKPERGRGGGSSGPVCLPWPCR

SEQ ID NO: 13451 - protein, 475 aa, Homo sapiens
MGEAPSPAPALWDWDYLDRCFARHRVCISFGLWICASSCWIAAHALLLYLRCAQKPRQDQSALCAACCLLTSLCDTVGALLARQLTIQVFTGAYLAAIDLVNFMFILFPVCGSKFKSNSDREARERKRRRQLRASVFALALPLSLGPCWALWVAVPKASATIRGPQRRLLASLLQENTEILGYLLGSVAAFGSWASRIPPLSRIAPPPTLGITTQHEIWRGQMSKPSQSPSRSPSGHWRAAAQRQVLGTEMCRGKTFPSIHLWTRLLSALAGLLYASAIVAHDQHPEYLLRATPWFLTSLGRAALDLAIIFLSCVMKSKMRQALGFAKEARESPDTQALLTCAEKEEENQENLDWVPLTTLSHCKSLRTMTAISRYMELTIEPVQQAGCSATRLPGDGQTSAGDASLQDPPSYPPVQVIRARVSSGSSSEVSSINSDLEWDPEDVNLEGSKENVELLGSQVHQDSVRTAHLSDDD

SEQ ID NO: 13452 - protein, 428 aa, Homo sapiens
MGEAPSPAPALWDWDYLDRCFARHRVCISFGLWICASSCWIAAHALLLYLRCAQKPRQDQSALCAACCLLTSLCDTVGALLARQLTIQVFTGAYLAAIDLVNFMFILFPVCGSKFKSNSDREARERKRRRQLRASVFALALPLSLGPCWALWVAVPKASATIRGPQRRLLASLLQENTEILGYLLGSVAAFGSWASRIPPLSRICRGKTFPSIHLWTRLLSALAGLLYASAIVAHDQHPEYLLRATPWFLTSLGRAALDLAIIFLSCVMKSKMRQALGFAKEARESPDTQALLTCAEKEEENQENLDWVPLTTLSHCKSLRTMTAISRYMELTIEPVQQAGCSATRLPGDGQTSAGDASLQDPPSYPPVQVIRARVSSGSSSEVSSINSDLEWDPEDVNLEGSKENVELLGSQVHQDSVRTAHLSDDD

SEQ ID NO: 13453 - protein, 396 aa, Homo sapiens
MGEAPSPAPALWDWDYLDRCFARHRVCISFGLWICASSCWIAAHALLLYLRCAQKPRQDQSALCAACCLLTSLCDTVGALLARQLTIQVFTGAYLAAIDLVNFMFILFPVCGSKFKSNSDREARERKRRRQLRASVFALALPLSLGPCWALWVAVPKASATIRGPQRRLLASLLQENTEILGYLLGSVAAFGSWASRIPPLSRICRGKTFPSIHLWTRLLSALAGLLYASAIVAHDQHPEYLLRATPWFLTSLGRAALDLAIIFLSCVMKSKMRQALGFAKEARESPDTQALLTCAEKEEENQENLDWVPLTTLSHCKSLRTMTAISRYMELTIEPVQQAAVPPGCQVTGRRAPEMRPCRTPRRTLPFRSSGPGCLPAAPLRSPPSTPTWSGTLKM

SEQ ID NO: 13454 - protein, 438 aa, Homo sapiens
MGEAPSPAPALWDWDYLDRCFARHRVCISFGLWICASSCWIAAHALLLYLRCAQKPRQDQSALCAACCLLTSLCDTVGALLARQLTIQVFTGAYLAAIDLVNFMFILFPVCGSKFKSNSDREARERKRRRQLRASVFALALPLSLGPCWALWVAVPKASATIRGPQRRLLASLLQENTEILGYLLGSVAAFGSWASRIPPLSRICRGKTFPSIHLWTRLLSALAGLLYASAIVAHDQHPEYLLRATPWFLTSLGRAALDLAIIFLSCVMKSKMRQALGFAKEARESPDTQALLTCAEKEEENQENLDWVPLTTLSHCKSLRTMTAISRYMELTIEPVQQAGCSATRLPGDGQTSAGDASLQDPPSYPPVQVIRARVSSGSSSEVSSINSDLEKYWEALNSEQWDPEDVNLEGSKENVELLGSQVHQDSVRTAHLSDDD

SEQ ID NO: 13455 - protein, 119 aa, Homo sapiens
MKSKMRQALGFAKEARESPDTQALLTCAEKEEENQENLDWVPLTTLSHCKSLRTMTAISRYMELTIEPVQQAAVPPGCQVTGRRAPEMRPCRTPRRTLPFRSSGPGCLPAAPLSGTLKM

SEQ ID NO: 13456 - protein, 261 aa, Homo sapiens
NFMFILFPVCGSKFKSNSDREARERKRRRQLRASVFALALPLSLGPCWALWVAVPKASATIRGPQRRLLASLLQENTEILGYLLGSVAAFGSWASRIPPLSRISKMRQALGFAKEARESPDTQALLTCAEKEEENQENLDWVPLTTLSHCKSLRTMTAISRYMELTIEPVQQAGCSATRLPGDGQTSAGDASLQDPPSYPPVQVIRARVSSGSSSEVSSINSDLEWDPEDVNLEGSKENVELLGSQVHQDSVRTAHLSDDD

SEQ ID NO: 13457 - protein, 124 aa, Homo sapiens
GGRWPPADCGCCCRSCRSCRSCRCRRWVGRRSLSVRPPRGGSLLGPRPSRAHPCPHRWRWASRTAAATPRTSARPRPAGAACGTWACTPRSLHPPTMKLSRWPSPERKDQHSPRNPALSLGPRA

SEQ ID NO: 13458 - protein, 43 aa, Homo sapiens
MARGPLAARGLRLLLPLLPLLPLLPLPQVALGFADGSCDPSDQ

SEQ ID NO: 13459 - protein, 209 aa, Homo sapiens
MARGPLAARGLRLLLPLLPLLPLLPLPQVALGFADGSCDPSDQCPPQARWSSLWHVGLILLAVLLLLLCGVTAGCVRFCCLRKQAQAQPHLPPARQPCDVAVIPMDSDSPVHSTVTSYSSVQYPLGMRLPLPFGELDLDSMAPPAYSLYTPEPPPSYDEAVKMAKPREEGPALSQKPSPLLGASGLETTPVPQESGPNTQLPPCSPGAP

SEQ ID NO: 13460 - protein, 103 aa, Homo sapiens
MARGPLAARGLRLLLPLLPLLPLLPLPQVGRAAFSLGSATAGRVPARTTPLPGSPLSPQVALGFADGSCDPSDQCPPQARWSSLWHVGLILLAVLLLLLCGVT

SEQ ID NO: 13461 - protein, 194 aa, Homo sapiens
MERHCLLFILLTCLRWLCHDIPQGAGARWPRVSPVVEPCSPRLILLAVLLLLLCGVTAGCVRFCCLRKQAQAQPHLPPARQPCDVAVIPMDSDSPVHSTVTSYSSVQYPLGMRLPLPFGELDLDSMAPPAYSLYTPEPPPSYDEAVKMAKPREEGPALSQKPSPLLGASGLETTPVPQESGPNTQLPPCSPGAP

SEQ ID NO: 13462 - protein, 90 aa, Homo sapiens
MGVRVHVVAASALLYFILLSGTRCEENCGNPEHCLTTDWVHLWYIWLLVVIGALLLLCGLTSLCFRCCCLSRQQNGEDGGPPPCEVTVIA

SEQ ID NO: 13463 - protein, 183 aa, Homo sapiens
MGVRVHVVAASALLYFILLSGTRCEENCGNPEHCLTTDWVHLWYIWLLVVIGALLLLCGLTSLCFRCCCLSRQQNGEDGGPPPCEVTVIAFDHDSTLQSTITSLQSVFGPAARRILAVAHSHSSLGQLPSSLDTLPGYEEALHMSRFTVAMCGQKAPDLPPVPEEKQLPPTEKESTRIVDSWN

SEQ ID NO: 13464 - protein, 163 aa, Homo sapiens
MSWRPQPCCISSCCLTTDWVHLWYIWLLVVIGALLLLCGLTSLCFRCCCLSRQQNGEDGGPPPCEVTVIAFDHDSTLQSTITSLQSVFGPAARRILAVAHSHSSLGQLPSSLDTLPGYEEALHMSRFTVAMCGQKAPDLPPVPEEKQLPPTEKESTRIVDSWN

SEQ ID NO: 13465 - protein, 323 aa, Homo sapiens
MAAPKGSLWVRTQLGLPPLLLLTMALAGGSGTASAEAFDSVLGDTASCHRACQLTYPLHTYPKEEELYACQRGCRLFSICQFVDDGIDLNRTKLECESACTEAYSQSDEQYACHLGCQNQLPFAELRQEQLMSLMPKMHLLFPLTLVRSFWSDMMDSAQSFITSSWTFYLQADDGKIVIFQSKPEIQYAPHLEQEPTNLRESSLSKMSYLQMRNSQAHRNFLEDGESDGFLRCLSLNSGWILTTTLVLSVMVLLWICCATVATAVEQYVPSEKLSIYGDLEFMNEQKLNRYPASSLVVVRSKTEDHEEAGPLPTKVNLAHSEI

SEQ ID NO: 13466 - protein, 145 aa, Homo sapiens
MAAPKGSLWVRTQLGLPPLLLLTMALAGGSGTASAEAFDSVLGDTASCHRACQLTYPLHTYPKEEELYACQRGCRLFSICQFVDDGIDLNRTKLECESACTEAYSQSDEQYACHLGCQNQLPFAELRQEQVRNNTAFQTSLLRWH

SEQ ID NO: 13467 - protein, 285 aa, Homo sapiens
MAAPKGSLWVRTQLGLPPLLLLTMALAGGSGTASAEAFDSVLGDTASCHRACQLTYPLHTYPKVSASLYTVDHIEEELYACQRGCRLFSICQFVDDGIDLNRTKLECESACTEAYSQSDEQYACHLGCQNQLPFAELRQEQLMSLMPKMHLLFPLTLVRSFWSDMMDSAQSFITSSWTFYLQADDGKIVIFQSKPEIQYAPHLEQEPTNLRESSLSKMSYLQMRNSQAHRNFLEDGESDGFLRCLSLNSGWILTTTLVLSVMVLLWICCATVATAVEQYVPSEVN

SEQ ID NO: 13468 - protein, 192 aa, Homo sapiens
MSLMPKMHLLFPLTLVRSFWSDMMDSAQSFITSSWTFYLQADDGKIVIFQSKPEIQYAPHLEQEPTNLRESSLSKMSYLQMRNSQAHRNFLEDGESDGFLRCLSLNSGWILTTTLVLSVMVLLWICCATVATAVEQYVPSEKLSIYGDLEFMNEQKLNRYPASSLVVVRSKTEDHEEAGPLPTKVNLAHSEI

SEQ ID NO: 13469 - protein, 192 aa, Homo sapiens; identical to SEQ ID NO: 13468

SEQ ID NO: 13470 - protein, 192 aa, Homo sapiens; identical to SEQ ID NO: 13468

SEQ ID NO: 13471 - protein, 144 aa, Homo sapiens
MSLMPKMHLLFPLTLVRSFWSDMMDSAQSFITSSWTFYLQADDGKIVIFQSKPEIQYAPHLEQEPTNLRESSLSKMSYLQMRNSQAHRNFLEDGESDGFLRCLSLNSGWILTTTLVLSVMVLLWICCATVATAVEQYVPSEVNL

SEQ ID NO: 13472 - protein, 144 aa, Homo sapiens; identical to SEQ ID NO: 13471

SEQ ID NO: 13473 - protein, 180 aa, Homo sapiens
MATRGGAGVAMAVWSLLSARAVTAFLLLFLPRFLQAQTFSFPFQQPEKCDNNQYFDISALSCVPCGANQRQDARGTSCVCLPGFQMISNNGGPAIICKKCPENMKGVTEDGWNCISCPSDLTAEGKCHCPIGHILDSNSGKWLLTRRIFLVDAVSGRENDLGTQPRVIRVATQISLSVHL

SEQ ID NO: 13474 - protein, 147 aa, Homo sapiens
MATRGGAGVAMAVWSLLSARAVTAFLLLFLPRFLQAQTFSFPFQQPEKCDNNQYFDISALSCVPCGANQRQDARGTSCVCLPGFQMISNNGGPAIICKKCPENMKGVTEDGWNCISCPSDLTAEGKCHCPIGHILGSHSCPGWSVVV

SEQ ID NO: 13475 - protein, 995 aa, Homo sapiens
MATRGGAGVAMAVWSLLSARAVTAFLLLFLPRFLQAQTFSFPFQQPEKCDNNQYFDISALSCVPCGANQRQDARGTSCVCLPGFQMISNNGGPAIICKKCPENMKGVTEDGWNCISCPSDLTAEGKCHCPIGHILVERDINGTLLSQATCELCDGNENSFMVVNALGDRCVRCEPTFVNTSRSCACSEPNILTGGLCFSSTGNFPLRRISAARYGEVGMSLTSEWFAKYLQSSAAACWVYANLTSCQALGNMCVMNMNSYDFATFDACGLFQFIFENTAGLSTVHSISFWRQNLPWLFYGDQLGLAPQVLSSTSLPTNFSFKGENQNTKLKFVAASYDIRGNFLKWQTLEGGVLQLCPDTETRLNAAYSFGTTYQQNCEIPISKILIDFPTPIFYDVYLEYTDENQHQYILAVPVLNLNLQHNKIFVNQDSNSGKWLLTRRIFLVDAVSGRENDLGTQPRVIRVATQISLSVHLVPNTINGNIYPPLITIAYSDIDIKDANSQSVKVSFSVTYEMDHGEAHVQTDIALGVLGGLAVLASLLKTAGWKRRIGSPMIDLQTVVKFLVYYAGDLANVFFIITVGTGLYWLIFFKAQKSVSVLLPMPIQEERFVTYVGCAFALKALQFLHKLISQITIDVFFIDWERPKGKVLKAVEGEGGVRSATVPVSIWRTYFVANEWNEIQTVRKINSLFQVLTVLFFLEVVGFKNLALMDSSSSLSRNPPSYIAPYSCILRYAVSAALWLAIGIIQVVFFAVFYERFIEDKIRQFVDLCSMSNISVFLLSHKCFGYYIHGRSVHGHADTNMEEMNMNLKREAENLCSQRGLVPNTDGQTFEIAISNQMRQHYDRIHETLIRKNGPARLLSSSASTFEQSIKAYHMMNKFLGSFIDHVHKEMDYFIKDKLLLERILGMEFMEPMEKSIFYNDEGYSFSSVLYYGNEATLLIFDLLFFCVVDLACQNFILASFLTYLQQEIFRYIRNTVGQKNLASKTLVDQRFLI

SEQ ID NO: 13476 - protein, 119 aa, Homo sapiens
MATRGGAGVAMAVWSLLSARAVTAFLLLFLPRFLQAQTFSFPFQQPEKCDNNQYFDISALSCVPCGANQRQDARGTSCVCLPGFQMISNNGGPAIICKKCPENMVLQKMAGTAFLALVT

SEQ ID NO: 13477 - protein, 985 aa, Homo sapiens
MAVWSLLSARAVTAFLLLFLPRFLQAQTFSFPFQQPEKCDNNQYFDISALSCVPCGANQRQDARGTSCVCLPGFQMISNNGGPAIICKKCPENMKGVTEDGWNCISCPSDLTAEGKCHCPIGHILVERDINGTLLSQATCELCDGNENSFMVVNALGDRCVRCEPTFVNTSRSCACSEPNILTGGLCFSSTGNFPLRRISAARYGEVGMSLTSEWFAKYLQSSAAACWVYANLTSCQALGNMCVMNMNSYDFATFDACGLFQFIFENTAGLSTVHSISFWRQNLPWLFYGDQLGLAPQVLSSTSLPTNFSFKGENQNTKLKFVAASYDIRGNFLKWQTLEGGVLQLCPDTETRLNAAYSFGTTYQQNCEIPISKILIDFPTPIFYDVYLEYTDENQHQYILAVPVLNLNLQHNKIFVNQDSNSGKWLLTRRIFLVDAVSGRENDLGTQPRVIRVATQISLSVHLVPNTINGNIYPPLITIAYSDIDIKDANSQSVKVSFSVTYEMDHGEAHVQTDIALGVLGGLAVLASLLKTAGWKRRIGSPMIDLQTVVKFLVYYAGDLANVFFIITVGTGLYWLIFFKAQKSVSVLLPMPIQEERFVTYVGCAFALKALQFLHKLISQITIDVFFIDWERPKGKVLKAVEGEGGVRSATVPVSIWRTYFVANEWNEIQTVRKINSLFQVLTVLFFLEVVGFKNLALMDSSSSLSRNPPSYIAPYSCILRYAVSAALWLAIGIIQVVFFAVFYERFIEDKIRQFVDLCSMSNISVFLLSHKCFGYYIHGRSVHGHADTNMEEMNMNLKREAENLCSQRGLVPNTDGQTFEIAISNQMRQHYDRIHETLIRKNGPARLLSSSASTFEQSIKAYHMMNKFLGSFIDHVHKEMDYFIKDKLLLERILGMEFMEPMEKSIFYNDEGYSFSSVLYYGNEATLLIFDLLFFCVVDLACQNFILASFLTYLQQEIFRYIRNTVGQKNLASKTLVDQRFLI

SEQ ID NO: 13478 - protein, 397 aa, Homo sapiens
MKGVTEDGWNCISCPSDLTAEGKCHCPIGHILVERDINGTLLSQATCELCDGNENSFMVVNALGDRCVRCEPTFVNTSRSCACSEPNILTGGLCFSSTGNFPLRRISAARYGEVGMSLTSEWFAKYLQSSAAACWVYANLTSCQALGNMCVMNMNSYDFATFDACGLFQFIFENTAGLSTVHSISFWRQNLPWLFYGDQLGLAPQVLSSTSLPTNFSFKGENQNTKLKFVAASYDIRGNFLKWQTLEGGVLQLCPDTETRLNAAYSFGTTYQQNCEIPISKILIDFPTPIFYDVYLEYTDENQHQYILAVPVLNLNLQHNKIFVNQDSNSGKWLLTRRIFLVDAVSGRENDLGTQPRVIRVATQISLSVHLVPNTINGNIYPPLITIAYSDIDIKDA

SEQ ID NO: 13479 - protein, 914 aa, Homo sapiens
MSLSHWPYFRLVLNFRPQVICLPQPPKVLGYRLEPPHLTLACTLEGMYNIIEEILERDINGTLLSQATCELCDGNENSFMVVNALGDRCVRCEPTFVNTSRSCACSEPNILTGGLCFSSTGNFPLRRISAARYGEVGMSLTSEWFAKYLQSSAAACWVYANLTSCQALGNMCVMNMNSYDFATFDACGLFQFIFENTAGLSTVHSISFWRQNLPWLFYGDQLGLAPQVLSSTSLPTNFSFKGENQNTKLKFVAASYDIRGNFLKWQTLEGGVLQLCPDTETRLNAAYSFGTTYQQNCEIPISKILIDFPTPIFYDVYLEYTDENQHQYILAVPVLNLNLQHNKIFVNQDSNSGKWLLTRRIFLVDAVSGRENDLGTQPRVIRVATQISLSVHLVPNTINGNIYPPLITIAYSDIDIKDANSQSVKVSFSVTYEMDHGEAHVQTDIALGVLGGLAVLASLLKTAGWKRRIGSPMIDLQTVVKFLVYYAGDLANVFFIITVGTGLYWLIFFKAQKSVSVLLPMPIQEERFVTYVGCAFALKALQFLHKLISQITIDVFFIDWERPKGKVLKAVEGEGGVRSATVPVSIWRTYFVANEWNEIQTVRKINSLFQVLTVLFFLEVVGFKNLALMDSSSSLSRNPPSYIAPYSCILRYAVSAALWLAIGIIQVVFFAVFYERFIEDKIRQFVDLCSMSNISVFLLSHKCFGYYIHGRSVHGHADTNMEEMNMNLKREAENLCSQRGLVPNTDGQTFEIAISNQMRQHYDRIHETLIRKNGPARLLSSSASTFEQSIKAYHMMNKFLGSFIDHVHKEMDYFIKDKLLLERILGMEFMEPMEKSIFYNDEGYSFSSVLYYGNEATLLIFDLLFFCVVDLACQNFILASFLTYLQQEIFRYIRNTVGQKNLASKTLVDQRFLI

SEQ ID NO: 13480 - protein, 6 aa, Homo sapiens
MVVNAL

SEQ ID NO: 13481 - protein, 38 aa, Homo sapiens
MVVNALGDRCVRCEPTFVNTSRSCACSEPNILTGGLCF

SEQ ID NO: 13482 - protein, 239 aa, Homo sapiens
  VARIANT 1: note = misc_feature - Xaa can be any naturally occurring amino acid
XFYDVYLEYTDENQHQYILAVPVLNLNLQHNKIFVNQDSNSGKWLLTRRIFLVDAVSGRENDLGTQPRVIRVATQISLSVHLVPNTINGNIYPPLITIAYSDIDIKDANSQSVKVSFSVTYEMDHGEAHVQTDTEFCTCCPGWSAMARSWLTATSASRVQAILLSQPPEYLGLQIALGVLGGLAVLASLLKTAGWKRRIGSPMIDLQTVVKFLVYYAGDLANVFFIITVGTGLYWLIFF

SEQ ID NO: 13483 - protein, 173 aa, Homo sapiens
  VARIANT 1: note = misc_feature - Xaa can be any naturally occurring amino acid
XRGGAGVAMAVWSLLSARAVTAFLLLFLPRFLQAQTFSFPFQQPEKCDNNQYFDISALSCVPCGANQRQDARGTSCVCLPGFQMISNNGGPAIICKKCPENMKGVTEDGWNCISCPSDLTAEGKCHCPIGHILVERDINGTLLSQATCELCDGNENSFMVVNALGDRQGDYVS

SEQ ID NO: 13484 - protein, 87 aa, Homo sapiens
  VARIANT 1: note = misc_feature - Xaa can be any naturally occurring amino acid
XTRGGAGVAMAVWSLLSARAVTAFLLLFLPRFLQAQTFSFPFQQPEKCDNNQYFDISALSCVPCGANQRQDARERCYRRWLELHFLP

SEQ ID NO: 13485 - protein, 107 aa, Homo sapiens
MLFLALGSPWAVELPLCGRRTALCAAAALRGPRASVSRASSSSGPSGPVAGWSTGPSGAARLLRRPGRAQIPVYWEGYVRFLNTPSDKSEDGRLIYTGNMARAVFGK

SEQ ID NO: 13486 - protein, 260 aa, Homo sapiens
MLFLALGSPWAVELPLCGRRTALCAAAALRGPRASVSRASSSSGPSGPVAGWSTGPSGAARLLRRPGRAQIPVYWEGYVRFLNTPSDKSEDGRLIYTGNMARAVFGVKCFSYSTSLIGLTFLPYIFTQNNAISESVPLPIQIIFYGIMGSFTVITPVLLHFITKGYVIRLYHEATTDTYKAITYNAMLAETSTVFHQNDVKIPDAKHVFTTFYAKTKSLLVNPVLFPNREDYIHLMGYDKEEFILYMEETSEEKRHKDDK

SEQ ID NO: 13487 - protein, 111 aa, Homo sapiens
MLFLALGSPWAVELPLCGRRTALCAAAALRGPRASVSRASSSSGPSGPVAGWSTGPSGAARLLRRPGRAQIPVYWEGYVRFLNTPSDKSEDGRLIYTGNMARAVFGWSAVA

SEQ ID NO: 13488 - protein, 555 aa, Homo sapiens
MAAAAWLQVLPVILLLLGAHPSPLSFFSAGPATVAAADRSKWHIPIPSGKNYFSFGKILFRNTTIFLKFDGEPCDLSLNITWYLKSADCYNEIYNFKAEEVELYLEKLKEKRGLSGKYQTSSKLFQNCSELFKTQTFSGDFMHRLPLLGEKQEAKENGTNLTFIGDKTAMHEPLQTWQDAPYIFIVHIGISSSKESSKENSLSNLFTMTVEVKGPYEYLTLEDYPLMIFFMVMCIVYVLFGVLWLAWSACYWRDLLRIQFWIGAVIFLGMLEKAVFYAEFQNIRYKGESVQGALILAELLSAVKRSLARTLVIIVSLGYGIVKPRLGVTLHKVVVAGALYLLFSGMEGVLRVTGAQTDLASLAFIPLAFLDTALCWWIFISLTQTMKLLKLRRNIVKLSLYRHFTNTLILAVAASIVFIIWTTMKFRIVTCQSDWRELWVDDAIWRLLFSMILFVIMVLWRPSANNQRFAFSPLSEEEEEDEQKEPMLKESFEGMKMRSTKQEPNGNSKVNKAQEDDLKWVEENVPSSVTDVALPALLDSDEERMITHFERSKME

SEQ ID NO: 13489 - protein, 181 aa, Homo sapiens
MAAAAWLQVLPVILLLLGAHPSPLSFFSAGPATVAAADRSKWHIPIPSGKNYFSFGKILFRNTTIFLKFDGEPCDLSLNITWYLKSADCYNEIYNFKAEEVELYLEKLKEKRGLSGKYQTSSKLFQNCSELFKTQTFSGDFMHRLPLLGEKQEAKENGTNLTFIGDKTIQMPFLKKHFLDC

SEQ ID NO: 13490 - protein, 57 aa, Homo sapiens
MAAAAWLQVLPVILLLLGAHPSPLSFFSAGPATVAAADRSKWHIPIPSLMENLVTCL

SEQ ID NO: 13491 - protein, 494 aa, Homo sapiens
MAHSDTVVDGEPCDLSLNITWYLKSADCYNEIYNFKAEEVELYLEKLKEKRGLSGKYQTSSKLFQNCSELFKTQTFSGDFMHRLPLLGEKQEAKENGTNLTFIGDKTAMHEPLQTWQDAPYIFIVHIGISSSKESSKENSLSNLFTMTVEVKGPYEYLTLEDYPLMIFFMVMCIVYVLFGVLWLAWSACYWRDLLRIQFWIGAVIFLGMLEKAVFYAEFQNIRYKGESVQGALILAELLSAVKRSLARTLVIIVSLGYGIVKPRLGVTLHKVVVAGALYLLFSGMEGVLRVTGAQTDLASLAFIPLAFLDTALCWWIFISLTQTMKLLKLRRNIVKLSLYRHFTNTLILAVAASIVFIIWTTMKFRIVTCQSDWRELWVDDAIWRLLFSMILFVIMVLWRPSANNQRFAFSPLSEEEEEDEQKEPMLKESFEGMKMRSTKQEPNGNSKVNKAQEDDLKWVEENVPSSVTDVALPALLDSDEERMITHFERSKME

SEQ ID NO: 13492 - protein, 39 aa, Homo sapiens
MHRLPLLGEKQEAKENGTNLTFIGDKTAMHEPLQTWQDA

SEQ ID NO: 13493 - protein, 110 aa, Homo sapiens
MHRLPLLGEKQEAKENGTNLTFIGDKTAMHEPLQTWQDAPYIFIVHIGISSSKESSKENSLSNLFTMTVEVKGPYEYLTLEDYPLMIFFMVMCIVYVLFGVLWLAWSACY

SEQ ID NO: 13494 - protein, 170 aa, Homo sapiens
MHRLPLLGEKQEAKENGTNLTFIGDKTAMHEPLQTWQDAPYIFIVHIGISSSKESSKENSLSNLFTMTVEVKGPYEYLTLEDYPLMIFFMVMCIVYVLFGVLWLAWSACYWRDLLRIQFWIGAVIFLGMLEKAVFYAEFQNIRYKGESVQGALILAELLSAVKRSLARTL

SEQ ID NO: 13495 - protein, 88 aa, Homo sapiens [sequence omitted]

SEQ ID NO: 13496 - protein, 40 aa, Homo sapiens
MHRLPLLGEKQEAKENGTNLTFIGDKTIQMPFLKKHFLDC

SEQ ID NO: 13497 - protein, 195 aa, Homo sapiens
  VARIANT 1: note = misc_feature - Xaa can be any naturally occurring amino acid
XFYAEFQNIRYKGESVQGALILAELLSAVKRSLARTLVIIVSLGYGIVKPRLGVTLHKVVVAGALYLLFSGMEGVLRVTGYFSYPLTLIVNLALSAIDACVILWIFISLTQTMKLLKLRRNIVKLSLYRHFTNTLILAVAASIVFIIWTTMKFRIVTCQSDWRELWVDDAIWRLLFSMILFVIMVLWRPSANNQR

SEQ ID NO: 13498 - protein, 256 aa, Homo sapiens
EMLRCIWGHFLRVLGGTSPTLSHSSSLLHSLGSVTVLCCVDKQGILSWPNPSPETVLFFSGKVEPPHSSHEDLTDGLSTRSFCHPEVEEEPHERDALLAGSLNNTLHLSNEQERGDWPGEAPKPPEPYSHHKAHGRSKHPSGSNVSFSRDTEGGEEEPSKTQPGMESDPYEAEDFVCDYHLEMLSLSQDQQNPSCIQFDDSNWQLHLTSLKPLGLNVLLNLCDASVTERLCRFSDHLCNIALQESHSAVLPVHVPW

SEQ ID NO: 13499 - protein, 57 aa, Homo sapiens
MDLKEKHLGEPPSALGLSTRKALSVLKEQLEAVLEGHLRERKKCLTWKEVWRSSFLH

SEQ ID NO: 13500 - protein, 121 aa, Homo sapiens
MDLKEKHLGEPPSALGLSTRKALSVLKEQLEAVLEGHLRERKKCLTWKEVWRSSFLHHSNRCSCFHWPGASLMLLAVLLLLGCCGGQPAGSRGVGLVNASALFLLLLLNLVLIGRQDRLKR

SEQ ID NO: 13501 - protein, 125 aa, Homo sapiens
MDLKEKHLGEPPSALGLSTRKALSVLKEQLEAVLEGHLRERKKCLTWKEVWRSSFLHHSNRCSCFHWPGASLMLLAVLLLLGCCGGQPAGSRGVGLVNASALFLLLLLNLVLIGRQDRLKRREVE

SEQ ID NO: 13502 - protein, 1356 aa, Homo sapiens
MDLKEKHLGEPPSALGLSTRKALSVLKEQLEAVLEGHLRERKKCLTWKEVWRSSFLHHSNRCSCFHWPGASLMLLAVLLLLGCCGGQPAGSRGVGLVNASALFLLLLLNLVLIGRQDRLKRREVERRLRGIIDQIQDALRDGREIQWPSAMYPDLHMPFAPSWSLHWAYRDGHLVNLPVSLLVEGDIIALRPGQESFASLRGIKDDEHIVLEPGDLFPPFSPPPSPRGEVERGPQSPQQHRLFRVLETPVIDNIRWCLDMALSRPVTALDNERFTVQSVMLHYAVPVVLAGFLITNALRFIFSAPGVTSWQYTLLQLQVNGVLPILPLLFPVLWVLATACGEARVLAQMSKASPSSLLAKFSEDTLSSYTEAVSSQEMLRCIWGHFLRVLGGTSPTLSHSSSLLHSLGSVTVLCCVDKQGILSWPNPSPETVLFFSGKVEPPHSSHEDLTDGLSTRSFCHPEPHERDALLAGSLNNTLHLSNEQERGDWPGEAPKPPEPYSHHKAHGRSKHPSGSNVSFSRDTEGGEEEPSKTQPGMESDPYEAEDFVCDYHLEMLSLSQDQQNPSCIQFDDSNWQLHLTSLKPLGLNVLLNLCDASVTERLCRFSDHLCNIALQESHSAVLPVHVPWGLCELARLIGFTPGAKELFKQENHLALYRLPSAETMKETSLGRLSCVTKRRPPLSHMISLFIKDTTTSTEQMLSHGTADVVLEACTDFWDGADIYPLSGSDRKKVLDFYQRACLSGYCSAFAYKPMNCALSSQLNGKCIELVQVPGQSSIFTMCELPSTIPIKQNARRSSWSSDEGIGEVLEKEDCMQALSGQIFMGMVSSQYQARLDIVRLIDGLVNACIRFVYFSLEDELKSKVFAEKMGLETGWNCHISLTPNGDMPGSEIPPSSPSHAGSLHDDLNQVSRDDAEGLLLMEEEGHSDLISFQPTDSDIPSFLEDSNRAKLPRGIHQVRPHLQNIDNVPLLVPLFTDCTPETMCEMIKIMQEYGEVTCCLGSSANLRNSCLFLQSDISIALDPLYPSRCSWETFGYATSISMAQASDGLSPLQLSGQLNSLPCSLTFRQEETISIIRLIEQARHATYGIRKCFLFLLQCQLTLVVIQFLSCLVQLPPLLSTTDILWLSCFCYPLLSISLLGKPPHSSIMSMATGKNLQSIPKKTQHYFLLCFLLKFSLTISSCLICFGFTLQSFCDSSRDRNLTNCSSVMLPSNDDRAPAWFEDFANGLLSAQKLTAALIVLHTVFISITHVHRTKPLWRKSPLTNLWWAVTVPVVLLGQVVQTAVDLQLWTHRDSHVHFGLEDVPLLTWLLGCLSLVLVVVTNEIVKLHEIRVRVRYQKRQKLQFETKLGMNSPF

SEQ ID NO: 13503 - protein, 1007 aa, Homo sapiens [sequence omitted]

SEQ ID NO: 13504 - protein, 162 aa, Homo sapiens
MLFKQAELWMPHQGKGNKGEPPSALGLSTRKALSVLKEQLEAVLEGHLRERKKCLTWKEVWRSSFLHHSNRCSCFHWPGASLMLLAVLLLLGCCGGQPAGSRGVGLVNASALFLLLLLNLVLIGRQDRLKRREVERRLRGIIDQIQASSLPPHSDAETTHQS

SEQ ID NO: 13505 - protein, 1366 aa, Homo sapiens
MLFKQAELWMPHQGKGNKGEPPSALGLSTRKALSVLKEQLEAVLEGHLRERKKCLTWKEVWRSSFLHHSNRCSCFHWPGASLMLLAVLLLLGCCGGQPAGSRGVGLVNASALFLLLLLNLVLIGRQDRLKRREVERRLRGIIDQIQDALRDGREIQWPSAMYPDLHMPFAPSWSLHWAYRDGHLVNLPVSLLVEGDIIALRPGQESFASLRGIKDDEHIVLEPGDLFPPFSPPPSPRGEVERGPQSPQQHRLFRVLETPVIDNIRWCLDMALSRPVTALDNERFTVQSVMLHYAVPVVLAGFLITNALRFIFSAPGVTSWQYTLLQLQVNGVLPILPLLFPVLWVLATACGEARVLAQMSKASPSSLLAKFSEDTLSSYTEAVSSQEMLRCIWGHFLRVLGGTSPTLSHSSSLLHSLGSVTVLCCVDKQGILSWPNPSPETVLFFSGKVEPPHSSHEDLTDGLSTRSFCHPEPHERDALLAGSLNNTLHLSNEQERGDWPGEAPKPPEPYSHHKAHGRSKHPSGSNVSFSRDTEGGEEEPSKTQPGMESDPYEAEDFVCDYHLEMLSLSQDQQNPSCIQFDDSNWQLHLTSLKPLGLNVLLNLCDASVTERLCRFSDHLCNIALQESHSAVLPVHVPWGLCELARLIGFTPGAKELFKQENHLALYRLPSAETMKETSLGRLSCVTKRRPPLSHMISLFIKDTTTSTEQMLSHGTADVVLEACTDFWDGADIYPLSGSDRKKVLDFYQRACLSGYCSAFAYKPMNCALSSQLNGKCIELVQVPGQSSIFTMCELPSTIPIKQNARRSSWSSDEGIGEVLEKEDCMQALSGQIFMGMVSSQYQARLDIVRLIDGLVNACIRFVYFSLEDELKSKVFAEKMGLETGWNCHISLTPNGDMPGSEIPPSSPSHAGSLHDDLNQVSRDDAEGLLLMEEEGHSDLISFQPTDSDIPSFLEDSNRAKLPRGIHQVRPHLQNIDNVPLLVPLFTDCTPETMCEMIKIMQEYGEVTCCLGSSANLRNSCLFLQSDISIALDPLYPSRCSWETFGYATSISMAQASDGLSPLQLSGQLNSLPCSLTFRQEETISIIRLIEQARHATYGIRKCFLFLLQCQLTLVVIQFLSCLVQLPPLLSTTDILWLSCFCYPLLSISLLGKPPHSSIMSMATGKNLQSIPKKTQHYFLLCFLLKFSLTISSCLICFGFTLQSFCDSSRDRNLTNCSSVMLPSNDDRAPAWFEDFANGLLSAQKLTAALIVLHTVFISITHVHRTKPLWRKSPLTNLWWAVTVPVVLLGQVVQTAVDLQLWTHRDSHVHFGLEDVPLLTWLLGCLSLVLVVVTNEIVKLHEIRVRVRYQKRQKLQFETKLGMNSPF

SEQ ID NO: 13506 - protein, 35 aa, Homo sapiens
MLLAVLLLLGCCGGQPAGSRGVGLVNASALFLLLL

SEQ ID NO: 13507 - protein, 89 aa, Homo sapiens
MSKASPSSLLAKFSEDTLSSYTEAVSSQEMLRCIWGHFLRVLGGTSPTLSHSSSLLHSLGSVTVLCCVDKQGILSWPNPSPETVLFFSG

SEQ ID NO: 13508 - protein, 128 aa, Homo sapiens
PHSSIMSMATGKNLQSIPKKTQHYFLLCFLLKFSLTISSCLICFGFTLQSFCDSSRDRNLTNCSSVMLPRAPAWFEDFANGLLSAQKLTAALIVLHTVFISITHVHRTKPLWRKSPLTNLWWAVTVPV

SEQ ID NO: 13509 - protein, 302 aa, Homo sapiens
  VARIANT 1: note = misc_feature - Xaa can be any naturally occurring amino acid
XGKVEPPHSSHEDLTDGLSTRSFCHPEPHERDALLAGSLNNTLHLSNEQERGDWPGEAPKPPEPYSHHKAHGRSKHPSGSNTQPGMESDPYEAEDFVCDYHLEMLSLSQDQQNPSCIQFDDSNWQLHLTSLKPLGLNVLLNLCDASVTERLCRFSDHLCNIALQESHSAVLPVHVPWGLCELARLIGFTPGAKELFKQENHLALYRLPSAETMKETSLGRLSCVTKRRPPLSHMISLFIKDTTTSTEQMLSHGTADVVLEACTDFWDGADIYPLSGSDRKKVLDFYQRACLSGYCSAFAYKP

SEQ ID NO: 13510 - protein, 56 aa, Homo sapiens
  VARIANT 1: note = misc_feature - Xaa can be any naturally occurring amino acid
XLLLNLVLIGRQDRLKRREVERRLRGIIDQIQDGAWTWPCPDQSLPWTMSGSQCSR

SEQ ID NO: 13511 - protein, 73 aa, Homo sapiens
  VARIANT 1: note = misc_feature - Xaa can be any naturally occurring amino acid
XRDALLAGSLNNTLHLSNEQERGDWPGEAPKPPEPYSHHKAHGRSKHPSGSNVSFSRDTEGGEEEPSKLLPVS

SEQ ID NO: 13512 - protein, 176 aa, Homo sapiens
  VARIANT 1: note = misc_feature - Xaa can be any naturally occurring amino acid
XWLSCFCYPLLSISLLGKPPHSSIMSMATGKNLQSIPKKSFCDSSRDRNLTNCSSVMLPSNDDRAPAWFEDFANGLLSAQKLTAALIVLHTVFISITHVHRTKPLWRKSPLTNLWWAVTVPVVLLGQVVQTAVDLQLWTHRDSHVHFGLEDVPLLTWLLGCLSLVLVVVTNEIVKL

SEQ ID NO: 13513 - protein, 295 aa, Homo sapiens
YATSISMAQASDGLSPLQLSGQLNSLPCSLTFRQEETISIIRLIEQFLSCLVQLPPLLSTTDILWLSCFCYPLLSISLLGKPPHSSIMSMATGKNLQSIPKKTQHYFLLCFLLKFSLTISSCLICFGFTLQSFCDSSRDRNLTNCSSVMLPSNDDRAPAWFEDFANGLLSAQKLTAALIVLHTVFISITHVHRTKPLWRKSPLTNLWWAVTVPVVLLGQVVQTAVDLQLWTHRDSHVHFGLEDVPLLTWLLGCLSLVLVVVTNEIVKLHEIRVRVRYQKRQKLQFETKLGMNSPF

SEQ ID NO: 13514 - protein, 184 aa, Homo sapiens
MWRLALGGVFLAAAQACVFCRLPAHDLSGRLARLCSQMEARQKECGASPDFSAFALDEVSMNKVTEKTHRVLRVMEIKEAVSSLPSYWSWLRKTKLPEYTREALCPPACPLPLLSPAGGSTTLYNCSTCKGTEVSCWPRKRCFPGSQDLWEAKILLLSIFGAFLLLGVLSLLVESHHLQAKSGL

SEQ ID NO: 13515 - protein, 203 aa, Homo sapiens
MWRLALGGVFLAAAQACVFCRLPAHDLSGRLARLCSQMEARQKECGASPDFSAFALDEVSMNKVTEKTHRVLRVMEIKEAVSSLPSYWSWLRKTKLPEYTREALCPPACRGSTTLYNCSTCKGTEVSCWPRKRCFPGSLGSQDSAPLHLRSFPASGCSEPPGGVPPPPSKKWLVKTLKTSQPPALRGMHSQLPHPLEGNQSAP

SEQ ID NO: 13516 - protein, 176 aa, Homo sapiens
MWRLALGGVFLAAAQACVFCRLPAHDLSGRLARLCSQMEARQKECGASPDFSAFALDEVSMNKVTEKTHRVLRVMEIKEAVSSLPSYWSWLRKTKLPEYTREALCPPACRGSTTLYNCSTCKGTEVSCWPRKRCFPGSQDLWEAKILLLSIFGAFLLLGVLSLLVESHHLQAKSGL

SEQ ID NO: 13517 - protein, 218 aa, Homo sapiens
MAWKSSVIMQMGRFLLLVILFLPREMTSSVLTVNGKTENYILDTTPGSQASLICAVQNHTREEELLWYREEGRVDLKSGNKINSSSVCVSSISENDNGISFTCRLGRDQSVSVSVVLNVTFPPLLSGNDFQTVEEGSNVKLVCNVKANPQAQMMWYKNSSLLDLEKSRHQIQQTSESFQLSITKVEKPDNGTYSCIAKSSLKTESLDFHLIVKALHEG

SEQ ID NO: 13518 - protein, 262 aa, Homo sapiens
MAWKSSVIMQMGRFLLLVILFLPREMTSSVLTVNGKTENYILDTTPGSQASLICAVQNHTREEELLWYREEGRVDLKSGNKINSSSVCVSSISENDNGISFTCRLGRDQSVSVSVVLNVTFPPLLSGNDFQTVEEGSNVKLVCNVKANPQAQMMWYKNSSLLDLEKSRHQIQQTSESFQLSITKVEKPDNGTYSCIAKSSLKTESLDFHLIVKDKTVGVPIEPIIAACVVIFLTLCFGLIARRKKIMKLCMKDKDPHSETAL

SEQ ID NO: 13519 - protein, 348 aa, Homo sapiens
MRLGLLSVALLFVGSSHLYSDHYSPSGRHRLGPSPEPAASSQQAEAVRKRLRRRREGGAHAEDCGTAPLKDVLQGSRIIGGTEAQAGAWPWVVSLQIKYGRVLVHVCGGTLVRERWVLTAAHCTKDASDPLMWTAVIGTNNIHGRYPHTKKIKIKAIIIHPNFILESYVNDIALFHLKKAVRYNDYIQPICLPFDVFQILDGNTKCFISGWGRTKEEGNATNILQDAEVHYISREMCNSERSYGGIIPNTSFCAGDEDGAFDTCRGDSGGPLMCYLPEYKRFFVMGITSYGHGCGRRGFPGVYIGPSFYQKWLTEHFFHASTQGILTINILRGQILIALCFVILLATT

SEQ ID NO: 13520 - protein, 320 aa, Homo sapiens
MRLGLLSVALLFVGSSHLYSDHYSPSGRHRLGPSPEPAASSQQAEAVRKRLRRRREGGAHAEDCGTAPLKDVLQGSRIIGGTEAQAGAWPWVVSLQIKYGRVLVHVCGGTLVRERWVLTAAHCTKDASDPLMWTAVIGTNNIHGRYPHTKKIKIKAIIIHPNFILESYVNDIALFHLKKAVRYNDYIQPICLPFDVFQILDGNTKCFISGWGRTKEEGNATNILQDAEVHYISREMCNSERSYGGIIPNTSFCAGDEDGAFDTCRVRPSNFPLKYFLKPEGNLSNKAFDNFLVVLIIRPKNNKSFFLLFNYFNNPNLLGS

SEQ ID NO: 13521 - protein, 10 aa, Homo sapiens
MHSFRLARLS

SEQ ID NO: 13522 - protein, 17 aa, Homo sapiens
MHSFRLARLSSWRVHAG

SEQ ID NO: 13523 - protein, 147 aa, Homo sapiens
MHSFRLARLSSWRVHAGLVSHSAVRPHQGALVERIIPHPLYSAQNHDYDVALLRLQTALNFSDTVGAVCLPAKEQHFPKGSRCWVSGWGHTHPSHTYSSDMLQDTVVPLFSTQLCNSSCVYSGALTPRMLCAGYLDGRADACQDSLL

SEQ ID NO: 13524 - protein, 198 aa, Homo sapiens
MHSFRLARLSSWRVHAGLVSHSAVRPHQGALVERIIPHPLYSAQNHDYDVALLRLQTALNFSDTVGAVCLPAKEQHFPKGSRCWVSGWGHTHPSHTYSSDMLQDTVVPLFSTQLCNSSCVYSGALTPRMLCAGYLDGRADACQGDSGGPLVCPDGDTWRLVGVVSWGRGCAEPNHPGVYAKVAEFLDWIHDTAQDSLL

SEQ ID NO: 13525 - protein, 413 aa, Homo sapiens
MRRGCAVLGALGLLAGAGVGSWLLVLYLCPAASQPISGTLQDEEITLSCSEASAEEALLPALPKTVSFRINSEDFLLEAQVRDQPRWLLVCHEGWSPALGLQICWSLGHLRLTHHKGVNLTDIKLNSSQEFAQLSPRLGGFLEEAWQPRNNCTSGQVVSLRCSECGARPLASRIVGGQSVAPGRWPWQASVALGFRHTCGGSVLAPRWVVTAAHCMHSFRLARLSSWRVHAGLVSHSAVRPHQGALVERIIPHPLYSAQNHDYDVALLRLQTALNFSDTVGAVCLPAKEQHFPKGSRCWVSGWGHTHPSHTYSSDMLQDTVVPLFSTQLCNSSCVYSGALTPRMLCAGYLDGRADACQGDSGGPLVCPDGDTWRLVGVVSWGRGCAEPNHPGVYAKVAEFLDWIHDTAQDSLL

SEQ ID NO: 13526 - protein, 344 aa, Homo sapiens
MRRGCAVLGALGLLAGAGVGSWLLVLYLCPAASQPISGTLQDEEITLSCSEASAEEALLPALPKTVSFRINSEDFLLEAQVRDQPRWLLVCHEGWSPALGLQICWSLGHLRLTHHKGVNLTDIKLNSSQEFAQLSPRLGGFLEEAWQPSFRLARLSSWRVHAGLVSHSAVRPHQGALVERIIPHPLYSAQNHDYDVALLRLQTALNFSDTVGAVCLPAKEQHFPKGSRCWVSGWGHTHPSHTYSSDMLQDTVVPLFSTQLCNSSCVYSGALTPRMLCAGYLDGRADACQGDSGGPLVCPDGDTWRLVGVVSWGRGCAEPNHPGVYAKVAEFLDWIHDTAQDSLL

SEQ ID NO: 13527 - protein, 457 aa, Homo sapiens
MSLMLDDQPPMEAQYAEEGPGPGIFRAEPGDQQHPISQAVCWRSMRRGCAVLGALGLLAGAGVGSWLLVLYLCPAASQPISGTLQDEEITLSCSEASAEEALLPALPKTVSFRINSEDFLLEAQVRDQPRWLLVCHEGWSPALGLQICWSLGHLRLTHHKGVNLTDIKLNSSQEFAQLSPRLGGFLEEAWQPRNNCTSGQVVSLRCSECGARPLASRIVGGQSVAPGRWPWQASVALGFRHTCGGSVLAPRWVVTAAHCMHSFRLARLSSWRVHAGLVSHSAVRPHQGALVERIIPHPLYSAQNHDYDVALLRLQTALNFSDTVGAVCLPAKEQHFPKGSRCWVSGWGHTHPSHTYSSDMLQDTVVPLFSTQLCNSSCVYSGALTPRMLCAGYLDGRADACQGDSGGPLVCPDGDTWRLVGVVSWGRGCAEPNHPGVYAKVAEFLDWIHDTAQDSLL

SEQ ID NO: 13528 - protein, 457 aa, Homo sapiens; identical to SEQ ID NO: 13527

SEQ ID NO: 13529 - protein, 388 aa, Homo sapiens
MSLMLDDQPPMEAQYAEEGPGPGIFRAEPGDQQHPISQAVCWRSMRRGCAVLGALGLLAGAGVGSWLLVLYLCPAASQPISGTLQDEEITLSCSEASAEEALLPALPKTVSFRINSEDFLLEAQVRDQPRWLLVCHEGWSPALGLQICWSLGHLRLTHHKGVNLTDIKLNSSQEFAQLSPRLGGFLEEAWQPSFRLARLSSWRVHAGLVSHSAVRPHQGALVERIIPHPLYSAQNHDYDVALLRLQTALNFSDTVGAVCLPAKEQHFPKGSRCWVSGWGHTHPSHTYSSDMLQDTVVPLFSTQLCNSSCVYSGALTPRMLCAGYLDGRADACQGDSGGPLVCPDGDTWRLVGVVSWGRGCAEPNHPGVYAKVAEFLDWIHDTAQDSLL

SEQ ID NO: 13530 - protein, 44 aa, Homo sapiens
MSLMLDDQPPMEAQYAEEGPGPGIFRAEPGDQQHPSRPDWAIGE

SEQ ID NO: 13531 - protein, 44 aa, Homo sapiens; identical to SEQ ID NO: 13530

SEQ ID NO: 13532 - protein, 448 aa, Homo sapiens
MTGWGQWRAIILHSPDPPWGQPHMIDVSQAVCWRSMRRGCAVLGALGLLAGAGVGSWLLVLYLCPAASQPISGTLQDEEITLSCSEASAEEALLPALPKTVSFRINSEDFLLEAQVRDQPRWLLVCHEGWSPALGLQICWSLGHLRLTHHKGVNLTDIKLNSSQEFAQLSPRLGGFLEEAWQPRNNCTSGQVVSLRCSECGARPLASRIVGGQSVAPGRWPWQASVALGFRHTCGGSVLAPRWVVTAAHCMHSFRLARLSSWRVHAGLVSHSAVRPHQGALVERIIPHPLYSAQNHDYDVALLRLQTALNFSDTVGAVCLPAKEQHFPKGSRCWVSGWGHTHPSHTYSSDMLQDTVVPLFSTQLCNSSCVYSGALTPRMLCAGYLDGRADACQGDSGGPLVCPDGDTWRLVGVVSWGRGCAEPNHPGVYAKVAEFLDWIHDTAQDSLL

SEQ ID NO: 13533 - protein, 152 aa, Homo sapiens
MTLIEGVGDEVTVLFSVLACLLVLALAWVSTHTAEGGDPLPQPSGTPTPSQPSAAMAATDSMRGEAPGAETPSLRHRGQAAQPEPSTGFTATPPAPDSPQEPLVLRLKFLNDSEQVARAWPHDTIGSLKRTQFPGREQQVRLIYQGQLLGDD

SEQ ID NO: 13534 - protein, 171 aa, Homo sapiens
MTLIEGVGDEVTVLFSVLACLLVLALAWVSTHTAEGGDPLPQPSGTPTPSQPSAAMAATDSMRGEAPGAETPSLRHRGQAAQPEPSTGFTATPPAPDSPQEPLVLRLKFLNDSEQVARAWPHDTIGSLKRTQFPGREQQVRLIYQGQLLGDDTQTLGSLHLPPNCVLHCHV

SEQ ID NO: 13535 - protein, 246 aa, Homo sapiens
MTLIEGVGDEVTVLFSVLACLLVLALAWVSTHTAEGGDPLPQPSGTPTPSQPSAAMAATDSMRGEAPGAETPSLRHRGQAAQPEPSTGFTATPPAPDSPQEPLVLRLKFLNDSEQVARAWPHDTIGSLKRTQFPGREQQVRLIYQGQLLGDDTQTLGSLHLPPNCVLHCHVSTRVGPPNPPCPPGSEPGPSGLEIGSLLLPLLLLLLLLLWYCQIQYRPFFPLTATLGLAGFTLLLSLLAFAMYRP

SEQ ID NO: 13536 - protein, 246 aa, Homo sapiens; identical to SEQ ID NO: 13535

SEQ ID NO: 13537 - protein, 246 aa, Homo sapiens; identical to SEQ ID NO: 13535

SEQ ID NO: 13538 - protein, 246 aa, Homo sapiens; identical to SEQ ID NO: 13535

SEQ ID NO: 13539 - protein, 246 aa, Homo sapiens; identical to SEQ ID NO: 13535

SEQ ID NO: 13540 - protein, 296 aa, Homo sapiens
MAVLAPLIALVYSVPRLSRWLAQPYYLLSALLSAAFLLVRKLPPLCHGLPTQREDGNPCDFDWREVEILMFLSAIVMMKNRRSITVEQHIGNIFMFSKVANTILFFRLDIRMGLLYITLCIVFLMTCKPPLYMGPEYIKYFNDKTIDEELERDKRVTWIVEFFANWSNDCQSFAPIYADLSLKYNCTGLNFGKVDVGRYTDVSTRYKVSTSPLTKQLPTLILFQGGKEAMRRPQIDKKGRAVSWTFSEENVIREFNLNELYQRAKKLSKAGDNIPEEQPVASTPTTVSDGENKKDK

SEQ ID NO: 13541 - protein, 258 aa, Homo sapiens
MAVLAPLIALVYSVPRLSRWLAQPYYLLSALLSAAFLLVRKLPPLCHGLPTQREDGNPCDFDWREVEILMFLSAIVMMKNRRSMFLMTCKPPLYMGPEYIKYFNDKTIDEELERDKRVTWIVEFFANWSNDCQSFAPIYADLSLKYNCTGLNFGKVDVGRYTDVSTRYKVSTSPLTKQLPTLILFQGGKEAMRRPQIDKKGRAVSWTFSEENVIREFNLNELYQRAKKLSKAGDNIPEEQPVASTPTTVSDGENKKDK

SEQ ID NO: 13542 - protein, 115 aa, Homo sapiens
MAVLAPLIALVYSVPRLSRWLAQPYYLLSALLSAAFLLVRKLPPLCHGLPTQREDGNPCDFDWREVEILMFLSAIVMMKNRRSMPHEEGQRMGYRSAQPSLTCDISVFQSLWSNI

SEQ ID NO: 13543 - protein, 115 aa, Homo sapiens; identical to SEQ ID NO: 13542

SEQ ID NO: 13544 - protein, 103 aa, Homo sapiens
MAVLAPLIALVYSVPRLSRWLAQPYYLLSALLSAAFLLVRKLPPLCHGLPTQREDGNPCDFDWREVEILMFLSAIVMMKNRRSRGTRTGQEGHLDCGVLCQLV

SEQ ID NO: 13545 - protein, 103 aa, Homo sapiens; identical to SEQ ID NO: 13544

SEQ ID NO: 13546 - protein, 84 aa, Homo sapiens
MAVLAPLIALVYSVPRLSRWLAQPYYLLSALLSAAFLLVRKLPPLCHGLPTQREDGNPCDFDWREVEILMFLSAIVMMKNRRSS

SEQ ID NO: 13547 - protein, 86 aa, Homo sapiens
MAVLAPLIALVYSVPRLSRWLAQPYYLLSALLSAAFLLVRKLPPLCHGLPTQREDGNPCDFDWREVEILMFLSAIVMMKNRRSSTK

SEQ ID NO: 13548 - protein, 63 aa, Homo sapiens
MAAWKSWTALRLCATVVVLDMVVCKGFVEDLDESFKENRNDDIWLVDALLQSLEFEVIQQLSY

SEQ ID NO: 13549 - protein, 89 aa, Homo sapiens
MAAWKSWTALRLCATVVVLDMVVCKGFVEDLDESFKENRNDDIWLVDFYAPWCGHCKKLEPIWNEVGLEMKSIGSPVKVGKMDATSYSN

SEQ ID NO: 13550 - protein, 89 aa, Homo sapiens; identical to SEQ ID NO: 13549

SEQ ID NO: 13551 - protein, 197 aa, Homo sapiens
MAAWKSWTALRLCATVVVLDMVVCKGFVEDLDESFKENRNDDIWLVDFYAPWCGHCKKLEPIWNEVGLEMKSIGSPVKVGKMDATSYSSIASEFGVRGYPTIKLALIRPLPSQQMFEHMQKRHRVFFVYVGGESPLKEKYIDAASELIVYTYFFSASEEVVPEYVTLKEMPAVLVFKDETYFVYDGKFQIFNSCKTF

SEQ ID NO: 13552 - protein, 195 aa, Homo sapiens
MAAWKSWTALRLCATVVVLDMVVCKGFVEDLDESFKENRNDDIWLVDFYAPWCGHCKKLEPIWNEVGLEMKSIGSPVKVGKMDATSYSSIASEFGVRGYPTIKLLKGDLAYNYRGPRTKDDIIEFAHRVSGALIRPLPSQQMFEHMQKRHRVFFVYVGGESPLKEKYIDAASELIVYTYFFSASEEVVPEVIFKI

SEQ ID NO: 13553 - protein, 454 aa, Homo sapiens
MAAWKSWTALRLCATVVVLDMVVCKGFVEDLDESFKENRNDDIWLVDFYAPWCGHCKKLEPIWNEVGLEMKSIGSPVKVGKMDATSYSSIASEFGVRGYPTIKLLKGDLAYNYRGPRTKDDIIEFAHRVSGALIRPLPSQQMFEHMQKRHRVFFVYVGGESPLKEKYIDAASELIVYTYFFSASEEVVPEYVTLKEMPAVLVFKDETYFVYDEYEDGDLSSWINRERFQNYLAMDGFLLYELGDTGKLVALAVIDEKNTSVEHTRLKSIIQEVARDYRDLFHRDFQFGHMDGNDYINTLLMDELTVPTVVVLNTSNQQYFLLDRQIKNVEDMVQFINNILDGTVEAQGGDSILQRLKRIVFDAKSTIVSIFKSSPLMGCFLFGLPLGVISIMCYGIYTADTDGGYIEERYEVSKSENENQEQIEESKEQQEPSSGGSVVPTVQEPKDVLEKKKD

SEQ ID NO: 13554 - protein, 128 aa, Homo sapiens
MAAWKSWTALRLCATVVVLDMVVCKGFVEDLDESFKENRNDDIWLVDFYAPWCGHCKKLEPIWNEVGLEMKSIGSPVKVGKMDATSYSSIASEFGVRGYPTIKLRFPGGLKIGVWPFFIGEIKRGLGI

SEQ ID NO: 13555 - protein, 69 aa, Homo sapiens
MVVCKGFVEDLDESFKENRNDDIWLVDFYAPWCGHCKKLEPIWNEVGLEMKSIGSPVKVGKMDATSYSN

SEQ ID NO: 13556 - protein, 23 aa, Homo sapiens
ASTEAEPEVDNLLVSDATPDGFR

SEQ ID NO: 13557 - protein, 92 aa, Homo sapiens
MGAMTQLLAGVFLAFLALATEGGVLKKVIRHKRQSGVNATLPEENQPVVFNHVYNIKLPVGSQCSVDLESASGEKDLAPPSEPSESFQEHTV

SEQ ID NO: 13558 - protein, 2019 aa, Homo sapiens
MGAMTQLLAGVFLAFLALATEGGVLKKVIRHKRQSGVNATLPEENQPVVFNHVYNIKLPVGSQCSVDLESASGEKDLAPPSEPSESFQEHTVDGENQIVFTHRINIPRRACGCAAAPDVKELLSRLEELENLVSSLREQCTAGAGCCLQPATGRLDTRPFCSGRGNFSTEGCGCVCEPGWKGPNCSEPECPGNCHLRGRCIDGQCICDDGFTGEDCSQLACPSDCNDQGKCVNGVCICFEGYAGADCSREICPVPCSEEHGTCVDGLCVCHDGFAGDDCNKPLCLNNCYNRGRCVENECVCDEGFTGEDCSELICPNDCFDRGRCINGTCYCEEGFTGEDCGKPTCPHACHTQGRCEEGQCVCDEGFAGVDCSEKRCPADCHNRGRCVDGRCECDDGFTGADCGELKCPNGCSGHGRCVNGQCVCDEGYTGEDCSQLRCPNDCHSRGRCVEGKCVCEQGFKGYDCSDMSCPNDCHQHGRCVNGMCVCDDGYTGEDCRDRQCPRDCSNRGLCVDGQCVCEDGFTGPDCAELSCPNDCHGQGRCVNGQCVCHEGFMGKDCKEQRCPSDCHGQGRCVDGQCICHEGFTGLDCGQHSCPSDCNNLGQCVSGRCICNEGYSGEDCSEVSPPKDLVVTEVTEETVNLAWDNEMRVTEYLVVYTPTHEGGLEMQFRVPGDQTSTIIQELEPGVEYFIRVFAILENKKSIPVSARVATYLPAPEGLKFKSIKETSVEVEWDPLDIAFETWEIIFRNMNKEDEGEITKSLRRPETSYRQTGLAPGQEYEISLHIVKNNTRGPGLKRVTTTRLDAPSQIEVKDVTDTTALITWFKPLAEIDGIELTYGIKDVPGDRTTIDLTEDENQYSIGNLKPDTEYEVSLISRRGDMSSNPAKETFTTGLDAPRNLRRVSQTDNSITLEWRNGKAAIDSYRIKYAPISGGDHAEVDVPKSQQATTKTTLTGLRPGTEYGIGVSAVKEDKESNPATINAATELDTPKDLQVSETAETSLTLLWKTPLAKFDRYRLNYSLPTGQWVGVQLPRNTTSYVLRGLEPGQEYNVLLTAEKGRHKSKPARVKASTEQAPELENLTVTEVGWDGLRLNWTAADQAYEHFIIQVQEANKVEAARNLTVPGSLRAVDIPGLKAATPYTVSIYGVIQGYRTPVLSAEASTGETPNLGEVVVAEVGWDALKLNWTAPEGAYEYFFIQVQEADTVEAAQNLTVPGGLRSTDLPGLKAATHYTITIRGVTQDFSTTPLSVEVLTEDLPQLGDLAVSEVGWDGLRLNWTAADNAYEHFVIQVQEVNKVEAAQNLTLPGSLRAVDIPGLEAATPYRVSIYGVIRGYRTPVLSAEASTAKEPEIGNLNVSDITPESFNLSWMATDGIFETFTIEIIDSNRLLETVEYNISGAERTAHISGLPPSTDFIVYLSGLAPSIRTKTISATATTEAEPEVDNLLVSDATPDGFRLSWTADEGVFDNFVLKIRDTKKQSEPLEITLLAPERTRDITGLREATEYEIELYGISKGRRSQTVSAIATTAMGSPKEVIFSDITENSATVSWRAPTAQVESFRITYVPITGGTPSMVTVDGTKTQTRLVKLIPGVEYLVSIIAMKGFEESEPVSGSFTTALDGPSGLVTANITDSEALARWQPAIATVDSYVISYTGEKVPEITRTVSGNTVEYALTDLEPATEYTLRIFAEKGPQKSSTITAKFTTDLDSPRDLTATEVQSETALLTWRPPRASVTGYLLVYESVDGTVKEVIVGPDTTSYSLADLSPSTHYTAKIQALNGPLRSNMIQTIFTTIGLLYPFPKDCSQAMLNGDTTSGLYTIYLNGDKAEALEVFCDMTSDGGGWIVFLRRKNGRENFYQNWKAYAAGFGDRREEFWLGLDNLNKITAQGQYELRVDLRDHGETAFAVYDKFSVGDAKTRYKLKVEGYSGTAGDSMAYHNGRSFSTFDKDTDSAITNCALSYKGAFWYRNCHRVNLMGRYGDNNHSQGVNWFHWKGHEHSIQFAEMKLRPSNFRNLEGRRKRA

SEQ ID NO: 13559 - protein, 2201 aa, Homo sapiens
MGAMTQLLAGVFLAFLALATEGGVLKKVIRHKRQSGVNATLPEENQPVVFNHVYNIKLPVGSQCSVDLESASGEKDLAPPSEPSESFQEHTVDGENQIVFTHRINIPRRACGCAAAPDVKELLSRLEELENLVSSLREQCTAGAGCCLQPATGRLDTRPFCSGRGNFSTEGCGCVCEPGWKGPNCSEPECPGNCHLRGRCIDGQCICDDGFTGEDCSQLACPSDCNDQGKCVNGVCICFEGYAGADCSREICPVPCSEEHGTCVDGLCVCHDGFAGDDCNKPLCLNNCYNRGRCVENECVCDEGFTGEDCSELICPNDCFDRGRCINGTCYCEEGFTGEDCGKPTCPHACHTQGRCEEGQCVCDEGFAGVDCSEKRCPADCHNRGRCVDGRCECDDGFTGADCGELKCPNGCSGHGRCVNGQCVCDEGYTGEDCSQLRCPNDCHSRGRCVEGKCVCEQGFKGYDCSDMSCPNDCHQHGRCVNGMCVCDDGYTGEDCRDRQCPRDCSNRGLCVDGQCVCEDGFTGPDCAELSCPNDCHGQGRCVNGQCVCHEGFMGKDCKEQRCPSDCHGQGRCVDGQCICHEGFTGLDCGQHSCPSDCNNLGQCVSGRCICNEGYSGEDCSEVSPPKDLVVTEVTEETVNLAWDNEMRVTEYLVVYTPTHEGGLEMQFRVPGDQTSTIIQELEPGVEYFIRVFAILENKKSIPVSARVATYLPAPEGLKFKSIKETSVEVEWDPLDIAFETWEIIFRNMNKEDEGEITKSLRRPETSYRQTGLAPGQEYEISLHIVKNNTRGPGLKRVTTTRLDAPSQIEVKDVTDTTALITWFKPLAEIDGIELTYGIKDVPGDRTTIDLTEDENQYSIGNLKPDTEYEVSLISRRGDMSSNPAKETFTTGLDAPRNLRRVSQTDNSITLEWRNGKAAIDSYRIKYAPISGGDHAEVDVPKSQQATTKTTLTGLRPGTEYGIGVSAVKEDKESNPATINAATELDTPKDLQVSETAETSLTLLWKTPLAKFDRYRLNYSLPTGQWVGVQLPRNTTSYVLRGLEPGQEYNVLLTAEKGRHKSKPARVKASTEQAPELENLTVTEVGWDGLRLNWTAADQAYEHFIIQVQEANKVEAARNLTVPGSLRAVDIPGLKAATPYTVSIYGVIQGYRTPVLSAEASTGETPNLGEVVVAEVGWDALKLNWTAPEGAYEYFFIQVQEADTVEAAQNLTVPGGLRSTDLPGLKAATHYTITIRGVTQDFSTTPLSVEVLTEEVPDMGNLTVTEVSWDALRLNWTTPDGTYDQFTIQVQEADQVEEAHNLTVPGSLRSMEIPGLRAGTPYTVTLHGEVRGHSTRPLAVEVVTEDLPQLGDLAVSEVGWDGLRLNWTAADNAYEHFVIQVQEVNKVEAAQNLTLPGSLRAVDIPGLEAATPYRVSIYGVIRGYRTPVLSAEASTAKEPEIGNLNVSDITPESFNLSWMATDGIFETFTIEIIDSNRLLETVEYNISGAERTAHISGLPPSTDFIVYLSGLAPSIRTKTISATATTEALPLLENLTISDINPYGFTVSWMASENAFDSFLVTVVDSGKLLDPQEFTLSGTQRKLELRGLITGIGYEVMVSGFTQGHQTKPLRAEIVTEAEPEVDNLLVSDATPDGFRLSWTADEGVFDNFVLKIRDTKKQSEPLEITLLAPERTRDITGLREATEYEIELYGISKGRRSQTVSAIATTAMGSPKEVIFSDITENSATVSWRAPTAQVESFRITYVPITGGTPSMVTVDGTKTQTRLVKLIPGVEYLVSIIAMKGFEESEPVSGSFTTALDGPSGLVTANITDSEALARWQPAIATVDSYVISYTGEKVPEITRTVSGNTVEYALTDLEPATEYTLRIFAEKGPQKSSTITAKFTTDLDSPRDLTATEVQSETALLTWRPPRASVTGYLLVYESVDGTVKEVIVGPDTTSYSLADLSPSTHYTAKIQALNGPLRSNMIQTIFTTIGLLYPFPKDCSQAMLNGDTTSGLYTIYLNGDKAEALEVFCDMTSDGGGWIVFLRRKNGRENFYQNWKAYAAGFGDRREEFWLGLDNLNKITAQGQYELRVDLRDHGETAFAVYDKFSVGDAKTRYKLKVEGYSGTAGDSMAYHNGRSFSTFDKDTDSAITNCALSYKGAFWYRNCHRVNLMGRYGDNNHSQGVNWFHWKGHEHSIQFAEMKLRPSNFRNLEGRRKRA

SEQ ID NO: 13560 - protein, 1928 aa, Homo sapiens
MGAMTQLLAGVFLAFLALATEGGVLKKVIRHKRQSGVNATLPEENQPVVFNHVYNIKLPVGSQCSVDLESASGEKDLAPPSEPSESFQEHTVDGENQIVFTHRINIPRRACGCAAAPDVKELLSRLEELENLVSSLREQCTAGAGCCLQPATGRLDTRPFCSGRGNFSTEGCGCVCEPGWKGPNCSEPECPGNCHLRGRCIDGQCICDDGFTGEDCSQLACPSDCNDQGKCVNGVCICFEGYAGADCSREICPVPCSEEHGTCVDGLCVCHDGFAGDDCNKPLCLNNCYNRGRCVENECVCDEGFTGEDCSELICPNDCFDRGRCINGTCYCEEGFTGEDCGKPTCPHACHTQGRCEEGQCVCDEGFAGVDCSEKRCPADCHNRGRCVDGRCECDDGFTGADCGELKCPNGCSGHGRCVNGQCVCDEGYTGEDCSQLRCPNDCHSRGRCVEGKCVCEQGFKGYDCSDMSCPNDCHQHGRCVNGMCVCDDGYTGEDCRDRQCPRDCSNRGLCVDGQCVCEDGFTGPDCAELSCPNDCHGQGRCVNGQCVCHEGFMGKDCKEQRCPSDCHGQGRCVDGQCICHEGFTGLDCGQHSCPSDCNNLGQCVSGRCICNEGYSGEDCSEVSPPKDLVVTEVTEETVNLAWDNEMRVTEYLVVYTPTHEGGLEMQFRVPGDQTSTIIQELEPGVEYFIRVFAILENKKSIPVSARVATYLPAPEGLKFKSIKETSVEVEWDPLDIAFETWEIIFRNMNKEDEGEITKSLRRPETSYRQTGLAPGQEYEISLHIVKNNTRGPGLKRVTTTRLDAPSQIEVKDVTDTTALITWFKPLAEIDGIELTYGIKDVPGDRTTIDLTEDENQYSIGNLKPDTEYEVSLISRRGDMSSNPAKETFTTGLDAPRNLRRVSQTDNSITLEWRNGKAAIDSYRIKYAPISGGDHAEVDVPKSQQATTKTTLTGLRPGTEYGIGVSAVKEDKESNPATINAATELDTPKDLQVSETAETSLTLLWKTPLAKFDRYRLNYSLPTGQWVGVQLPRNTTSYVLRGLEPGQEYNVLLTAEKGRHKSKPARVKASTEQAPELENLTVTEVGWDGLRLNWTAADQAYEHFIIQVQEANKVEAARNLTVPGSLRAVDIPGLKAATPYTVSIYGVIQGYRTPVLSAEASTGETPNLGEVVVAEVGWDALKLNWTAPEGAYEYFFIQVQEADTVEAAQNLTVPGGLRSTDLPGLKAATHYTITIRGVTQDFSTTPLSVEVLTEEVPDMGNLTVTEVSWDALRLNWTTPDGTYDQFTIQVQEADQVEEAHNLTVPGSLRSMEIPGLRAGTPYTVTLHGEVRGHSTRPLAVEVVTEDLPQLGDLAVSEVGWDGLRLNWTAADNAYEHFVIQVQEVNKVEAAQNLTLPGSLRAVDIPGLEAATPYRVSIYGVIRGYRTPVLSAEASTAMGSPKEVIFSDITENSATVSWRAPTAQVESFRITYVPITGGTPSMVTVDGTKTQTRLVKLIPGVEYLVSIIAMKGFEESEPVSGSFTTALDGPSGLVTANITDSEALARWQPAIATVDSYVISYTGEKVPEITRTVSGNTVEYALTDLEPATEYTLRIFAEKGPQKSSTITAKFTTDLDSPRDLTATEVQSETALLTWRPPRASVTGYLLVYESVDGTVKEVIVGPDTTSYSLADLSPSTHYTAKIQALNGPLRSNMIQTIFTTIGLLYPFPKDCSQAMLNGDTTSGLYTIYLNGDKAEALEVFCDMTSDGGGWIVFLRRKNGRENFYQNWKAYAAGFGDRREEFWLGLDNLNKITAQGQYELRVDLRDHGETAFAVYDKFSVGDAKTRYKLKVEGYSGTAGDSMAYHNGRSFSTFDKDTDSAITNCALSYKGAFWYRNCHRVNLMGRYGDNNHSQGVNWFHWKGHEHSIQFAEMKLRPSNFRNLEGRRKRA

SEQ ID NO: 13561 - protein, 1564 aa, Homo sapiens
MGAMTQLLAGVFLAFLALATEGGVLKKVIRHKRQSGVNATLPEENQPVVFNHVYNIKLPVGSQCSVDLESASGEKDLAPPSEPSESFQEHTVDGENQIVFTHRINIPRRACGCAAAPDVKELLSRLEELENLVSSLREQCTAGAGCCLQPATGRLDTRPFCSGRGNFSTEGCGCVCEPGWKGPNCSEPECPGNCHLRGRCIDGQCICDDGFTGEDCSQLACPSDCNDQGKCVNGVCICFEGYAGADCSREICPVPCSEEHGTCVDGLCVCHDGFAGDDCNKPLCLNNCYNRGRCVENECVCDEGFTGEDCSELICPNDCFDRGRCINGTCYCEEGFTGEDCGKPTCPHACHTQGRCEEGQCVCDEGFAGVDCSEKRCPADCHNRGRCVDGRCECDDGFTGADCGELKCPNGCSGHGRCVNGQCVCDEGYTGEDCSQLRCPNDCHSRGRCVEGKCVCEQGFKGYDCSDMSCPNDCHQHGRCVNGMCVCDDGYTGEDCRDRQCPRDCSNRGLCVDGQCVCEDGFTGPDCAELSCPNDCHGQGRCVNGQCVCHEGFMGKDCKEQRCPSDCHGQGRCVDGQCICHEGFTGLDCGQHSCPSDCNNLGQCVSGRCICNEGYSGEDCSEVSPPKDLVVTEVTEETVNLAWDNEMRVTEYLVVYTPTHEGGLEMQFRVPGDQTSTIIQELEPGVEYFIRVFAILENKKSIPVSARVATYLPAPEGLKFKSIKETSVEVEWDPLDIAFETWEIIFRNMNKEDEGEITKSLRRPETSYRQTGLAPGQEYEISLHIVKNNTRGPGLKRVTTTRLDAPSQIEVKDVTDTTALITWFKPLAEIDGIELTYGIKDVPGDRTTIDLTEDENQYSIGNLKPDTEYEVSLISRRGDMSSNPAKETFTTGLDAPRNLRRVSQTDNSITLEWRNGKAAIDSYRIKYAPISGGDHAEVDVPKSQQATTKTTLTGLRPGTEYGIGVSAVKEDKESNPATINAATELDTPKDLQVSETAETSLTLLWKTPLAKFDRYRLNYSLPTGQWVGVQLPRNTTSYVLRGLEPGQEYNVLLTAEKGRHKSKPARVKASTAMGSPKEVIFSDITENSATVSWRAPTAQVESFRITYVPITGGTPSMVTVDGTKTQTRLVKLIPGVEYLVSIIAMKGFEESEPVSGSFTTALDGPSGLVTANITDSEALARWQPAIATVDSYVISYTGEKVPEITRTVSGNTVEYALTDLEPATEYTLRIFAEKGPQKSSTITAKFTTDLDSPRDLTATEVQSETALLTWRPPRASVTGYLLVYESVDGTVKEVIVGPDTTSYSLADLSPSTHYTAKIQALNGPLRSNMIQTIFTTIGLLYPFPKDCSQAMLNGDTTSGLYTIYLNGDKAEALEVFCDMTSDGGGWIVFLRRKNGRENFYQNWKAYAAGFGDRREEFWLGLDNLNKITAQGQYELRVDLRDHGETAFAVYDKFSVGDAKTRYKLKVEGYSGTAGDSMAYHNGRSFSTFDKDTDSAITNCALSYKGAFWYRNCHRVNLMGRYGDNNHSQGVNWFHWKGHEHSIQFAEMKLRPSNFRNLEGRRKRA

SEQ ID NO: 13562 - protein, 1838 aa, Homo sapiens
MGAMTQLLAGVFLAFLALATEGGVLKKVIRHKRQSGVNATLPEENQPVVFNHVYNIKLPVGSQCSVDLESASGEKDLAPPSEPSESFQEHTVDGENQIVFTHRINIPRRACGCAAAPDVKELLSRLEELENLVSSLREQCTAGAGCCLQPATGRLDTRPFCSGRGNFSTEGCGCVCEPGWKGPNCSEPECPGNCHLRGRCIDGQCICDDGFTGEDCSQLACPSDCNDQGKCVNGVCICFEGYAGADCSREICPVPCSEEHGTCVDGLCVCHDGFAGDDCNKPLCLNNCYNRGRCVENECVCDEGFTGEDCSELICPNDCFDRGRCINGTCYCEEGFTGEDCGKPTCPHACHTQGRCEEGQCVCDEGFAGVDCSEKRCPADCHNRGRCVDGRCECDDGFTGADCGELKCPNGCSGHGRCVNGQCVCDEGYTGEDCSQLRCPNDCHSRGRCVEGKCVCEQGFKGYDCSDMSCPNDCHQHGRCVNGMCVCDDGYTGEDCRDRQCPRDCSNRGLCVDGQCVCEDGFTGPDCAELSCPNDCHGQGRCVNGQCVCHEGFMGKDCKEQRCPSDCHGQGRCVDGQCICHEGFTGLDCGQHSCPSDCNNLGQCVSGRCICNEGYSGEDCSEVSPPKDLVVTEVTEETVNLAWDNEMRVTEYLVVYTPTHEGGLEMQFRVPGDQTSTIIQELEPGVEYFIRVFAILENKKSIPVSARVATYLPAPEGLKFKSIKETSVEVEWDPLDIAFETWEIIFRNMNKEDEGEITKSLRRPETSYRQTGLAPGQEYEISLHIVKNNTRGPGLKRVTTTRLDAPSQIEVKDVTDTTALITWFKPLAEIDGIELTYGIKDVPGDRTTIDLTEDENQYSIGNLKPDTEYEVSLISRRGDMSSNPAKETFTTGLDAPRNLRRVSQTDNSITLEWRNGKAAIDSYRIKYAPISGGDHAEVDVPKSQQATTKTTLTGLRPGTEYGIGVSAVKEDKESNPATINAATELDTPKDLQVSETAETSLTLLWKTPLAKFDRYRLNYSLPTGQWVGVQLPRNTTSYVLRGLEPGQEYNVLLTAEKGRHKSKPARVKASTAKEPEIGNLNVSDITPESFNLSWMATDGIFETFTIEIIDSNRLLETVEYNISGAERTAHISGLPPSTDFIVYLSGLAPSIRTKTISATATTEPKPQLGTLIFSNITPKSFNMSWTTQAGLFAKIVINVSDAHSLHESQQFTVSGDAKQAHITGLVENTGYDVSVAGTTLAGDPTRPLTAFVITEAEPEVDNLLVSDATPDGFRLSWTADEGVFDNFVLKIRDTKKQSEPLEITLLAPERTRDITGLREATEYEIELYGISKGRRSQTVSAIATTAMGSPKEVIFSDITENSATVSWRAPTAQVESFRITYVPITGGTPSMVTVDGTKTQTRLVKLIPGVEYLVSIIAMKGFEESEPVSGSFTTALDGPSGLVTANITDSEALARWQPAIATVDSYVISYTGEKVPEITRTVSGNTVEYALTDLEPATEYTLRIFAEKGPQKSSTITAKFTTDLDSPRDLTATEVQSETALLTWRPPRASVTGYLLVYESVDGTVKEVIVGPDTTSYSLADLSPSTHYTAKIQALNGPLRSNMIQTIFTTIGLLYPFPKDCSQAMLNGDTTSGLYTIYLNGDKAEALEVFCDMTSDGGGWIVFLRRKNGRENFYQNWKAYAAGFGDRREEFWLGLDNLNKITAQGQYELRVDLRDHGETAFAVYDKFSVGDAKTRYKLKVEGYSGTAGDSMAYHNGRSFSTFDKDTDSAITNCALSYKGAFWYRNCHRVNLMGRYGDNNHSQGVNWFHWKGHEHSIQFAEMKLRPSNFRNLEGRRKRA

SEQ ID NO: 13563 - protein, 1838 aa, Homo sapiens; identical to SEQ ID NO: 13562

SEQ ID NO: 13564 - protein, 615 aa, Homo sapiens
  VARIANT 1: note = misc_feature - Xaa can be any naturally occurring amino acid
XPELENLTVTEVGWDGLRLNWTAADQAYEHFIIQVQEANKVEAARNLTVPGSLRAVDIPGLKAATPYTVSIYGVIQGYRTPVLSAEASTAKEPEIGNLNVSDITPESFNLSWMATDGIFETFTIEIIDSNRLLETVEYNISGAERTAHISGLPPSTDFIVYLSGLAPSIRTKTISATATTEAEPEVDNLLVSDATPDGFRLSWTADEGVFDNFVLKIRDTKKQSEPLEITLLAPERTRDITGLREATEYEIELYGISKGRRSQTVSAIATTAMGSPKEVIFSDITENSATVSWRAPTAQVESFRITYVPITGGTPSMVTVDGTKTQTRLVKLIPGVEYLVSIIAMKGFEESEPVSGSFTTALDGPSGLVTANITDSEALARWQPAIATVDSYVISYTGEKVPEITRTVSGNTVEYALTDLEPATEYTLRIFAEKGPQKSSTITAKFTTDLDSPRDLTATEVQSETALLTWRPPRASVTGYLLVYESVDGTVKEVIVGPDTTSYSLADLSPSTHYTAKIQALNGPLRSNMIQTIFTTIGLLYPFPKDCSQAMLNGDTTSGLYTIYLNGDKAEALEVFCDMTSDGGGWIVFLRRKNGRENFYQNWKAYAAGFGDRRE

SEQ ID NO: 13565 - protein, 277 aa, Homo sapiens
MIILIYLFLLLWEDTQGWGFKDGIFHNSIWLERAAGVYHREARSGKYKLTYAEAKAVCEFEGGHLATYKQLEAARKIGFHVCAAGWMAKGRVGYPIVKPGPNCGFGKTGIIDYGIRLNRSERWDAYCYNPHAKECGGVFTDPKQIFKSPGFPNEYEDNQICYWHIRLKYGQRIHLSFLDFDLEDDPGCLADYVEIYDSYDDVHGFVGRYCGDELPDDIISTGNVMTLKFLSDASVTAGGFQIKYVAMDPVSKSSQGKNTSTTSTGNKNFLAGRFSHL

SEQ ID NO: 13566 - protein, 616 aa, Homo sapiens
MAPRARRRRPLFALLLLCALLARLQVALQIAPPCTSEKHYEHLGRCCNKCEPGKYMSSKCTTTSDSVCLPCGPDEYLDSWNEEDKCLLHKVCDTGKALVAVVAGNSTTPRRCACTAGYHWSQDCECCRRNTECAPGLGAQHPLQLNKDTVCKPCLAGYFSDAFSSTDKCRPWTNCTFLGKRVEHHGTEKSDAVCSSSLPARKPPNEPHVYLPGLIILLLFASVALVAAIIFGVCYRKKGKALTANLWHWINEACGRLSGDKESSGDSCVSTHTANFGQQGACEGVLLLTLEEKTFPEDMCYPDQGGVCQGTCVGGGPYAQGEDARMLSLVSKTEIEEDSFRQMPTEDEYMDRPSQPTDQLLFLTEPGSKSTPPFSEPLEVGENDSLSQCFTGTQSTVGSESCNCTEPLCRTDWTPMSSENYLQKEVDSGHCPHWAASPSPNWADVCTGCRNPPGEDCEPLVGSPKRGPLPQCAYGMGLPPEEEASRTEARDQPEDGADGRLPSSARAGAGSGSSPGGQSPASGNVTGNSNSTFISSGQVMNFKGDIIVVYVSQTSQEGAAAAAEPMGRPVQEETLARRDSFAGNGPRFPDPCGGPEGLREPEKASRPVQEQGGAKA

SEQ ID NO: 13567 - protein, 263 aa, Homo sapiens
MAPRARRRRPLFALLLLCALLARLQVALQIAPPCTSEKHYEHLGRCCNKCEPGKYMSSKCTTTSDSVCLPCGPDEYLDSWNEEDKCLLHKVCDTGKALVAVVAGNSTTPRRCACTAGYHWSQDCECCRRNTECAPGLGAQHPLQLNKDTVCKPCLAGYFSDAFSSTDKCRPWTNCTFLGKRVEHHGTEKSDAVCSSSLPARKPPNEPHVYLPGLIILLLFASVALVAAIIFGVCYRKKGKALTANLWHWINEACGRLSGDKEM

SEQ ID NO: 13568 - protein, 263 aa, Homo sapiens
MAPRARRRRPLFALLLLCALLARLQVALQIAPPCTSEKHYEHLGRCCNKCEPGKYMSSKCTTTSDSVCLPCGPDEYLDSWNEEDKCLLHKVCDTGKALVAVVAGNSTTPRRCACTAGYHWSQDCECCRRNTECAPGLGAQHPLQLNKDTVCKPCLAGYFSDAFSSTDKCRPWTNCTFLGKRVEHHGTEKSDAVCSSSLPARKPPNEPHVYLPGLIILLLFASVALVAAIIFGVCYRKKGKALTANLWHWINEACGRLSGDKES

SEQ ID NO: 13569 - protein, 337 aa, Homo sapiens
MAPRARRRRPLFALLLLCALLARLQVALQIAPPCTSEKHYEHLGRCCNKCEPGKYMSSKCTTTSDSVCLPCGPDEYLDSWNEEDKCLLHKVCDTGKALVAVVAGNSTTPRRCACTAGYHWSQDCECCRRNTECAPGLGAQHPLQLNKDTVCKPCLAGYFSDAFSSTDKCRPWTNCTFLGKRVEHHGTEKSDAVCSSSLPARKPPNEPHVYLPGLIILLLFASVALVAAIIFGVCYRKKGKALTGNVTGNSNSTFISSGQVMNFKGDIIVVYVSQTSQEGAAAAAEPMGRPVQEETLARRDSFAGNGPRFPDPCGGPEGLREPEKASRPVQEQGGAKA

SEQ ID NO: 13570 - protein, 299 aa, Homo sapiens
MAPRARRRRPLFALLLLCALLARLQVALQIAPPCTSEKHYEHLGRCCNKCEPGKYMSSKCTTTSDSVCLPCGPDEYLDSWNEEDKCLLHKVCDTGKALVAVVAGNSTTPRRCACTAGYHWSQDCECCRRNTECAPGLGAQHPLQLNKDTVCKPCLAGYFSDAFSSTDKCRPWTNCTFLGKRVEHHGTEKSDAVCSSSLPARKPPNGNVTGNSNSTFISSGQVMNFKGDIIVVYVSQTSQEGAAAAAEPMGRPVQEETLARRDSFAGNGPRFPDPCGGPEGLREPEKASRPVQEQGGAKA

SEQ ID NO: 13571 - protein, 145 aa, Homo sapiens
MNNLLCCALVFLDISIKWTTQETFPPKYLHYDEETSHQLLCDKCPPGTYLKQHCTAKWKTVCAPCPDHYYTDSWHTSDECLYCSPVCKELQYVKQECNRTHNRVCECKEGRYLEIEFCLKHRSCPPGFGVVQAGCRRRPKPQICI

SEQ ID NO: 13572 - protein, 401 aa, Homo sapiens
MNNLLCCALVFLDISIKWTTQETFPPKYLHYDEETSHQLLCDKCPPGTYLKQHCTAKWKTVCAPCPDHYYTDSWHTSDECLYCSPVCKELQYVKQECNRTHNRVCECKEGRYLEIEFCLKHRSCPPGFGVVQAGTPERNTVCKRCPDGFFSNETSSKAPCRKHTNCSVFGLLLTQKGNATHDNICSGNSESTQKCGIDVTLCEEAFFRFAVPTKFTPNWLSVLVDNLPGTKVNAESVERIKRQHSSQEQTFQLLKLWKHQNKDQDIVKKIIQDIDLCENSVQRHIGHANLTFEQLRSLMESLPGKKVGAEDIEKTIKACKPSDQILKLLSLWRIKNGDQDTLKGLMHALKHSKTYHFPKTVTQSLKKTIRFLHSFTMYKLYQKLFLEMIGNQVQSVKISCL

SEQ ID NO: 13573 - protein, 94 aa, Homo sapiens
MARGSLRRLLRLLVLGLWLALLRSVAGEQAPASDPRPPPQAPPPAPAAAPGARTWTSAWTARLAGRDRTATSAWAALQHLLPPSGCFGPSLGAL

SEQ ID NO: 13574 - protein, 47 aa, Homo sapiens
MARGSLRRLLRLLVLGLWLALLRSVAGEQAPDPRIAESRPQPLTRGP

SEQ ID NO: 13575 - protein, 94 aa, Homo sapiens
MARGSLRRLLRLLVLGLWLALLRSVAGEQAPGAAAPPAPFRLLWPILGGALSLTFVLGLLSGFLVWRRCRRREKFTTPIEETGGEGCPAVALIQ

SEQ ID NO: 13576 - protein, 129 aa, Homo sapiens
MARGSLRRLLRLLVLGLWLALLRSVAGEQAPGTAPCSRGSSWSADLDKCMDCASCRARPHSDFCLGCAAAPPAPFRLLWPILGGALSLTFVLGLLSGFLVWRRCRRREKFTTPIEETGGEGCPAVALIQ

SEQ ID NO: 13577 - protein, 226 aa, Homo sapiens
MARGSLRRLLRLLVLGLWLALLRSVAGEQAPGTRDSGVGEPRAGAREPDWVSGEQRRTGGTGGCGDLGSGGLQTARSRLWEVPSLSKLHSQSGPQFLPPSNWGWGGSSVPQVRSTSNGERKRCSTSCPLPAALAHPWGRSEPDLRAGAAFWLFGLETMPQEREVHHPHRGDRRRGLPSCGADPVTMCPLPAGARPLIIHSSILEPVSASQTRREPSSSNHKGGGGR

SEQ ID NO: 13578 - protein, 80 aa, Homo sapiens
MDCASCRARPHSDFCLGCAAAPPAPFRLLWPILGGALSLTFVLGLLSGFLVWRRCRRREKFTTPIEETGGEGCPAVALIQ

SEQ ID NO: 13579 - protein, 183 aa, Homo sapiens
MEPPGDWGPPPWRSTPKTDVLRLVLYLTFLGAPCYAPALPSCKEDEYPVGSECCPKCSPGYRVKEACGELTGTVCEPCPPGTYIAHLNGLSKCLQCQMCDPAMGLRASRNCSRTENAVCGCSPGHFCIVQDGDHCAACRAYATSSPGQRVQKGGTESQDTLCQNCPPGTFSPNGTLEECQHQT

SEQ ID NO: 13580 - protein, 231 aa, Homo sapiens
MEPPGDWGPPPWRSTPKTDVLRLVLYLTFLGAPCYAPALPSCKEDEYPVGSECCPKCSPGYRVKEACGELTGTVCEPCPPGTYIAHLNGLSKCLQCQMCDPAMGLRASRNCSRTENAVCGCSPGHFCIVQDGDHCAACRAYATSSPGQRVQKGGTESQDTLCQNCPPGTFSPNGTLEECQHQTKCSWLVTKAGAGTSSSHWVWWFLSGSLVIVIVCSTVGLIICVKRRKPR

SEQ ID NO: 13581 - protein, 231 aa, Homo sapiens; identical to SEQ ID NO: 13580

SEQ ID NO: 13582 - protein, 231 aa, Homo sapiens; identical to SEQ ID NO: 13580

SEQ ID NO: 13583 - protein, 283 aa, Homo sapiens
MEPPGDWGPPPWRSTPKTDVLRLVLYLTFLGAPCYAPALPSCKEDEYPVGSECCPKCSPGYRVKEACGELTGTVCEPCPPGTYIAHLNGLSKCLQCQMCDPAMGLRASRNCSRTENAVCGCSPGHFCIVQDGDHCAACRAYATSSPGQRVQKGGTESQDTLCQNCPPGTFSPNGTLEECQHQTKCSWLVTKAGAGTSSSHWVWWFLSGSLVIVIVCSTVGLIICVKRRKPRGDVVKVIVSVQRKRQEAEGEATVIEALQAPPDVTTVAVEETIPSFTGRSPNH

SEQ ID NO: 13584 - protein, 193 aa, Homo sapiens
MEPPGDWGPPPWRSTPKTDVLRLVLYLTFLGAPCYAPALPSCKEDEYPVGSECCPKCSPGYRVKEACGELTGTVCEPCPPGTYIAHLNGLSKCLQCQMCDPAMGLRASRNCSRTENAVCGCSPGHFCIVQDGDHCAACRAYATSSPGQRVQKGGTESQDTLCQNCPPGTFSPNGTLEECQHQTNRAWKSQTDL

SEQ ID NO: 13585 - protein, 25 aa, Homo sapiens
  VARIANT 1: note = misc_feature - Xaa can be any naturally occurring amino acid
XGTLEECQHQTNWPNHMCEKKKAKG

SEQ ID NO: 13586 - protein, 255 aa, Homo sapiens
MAQHGAMGAFRALCGLALLCALSLGQRPTGGPGCGPGRLLLGTGTDARCCRVHTTRCCRDYPGEECCSEWDCMCVQPEFHCGDPCCTTCRHHPCPPGQGVQSQGKFSFGFQCIDCASGTFSGGHEGHCKPWTDCCWRCRRRPKTPEAASSPRKSGASDRQRRRGGWETCGCEPGRPPGPPTAASPSPGAPQAAGALRSALGRALLPWQQKWVQEGGSDQRPGPCSSAAAAGPCRRERETQSWPPSSLAGPDGVGS

SEQ ID NO: 13587 - protein, 234 aa, Homo sapiens
MAQHGAMGAFRALCGLALLCALSLGQRPTGGPGCGPGRLLLGTGTDARCCRVHTTRCCRDYPGEECCSEWDCMCVQPEFHCGDPCCTTCRHHPCPPGQGVQSQGKFSFGFQCIDCASGTFSGGHEGHCKPWTDCTQFGFLTVFPGNKTHNAVCVPGSPPAEPLGWLTVVLLAVAACVLLLTSAQLGLHIWQLRKTQLLLEVPPSTEDARSCQFPEEERGERSAEEKGRLGDLWV

SEQ ID NO: 13588 - protein, 241 aa, Homo sapiens
MAQHGAMGAFRALCGLALLCALSLGQRPTGGPGCGPGRLLLGTGTDARCCRVHTTRCCRDYPGEECCSEWDCMCVQPEFHCGDPCCTTCRHHPCPPGQGVQSQGKFSFGFQCIDCASGTFSGGHEGHCKPWTDCTQFGFLTVFPGNKTHNAVCVPGSPPAEPLGWLTVVLLAVAACVLLLTSAQLGLHIWQLRSQCMWPRETQLLLEVPPSTEDARSCQFPEEERGERSAEEKGRLGDLWV

SEQ ID NO: 13589 - protein, 169 aa, Homo sapiens
MCVQPEFHCGDPCCTTCRHHPCPPGQGVQSQGKFSFGFQCIDCASGTFSGGHEGHCKPWTDCTQFGFLTVFPGNKTHNAVCVPGSPPAEPLGWLTVVLLAVAACVLLLTSAQLGLHIWQLRSQCMWPRETQLLLEVPPSTEDARSCQFPEEERGERSAEEKGRLGDLWV

SEQ ID NO: 13590 - protein, 122 aa, Homo sapiens
MGLSTVPDLLLPLEPTCTMTVQARGRIRTAGSVRAAPSPLQKTTSDTASAAPNAERKWVRWRSLLAQWTGTPCVAAGRTSTGIIGVKTFSSASIAASASMGPCTSPARRNRTPCAPAMQVSF

SEQ ID NO: 13591 - protein, 412 aa, Homo sapiens
MGLSTVPDLLLPLVLLELLVGIYPSGVIGLVPHLGDREKRDSVCPQGKYIHPQNNSICCTKCHKEMGQVEISSCTVDRDTVCGCRKNQYRHYWSENLFQCFNCSLCLNGTVHLSCQEKQNTVCTCHAGFFLRENECVSCSNCKKSLECTKLCLPQIENVKGTEDSGTTVLLPLVIFFGLCLLSLLFIGLMYRYQRWKSKLYSIVCGKSTPEKEGELEGTTTKPLAPNPSFSPTPGFTPTLGFSPVPSSTFTSSSTYTPGDCPNFAAPRREVAPPYQGADPILATALASDPIPNPLQKWEDSAHKPQSLDTDDPATLYAVVENVPPLRWKEFVRRLGLSDHEIDRLELQNGRCLREAQYSMLATWRRRTPRREATLELLGRVLRDMDLLGCLEDIEEALCGPAALPPAPSLLR

SEQ ID NO: 13592 - protein, 72 aa, Homo sapiens
MGLSTVPDLLLPLVLLELLVGIYPSGVIGLVPHLGDREKRDSVCPQGKYIHPQNNSICCTKCHKEPVPALLE

SEQ ID NO: 13593 - protein, 118 aa, Homo sapiens
MGLSTVPDLLLPLVLLELLVGIYPSGVIGLVPHLGDREKRDSVCPQGKYIHPQNNSICCTKCHKGPGQDTDCRECESGSFTASENHLRHCLSCSKCRKEMGQVEISSCTVDRDTVCGC

SEQ ID NO: 13594 - protein, 71 aa, Homo sapiens
MGLSTVPDLLLPLVLLELLVGIYPSGVIGLVPHLGDREKRDSVCPQGKYIHPQNNSICCTKCHKGTYLYND

SEQ ID NO: 13595 - protein, 254 aa, Homo sapiens
MGLSTVPDLLLPLVLLELLVGIYPSGVIGLVPHLGDREKRDSVCPQGKYIHPQNNSICCTKCHKGTYLYNDCPGPGQDTDCRECESGSFTASENHLRHCLSCSKCRKEMGQVEISSCTVDRDTVCGCRKNQYRHYWSENLFQCFNCSLCLNGTVHLSCERSSPEAKPSPHPRGWPLPHAVALPFLPPPVFCGSDNQLLSGRPHPVPRHFLCPVGWGCRRFSFSCAALLPTGQEKQNTVCTCHAGFFLRENECVS

SEQ ID NO: 13596 - protein, 218 aa, Homo sapiens
MGLSTVPDLLLPLVLLELLVGIYPSGVIGLVPHLGDREKRDSVCPQGKYIHPQNNSICCTKCHKGTYLYNDCPGPGQDTDCRECESGSFTASENHLRHCLSCSKCRKEMGQVEISSCTVDRDTVCGCRKNQYRHYWSENLFQCFNCSLCLNGTVHLSCQEKQNTVCTCHAGFFLRENECVSCSKVLLCRPGWNAVARSRLTATSASQIQAILLLQPPK

SEQ ID NO: 13597 - protein, 298 aa, Homo sapiens
MGLSTVPDLLLPLVLLELLVGIYPSGVIGLVPHLGDREKRDSVCPQGKYIHPQNNSICCTKCHKGTYLYNDCPGPGQDTDCRECESGSFTASENHLRHCLSCSKCRKEMGQVEISSCTVDRDTVCGCRKNQYRHYWSENLFQCFNCSLCLNGTVHLSCQEKQNTVCTCHAGFFLRENECVSCSNCKKSLECTKLCLPQIENVKGTEDSGTTVLLPLVIFFGLCLLSLLFIGLMYRYQRWKSKLYSIGEWGLWEGEGAGGGEGGHGWVRWTCVEGGEECPLSSYRWGLWAEGGPGWLGR

SEQ ID NO: 13598 - protein, 455 aa, Homo sapiens
MGLSTVPDLLLPLVLLELLVGIYPSGVIGLVPHLGDREKRDSVCPQGKYIHPQNNSICCTKCHKGTYLYNDCPGPGQDTDCRECESGSFTASENHLRHCLSCSKCRKEMGQVEISSCTVDRDTVCGCRKNQYRHYWSENLFQCFNCSLCLNGTVHLSCQEKQNTVCTCHAGFFLRENECVSCSNCKKSLECTKLCLPQIENVKGTEDSGTTVLLPLVIFFGLCLLSLLFIGLMYRYQRWKSKLYSIVCGKSTPEKEGELEGTTTKPLAPNPSFSPTPGFTPTLGFSPVPSSTFTSSSTYTPGDCPNFAAPRREVAPPYQGADPILATALASDPIPNPLQKWEDSAHKPQSLDTDDPATLYAVVENVPPLRWKEFVRRLGLSDHEIDRLELQNGRCLREAQYSMLATWRRRTPRREATLELLGRVLRDMDLLGCLEDIEEALCGPAALPPAPSLLR

SEQ ID NO: 13599 - protein, 155 aa, Homo sapiens
MAPVAVWAALAVGLELWAAAHALPAQVAFTPYAPEPGSTCRLREYYDQTAQMCCSKCSPGQHAKVFCTKTSDTVCDSCEDSTYTQLWNWVPECLSCGSRCSSDQVETQACTREQNRICTCRPGWYCALSKQEGCRLCAPLRKCRPGFGVARPDLS

SEQ ID NO: 13600 - protein, 461 aa, Homo sapiens
MAPVAVWAALAVGLELWAAAHALPAQVAFTPYAPEPGSTCRLREYYDQTAQMCCSKCSPGQHAKVFCTKTSDTVCDSCEDSTYTQLWNWVPECLSCGSRCSSDQVETQACTREQNRICTCRPGWYCALSKQEGCRLCAPLRKCRPGFGVARPGTETSDVVCKPCAPGTFSNTTSSTDICRPHQICNVVAIPGNASMDAVCTSTSPTRSMAPGAVHLPQPVSTRSQHTQPTPEPSTAPSTSFLLPMGPSPPAEGSTGDFALPVGLIVGVTALGLLIIGVVNCVIMTQVKKKPLCLQREAKVPHLPADKARGTQGPEQQHLLITAPSSSSSSLESSASALDRRAPTRNQPQAPGVEASGAGEARASTGSSDSSPGGHGTQVNVTCIVNVCSSSDHSSQCSSQASSTMGDTDSSPSESPKDEQVPFSKEECAFRSQLETPETLLGSTEEKPLPLGVPDAGMKPS

SEQ ID NO: 13601 - protein, 126 aa, Homo sapiens
MEQRPRGCAAVAAALLLVLLGARAQGGTRSPRCDCAGDFHKKIGLFCCRGCPAASQVALENCSAVADTRCGCKPGWFVECQVSQCVSSSPFYCQPCLDCGALHRHTRLLCHPSVTLGQRPHPSSTS

SEQ ID NO: 13602 - protein, 136 aa, Homo sapiens
MEQRPRGCAAVAAALLLVLLGARAQGGTRSPRCDCAGDFHKKIGLFCCRGCPAASQVALENCSAVADTRCGCKPGWFVECQVSQCVSSSPFYCQPCLDCGALHRHTRLLCSRRDTDCGTCLPGFYEHGDGCVSCPT

SEQ ID NO: 13603 - protein, 372 aa, Homo sapiens
MEQRPRGCAAVAAALLLVLLGARAQGGTRSPRCDCAGDFHKKIGLFCCRGCPAASQVALENCSAVADTRCGCKPGWFVECQVSQCVSSSPFYCQPCLDCGALHRHTRLLCSRRDTDCGTCLPGFYEHGDGCVSCPTSTLGSCPERCAAVCGWRQMFWVQVLLAGLVVPLLLGATLTYTYRHCWPHKPLVTADEAGMEALTPPPATHLSPLDSAHTLLAPPDSSEKICTVQLVGNSWTPGYPETQEALCPQVTWSWDQLPSRALGPAAAPTLSPESPAGSPAMMLQPGPQLYDVMDAVPARRWKEFVRTLGLREAEIEAVEVEIGRFRDQQYEMLKRWRQQQPAGLGAVYAALERMGLDGCVEDLRSRLQRGP

SEQ ID NO: 13604 - protein, 234 aa, Homo sapiens
MEQRPRGCAAVAAALLLVLLGARAQGGTRSPRCDCAGDFHKKIGLFCCRGCPADEAGMEALTPPPATHLSPLDSAHTLLAPPDSSEKICTVQLVGNSWTPGYPETQEALCPQVTWSWDQLPSRALGPAAAPTLSPESPAGSPAMMLQPGPQLYDVMDAVPARRWKEFVRTLGLREAEIEAVEVEIGRFRDQQYEMLKRWRQQQPAGLGAVYAALERMGLDGCVEDLRSRLQRGP

SEQ ID NO: 13605 - protein, 181 aa, Homo sapiens
MEQRPRGCAAVAAALLLVLLGARAQGGTRSPRCDCAGDFHKKIGLFCCRGCPAGHYLKAPCTEPCGNSTCLVCPQDTFLAWENHHNSECARCQACDEQASQVALENCSAVADTRCGCKPGWFVECQVSQCVSSSPFYCQPCLDCGALHRHTRLLCSRRDTDCGTCLPGFYEHGDGCVSCPT

SEQ ID NO: 13606 - protein, 277 aa, Homo sapiens
MEQRPRGCAAVAAALLLVLLGARAQGGTRSPRCDCAGDFHKKIGLFCCRGCPAGHYLKAPCTEPCGNSTCLVCPQDTFLAWENHHNSECARCQACDEQASQVALENCSAVADTRCGCKPGWFVECQVSQCVSSSPFYCQPCLDCGALHRHTRLLCSRRDTDCGTCLPGFYEHGDGCVSCPTPPPSLAGAPWGAVQSAVPLSVAGGRVGGVLGMRVGELGWTEGRRVRRGATTQHPPAAFSVLGPGAPGWPCGPPPAWGHPDLHIPPLLASQAPGYCR

SEQ ID NO: 13607 - protein, 426 aa, Homo sapiens
MEQRPRGCAAVAAALLLVLLGARAQGGTRSPRCDCAGDFHKKIGLFCCRGCPAGHYLKAPCTEPCGNSTCLVCPQDTFLAWENHHNSECARCQACDEQASQVALENCSAVADTRCGCKPGWFVECQVSQCVSSSPFYCQPCLDCGALHRHTRLLCSRRDTDCGTCLPGFYEHGDGCVSCPTPPPSLAGAPWGAVQSAVPLSVAGGRVGVFWVQVLLAGLVVPLLLGATLTYTYRHCWPHKPLVTADEAGMEALTPPPATHLSPLDSAHTLLAPPDSSEKICTVQLVGNSWTPGYPETQEALCPQVTWSWDQLPSRALGPAAAPTLSPESPAGSPAMMLQPGPQLYDVMDAVPARRWKEFVRTLGLREAEIEAVEVEIGRFRDQQYEMLKRWRQQQPAGLGAVYAALERMGLDGCVEDLRSRLQRGP

SEQ ID NO: 13608 - protein, 417 aa, Homo sapiens
MEQRPRGCAAVAAALLLVLLGARAQGGTRSPRCDCAGDFHKKIGLFCCRGCPAGHYLKAPCTEPCGNSTCLVCPQDTFLAWENHHNSECARCQACDEQASQVALENCSAVADTRCGCKPGWFVECQVSQCVSSSPFYCQPCLDCGALHRHTRLLCSRRDTDCGTCLPGFYEHGDGCVSCPTSTLGSCPERCAAVCGWRQMFWVQVLLAGLVVPLLLGATLTYTYRHCWPHKPLVTADEAGMEALTPPPATHLSPLDSAHTLLAPPDSSEKICTVQLVGNSWTPGYPETQEALCPQVTWSWDQLPSRALGPAAAPTLSPESPAGSPAMMLQPGPQLYDVMDAVPARRWKEFVRTLGLREAEIEAVEVEIGRFRDQQYEMLKRWRQQQPAGLGAVYAALERMGLDGCVEDLRSRLQRGP

SEQ ID NO: 13609 - protein, 380 aa, Homo sapiens
MEQRPRGCAAVAAALLLVLLGARAQGGTRSPRCDCAGDFHKKIGLFCCRGCPAGHYLKAPCTEPCGNSTCLVCPQDTFLAWENHHNSECARCQACDEQASQVALENCSAVADTRCGCKPGWFVECQVSQCVSSSPFYCQPCLDCGALHRHTRLLCSRRDTDCGTCLPGFYEHGDGCVSCPTSTLGSCPERCAAVCGWRQNEAGMEALTPPPATHLSPLDSAHTLLAPPDSSEKICTVQLVGNSWTPGYPETQEALCPQVTWSWDQLPSRALGPAAAPTLSPESPAGSPAMMLQPGPQLYDVMDAVPARRWKEFVRTLGLREAEIEAVEVEIGRFRDQQYEMLKRWRQQQPAGLGAVYAALERMGLDGCVEDLRSRLQRGP

SEQ ID NO: 13610 - protein, 253 aa, Homo sapiens
MEQRPRGCAAVAAALLLVLLGARAQGGTRSPRCDCAGDFHKKIGLFCCRGCPAGHYLKAPCTEPCGNSTCLVCPQDTFLAWENHHNSECARCQACDEQASQVALENCSAVADTRCGCKPGWFVECQVSQCVSSSPFYCQPCLDCGALHRHTRLLCSRRDTDCGTCLPGFYEHGDGCVSCPTSTLGSCPERCAAVCGWRQSRWCAGNASGRTGMDRGEAGEEGGNHPTPTSCFQCSGSRCSWLALWSPSCLGPP

SEQ ID NO: 13611 - protein, 218 aa, Homo sapiens
MEQRPRGCAAVAAALLLVLLGARAQGGTRSPRCDCAGDFHKKIGLFCCRGCPAGHYLKAPCTEPCGNSTCLVCPQDTFLAWENHHNSECARCQACDEQASQVALENCSAVADTRCGCKPGWFVECQVSQCVSSSPFYCQPCLDCGALHRHTRLLCSRRDTDCGTCLPGFYEHGDGCVSCPTVLGPGAPGWPCGPPPAWGHPDLHIPPLLASQAPGYCR

SEQ ID NO: 13612 - protein, 45 aa, Homo sapiens
MFWVQVLLAGLVVPLLLGATLTYTYRHCWPHKPLVTDEAGMEALT

SEQ ID NO: 13613 - protein, 300 aa, Homo sapiens
MRALEGPGLSLLCLVLALPALLPVPAVRGVAETPTYPWRDAETGERLVCAQCPPGTFVQRPCRRDSPTTCGPCPPRHYTQFWNYLERCRYCNVLCGEREEEARACHATHNRACRCRTGFFAHAGFCLEHASCPPGAGVIAPGTPSQNTQCQPCPPGTFSASSSSSEQCQPHRNCTALGLALNVPGSSSHDTLCTSCTGFPLSTRVPGAEECERAVIDFVAFQDISIKRLQRLLQALEAPEGWGPTPRAGRAALQLKLRRRLTELLGAQDGALLVRLLQALRVARMPGLERSVRERFLPVH

SEQ ID NO: 13614 - protein, 244 aa, Homo sapiens
MDPNRISEDGTHCIYRILRLHENADFQDTTLESQDTKLIPDSCRRIKQAFQGAVQKELQHIVGSQHIRAEKAMVDGSWLDLAKRSKLEAQPFAHLTINATDIPSGSHKVSLSSWYHDRGWAKISNMTFSNGKLIVNQDGFYYLYANICFRHHETSGDLATEYLQLMVYVTKTSIKIPSSHTLMKGGSTKYWSGNSEFHFYSINVGGFFKLRSGEEISIEVSNPSLLDPDQDATYFGAFKVRDID

SEQ ID NO: 13615 - protein, 244 aa, Homo sapiens; identical to SEQ ID NO: 13614

SEQ ID NO: 13616 - protein, 244 aa, Homo sapiens; identical to SEQ ID NO: 13614

SEQ ID NO: 13617 - protein, 270 aa, Homo sapiens
MFVALLGLGLGQVVCSVALFFYFRAQMDPNRISEDGTHCIYRILRLHENADFQDTTLESQDTKLIPDSCRRIKQAFQGAVQKELQHIVGSQHIRAEKAMVDGSWLDLAKRSKLEAQPFAHLTINATDIPSGSHKVSLSSWYHDRGWAKISNMTFSNGKLIVNQDGFYYLYANICFRHHETSGDLATEYLQLMVYVTKTSIKIPSSHTLMKGGSTKYWSGNSEFHFYSINVGGFFKLRSGEEISIEVSNPSLLDPDQDATYFGAFKVRDID

SEQ ID NO: 13618 - protein, 317 aa, Homo sapiens
MRRASRDYTKYLRGSEEMGGGPGAPHEGPLHAPPPPAPHQPPAASRSMFVALLGLGLGQVVCSVALFFYFRAQMDPNRISEDGTHCIYRILRLHENADFQDTTLESQDTKLIPDSCRRIKQAFQGAVQKELQHIVGSQHIRAEKAMVDGSWLDLAKRSKLEAQPFAHLTINATDIPSGSHKVSLSSWYHDRGWAKISNMTFSNGKLIVNQDGFYYLYANICFRHHETSGDLATEYLQLMVYVTKTSIKIPSSHTLMKGGSTKYWSGNSEFHFYSINVGGFFKLRSGEEISIEVSNPSLLDPDQDATYFGAFKVRDID

SEQ ID NO: 13619 - protein, 134 aa, Homo sapiens
MAARRSQRRRGRRGEPGTALLVPLALGLGLALACLGLLLAVVSLGSRASLSAQEPAQEELVAEEDQDPSELNPQTEESQDPAPFLNRLVRPRRSAPKGRKTRARRAIAAHYEVHPRPGQDGAQADGGYTTCLRP

SEQ ID NO: 13620 - protein, 249 aa, Homo sapiens
MAARRSQRRRGRRGEPGTALLVPLALGLGLALACLGLLLAVVSLGSRASLSAQEPAQEELVAEEDQDPSELNPQTEESQDPAPFLNRLVRPRRSAPKGRKTRARRAIAAHYEVHPRPGQDGAQAGVDGTVSGWEEARINSSSPLRYNRQIGEFIVTRAGLYYLYCQVHFDEGKAVYLKLDLLVDGVLALRCLEEFSATAASSLGPQLRLCQVSGLLALRPGSSLRIRTLPWAHLKAAPFLTYFGLFQVH

SEQ ID NO: 13621 - protein, 330 aa, Homo sapiens
MAARRSQRRRGRRGEPGTALLVPLALGLGLALACLGLLLAVVSLGSRASLSAQEPAQEELVAEEDQDPSELNPQTEESQDPAPFLNRLVRPRRSAPKGRKTRARRAIAAHYEVHPRPGQDGAQAGVDGTVSGWEEARINSSSPLRYNRQIGEFIVTRAGLYYLYCQSSDALEAWENGERSRKRRAVLTQKQKKQHSVLHLVPINATSKDDSDVTEVMWQPALRRGRGLQAQGYGVRIQDAGVYLLYSQVLFQDVTFTMGQVVSREGQGRQETLFRCIRSMPSHPDRAYNSCYSAGVFHLHQGDILSVIIPRARAKLNLSPHGTFLGFVKL

SEQ ID NO: 13622 - protein, 251 aa, Homo sapiens
MAEDLGLSFGETASVEMLPEHGSCRPKARSSSARWALTCCLVLLPFLAGLTTYLLVSQLRAQGEACVQFQALKGQEFAPSHQQVYAPLRADGDKPRAHLTVVRQTPTQHFKNQFPALHWEHELGLAFTKNRMNYTNKFLLIPESGDYFIYSQVTFRGMTSECSEIRQAGRPNKPDSITVVITKVTDSYPEPTQLLMGTKSVCEVGSNWFQPIYLGAMFSLQEGDKLMVNVSDISLVDYTKEDKTFFGAFLL

SEQ ID NO: 13623 - protein, 174 aa, Homo sapiens
MRHFLSKVYSFPMRKLILFLVFPVVRQTPTQHFKNQFPALHWEHELGLAFTKNRMNYTNKFLLIPESGDYFIYSQVTFRGMTSECSEIRQAGRPNKPDSITVVITKVTDSYPEPTQLLMGTKSVCEVGSNWFQPIYLGAMFSLQEGDKLMVNVSDISLVDYTKEDKTFFGAFLL

SEQ ID NO: 13624 - protein, 1299 aa, Homo sapiens
MSLQEMFRFPMGLLLGSVLLVASAPATLEPPGCSNKEQQVTVSHTYKIDVPKSALVQVDADPQPLSDDGASLLALGEAREEQNIIFRHNIRLQTPQKDCELAGSVQDLLARVKKLEEEMVEMKEQCSAQRCCQGVTDLSRHCSGHGTFSLETCSCHCEEGREGPACERLACPGACSGHGRCVDGRCLCHEPYVGADCGYPACPENCSGHGECVRGVCQCHEDFMSEDCSEKRCPGDCSGHGFCDTGECYCEEGFTGLDCAQVVTPQGLQLLKNTEDSLLVSWEPSSQVDHYLLSYYPLGKELSGKQIQVPKEQHSYEILGLLPGTKYIVTLRNVKNEVSSSPQHLLATTDLAVLGTAWVTDETENSLDVEWENPSTEVDYYKLRYGPMTGQEVAEVTVPKSSDPKSRYDITGLHPGTEYKITVVPMRGELEGKPILLNGRTEIDSPTNVVTDRVTEDTATVSWDPVQAVIDKYVVRYTSADGDTKEMAVHKDESSTVLTGLKPGEAYKVYVWAERGNQGSKKADTNALTEIDSPANLVTDRVTENTATISWDPVQATIDKYVVRYTSADDQETREVLVGKEQSSTVLTGLRPGVEYTVHVWAQKGDRESKKADTNAPTDIDSPKNLVTDRVTENMATVSWDPVQAAIDKYVVRYTSAGGETREVPVGKEQSSTVLTGLRPGMEYMVHVWAQKGDQESKKADTKAQTDIDSPQNLVTDRVTENMATVSWDPVRATIDRYVVRYTSAKDGETREVPVGKEQSSTVLTGLRPGVEYTVHVWAQKGAQESKKADTKAQTDIDSPQNLVTDWVTENTATVSWDPVQATIDRYVVHYTSANGETREVPVGKEQSSTVLTGLRPGMEYTVHVWAQKGNQESKKADTKAQTEIDGPKNLVTDWVTENMATVSWDPVQATIDKYMVRYTSADGETREVPVGKEHSSTVLTGLRPGMEYMVHVWAQKGAQESKKADTKAQTELDPPRNLRPSAVTQSGGILTWTPPSAQIHGYILTYQFPDGTVKEMQLGREDQRFALQGLEQGATYPVSLVAFKGGRRSRNVSTTLSTVGARFPHPSDCSQVQQNSNAASGLYTIYLHGDASRPLQVYCDMETDGGGWIVFQRRNTGQLDFFKRWRSYVEGFGDPMKEFWLGLDKLHNLTTGTPARYEVRVDLQTANESAYAIYDFFQVASSKERYKLTVGKYRGTAGDALTYHNGWKFTTFDRDNDIALSNCALTHHGGWWYKNCHLANPNGRYGETKHSEGVNWEPWKGHEFSIPYVELKIRPHGYSREPVLGRKKRTLRGRLRTF

SEQ ID NO: 13625 - protein, 1122 aa, Homo sapiens
MSLQEMFRFPMGLLLGSVLLVASAPATLEPPGCSNKEQQVTVSHTYKIDVPKSALVQVDADPQPLSDDGASLLALGEAREEQNIIFRHNIRLQTPQKDCELAGSVQDLLARVKKLEEEMVEMKEQCSAQRCCQGVTDLSRHCSGHGTFSLETCSCHCEEGREGPACERLACPGACSGHGRCVDGRCLCHEPYVGADCGYPACPENCSGHGECVRGVCQCHEDFMSEDCSEKRCPGDCSGHGFCDTGECYCEEGFTGLDCAQVVTPQGLQLLKNTEDSLLVSWEPSSQVDHYLLSYYPLGKELSGKQIQVPKEQHSYEILGLLPGTKYIVTLRNVKNEVSSSPQHLLATTDLAVLGTAWVTDETENSLDVEWENPSTEVDYYKLRYGPMTGQEVAEVTVPKSSDPKSRYDITGLHPGTEYKITVVPMRGELEGKPILLNGRTEIDSPTNVVTDRVTEDTATVSWDPVQAVIDKYVVRYTSADGDTKEMAVHKDESSTVLTGLKPGEAYKVYVWAERGNQGSKKADTNALTDIDSPQNLVTDRVTENMATVSWDPVRATIDRYVVRYTSAKDGETREVPVGKEQSSTVLTGLRPGVEYTVHVWAQKGAQESKKADTKAQTDIDSPQNLVTDWVTENTATVSWDPVQATIDRYVVHYTSANGETREVPVGKEQSSTVLTGLRPGMEYTVHVWAQKGNQESKKADTKAQTEIDGPKNLVTDWVTENMATVSWDPVQATIDKYMVRYTSADGETREVPVGKEHSSTVLTGLRPGMEYMVHVWAQKGAQESKKADTKAQTELDPPRNLRPSAVTQSGGILTWTPPSAQIHGYILTYQFPDGTVKEMQLGREDQRFALQGLEQGATYPVSLVAFKGGRRSRNVSTTLSTVGARFPHPSDCSQVQQNSNAASGLYTIYLHGDASRPLQVYCDMETDGGGWIVFQRRNTGQLDFFKRWRSYVEGFGDPMKEFWLGLDKLHNLTTGTPARYEVRVDLQTANESAYAIYDFFQVASSKERYKLTVGKYRGTAGDALTYHNGWKFTTFDRDNDIALSNCALTHHGGWWYKNCHLANPNGRYGETKHSEGVNWEPWKGHEFSIPYVELKIRPHGYSREPVLGRKKRTLRGRLRTF

SEQ ID NO: 13626 - protein, 1122 aa, Homo sapiens
MSLQEMFRFPMGLLLGSVLLVASAPATLEPPGCSNKEQQVTVSHTYKIDVPKSALVQVDADPQPLSDDGASLLALGEAREEQNIIFRHNIRLQTPQKDCELAGSVQDLLARVKKLEEEMVEMKEQCSAQRCCQGVTDLSRHCSGHGTFSLETCSCHCEEGREGPACERLACPGACSGHGRCVDGRCLCHEPYVGADCGYPACPENCSGHGECVRGVCQCHEDFMSEDCSEKRCPGDCSGHGFCDTGECYCEEGFTGLDCAQVVTPQGLQLLKNTEDSLLVSWEPSSQVDHYLLSYYPLGKELSGKQIQVPKEQHSYEILGLLPGTKYIVTLRNVKNEVSSSPQHLLATTDLAVLGTAWVTDETENSLDVEWENPSTEVDYYKLRYGPMTGQEVAEVTVPKSSDPKSRYDITGLHPGTEYKITVVPMRGELEGKPILLNGRTEIDSPTNVVTDRVTEDTATVSWDPVQAVIDKYVVRYTSADGDTKEMAVHKDESSTVLTGLKPGEAYKVYVWAERGNQGSKKADTNALTEIDSPANLVTDRVTENTATISWDPVQATIDRYVVRYTSAKDGETREVPVGKEQSSTVLTGLRPGVEYTVHVWAQKGAQESKKADTKAQTDIDSPQNLVTDWVTENTATVSWDPVQATIDRYVVHYTSANGETREVPVGKEQSSTVLTGLRPGMEYTVHVWAQKGNQESKKADTKAQTEIDGPKNLVTDWVTENMATVSWDPVQATIDKYMVRYTSADGETREVPVGKEHSSTVLTGLRPGMEYMVHVWAQKGAQESKKADTKAQTELDPPRNLRPSAVTQSGGILTWTPPSAQIHGYILTYQFPDGTVKEMQLGREDQRFALQGLEQGATYPVSLVAFKGGRRSRNVSTTLSTVGARFPHPSDCSQVQQNSNAASGLYTIYLHGDASRPLQVYCDMETDGGGWIVFQRRNTGQLDFFKRWRSYVEGFGDPMKEFWLGLDKLHNLTTGTPARYEVRVDLQTANESAYAIYDFFQVASSKERYKLTVGKYRGTAGDALTYHNGWKFTTFDRDNDIALSNCALTHHGGWWYKNCHLANPNGRYGETKHSEGVNWEPWKGHEFSIPYVELKIRPHGYSREPVLGRKKRTLRGRLRTF

SEQ ID NO: 13627 - protein, 1358 aa, Homo sapiens
MGADGETVVLKNMLIGINLILLGSMIKPSECQLEVTTERVQRQSVEEEGGIANYNTSSKEQPVVFNHVYNINVPLDNLCSSGLEASAEQEVSAEDETLAEYMGQTSDHESQVTFTHRINFPKKACPCASSAQVLQELLSRIEMLEREVSVLRDQCNANCCQESAATGQLDYIPHCSGHGNFSFESCGCICNEGWFGKNCSEPYCPLGCSSRGVCVDGQCICDSEYSGDDCSELRCPTDCSSRGLCVDGECVCEEPYTGEDCRELRCPGDCSGKGRCANGTCLCEEGYVGEDCGQRQCLNACSGRGQCEEGLCVCEEGYQGPDCSAVAPPEDLRVAGISDRSIELEWDGPMAVTEYVISYQPTALGGLQLQQRVPGDWSGVTITELEPGLTYNISVYAVISNILSLPITAKVATHLSTPQGLQFKTITETTVEVQWEPFSFSFDGWEISFIPKNNEGGVIAQVPSDVTSFNQTGLKPGEEYIVNVVALKEQARSPPTSASVSTVIDGPTQILVRDVSDTVAFVEWIPPRAKVDFILLKYGLVGGEGGRTTFRLQPPLSQYSVQALRPGSRYEVSVSAVRGTNESDSATTQFTTEIDAPKNLRVGSRTATSLDLEWDNSEAEVQEYKVVYSTLAGEQYHEVLVPRGIGPTTRATLTDLVPGTEYGVGISAVMNSQQSVPATMNARTELDSPRDLMVTASSETSISLIWTKASGPIDHYRITFTPSSGIASEVTVPKDRTSYTLTDLEPGAEYIISVTAERGRQQSLESTVDAFTGFRPISHLHFSHVTSSSVNITWSDPSPPADRLILNYSPRDEEEEMMEVSLDATKRHAVLMGLQPATEYIVNLVAVHGTVTSEPIVGSITTGIDPPKDITISNVTKDSVMVSWSPPVASFDYYRVSYRPTQVGRLDSSVVPNTVTEFTITRLNPATEYEISLNSVRGREESERICTLVHTAMDNPVDLIATNITPTEALLQWKAPVGEVENYVIVLTHFAVAGETILVDGVSEEFRLVDLLPSTHYTATMYATNGPLTSGTISTNFSTLLDPPANLTASEVTRQSALISWQPPRAEIENYVLTYKSTDGSRKELIVDAEDTWIRLEGLLENTDYTVLLQAAQDTTWSSITSTAFTTGGRVFPHPQDCAQHLMNGDTLSGVYPIFLNGELSQKLQVYCDMTTDGGGWIVFQRRQNGQTDFFRKWADYRVGFGNVEDEFWLGLDNIHRITSQGRYELRVDMRDGQEAAFASYDRFSVEDSRNLYKLRIGSYNGTAGDSLSYHQGRPFSTEDRDNDVAVTNCAMSYKGAWWYKNCHRTNLNGKYGESRHSQGINWYHWKGHEFSIPFVEMKMRPYNHRLMAGRKRQSLQF

SEQ ID NO: 13628 - protein, 1358 aa, Homo sapiens; identical to SEQ ID NO: 13627

SEQ ID NO: 13629 - protein, 181 aa, Homo sapiens
  VARIANT 1: note = misc_feature - Xaa can be any naturally occurring amino acid
XINFPKKACPCASSAQVLQELLSRIEMLEREVSVLRDQCNANCCQESAATVAPPEDLRVAGISDRSIELEWDGPMAVTEYVISYQPTALGGLQLQQRVPGDWSGVTITELEPGLTYNISVYAVISNILSLPITAKVATHLSTPQGLQFKTITETTVEVQWEPFSFSFDGWEISFIPKNNEG

SEQ ID NO: 13630 - protein, 1962 aa, Homo sapiens
APGKDEEMAPASTEPPTPEPPIKPRLEELTVTDATPDSLSLSWTVPEGQFDHFLVQYKNGDGQPKATRVPGHEDRVTISGLEPDNKYKMNLYGFHGGQRVGPVSAIGVTAAEEETPSPTEPSMEAPEPPEEPLLGELTVTGSSPDSLSLSWTVPQGRFDSFTVQYKDRDGRPQVVRVGGEESEVTVGGLEPGRKYKMHLYGLHEGRRVGPVSTVGVTAPQEDVDETPSPTEPGTEAPGPPEEPLLGELTVTGSSPDSLSLSWTVPQGRFDSFTVQYKDRDGRPQAVRVGGQESKVTVRGLEPGRKYKMHLYGLHEGRRLGPVSAVGVTEDEAETTQAVPTMTPEPPIKPRLGELTMTDATPDSLSLSWTVPEGQFDHFLVQYRNGDGQPKAVRVPGHEDGVTISGLEPDHKYKMNLYGFHGGQRVGPISVIGVTAAEEETPSPTELSTEAPEPPEEPLLGELTVTGSSPDSLSLSWTIPQGHFDSFTVQYKDRDGRPQVMRVRGEESEVTVGGLEPGRKYKMHLYGLHEGRRVGPVSTVGVTEDEAETTQAVPTTTPEPPNKPRLGELTVTDATPDSLSLSWMVPEGQFDHFLVQYRNGDGQPKVVRVPGHEDGVTISGLEPDHKYKMNLYGFHGGQRVGPISVIGVTAAEEETPAPTEPSTEAPEPPEEPLLGELTVTGSSPDSLSLSWTIPQGRFDSFTVQYKDRDGRPQVVRVRGEESEVTVGGLEPGCKYKMHLYGLHEGQRVGPVSAVGVTAPKDEAETTQAVPTMTPEPPIKPRLGELTVTDATPDSLSLSWMVPEGQFDHFLVQYRNGDGQPKAVRVPGHEDGVTISGLEPDHKYKMNLYGFHGGQRVGPVSAIGVTEEETPSPTEPSTEAPEAPEEPLLGELTVTGSSPDSLSLSWTVPQGRFDSFTVQYKDRDGQPQVVRVRGEESEVTVGGLEPGRKYKMHLYGLHEGQRVGPVSTVGITAPLPTPLPVEPRLGELAVAAVTSDSVGLSWTVAQGPFDSFLVQYRDAQGQPQAVPVSGDLRAVAVSGLDPARKYKFLLFGLQNGKRHGPVPVEARTAPDTKPSPRLGELTVTDATPDSVGLSWTVPEGEFDSFVVQYKDKDGRLQVVPVAANQREVTVQGLEPSRKYRFLLYGLSGRKRLGPISADSTTAPLEKELPPHLGELTVAEETSSSLRLSWTVAQGPFDSFVVQYRDTDGQPRAVPVAADQRTVTVEDLEPGKKYKFLLYGLLGGKRLGPVSALGMTAPEEDTPAPELAPEAPEPPEEPRLGVLTVTDTTPDSMRLSWSVAQGPFDSFVVQYEDTNGQPQALLVDGDQSKILISGLEPSTPYRFLLYGLHEGKRLGPLSAEGTTGLAPAGQTSEESRPRLSQLSVTDVTTSSLRLNWEAPPGAFDSFLLRFGVPSPSTLEPHPRPLLQRELMVPGTRHSAVLRDLRSGTLYSLTLYGLRGPHKADSIQGTARTLSPVLESPRDLQFSEIRETSAKVNWMPPPSRADSFKVSYQLADGGEPQSVQVDGQARTQKLQGLIPGARYEVTVVSVRGFEESEPLTGFLTTVPDGPTQLRALNLTEGFAVLHWKPPQNPVDTYDVQVTAPGAPPLQAETPGSAVDYPLHDLVLHTNYTATVRGLRGPNLTSPASITFTTGLEAPRDLEAKEVTPRTALLTWTEPPVRPAGYLLSFHTPGGQNQEILLPGGITSHQLLGLFPSTSYNARLQAMWGQSLLPPVSTSFTTGGLRIPFPRDCGEEMQNGAGASRTSTIFLNGNRERPLNVFCDMETDGGGWLVFQRRMDGQTDFWRDWEDYAHGFGNISGEFWLGNEALHSLTQAGDYSMRVDLRAGDEAVFAQYDSFHVDSAAEYYRLHLEGYHGTAGDSMSYHSGSVFSARDRDPNSLLISCAVSYRGAWWYRNCHYANLNGLYGSTVDHQGVSWYHWKGFEFSVPFTEMKLRPRNFRSPAGGG

SEQ ID NO: 13631 - protein, 8 aa, Homo sapiens
MMPAQYAL

SEQ ID NO: 13632 - protein, 4244 aa, Homo sapiens
MMPAQYALTSSLVLLVLLSTARAGPFSSRSNVTLPAPRPPPQPGGHTVGAGVGSPSSQLYEHTVEGGEKQVVFTHRINLPPSTGCGCPPGTEPPVLASEVQALRVRLEILEELVKGLKEQCTGGCCPASAQAGTGQTDVRTLCSLHGVFDLSRCTCSCEPGWGGPTCSDPTDAEIPPSSPPSASGSCPDDCNDQGRCVRGRCVCFPGYTGPSCGWPSCPGDCQGRGRCVQGVCVCRAGFSGPDCSQRSCPRGCSQRGRCEGGRCVCDPGYTGDDCGMRSCPRGCSQRGRCENGRCVCNPGYTGEDCGVRSCPRGCSQRGRCKDGRCVCDPGYTGEDCGTRSCPWDCGEGGRCVDGRCVCWPGYTGEDCSTRTCPRDCRGRGRCEDGECICDTGYSGDDCGVRSCPGDCNQRGRCEDGRCVCWPGYTGTDCGSRACPRDCRGRGRCENGVCVCNAGYSGEDCGVRSCPGDCRGRGRCESGRCMCWPGYTGRDCGTRACPGDCRGRGRCVDGRCVCNPGFTGEDCGSRRCPGDCRGHGLCEDGVCVCDAGYSGEDCSTRSCPGGCRGRGQCLDGRCVCEDGYSGEDCGVRQCPNDCSQHGVCQDGVCICWEGYVSEDCSIRTCPSNCHGRGRCEEGRCLCDPGYTGPTCATRMCPADCRGRGRCVQGVCLCHVGYGGEDCGQEEPPASACPGGCGPRELCRAGQCVCVEGFRGPDCAIQTCPGDCRGRGECHDGSCVCKDGYAGEDCGEEVPTIEGMRMHLLEETTVRTEWTPAPGPVDAYEIQFIPTTEGASPPFTARVPSSASAYDQRGLAPGQEYQVTVRALRGTSWGLPASKTITTMIDGPQDLRVVAVTPTTLELGWLRPQAEVDRFVVSYVSAGNQRVRLEVPPEADGTLLTDLMPGVEYVVTVTAERGRAVSYPASVRANTGSSPLGLLGTTDEPPPSGPSTTQGAQAPLLQQRPQELGELRVLGRDETGRLRVVWTAQPDTFAYFQLRMRVPEGPGAHEEVLPGDVRQALVPPPPPGTPYELSLHGVPPGGKPSDPIIYQGIMDKDEEKPGKSSGPPRLGELTVTDRTSDSLLLRWTVPEGEFDSFVIQYKDRDGQPQVVPVEGPQRSAVITSLDPGRKYKFVLYGFVGKKRHGPLVAEAKILPQSDPSPGTPPHLGNLWVTDPTPDSLHLSWTVPEGQFDTFMVQYRDRDGRPQVVPVEGPERSFVVSSLDPDHKYRFTLFGIANKKRYGPLTADGTTAPERKEEPPRPEFLEQPLLGELTVTGVTPDSLRLSWTVAQGPFDSFMVQYKDAQGQPQAVPVAGDENEVTVPGLDPDRKYKMNLYGLRGRQRVGPESVVAKTAPQEDVDETPSPTELGTEAPESPEEPLLGELTVTGSSPDSLSLFWTVPQGSFDSFTVQYKDRDGRPRAVRVGGKESEVTVGGLEPGHKYKMHLYGLHEGQRVGPVSAVGVTAPQQEETPPATESPLEPRLGELTVTDVTPNSVGLSWTVPEGQFDSFIVQYKDKDGQPQVVPVAADQREVTVYNLEPERKYKMNMYGLHDGQRMGPLSVVIVTAPLPPAPATEASKPPLEPRLGELTVTDITPDSVGLSWTVPEGEFDSFVVQYKDRDGQPQVVPVAADQREVTIPDLEPSRKYKFLLFGIQDGKRRSPVSVEAKTVARGDASPGAPPRLGELWVTDPTPDSLRLSWTVPEGQFDSFVVQFKDKDGPQVVPVEGHERSVTVTPLDAGRKYRFLLYGLLGKKRHGPLTADGTTEARSAMDDTGTKRPPKPRLGEELQVTTVTQNSVGLSWTVPEGQFDSFVVQYKDRDGQPQVVPVEGSLREVSVPGLDPAHRYKLLLYGLHHGKRVGPISAVAITAGREETETETTAPTPPAPEPHLGELTVEEATSHTLHLSWMVTEGEFDSFEIQYTDRDGQLQMVRIGGDRNDITLSGLESDHRYLVTLYGFSDGKHVGPVHVEALTVPEEEKPSEPPTATPEPPIKPRLGELTVTDATPDSLSLSWTVPEGQFDHFLVQYRNGDGQPKAVRVPGHEEGVTISGLEPDHKYKMNLYGFHGGQRMGPVSVVGVTAAEEETPSPTEPSMEAPEPAEEPLLGELTVTGSSPDSLSLSWTVPQGRFDSFTVQYKDRDGRPQVVRVGGEESEVTVGGLEPGRKYKMHLYGLHEGRRVGPVSAVGVTAPEEESPDAPLAKLRLGQMTVRDITSDSLSLSWTVPEGQFDHFLVQFKNGDGQPKAVRVPGHEDGVTISGLEPDHKYKMNLYGFHGGQRVGPVSAVGLTAPGKDEEMAPASTEPPTPEPPIKPRLEELTVTDATPDSLSLSWTVPEGQFDHFLVQYKNGDGQPKATRVPGHEDRVTISGLEPDNKYKMNLYGFHGGQRVGPVSAIGVTAAEEETPSPTEPSMEAPEPPEEPLLGELTVTGSSPDSLSLSWTVPQGRFDSFTVQYKDRDGRPQVVRVGGEESEVTVGGLEPGRKYKMHLYGLHEGRRVGPVSTVGVTAPQEDVDETPSPTEPGTEAPGPPEEPLLGELTVTGSSPDSLSLSWTVPQGRFDSFTVQYKDRDGRPQAVRVGGQESKVTVRGLEPGRKYKMHLYGLHEGRRLGPVSAVGVTEDEAETTQAVPTMTPEPPIKPRLGELTMTDATPDSLSLSWTVPEGQFDHFLVQYRNGDGQPKAVRVPGHEDGVTISGLEPDHKYKMNLYGFHGGQRVGPISVIGVTAAEEETPSPTELSTEAPEPPEEPLLGELTVTGSSPDSLSLSWTIPQGHFDSFTVQYKDRDGRPQVMRVRGEESEVTVGGLEPGRKYKMHLYGLHEGRRVGPVSTVGVTAPEDEAETTQAVPTTTPEPPNKPRLGELTVTDATPDSLSLSWMVPEGQFDHFLVQYRNGDGQPKVVRVPGHEDGVTISGLEPDHKYKMNLYGFHGGQRVGPISVIGVTAAEEETPAPTEPSTEAPEPPEEPLLGELTVTGSSPDSLSLSWTIPQGRFDSFTVQYKDRDGRPQVVRVRGEESEVTVGGLEPGCKYKMHLYGLHEGQRVGPVSAVGVTAPKDEAETTQAVPTMTPEPPIKPRLGELTVTDATPDSLSLSWMVPEGQFDHFLVQYRNGDGQPKAVRVPGHEDGVTISGLEPDHKYKMNLYGFHGGQRVGPVSAIGVTEEETPSPTEPSTEAPEAPEEPLLGELTVTGSSPDSLSLSWTVPQGRFDSFTVQYKDRDGQPQVVRVRGEESEVTVGGLEPGRKYKMHLYGLHEGQRVGPVSTVGITAPLPTPLPVEPRLGELAVAAVTSDSVGLSWTVAQGPFDSFLVQYRDAQGQPQAVPVSGDLRAVAVSGLDPARKYKFLLFGLQNGKRHGPVPVEARTAPDTKPSPRLGELTVTDATPDSVGLSWTVPEGEFDSFVVQYKDKDGRLQVVPVAANQREVTVQGLEPSRKYRFLLYGLSGRKRLGPISADSTTAPLEKELPPHLGELTVAEETSSSLRLSWTVAQGPFDSFVVQYRDTDGQPRAVPVAADQRTVTVEDLEPGKKYKFLLYGLLGGKRLGPVSALGMTAPEEDTPAPELAPEAPEPPEEPRLGVLTVTDTTPDSMRLSWSVAQGPFDSFVVQYEDTNGQPQALLVDGDQSKILISGLEPSTPYRFLLYGLHEGKRLGPLSAEGTTGLAPAGQTSEESRPRLSQLSVTDVTTSSLRLNWEAPPGAFDSFLLRFGVPSPSTLEPHPRPLLQRELMVPGTRHSAVLRDLRSGTLYSLTLYGLRGPHKADSIQGTARTLSPVLESPRDLQFSEIRETSAKVNWMPPPSRADSFKVSYQLADGGEPQSVQVDGQARTQKLQGLIPGARYEVTVVSVRGFEESEPLTGFLTTVPDGPTQLRALNLTEGFAVLHWKPPQNPVDTYDVQVTAPGAPPLQAETPGSAVDYPLHDLVLHTNYTATVRGLRGPNLTSPASITFTTGLEAPRDLEAKEVTPRTALLTWTEPPVRPAGYLLSFHTPGGQNQEILLPGGITSHQLLGLFPSTSYNARLQAMWGQSLLPPVSTSFTTGGLRIPFPRDCGEEMQNGAGASRTSTIFLNGNRERPLNVFCDMETDGGGWLVFQRRMDGQTDFWRDWEDYAHGFGNISGEFWLGNEALHSLTQAGDYSMRVDLRAGDEAVFAQYDSFHVDSAAEYYRLHLEGYHGTAGDSMSYHSGSVFSARDRDPNSLLISCAVSYRGAWWYRNCHYANLNGLYGSTVDHQGVSWYHWKGFEFSVPFTEMKLRPRNFRSPAGGG

SEQ ID NO: 13633 - protein, 842 aa, Homo sapiens
MMPAQYALTSSLVLLVLLSTARAGPFSSRSNVTLPAPRPPPQPGGHTVGAGVGSPSSQLYEHTVEGGEKQVVFTHRINLPPSTGCGCPPGTEPPVLASEVQALRVRLEILEELVKGLKEQCTGGCCPASAQAGTGQTDVRTLCSLHGVFDLSRCTCSCEPGWGGPTCSDPTDAEIPPSSPPSASGSCPDDCNDQGRCVRGRCVCFPGYTGPSCGWPSCPGDCQGRGRCVQGVCVCRAGFSGPDCSQRSCPRGCSQRGRCEGGRCVCDPGYTGDDCGMRSCPRGCSQRGRCENGRCVCNPGYTGEDCGVRSCPRGCSQRGRCKDGRCVCDPGYTGEDCGTRSCPWDCGEGGRCVDGRCVCWPGYTGEDCSTRTCPRDCRGRGRCEDGECICDTGYSGDDCGVRSCPGDCNQRGRCEDGRCVCWPGYTGTDCGSRACPRDCRGRGRCENGVCVCNAGYSGEDCGVRSCPGDCRGRGRCESGRCMCWPGYTGRDCGTRACPGDCRGRGRCVDGRCVCNPGFTGEDCGSRRCPGDCRGHGLCEDGVCVCDAGYSGEDCSTRSCPGGCRGRGQCLDGRCVCEDGYSGEDCGVRQCPNDCSQHGVCQDGVCICWEGYVSEDCSIRTCPSNCHGRGRCEEGRCLCDPGYTGPTCATRMCPADCRGRGRCVQGVCLCHVGYGGEDCGQEEPPASACPGGCGPRELCRAGQCVCVEGFRGPDCAIQTCPGDCRGRGECHDGSCVCKDGYAGEDCGEEVPTIEGMRMHLLEETTVRTEWTPAPGPVDAYEIQFIPTASPLLCSASPHSPAKAEAEISTSWRNQDSLNFFFCLNIFFCCCYKNTLITRQEFGN

SEQ ID NO: 13634 - protein, 4244 aa, Homo sapiens; identical to SEQ ID NO: 13632

SEQ ID NO: 13635 - protein, 1545 aa, Homo sapiens
MMPAQYALTSSLVLLVLLSTARAGPFSSRSNVTLPAPRPPPQPGGHTVGAGVGSPSSQLYEHTVEGGEKQVVFTHRINLPPSTGCGCPPGTEPPVLASEVQALRVRLEILEELVKGLKEQCTGGCCPASAQAGTGQTDVRTLCSLHGVFDLSRCTCSCEPGWGGPTCSDPTDAEIPPSSPPSASGSCPDDCNDQGRCVRGRCVCFPGYTGPSCGWPSCPGDCQGRGRCVQGVCVCRAGFSGPDCSQRSCPRGCSQRGRCEGGRCVCDPGYTGDDCGMRSCPRGCSQRGRCENGRCVCNPGYTGEDCGVRSCPRGCSQRGRCKDGRCVCDPGYTGEDCGTRSCPWDCGEGGRCVDGRCVCWPGYTGEDCSTRTCPRDCRGRGRCEDGECICDTGYSGDDCGVRSCPGDCNQRGRCEDGRCVCWPGYTGTDCGSRACPRDCRGRGRCENGVCVCNAGYSGEDCGVRSCPGDCRGRGRCESGRCMCWPGYTGRDCGTRACPGDCRGRGRCVDGRCVCNPGFTGEDCGSRRCPGDCRGHGLCEDGVCVCDAGYSGEDCSTRSCPGGCRGRGQCLDGRCVCEDGYSGEDCGVRQCPNDCSQHGVCQDGVCICWEGYVSEDCSIRTCPSNCHGRGRCEEGRCLCDPGYTGPTCATRMCPADCRGRGRCVQGVCLCHVGYGGEDCGQEEPPASACPGGCGPRELCRAGQCVCVEGFRGPDCAIQTCPGDCRGRGECHDGSCVCKDGYAGEDCGEARVPSSASAYDQRGLAPGQEYQVTVRALRGTSWGLPASKTITTMIDGPQDLRVVAVTPTTLELGWLRPQAEVDRFVVSYVSAGNQRVRLEVPPEADGTLLTDLMPGVEYVVTVTAERGRAVSYPASVRANTEEREEESPPRPSLSQPPRRPWGNLTAELSRFRGTVQDLERHLRAHGYPLRANQTYTSVARHIHEYLQRQVLGSSADGALLVSLDGLRGQFERVVLRWRPQPPAEGPGGELTVPGTTRTVSLPDLRPGTTYHVEVHGVRAGQTSKSYAFITTTGPSTTQGAQAPLLQQRPQELGELRVLGRDETGRLRVVWTAQPDTFAYFQLRMRVPEGPGAHEEVLPGDVRQALVPPPPPGTPYELSLHGVPPGGKPSDPIIYQGIMDKDEEKPGKSSGPPRLGELTVTDRTSDSLLLRWTVPEGEFDSFVIQYKDRDGQPQVVPVEGPQRSAVITSLDPGRKYKFVLYGFVGKKRHGPLVAEAKILPQSDPSPGTPPHLGNLWVTDPTPDSLHLSWTVPEGQFDTFMVQYRDRDGRPQVVPVEGPERSFVVSSLDPDHKYRFTLFGIANKKRYGPLTADGTTAPERKEEPPRPEFLEQPLLGELTVTGVTPDSLRLSWTVAQGPFDSFMVQYKDAQGQPQAVPVAGDENEVTVPGLDPDRKYKMNLYGLRGRQRVGPESVVAKTAPQEDVDETPSPTELGTEAPESPEEPLLGELTVTGSSPDSLSLFWTVPQGSFDSFTVQYKDRDGRPRAVRVGGKESEVTVGGLEPGHKYKMHLYGLHEGQRVGPVSAVGVT

SEQ ID NO: 13636 - protein, 673 aa, Homo sapiens
MRLSWSVAQGPFDSFVVQYEDTNGQPQALLVDGDQSKILISGLEPSTPYRFLLYGLHEGKRLGPLSAEGTTGLAPAGQTSEESRPRLSQLSVTDVTTSSLRLNWEAPPGAFDSFLLRFGVPSPSTLEPHPRPLLQRELMVPGTRHSAVLRDLRSGTLYSLTLYGLRGPHKADSIQGTARTLSPVLESPRDLQFSEIRETSAKVNWMPPPSRADSFKVSYQLADGGEPQSVQVDGQARTQKLQGLIPGARYEVTVVSVRGFEESEPLTGFLTTVPDGPTQLRALNLTEGFAVLHWKPPQNPVDTYDVQVTAPGAPPLQAETPGSAVDYPLHDLVLHTNYTATVRGLRGPNLTSPASITFTTGLEAPRDLEAKEVTPRTALLTWTEPPVRPAGYLLSFHTPGGQNQEILLPGGITSHQLLGLFPSTSYNARLQAMWGQSLLPPVSTSFTTGGLRIPFPRDCGEEMQNGAGASRTSTIFLNGNRERPLNVFCDMETDGGGWLVFQRRMDGQTDFWRDWEDYAHGFGNISGEFWLGNEALHSLTQAGDYSMRVDLRAGDEAVFAQYDSFHVDSAAEYYRLHLEGYHGTAGDSMSYHSGSVFSARDRDPNSLLISCAVSYRGAWWYRNCHYANLNGLYGSTVDHQGVSWYHWKGFEFSVPFTEMKLRPRNFRSPAGGG

SEQ ID NO: 13637 - protein, 1720 aa, Homo sapiens
MAAAPSALLLLPPFPVLSTYRLQSRSRPSAPETDDSRVGGIMRGEKNYYFRGAAGDHGSCPTTTSPLASALLMPSEAVSSSWSESGGGLSGGDEEDTRLLQLLRTARDPSEAFQALQAALPRRGGRLGFPRRKEALYRALGRVLVEGGSDEKRLCLQLLSDVLRGQGEAGQLEEAFSLALLPQLVVSLREENPALRKDALQILHICLKRSPGEVLRTLIQQGLESTDARLRASTALLLPILLTTEDLLLGLDLTEVIISLARKLGDQETEEESETAFSALQQIGERLGQDRFQSYISRLPSALRRHYNRRLESQFGSQVPYYLELEASGFPEDPLPCAVTLSNSNLKFGIIPQELHSRLLDQEDYKNRTQAVEELKQVLGKFNPSSTPHSSLVGFISLLYNLLDDSNFKVVHGTLEVLHLLVIRLGEQVQQFLGPVIAASVKVLADNKLVIKQEYMKIFLKLMKEVGPQQVLCLLLEHLKHKHSRVREEVVNICICSLLTYPSEDFDLPKLSFDLAPALVDSKRRVRQAALEAFAVLASSMGSGKTSILFKAVDTVELQDNGDGVMNAVQARLARKTLPRLTEQGFVEYAVLMPSSAGGRSNHLAHGADTDWLLAGNRTQSAHCHCGDHVRDSMHIYGSYSPTICTRRVLSAGKGKNKLPWENEQPGIMGENQTSTSKDIEQFSTYDFIPSAKLKLSQGMPVNDDLCFSRKRVSRNLFQNSRDFNPDCLPLCAAGTTGTHQTNLSGKCAQLGFSQICGKTGSVGSDLQFLGTTSSHQEKVYASLNFGSKTQQTFGSQTECTSSNGQNPSPGAYILPSYPVSSPRTSPKHTSPLIISPKKSQDNSVNFSNSWPLKSFEGLSKPSPQKKLVSQKSSDPTGRNHGENSQEKPPVQLTPALVRSPSSRRGLNGTKPVPPIPRGISLLPDKADLSTVGHKKKEPDDIWKCEKDSLPIDLSELNFKDKDLDQEEMHSSLRSLRNSAAKKRAKLSGSTSDLESPDSAMKLDLTMDSPSLSSSPNINSYSESGVYSQESLTSSLSTTPQGKRIMSDIFPTFGSKPCPTRLSSAKKKISHIAEQSPSAGSSSNPQQISSFDFTTTKALSEDSVVVVGKGVFGSLSSAPATCSQSVISSVENGDTFSIKQSIEPPSGIYGRSVQQNISSYLDVENEKDAKVSISKSTYNKMRQKRKEEKELFHNKDCEKKEKNSWERMRHTGTEKMASESETPTGAISQYKERMPSVTHSPEIMDLSELRPFSKPEIALTEALRLLADEDWEKKIEGLNFIRCLAAFHSEILNTKLHETNFAVVQEVKNLRSGVSRAAVVCLSDLFTYLKKSMDQELDTTVKVLLHKAGESNTFIREDVDKALRAMVNNVTPARAVVSLINGGQRYYGRKMLFFMMCHPNFEKMLEKYVPSKDLPYIKDSVRNLQQKGLGEIPLDTPSAKGRRSHTGSVGNTRSSSVSRDAFNSAERAVTEVREVTRKSVPRNSLESAEYLKLITGLLNAKDFRDRINGIKQLLSDTENNQDLVVGNIVKIFDAFKSRLHDSNSKVNLVALETMHKMIPLLRDHLSPIINMLIPAIVDNNLNSKNPGIYAAATNVVQALSQHVDNYLLLQPFCTKAQFLNGKAKQDMTEKLADIVTELYQRKPHATEQKVLVVLWHLLGNMTNSGSLPGAGGNIRTATAKLSKALFAQMGQNLLNQAASQPPHIKKSLEELLDMTILNEL

SEQ ID NO: 13638 - protein, 1773 aa, Homo sapiens
MAAAPSALLLLPPFPVLSTYRLQSRSRPSAPETDDSRVGGIMRGEKNYYFRGAAGDHGSCPTTTSPLASALLMPSEAVSSSWSESGGGLSGGDEEDTRLLQLLRTARDPSEAFQALQAALPRRGGRLGFPRRKEALYRALGRVLVEGGSDEKRLCLQLLSDVLRGQGEAGQLEEAFSLALLPQLVVSLREENPALRKDALQILHICLKRSPGEVLRTLIQQGLESTDARLRASTALLLPILLTTEDLLLGLDLTEVIISLARKLGDQETEEESETAFSALQQIGERLGQDRFQSYISRLPSALRRHYNRRLESQFGSQVPYYLELEASGFPEDPLPCAVTLSNSNLKFGIIPQELHSRLLDQEDYKNRTQAVEELKQVLGKFNPSSTPHSSLVGFISLLYNLLDDSNFKVVHGTLEVLHLLVIRLGEQVQQFLGPVIAASVKVLADNKLVIKQEYMKIFLKLMKEVGPQQVLCLLLEHLKHKHSRVREEVVNICICSLLTYPSEDFDLPKLSFDLAPALVDSKRRVRQAALEAFAVLASSMGSGKTSILFKAVDTVELQDNGDGVMNAVQARLARKTLPRLTEQGFVEYAVLMPSSAGGRSNHLAHGADTDWLLAGNRTQSAHCHCGDHVRDSMHIYGSYSPTICTRRVLSAGKGKNKLPWENEQPGIMGENQTSTSKDIEQFSTYDFIPSAKLKLSQGMPVNDDLCFSRKRVSRNLFQNSRDFNPDCLPLCAAGTTGTHQTNLSGKCAQLGFSQICGKTGSVGSDLQFLGTTSSHQEKVYASLNFGSKTQQTFGSQTECTSSNGQNPSPGAYILPSYPVSSPRTSPKHTSPLIISPKKSQDNSVNFSNSWPLKSFEGLSKPSPQKKLVSQKSSDPTGRNHGENSQEKPPVQLTPALVRSPSSRRGLNGTKPVPPIPRGISLLPDKADLSTVGHKKKEPDDIWKCEKDSLPIDLSELNFKDKDLDQEEMHSSLRSLRNSAAKKRAKLSGSTSDLESPDSAMKLDLTMDSPSLSSSPNINSYSESGVYSQESLTSSLSTTPQGKRIMSDIFPTFGSKPCPTRLSSAKKKISHIAEQSPSAGSSSNPQQISSFDFTTTKALSEDSVVVVGKGVFGSLSSAPATCSQSVISSVENGDTFSIKQSIEPPSGIYGRSVQQNISSYLDVENEKDAKVSISKSTYNKMRQKRKEEKELFHNKDCEKKEKNSWERMRHTGTEKMASESETPTGAISQYKERMPSVTHSPEIMDLSELRPFSKPEIALTEALRLLADEDWEKKIEGLNFIRCLAAFHSEILNTKLHETNFAVVQEVKNLRSGVSRAAVVCLSDLFTYLKKSMDQELDTTVKVLLHKAGESNTFIREDVDKALRAMVNNVTPARAVVSLINGGQSHLHIAVRRCTAQHLSDVLEFMEPERILSAAKDMAERILPAAAKFAQDSSQETRYYGRKMLFFMMCHPNFEKMLEKYVPSKDLPYIKDSVRNLQQKGLGEIPLDTPSAKGRRSHTGSVGNTRSSSVSRDAFNSAERAVTEVREVTRKSVPRNSLESAEYLKLITGLLNAKDFRDRINGIKQLLSDTENNQDLVVGNIVKIFDAFKSRLHDSNSKVNLVALETMHKMIPLLRDHLSPIINMLIPAIVDNNLNSKNPGIYAAATNVVQALSQHVDNYLLLQPFCTKAQFLNGKAKQDMTEKLADIVTELYQRKPHATEQKVLVVLWHLLGNMTNSGSLPGAGGNIRTATAKLSKALFAQMGQNLLNQAASQPPHIKKSLEELLDMTILNEL

SEQ ID NO: 13639 - protein, 995 aa, Homo sapiens
MAAAPSALLLLPPFPVLSTYRLQSRSRPSAPETDDSRVGGIMRGEKNYYFRGAAGDHGSCPTTTSPLASALLMPSEAVSSSWSESGGGLSGGDEEDTRLLQLLRTARDPSEAFQALQAALPRRGGRLGFPRRKEALYRALGRVLVEGGSDEKRLCLQLLSDVLRGQGEAGQLEEAFSLALLPQLVVSLREENPALRKDALQILHICLKRSPGEVLRTLIQQGLESTDARLRASTALLLPILLTTEDLLLGLDLTEVIISLARKLGDQETEEESETAFSALQQIGERLGQDRFQSYISRLPSALRRHYNRRLESQFGSQVPYYLELEASGFPEDPLPCAVTLSNSNLKFGIIPQELHSRLLDQEDYKNRTQAVEELKQVLGKFNPSSTPHSSLVGFISLLYNLLDDSNFKVVHGTLEVLHLLVIRLGEQVQQFLGPVIAASVKVLADNKLVIKQEYMKIFLKLMKEVGPQQVLCLLLEHLKHKHSRVREEVVNICICSLLTYPSEDFDLPKLSFDLAPALVDSKRRVRQAALEAFAVLASSMGSGKTSILFKAVDTVELQDNGDGVMNAVQARLARKTLPRLTEQGFVEYAVLMPSSAGGRSNHLAHGADTDWLLAGNRTQSAHCHCGDHVRDSMHIYGSYSPTICTRRVLSAGKGKNKLPWENEQPGIMGENQTSTSKDIEQFSTYDFIPSAKLKLSQGMPVNDDLCFSRKRVSRNLFQNSRDFNPDCLPLCAAGTTGTHQTNLSGKCAQLGFSQICGKTGSVGSDLQFLGTTSSHQEKVYASLNFGSKTQQTFGSQTECTSSNGQNPSPGAYILPSYPVSSPRTSPKHTSPLIISPKKSQDNSVNFSNSWPLKSFEGLSKPSPQKKLVSQKSSDPTGRNHGENSQEKPPVQLTPALVRSPSSRRGLNGTKPVPPIPRGISLLPDKADLSTVGHKKKEPDDIWKCEKDSLPIDLSELNFKDKDLDQEEVRHISNIWVKTLSNKTFFCKEKNFSYC

SEQ ID NO: 13640 - protein, 174 aa, Homo sapiens
MFSTYDFIPSAKLKLSQGMPVNDDLCFSRKRVSRNLFQNSRDFNPDCLPLCAAGTTGTHQTNLSGKCAQLGFSQICGKTGSVGSDLQFLGTTSSHQEKVYASLNFGSKTQQTFGSQTECTSSNGQNPSPGAYILPSYPVSSPRTSPKHTSPLIISPKKSQDNSVNFSNSWPLKS

SEQ ID NO: 13641 - protein, 155 aa, Homo sapiens
SRLHDSNSKVNLVALETMHKMIPLLRDHLSPIINMLIPAIVDNNLNSKNPGIYAAATNVVQALSQHVDIVTELYQRKPHATEQKVLVVLWHLLGNMTNSGSLPGAGGNIRTATAKLSKALFAQMGQNLLNQAASQPPHIKKSLEELLDMTILNEL

SEQ ID NO: 13642 - protein, 160 aa, Homo sapiens
  VARIANT 1: note = misc_feature - Xaa can be any naturally occurring amino acid
XFSRKRVSRNLFQNSRDFNPDCLPLCAAGTTGTHQTNLSGKCAQLGFSQICGKTGSVGSDLQFLGTTSSHQEKGENSQEKPPVQLTPALVRSPSSRRGLNGTKPVPPIPRGISLLPDKADLSTVGHKKKEPDDIWKCEKDSLPIDLSELNFKDKDLDQEE

SEQ ID NO: 13643 - protein, 51 aa, Homo sapiens
MIIIIVVGCLCFLTCTMKGLDDFYYCPHFTGFKRGADPGMPEPTVLSLLWG

SEQ ID NO: 13644 - protein, 55 aa, Homo sapiens [sequence omitted]

SEQ ID NO: 13645 - protein, 125 aa, Homo sapiens
MVKLSKEAKQRLQQLFKGSQFAIRWGFIPLVIYLGFKRGADPGMPEPTVLRVWWLTPVISALWKAKVGRSWEDCLKLGVQDQPGQRSETHLYQKKKTYFGDKGLFGLLDLEAISGQHGRCVLWLG

SEQ ID NO: 13646 - protein, 55 aa, Homo sapiens
MVKLSKEAKQRLQQLFKGSQFAIRWGFIPLVIYLGFKRGADPGMPEPTVLSLLWG

SEQ ID NO: 13647 - protein, 49 aa, Homo sapiens
ATFYGRMLDHEYTTKEVFRKNFFNDWRKAPLLDPLLWPDATPLPFTTAL

SEQ ID NO: 13648 - protein, 164 aa, Homo sapiens
MKSHPRKKAKNSQKGPFRNVCCTCFPLSDPSETSCCSEDTHPSRPGPPGPQQHYLAGVTCRSPGSGRWEKEKHEDGVKWRQLEHKGPYFAPPYEPLPDGVRFFYEGRPVRLSVAAEEVATFYGRMLDHEYTTKEVFRKNFFNDWRKEMAVEEREVIKSLDKCDF

SEQ ID NO: 13649 - protein, 134 aa, Homo sapiens
MKSHPRKKAKWEKEKHEDGVKWRQLEHKGPYFAPPYEPLPDGVRFFYEGRPVRLSVAAEEVATFYGRMLDHEYTTKEVFRKNFFNDWRKEMAVEEREVIKSLDKCDFTEIHRYFVDKAAARKVLSREEKQKLKE

SEQ ID NO: 13650 - protein, 33 aa, Homo sapiens
MLDHEYTTKEVFRKNFFNDWRKEMAVEEREVIK

SEQ ID NO: 13651 - protein, 201 aa, Homo sapiens
MLDHEYTTKEVFRKNFFNDWRKEMAVEEREVIKSLDKCDFTEIHRYFVDKAAARKVLSREEKQKLKEEAEKLQQEFGYCILDGHQEKIGNFKIEPPGLFRGRGDHPKMGMLKRRITPEDVVINCSRDSKIPEPPAGHQWKEVRSDNTVTWLAAWTESVQNSIKYIMLNPCSKLKGETAWQKFETARRLRGFVDEIRSQYRA

SEQ ID NO: 13652 - protein, 221 aa, Homo sapiens
MLDHEYTTKEVFRKNFFNDWRKEMAVEEREVIKSLDKCDFTEIHRYFVDKAAARKVLSREEKQKLKEEAEKLQQEFGYCILDGHQEKIGNFKIEPPGLFRGRGDHPKMGMLKRRITPEDVVINCSRDSKIPEPPAGHQWKEVRSDNTVTWLAAWTESVQNSIKYIMLNPCSKLKGETAWQKFETARRLRGFVDEIRSQYRADWKSREMKTRQRAVALYFID

SEQ ID NO: 13653 - protein, 376 aa, Homo sapiens
MLDHEYTTKEVFRKNFFNDWRKEMAVEEREVIKSLDKCDFTEIHRYFVDKAAARKVLSREEKQKLKEEAEKLQQEFGYCILDGHQEKIGNFKIEPPGLFRGRGDHPKMGMLKRRITPEDVVINCSRDSKIPEPPAGHQWKEVRSDNTVTWLAAWTESVQNSIKYIMLNPCSKLKGETAWQKFETARRLRGFVDEIRSQYRADWKSREMKTRQRAVALYFIDKLALRAGNEKEDGEAADTVGCCSLRVEHVQLHPEADGCQHVVEFDFLGKDCIRYYNRVPVEKPVYKNLQLFMENKDPRDDLFDRLTVSWDGPAKPRNYRDHFPPQTTSLNKHLQELMDGLTAKVFRTYNASITLQEQLRALTRAEDSIAAKILSY

SEQ ID NO: 13654 - protein, 503 aa, Homo sapiens
MLDHEYTTKEVFRKNFFNDWRKEMAVEEREVIKSLDKCDFTEIHRYFVDKAAARKVLSREEKQKLKEEAEKLQQEFGYCILDGHQEKIGNFKIEPPGLFRGRGDHPKMGMLKRRITPEDVVINCSRDSKIPEPPAGHQWKEVRSDNTVTWLAAWTESVQNSIKYIMLNPCSKLKGETAWQKFETARRLRGFVDEIRSQYRADWKSREMKTRQRAVALYFIDKLALRAGNEKEDGEAADTVGCCSLRVEHVQLHPEADGCQHVVEFDFLGKDCIRYYNRVPVEKPVYKNLQLFMENKDPRDDLFDRLTTTSLNKHLQELMDGLTAKVFRTYNASITLQEQLRALTRAEDSIAAKILSYNRANRVVAILCNHQRATPSTFEKSMQNLQTKIQAKKEQVAEARAELRRARAEHKAQGDGKSRSVLEKKRRLLEKLQEQLAQLSVQATDKEENKQVALGTSKLNYLDPRISIAWCKRFRVPVEKIYSKTQRERFAWALAMAGEDFEF

SEQ ID NO: 13655 - protein, 503 aa, Homo sapiens; identical to SEQ ID NO: 13654

SEQ ID NO: 13656 - protein, 503 aa, Homo sapiens; identical to SEQ ID NO: 13654

SEQ ID NO: 13657 - protein, 164 aa, Homo sapiens
MRVVRLLRLRAALTLLGEVPRRPASRGVPGSRRTQKGSGARNSQKGPFRNVCCTCFPLSDPSETSCCSEDTHPSRPGPPGPQQHYLAGVTCRSPGSGRWEKEKHEDGVKWRQLEHKGPYFAPPYEPLPDGVRFFYEGRPVRLSVAAEEVATFYGRMLDHEYTTK

SEQ ID NO: 13658 - protein, 601 aa, Homo sapiens
MRVVRLLRLRAALTLLGEVPRRPASRGVPGSRRTQKGSGARWEKEKHEDGVKWRQLEHKGPYFAPPYEPLPDGVRFFYEGRPVRLSVAAEEVATFYGRMLDHEYTTKEVFRKNFFNDWRKEMAVEEREVIKSLDKCDFTEIHRYFVDKAAARKVLSREEKQKLKEEAEKLQQEFGYCILDGHQEKIGNFKIEPPGLFRGRGDHPKMGMLKRRITPEDVVINCSRDSKIPEPPAGHQWKEVRSDNTVTWLAAWTESVQNSIKYIMLNPCSKLKGETAWQKFETARRLRGFVDEIRSQYRADWKSREMKTRQRAVALYFIDKLALRAGNEKEDGEAADTVGCCSLRVEHVQLHPEADGCQHVVEFDFLGKDCIRYYNRVPVEKPVYKNLQLFMENKDPRDDLFDRLTTTSLNKHLQELMDGLTAKVFRTYNASITLQEQLRALTRAEDSIAAKILSYNRANRVVAILCNHQRATPSTFEKSMQNLQTKIQAKKEQVAEARAELRRARAEHKAQGDGKSRSVLEKKRRLLEKLQEQLAQLSVQATDKEENKQVALGTSKLNYLDPRISIAWCKRFRVPVEKIYSKTQRERFAWALAMAGEDFEF

SEQ ID NO: 13659 - protein, 167 aa, Homo sapiens
MRVVRLLRLRAALTLLGEVPRRPASRGVPGSRRTQKGSGARWEKEKHEDGVKWRQLEHKGPYFAPPYEPLPDGVRFFYEGRPVRLSVAAEEVATFYGRMLDHEYTTKEVFRKNFFNDWRKEMAVEEREVIKSLDKCDFTEIHRYFVDKAAARKVLSREEKQMVTKKK

SEQ ID NO: 13660 - protein, 111 aa, Homo sapiens
  VARIANT 1: note = misc_feature - Xaa can be any naturally occurring amino acid
XEQVAEARAELRRARAEHKAQGDGKSRSVLEKKRRLLEKLQEQLAQLSVQATDKEENKQVALGTSKLNYLDPRISIAWCKRFRVPVEKIYSKTQRERFAWALAMAGEDFEF

SEQ ID NO: 13661 - protein, 123 aa, Homo sapiens
  VARIANT 1: note = misc_feature - Xaa can be any naturally occurring amino acid
XLRLRAALTLLGEVPRRPASRGVPGSRRTQKGSGARWEKEKHEDGVKWRQLEHKGPYFAPPYEPLPDGVRFFYEGRPVRLSVAAEEVATFYGRMLDHEYTTKEVFRKNFFNDWRKVLCQTHML

SEQ ID NO: 13662 - protein, 332 aa, Homo sapiens
MKLGRAVLGLLLLAPSVVQAVEPISLGLALAGVLTGYIYPRLYCLFAECCGQKRSLSREALQKDLDDNLFGQHLAKKIILNAVFGFINNPKPKKPLTLSLHGWTGTGKNFVSKIIAENIYEGGLNSDYVHLFVATLHFPHASNITLYKDQLQLWIRGNVSACARSIFIFDEMDKMHAGLIDAIKPFLDYYDLVDGVSYQKAMFIFLSNAGAERITDVALDFWRSGKQREDIKLKDIEHALSVSVFNNKNSGFWHSSLIDRNLIDYFVPFLPLEYKHLKMCIRVEMQSRGYEIDEDIVSRVAEEMTFFPKEERVFSDKGCKTVFTKLDYYYDD

SEQ ID NO: 13663 - protein, 336 aa, Homo sapiens
MLRAGWLRGAAALALLLAARVVAAFEPITVGLAIGAASAITGYLSYNDIYCRFAECCREERPLNASALKLDLEEKLFGQHLATEVIFKALTGFRNNKNPKKPLTLSLHGWAGTGKNFVSQIVAENLHPKGLKSNFVHLFVSTLHFPHEQKIKLYQDQLQKWIRGNVSACANSVFIFDEMDKLHPGIIDAIKPFLDYYEQVDGVSYRKAIFIFLSNAGGDLITKTALDFWRAGRKREDIQLKDLEPVLSVGVFNNKHSGLWHSGLIDKNLIDYFIPFLPLEYRHVKMCVRAEMRARGSAIDEDIVTRVAEEMTFFPRDEKIYSDKGCKTVQSRLDFH

SEQ ID NO: 13664 - protein, 141 aa, Homo sapiens
  VARIANT 1: note = misc_feature - Xaa can be any naturally occurring amino acid
XRVVAAFEPITVGLAIGAASAITGYLSYNDIYCRFAECCREERPLNASALKLDLEEKLFGQHLATEVIFKALTGFRNNKNPKKPLTLSLHGWAGTGKNFVSQIVAENLHPKGLKSNFVHLFVSTLHFPHEQKIKLYQSSLT

SEQ ID NO: 13665 - protein, 72 aa, Homo sapiens
MAAATRGCRPWGSLLGLLGLVSAAAAAWDLASLRCTLGAFCECDFRPDLPEGSEELGPREPHCLWPLPLPLR

SEQ ID NO: 13666 - protein, 72 aa, Homo sapiens; identical to SEQ ID NO: 13665

SEQ ID NO: 13667 - protein, 72 aa, Homo sapiens; identical to SEQ ID NO: 13665

SEQ ID NO: 13668 - protein, 72 aa, Homo sapiens; identical to SEQ ID NO: 13665

SEQ ID NO: 13669 - protein, 253 aa, Homo sapiens
MAAATRGCRPWGSLLGLLGLVSAAAAAWDLASLRCTLGAFCECDFRPDLPGLECDLAQHLAGQHLAKALVVKALKAFVRDPAPTKPLVLSLHGWTGTGKSYVSSLLAHYLFQGGLRSPRVHHFSPVLHFPHPSHIERYKKDLKSWVQGNLTACGRSLFLFDEMDKMPPGLMEVLRPFLGSSWVVYGTNYRKAIFIFIRWGPALQWAQWGGHFSEVQLYSLSLCSQQNPVPHGLSWAFPVPSATLRDDIVIPPG

SEQ ID NO: 13670 - protein, 242 aa, Homo sapiens
MAAATRGCRPWGSLLGLLGLVSAAAAAWDLASLRCTLGAFCECDFRPDLPGLECDLAQHLAGQHLAKALVVKALKAFVRDPAPTKPLVLSLHGWTGTGKSYVSSLLAHYLFQGGLRSPRVHHFSPVLHFPHPSHIERYKKDLKSWVQGNLTACGRSLFLFDEMDKMPPGLMEVLRPFLGSSWVVYGTNYRKAIFIFIRWLLKLGHHGRAPPRRSGALPPAPAAPRPALRAQRAGPAGPGAKG

SEQ ID NO: 13671 - protein, 321 aa, Homo sapiens
MAAATRGCRPWGSLLGLLGLVSAAAAAWDLASLRCTLGAFCECDFRPDLPGLECDLAQHLAGQHLAKALVVKALKAFVRDPAPTKPLVLSLHGWTGTGKSYVSSLLAHYLFQGGLRSPRVHHFSPVLHFPHPSHIERYKKDLKSWVQGNLTACGRSLFLFDEMDKMPPGLMEVLRPFLGSSWVVYGTNYRKAIFIFISNTGGKQINQVALEAWRSRRDREEILLQELEPVISRAVLDNPHHGFSNSGIMEERLLDAVVPFLPLQRHHVRHCVLNELAQLGLEPRDEVVQAVLDSTTFFPEDEQLFSSNGCKTVASRIAFFL

SEQ ID NO: 13672 - protein, 174 aa, Homo sapiens
MGLCVPFAVTTSFLSLGLEWDLNVRLHGQHLVQQLVLRTVRGYLETPQPEKALALSFHGWSGTGKNFVARMLVENLYRDGLMSDCVRMFIATFHFPHPKYVDLYKEQLMSQIRETQQLCHQTLFIFDEAEKLHPGLLEVLGPHLERRAPEGHRAESPWTIFLFLSNLRGDIINE

SEQ ID NO: 13673 - protein, 97 aa, Homo sapiens
MLRGPWRQLWLFFLLLLPGAPEPRGASRPWEGTDEPGSAWAWPGFQRLQEQLRAAGALSKRYWTLFSCQVWPDDCDEDEEAATGPLALGNVRCGHAW

SEQ ID NO: 13674 - protein, 153 aa, Homo sapiens
MLRGPWRQLWLFFLLLLPGAPEPRGASRPWEGTDEPGSAWAWPGFQRLQEQLRAAGALSKRYWTLFSCQVWPDDCDEDEEAATGPLGWRLPLLGQRYLDLLTTWYCSFKDCCPRGDCRISNNFTGKNFVARMLVENLYRDGLMSDCVRMFIAT

SEQ ID NO: 13675 - protein, 397 aa, Homo sapiens
MLRGPWRQLWLFFLLLLPGAPEPRGASRPWEGTDEPGSAWAWPGFQRLQEQLRAAGALSKRYWTLFSCQVWPDDCDEDEEAATGPLGWRLPLLGQRYLDLLTTWYCSFKDCCPRGDCRISNNFTGLEWDLNVRLHGQHLVQQLVLRTVRGYLETPQPEKALALSFHGWSGTGKNFVARMLVENLYRDGLMSDCVRMFIATFHFPHPKYVDLYKEQLMSQIRETQQLCHQTLFIFDEAEKLHPGLLEVLGPHLERRAPEGHRAESPWTIFLFLSNLRGDIINEVVLKLLKAGWSREEITMEHLEPHLQAEIVETIDNGFGHSRLVKENLIDYFIPFLPLEYRHVRLCARDAFLSQELLYKEETLDEIAQMMVYVPKEEQLFSSQGCKSISQRINYFLS

SEQ ID NO: 13676 - protein, 336 aa, Homo sapiens
MLRGPWRQLWLFFLLLLPGAPEPRGASRPWEGTDEPGSAWAWPGFQRLQEQLRAAGALSKRYWTLFSCQVWPDDCDEDEEAATGPLGWRLPLLGQRYLDLLTTWYCSFKDCCPRGDCRISNNFTGLEWDLNVRLHGQHLVQQLVLRTVRGYLETPQPEKALALSFHGWSGTGKNFVARMLVENLYRDGLMSDCVRMFIATFHFPHPKYVDLYKEQLMSQIRETQQLCHQTLFIFDEAEKLHPGLLEVLGPHLERRAPEGHRAESPWTIFLFLSNLRGDIINEVVLKLLKAGWSREEITMEHLEPHLQAEIVETIGFSFLTTRWPHLDLPTSSVAPT

SEQ ID NO: 13677 - protein, 151 aa, Homo sapiens
MDCREMDLYEDYQSPFDFDAGVNKSYLYLSPSGNSSPPGSPTLQKFGLLRTDPVPEEGEDVAATISATETLSEEEQEELRRELAKVEEEIQTLSQVLAAKEKHLAEIKRKLGINSLQELKQNIAKGWQDVTATSARSKLLAAETELLCLLY

SEQ ID NO: 13678 - protein, 233 aa, Homo sapiens
MDCREMDLYEDYQSPFDFDAGVNKSYLYLSPSGNSSPPGSPTLQKFGLLRTDPVPEEGEDVAATISATETLSEEEQEELRRELAKVEEEIQTLSQVLAAKEKHLAEIKRKLGINSLQELKQNIAKGWQDVTATSAYKKTSETLSQAGQKASAAFSSVGSVITKKLEDVKLQAFSHSFRNSPTFKSFEEKVENLKSKVGGTKPAGGDFGEVLNSAANASATTTEPLPEKTQESL

SEQ ID NO: 13679 - protein, 247 aa, Homo sapiens
MDCREMDLYEDYQSPFDFDAGVNKSYLYLSPSGNSSPPGSPTLQKFGLLRTDPVPEEGEDVAATISATETLSEEEQEELRRELAKVEEEIQTLSQVLAAKEKHLAEIKRKLGINSLQELKQNIAKGWQDVTATSAYKKTSETLSQAGQKASAAFSSVGSVITKKLEDVKLQAFSHSFSIRSIQHSISMPAMRNSPTFKSFEEKVENLKSKVGGTKPAGGDFGEVLNSAANASATTTEPLPEKTQESL

SEQ ID NO: 13680 - protein, 224 aa, Homo sapiens
MDCREMDLYEDYQSPFDFDAGVNKSYLYLSPSGNSSPPGSPTLQKFGLLRTDPVPEEGEDVAATISATETLSEEEQEELRRELAKVEEEIQTLSQVLAAKEKHLAEIKRKLGINSLQELKQNIAKGWQDVTATSAYKKTSETLSQAGQKASAAFSSVGSVITKKLEDVKNSPTFKSFEEKVENLKSKVGGTKPAGGDFGEVLNSAANASATTTEPLPEKTQESL

SEQ ID NO: 13681 - protein, 238 aa, Homo sapiens
MDCREMDLYEDYQSPFDFDAGVNKSYLYLSPSGNSSPPGSPTLQKFGLLRTDPVPEEGEDVAATISATETLSEEEQEELRRELAKVEEEIQTLSQVLAAKEKHLAEIKRKLGINSLQELKQNIAKGWQDVTATSAYKKTSETLSQAGQKASAAFSSVGSVITKKLEDVNIRSIQHSISMPAMRNSPTFKSFEEKVENLKSKVGGTKPAGGDFGEVLNSAANASATTTEPLPEKTQESL

SEQ ID NO: 13682 - protein, 38 aa, Homo sapiens
MDRGEQAFYFIWNFWLELGKDLSFLHSYKMSAENRPSP

SEQ ID NO: 13683 - protein, 38 aa, Homo sapiens; identical to SEQ ID NO: 13682

SEQ ID NO: 13684 - protein, 111 aa, Homo sapiens
MDRGEQGLLRTDPVPEEGEDVAATISATETLSEEEQEELRRELAKVEEEIQTLSQVLAAKEKHLAEIKRKLGINSLQELKQNIAKGWQDVTATSARSKLLAAETELLCLLY

SEQ ID NO: 13685 - protein, 207 aa, Homo sapiens
MDRGEQGLLRTDPVPEEGEDVAATISATETLSEEEQEELRRELAKVEEEIQTLSQVLAAKEKHLAEIKRKLGINSLQELKQNIAKGWQDVTATSAYKKTSETLSQAGQKASAAFSSVGSVITKKLEDVKLQAFSHSFSIRSIQHSISMPAMRNSPTFKSFEEKVENLKSKVGGTKPAGGDFGEVLNSAANASATTTEPLPEKTQESL

SEQ ID NO: 13686 - protein, 184 aa, Homo sapiens
MDRGEQGLLRTDPVPEEGEDVAATISATETLSEEEQEELRRELAKVEEEIQTLSQVLAAKEKHLAEIKRKLGINSLQELKQNIAKGWQDVTATSAYKKTSETLSQAGQKASAAFSSVGSVITKKLEDVKNSPTFKSFEEKVENLKSKVGGTKPAGGDFGEVLNSAANASATTTEPLPEKTQESL

SEQ ID NO: 13687 - protein, 61 aa, Homo sapiens
MDRGEQGRRRNPDSVSSVSSKREASSRDQAETWNQFSTGTKTEHCQRVARRDSNICLQEDI

SEQ ID NO: 13688 - protein, 60 aa, Homo sapiens
MPAMRNSPTFKSFEEKVENLKSKVGGTKPAGGDFGEVLNSAANASATTTEPLPEKTQESL

SEQ ID NO: 13689 - protein, 148 aa, Homo sapiens
  VARIANT 1: note = misc_feature - Xaa can be any naturally occurring amino acid
XGLGLGLWLGAGLSAARRLEQVPSLLGRRRKLHLPDPDLASWGPGRSGSGGGRWDCMCECLLRTDPVPEEGEDVAATISATETLSEEEQEELRRELAKVEEEIQTLSQVLAAKEKHLAEIKRKLGINSLQELKQNIAKGWQDVTATSA

SEQ ID NO: 13690 - protein, 172 aa, Homo sapiens
MRALAVLSVTLVMACTEAFFPFISRGKELLWGKPEESRVSSVLEESKRLVDTAMYATMQRNLKKRGILSPAQLLSFSKLPEPTSGVIARAAEIMETSIQAMKRKVNLKTQQSQHPTDALSEDLLSIIANMSGCLPYMLPPKCPNTCLANKYRPITGACNNRDHPRWGASNTA

SEQ ID NO: 13691 - protein, 933 aa, Homo sapiens
MRALAVLSVTLVMACTEAFFPFISRGKELLWGKPEESRVSSVLEESKRLVDTAMYATMQRNLKKRGILSPAQLLSFSKLPEPTSGVIARAAEIMETSIQAMKRKVNLKTQQSQHPTDALSEDLLSIIANMSGCLPYMLPPKCPNTCLANKYRPITGACNNRDHPRWGASNTALARWLPPVYEDGFSQPRGWNPGFLYNGFPLPPVREVTRHVIQVSNEVVTDDDRYSDLLMAWGQYIDHDIAFTPQSTSKAAFGGGADCQMTCENQNPCFPIQLPEEARPAAGTACLPFYRSSAACGTGDQGALFGNLSTANPRQQMNGLTSFLDASTVYGSSPALERQLRNWTSAEGLLRVHARLRDSGRAYLPFVPPRAPAACAPEPGIPGETRGPCFLAGDGRASEVPSLTALHTLWLREHNRLAAALKALNAHWSADAVYQEARKVVGALHQIITLRDYIPRILGPEAFQQYVGPYEGYDSTANPTVSNVFSTAAFRFGHATIHPLVRRLDASFQEHPDLPGLWLHQAFFSPWTLLRGGGLDPLIRGLLARPAKLQVQDQLMNEELTERLFVLSNSSTLDLASINLQRGRDHGLPGYNEWREFCGLPRLETPADLSTAIASRSVADKILDLYKHPDNIDVWLGGLAENFLPRARTGPLFACLIGKQMKALRDGDWFWWENSHVFTDAQRRELEKHSLSRVICDNTGLTRVPMDAFQVGKFPEDFESCDSITGMNLEAWRETFPQDDKCGFPESVENGDFVHCEESGRRVLVYSCRHGYELQGREQLTCTQEGWDFQPPLCKDVNECADGAHPPCHASARCRNTKGGFQCLCADPYELGDDGRTCVDSGRLPRVTWISMSLAALLIGGFAGLTSTVICRWTRTGTKSTLPISETGGGTPELRCGKHQAVGTSPQRAAAQDSEQESAGMEGRDTHRLPRAL

SEQ ID NO: 13692 - protein, 933 aa, Homo sapiens; identical to SEQ ID NO: 13691

SEQ ID NO: 13693 - protein, 889 aa, Homo sapiens
MRALAVLSVTLVMACTEAFFPFISRGKELLWGKPEESRVSSVLEESKRLVDTAMYATMQRNLKKRGILSPAQLLSFSKLPEPTSGVIARAAEIMETSIQAMKRKVNLKTQQSQHPTDALSEDLLSIIANMSGCLPYMLPPKCPNTCLANKYRPITGACNNRDHPRWGASNTALARWLPPVYEDGFSQPRGWNPGFLYNGFPLPPVREVTRHVIQVSNEVVTDDDRYSDLLMAWGQYIDHDIAFTPQSTSKAAFGGGADCQMTCENQNPCFPIQLPEEARPAAGTACLPFYRSSAACGTGDQGALFGNLSTANPRQQMNGLTSFLDASTVYGSSPALERQLRNWTSAEGLLRVHARLRDSGRAYLPFVPPRAPAACAPEPGIPGETRGPCFLAGDGRASEVPSLTALHTLWLREHNRLAAALKALNAHWSADAVYQEARKVVGALHQIITLRDYIPRILGPEAFQQYVGPYEGYDSTANPTVSNVFSTAAFRFGHATIHPLVRRLDASFQEHPDLPGLWLHQAFFSPWTLLRGGGLDPLIRGLLARPAKLQVQDQLMNEELTERLFVLSNSSTLDLASINLQRGRDHGLPGYNEWREFCGLPRLETPADLSTAIASRSVADKILDLYKHPDNIDVWLGGLAENFLPRARTGPLFACLIGKQMKALRDGDWFWWENSHVFTDAQRRELEKHSLSRVICDNTGLTRVPMDAFQVGKFPEDFESCDSITGMNLEAWRETFPQDDKCGFPESVENGDFVHCEESGRRVLVYSCRHGYELQGREQLTCTQEGWDFQPPLCKDSGRLPRVTWISMSLAALLIGGFAGLTSTVICRWTRTGTKSTLPISETGGGTPELRCGKHQAVGTSPQRAAAQDSEQESAGMEGRDTHRLPRAL

SEQ ID NO: 13694 - protein, 876 aa, Homo sapiens
MRALAVLSVTLVMACTEAFFPFISRGKELLWGKPEESRVSSVLEESKRLVDTAMYATMQRNLKKRGILSPAQLLSFSKLPEPTSGVIARAAEIMETSIQAMKRKVNLKTQQSQHPTDALSEDLLSIIANMSGCLPYMLPPKCPNTCLANKYRPITGACNNRDHPRWGASNTALARWLPPVYEDGFSQPRGWNPGFLYNGFPLPPVREVTRHVIQVSNEVVTDDDRYSDLLMAWGQYIDHDIAFTPQSTSKAAFGGGADCQMTCENQNPCFPIQLPEEARPAAGTACLPFYRSSAACGTGDQGALFGNLSTANPRQQMNGLTSFLDASTVYGSSPALERQLRNWTSAEGLLRVHARLRDSGRAYLPFVPPRAPAACAPEPGIPGETRGPCFLAGDGRASEVPSLTALHTLWLREHNRLAAALKALNAHWSADAVYQEARKVVGALHQIITLRDYIPRILGPEAFQQYVGPYEGYDSTANPTVSNVFSTAAFRFGHATIHPLVRRLDASFQEHPDLPGLWLHQAFFSPWTLLRGGYNEWREFCGLPRLETPADLSTAIASRSVADKILDLYKHPDNIDVWLGGLAENFLPRARTGPLFACLIGKQMKALRDGDWFWWENSHVFTDAQRRELEKHSLSRVICDNTGLTRVPMDAFQVGKFPEDFESCDSITGMNLEAWRETFPQDDKCGFPESVENGDFVHCEESGRRVLVYSCRHGYELQGREQLTCTQEGWDFQPPLCKDVNECADGAHPPCHASARCRNTKGGFQCLCADPYELGDDGRTCVDSGRLPRVTWISMSLAALLIGGFAGLTSTVICRWTRTGTKSTLPISETGGGTPELRCGKHQAVGTSPQRAAAQDSEQESAGMEGRDTHRLPRAL

SEQ ID NO: 13695 - protein, 760 aa, Homo sapiens
MRALAVLSVTLVMACTEAFFPFISRGKELLWGKPEESRVSSVLEESKRLVDTAMYATMQRNLKKRGILSPAQLLSFSKLPEPTSGVIARAAEIMETSIQAMKRKVNLKTQQSQHPTDALSEDLLSIIANMSGCLPYMLPPKCPNTCLANKYRPITGACNNRDHPRWGASNTALARWLPPVYEDGFSQPRGWNPGFLYNGFPLPPVREVTRHVIQVSNEVVTDDDRYSDLLMAWGQYIDHDIAFTPQSTSKAAFGGGADCQMTCENQNPCFPIQIITLRDYIPRILGPEAFQQYVGPYEGYDSTANPTVSNVFSTAAFRFGHATIHPLVRRLDASFQEHPDLPGLWLHQAFFSPWTLLRGGGLDPLIRGLLARPAKLQVQDQLMNEELTERLFVLSNSSTLDLASINLQRGRDHGLPGYNEWREFCGLPRLETPADLSTAIASRSVADKILDLYKHPDNIDVWLGGLAENFLPRARTGPLFACLIGKQMKALRDGDWFWWENSHVFTDAQRRELEKHSLSRVICDNTGLTRVPMDAFQVGKFPEDFESCDSITGMNLEAWRETFPQDDKCGFPESVENGDFVHCEESGRRVLVYSCRHGYELQGREQLTCTQEGWDFQPPLCKDVNECADGAHPPCHASARCRNTKGGFQCLCADPYELGDDGRTCVDSGRLPRVTWISMSLAALLIGGFAGLTSTVICRWTRTGTKSTLPISETGGGTPELRCGKHQAVGTSPQRAAAQDSEQESAGMEGRDTHRLPRAL

SEQ ID NO: 13696 - protein, 174 aa, Homo sapiens
MRALAVLSVTLVMACTEAFFPFISRGKELLWGKPEESRVSSVLEESKRLVDTAMYATMQRNLKKRGILSPAQLLSFSKLPEPTSGVIARAAEIMETSIQAMKRKVNLKTQQSQHPTDALSEDLLSIIANMSGCLPYMLPPKCPNTCLANKYRPITGACNNRKMKYKPDHSETAN

SEQ ID NO: 13697 - protein, 174 aa, Homo sapiens; identical to SEQ ID NO: 13696

SEQ ID NO: 13698 - protein, 864 aa, Homo sapiens
QLLSFSKLPEPTSGVIARAAEIMETSIQAMKRKVNLKTQQSQHPTDALSEDLLSIIANMSGCLPYMLPPKCPNTCLANKYRPITGACNNRDHPRWGASNTALARWLPPVYEDGFSQPRGWNPGFLYNGFPLPPVREVTRHVIQVSNEVVTDDDRYSDLLMAWGQYIDHDIAFTPQSTSKAAFGGGADCQMTCENQNPCFPIQLPEEARPAAGTACLPFYRSSAACGTGDQGALFGNLSTANPRQQMNGLTSFLDASTVYGSSPALERQLRNWTSAEGLLRVHARLRDSGRAYLPFVPPRAPAACAPEPGIPGETRGPCFLAGDGRASEVPSLTALHTLWLREHNRLAAALKALNAHWSADAVYQEARKVVGALHQIITLRDYIPRILGPEAFQQYVGPYEGYDSTANPTVSNVFSTAAFRFGHATIHPLVRRLDASFQEHPDLPGLWLHQAFFSPWTLLRGGGLDPLIRGLLARPAKLQVQDQLMNEELTERLFVLSNSSTLDLASINLQRGRDHGLPGYNEWREFCGLPRLETPADLSTAIASRSVADKILDLYKHPDNIDVWLGGLAENFLPRARTGPLFACLIGKQMKALRDGDWFWWENSHVFTDAQRRELEKHSLSRVICDNTGLTRVPMDAFQVGKFPEDFESCDSITGMNLEAWRETFPQDDKCGFPESVENGDFVHCEESGRRVLVYSCRHGYELQGREQLTCTQEGWDFQPPLCKDSGRLPRVTWISMSLAALLIGGFAGLTSTVICRWTRTGTKSTLPISETGGGTPELRCGKHQAVGTSPQRAAAQDSEQVGHTMPHVSSCHRSGWTGSGCRSSSAGAPCIFLFTPCFLVRSAPSSGRFYLQANDSEPECEPA

SEQ ID NO: 13699 - protein, 404 aa, Homo sapiens
  VARIANT 1: note = misc_feature - Xaa can be any naturally occurring amino acid
XYEGYDSTANPTVSNVFSTAAFRFGHATIHPLVRRLDASFQEHPDLPGLWLHQAFFSPWTLLRGGYNEWREFCGLPRLETPADLSTAIASRSVADKILDLYKHPDNIDVWLGGLAENFLPRARTGPLFACLIGKQMKALRDGDWFWWENSHVFTDAQRRELEKHSLSRVICDNTGLTRVPMDAFQVGKFPEDFESCDSITGMNLEAWRETFPQDDKCGFPESVENGDFVHCEESGRRVLVYSCRHGYELQGREQLTCTQEGWDFQPPLCKDVNECADGAHPPCHASARCRNTKGGFQCLCADPYELGDDGRTCVDSGRLPRVTWISMSLAALLIGGFAGLTSTVICRWRVLGWKAGILTGCREPSEGKVAGHCRTASCSQNHRTTLFQTQANPKSAGRLFSQHG

SEQ ID NO: 13700 - protein, 363 aa, Homo sapiens
YEGYDSTANPTVSNVFSTAAFRFGHATIHPLVRRLDASFQEHPDLPGLWLHQAFFSPWTLLRGGYNEWREFCGLPRLETPADLSTAIASRSVADKILDLYKHPDNIDVWLGGLAENFLPRARTGPLFACLIGKQMKALRDGDWFWWENSHVFTDAQRRELEKHSLSRVICDNTGLTRVPMDAFQVGKFPEDFESCDSITGMNLEAWRETFPQDDKCGFPESVENGDFVHCEESGRRVLVYSCRHGYELQGREQLTCTQEGWDFQPPLCKDSGRLPRVTWISMSLAALLIGGFAGLTSTVICRWTRTGTKSTLPISETGGGTPELRCGKHQAVGTSPQRAAAQDSEQESAGMEGRDTHRLPRAL

SEQ ID NO: 13701 - protein, 30 aa, Homo sapiens
MGLQACLLGLFALILSGKCSYSPEPDQRRT

SEQ ID NO: 13702 - protein, 39 aa, Homo sapiens
MGLQACLLGLFALILSGKCSYSPEPDQRRTKIPDPRECG

SEQ ID NO: 13703 - protein, 39 aa, Homo sapiens; identical to SEQ ID NO: 13702

SEQ ID NO: 13704 - protein, 81 aa, Homo sapiens
MGLQACLLGLFALILSGKCSYSPEPDQRRTLPPGWVSLGRADPEEELSLTFALRQQNVERLSELVQAVSDPSSPQYGAFWD

SEQ ID NO: 13705 - protein, 563 aa, Homo sapiens
MGLQACLLGLFALILSGKCSYSPEPDQRRTLPPGWVSLGRADPEEELSLTFALRQQNVERLSELVQAVSDPSSPQYGKYLTLENVADLVRPSPLTLHTVQKWLLAAGAQKCHSVITQDFLTCWLSIRQAELLLPGAEFHHYVGGPTETHVVRSPHPYQLPQALAPHVDFVGGLHRFPPTSSLRQRPEPQVTGTVGLHLGVTPSVIRKRYNLTSQDVGSGTSNNSQACAQFLEQYFHDSDLAQFMRLFGGNFAHQASVARVVGQQGRGRAGIEASLDVQYLMSAGANISTWVYSSPGRHEGQEPFLQWLMLLSNESALPHVHTVSYGDDEDSLSSAYIQRVNTELMKAAARGLTLLFASGDSGAGCWSVSGRHQFRPTFPASSPYVTTVGGTSFQEPFLITNEIVDYISGGGFSNVFPRPSYQEEAVTKFLSSSPHLPPSSYFNASGRAYPDVAALSDGYWVVSNRVPIPWVSGTSASTPVFGGILSLINEHRILSGRPPLGFLNPRLYQQHGAGLFDVTRGCHESCLDEEVEGQGFCSGPGWDPVTGWGTPNFPALLKTLLNP

SEQ ID NO: 13706 - protein, 500 aa, Homo sapiens
MGLQACLLGLFALILSGKCSYSPEPDQRRTLPPGWVSLGRADPEEELSLTFALRQQNVERLSELVQAVSDPSSPQYGKYLTLENVADLVRPSPLTLHTVQKWLLAAGAQKCHSVITQDFLTCWLSIRQAELLLPGAEFHHYVGGPTETHVVRSPHPYQLPQALAPHVDFVGGLHRFPPTSSLRQRPEPQVTGTVGLHLGVTPSVIRKRYNLTSQDVGSGTSNNSQACAQFLEQYFHDSDLAQFMRLFGGNFAHQASVARVVGQQGRGRAGIEASLDVQYLMSAGANISTWVYSSPGDSGAGCWSVSGRHQFRPTFPASSPYVTTVGGTSFQEPFLITNEIVDYISGGGFSNVFPRPSYQEEAVTKFLSSSPHLPPSSYFNASGRAYPDVAALSDGYWVVSNRVPIPWVSGTSASTPVFGGILSLINEHRILSGRPPLGFLNPRLYQQHGAGLFDVTRGCHESCLDEEVEGQGFCSGPGWDPVTGWGTPNFPALLKTLLNP

SEQ ID NO: 13707 - protein, 162 aa, Homo sapiens
MGLQACLLGLFALILSGKCSYSPEPDQRRTLPPGWVSLGRADPEEELSLTFALRQQNVERLSELVQAVSDPSSPQYGKYLTLENVADLVRPSPLTLHTVQKWLLAAGAQKCHSVITQDFLTCWLSIRQAELLLPGAEFHHYVGGPTETHVWGDCTVFPQHHP

SEQ ID NO: 13708 - protein, 470 aa, Homo sapiens
MGLQACLLGLFALILSGKCSYSPEPDQRRTLPPGWVSLGRADPEEELSLTFALRQQNVERLSELVQAVSDPSSPQYVGGLHRFPPTSSLRQRPEPQVTGTVGLHLGVTPSVIRKRYNLTSQDVGSGTSNNSQACAQFLEQYFHDSDLAQFMRLFGGNFAHQASVARVVGQQGRGRAGIEASLDVQYLMSAGANISTWVYSSPGRHEGQEPFLQWLMLLSNESALPHVHTVSYGDDEDSLSSAYIQRVNTELMKAAARGLTLLFASGDSGAGCWSVSGRHQFRPTFPASSPYVTTVGGTSFQEPFLITNEIVDYISGGGFSNVFPRPSYQEEAVTKFLSSSPHLPPSSYFNASGRAYPDVAALSDGYWVVSNRVPIPWVSGTSASTPVFGGILSLINEHRILSGRPPLGFLNPRLYQQHGAGLFDVTRGCHESCLDEEVEGQGFCSGPGWDPVTGWGTPNFPALLKTLLNP

SEQ ID NO: 13709 - protein, 40 aa, Homo sapiens
MGLQAWALCPHPLWQMQLQPGARPAEDAAPRLGVPGPCGP

SEQ ID NO: 13710 - protein, 99 aa, Homo sapiens
MRLFGGNFAHQASVARVVGQQGRGRAGIEASLDVQYLMSAGANISTWVYSSPGDSGAGCWSVSGRHQFRPTFPASRSQAPNLLCGIQLPLFLFVSSQAF

SEQ ID NO: 13711 - protein, 162 aa, Homo sapiens
MRLFGGNFAHQASVARVVGQQGRGRAGIEASLDVQYLMSAGANISTWVYSSPGRHEGQEPFLQWLMLLSNESALPHVHTVSYGDDEDSLSSAYIQRVNTELMKAAARGLTLLFASGDSGAGCWSVSGRHQFRPTFPASRSQAPNLLCGIQLPLFLFVSSQAF

SEQ ID NO: 13712 - protein, 320 aa, Homo sapiens
MRLFGGNFAHQASVARVVGQQGRGRAGIEASLDVQYLMSAGANISTWVYSSPGRHEGQEPFLQWLMLLSNESALPHVHTVSYGDDEDSLSSAYIQRVNTELMKAAARGLTLLFASGDSGAGCWSVSGRHQFRPTFPASSPYVTTVGGTSFQEPFLITNEIVDYISGGGFSNVFPRPSYQEEAVTKFLSSSPHLPPSSYFNASGRAYPDVAALSDGYWVVSNRVPIPWVSGTSASTPVFGGILSLINEHRILSGRPPLGFLNPRLYQQHGAGLFDVTRGCHESCLDEEVEGQGFCSGPGWDPVTGWGTPNFPALLKTLLNP

SEQ ID NO: 13713 - protein, 320 aa, Homo sapiens; identical to SEQ ID NO: 13712

SEQ ID NO: 13714 - protein, 320 aa, Homo sapiens; identical to SEQ ID NO: 13712

SEQ ID NO: 13715 - protein, 320 aa, Homo sapiens; identical to SEQ ID NO: 13712

SEQ ID NO: 13716 - protein, 171 aa, Homo sapiens
  VARIANT 1: note = misc_feature - Xaa can be any naturally occurring amino acid
XAVSDPSSPQYGKYLTLENVADLVRPSPLTLHTVQKWLLAAGAQKCHSVITQDFLTCWLSIRQAELLLPGAEFHHYVGGPTETHVVRSPHPYQLPQALAPHVDFGDSGAGCWSVSGRHQFRPTFPASSPYVTTVGGTSFQEPFLITNEIVDYISGGGFSNVFPRPSYQEEA

SEQ ID NO: 13717 - protein, 400 aa, Homo sapiens
  VARIANT 1: note = misc_feature - Xaa can be any naturally occurring amino acid
XGRADPEEELSLTFALRQQNVERLSELVQAVSDPSSPQYGKYLTLENVADLVRPSPLTLHTVQKWLLAAGAQKCHSVITQDFLTCWLSIRQAELLLPGAEFHHYVGGPTETHVVRSPHPYQLPQALAPHVDFGRHEGQEPFLQWLMLLSNESALPHVHTVSYGDDEDSLSSAYIQRVNTELMKAAARGLTLLFASGDSGAGCWSVSGRHQFRPTFPASSPYVTTVGGTSFQEPFLITNEIVDYISGGGFSNVFPRPSYQEEAVTKFLSSSPHLPPSSYFNASGRAYPDVAALSDGYWVVSNRVPIPWVSGTSASTPVFGGILSLINEHRILSGRPPLGFLNPRLYQQHGAGLFDVTRGCHESCLDEEVEGQGFCSGPGWDPVTGWGTPNFPALLKTLLNP

SEQ ID NO: 13718 - protein, 92 aa, Homo sapiens
  VARIANT 1: note = misc_feature - Xaa can be any naturally occurring amino acid
XLQWLMLLSNESALPHVHTVSYGDDEDSLSSAYIQRVNTELMKAAARGLTLLFASGDSGAGCWSVSGRHQFRPTFPASSGRHILPGTFPHHK

SEQ ID NO: 13719 - protein, 282 aa, Homo sapiens
MLLLAPQMLNLLLLALPVLASRAYAAPAPGQALQRVGIVGGQEAPRSKWPWQVSLRVHGPYWMHFCGGSLIHPQWVLTAAHCVGPDVKDLAALRVQLREQHLYYQDQLLPVSRIIVHPQFYTAQIGADIALLELEEPVNVSSHVHTVTLPPASETFPPGMPCWVTGWGDVDNDERLPPPFPLKQVKVPIMENHICDAKYHLGAYTGDDVRIVRDDMLCAGNTRRDSCQGDSGGPLVCKVNGTWLQAGVVSWGEGCAQPNRPGIYTRVTYYLDWIHHYVPKKP

SEQ ID NO: 13720 - protein, 275 aa, Homo sapiens
MLNLLLLALPVLASRAYAAPAPGQALQRVGIVGGQEAPRSKWPWQVSLRVHGPYWMHFCGGSLIHPQWVLTAAHCVGPDVKDLAALRVQLREQHLYYQDQLLPVSRIIVHPQFYTAQIGADIALLELEEPVNVSSHVHTVTLPPASETFPPGMPCWVTGWGDVDNDERLPPPFPLKQVKVPIMENHICDAKYHLGAYTGDDVRIVRDDMLCAGNTRRDSCQGDSGGPLVCKVNGTWLQAGVVSWGEGCAQPNRPGIYTRVTYYLDWIHHYVPKKP

SEQ ID NO: 13721 - protein, 213 aa, Homo sapiens
YWMHFCGGSLIHPQWVLTAAHCVGPVQLREQHLYYQDQLLPVSRIIVHPQFYTAQIGADIALLELEEPVNVSSHVHTVTLPPASETFPPGMPCWVTGWGDVDNDERLPPPFPLKQVKVPIMENHICDAKYHLGAYTGDDVRIVRDDMLCAGNTRRDSCQGDSGGPLVCKVNGTWLQAGVVSWGEGCAQPNRPGIYTRVTYYLDWIHHYVPKKP

SEQ ID NO: 13722 - protein, 282 aa, Homo sapiens
MLLLAPQMLNLLLLALPVLASRAYAAPAPGQALQRVGIVGGQEAPRSKWPWQVSLRVRDRYWMHFCGGSLIHPQWVLTAAHCVGPDVKDLAALRVQLREQHLYYQDQLLPVSRIIVHPQFYTAQIGADIALLELEEPVNVSSHVHTVTLPPASETFPPGMPCWVTGWGDVDNDERLPPPFPLKQVKVPIMENHICDAKYHLGAYTGDDVRIVRDDMLCAGNTRRDSCQGDSGGPLVCKVNGTWLQAGVVSWGEGCAQPNRPGIYTRVTYYLDWIHHYVPKKP

SEQ ID NO: 13723 - protein, 275 aa, Homo sapiens
MLNLLLLALPVLASRAYAAPAPGQALQRVGIVGGQEAPRSKWPWQVSLRVRDRYWMHFCGGSLIHPQWVLTAAHCVGPDVKDLAALRVQLREQHLYYQDQLLPVSRIIVHPQFYTAQIGADIALLELEEPVNVSSHVHTVTLPPASETFPPGMPCWVTGWGDVDNDERLPPPFPLKQVKVPIMENHICDAKYHLGAYTGDDVRIVRDDMLCAGNTRRDSCQGDSGGPLVCKVNGTWLQAGVVSWGEGCAQPNRPGIYTRVTYYLDWIHHYVPKKP

SEQ ID NO: 13724 - protein, 292 aa, Homo sapiens
MLNLLLLALPVLASRAYAAPAPGQALQRVGIVGGQEAPRSKWPWQVSLRVRDRYWMHFCGGSLIHPQWVLTAAHCVGPDVKDLAALRVQLREQHLYYQDQLLPVSRIIVHPQFYTAQIGADIALLELEEPVNVSSHVHTVTLPPASETFPPGMPCWVTGWGDVDNDERLPPPFPLKQVKVPIMENHICDAKYHLGAYTGDDVRIVRDDMLCAGNTRRDSCQGDSGGPLVCKVNGTWLQAGVVSWGEGCAQPNRPGIYTRVTYYLDWIHHYVPKKPDGVSPCWPVWSRTPDLK

SEQ ID NO: 13725 - protein, 242 aa, Homo sapiens
MLLLAPQMLSLLLLALPVLASPAYVAPAPGQALQQTGIVGGQEAPRSKWPWQVSLRVRGPYWMHFCGGSLIHPQWVLTAAHCVEPDIKDLAALRVQLREQHLYYQDQLLPVSRIIVHPQFYIIQTGADIALLELEEPVNISSHIHTVTLPPASETFPPGMPCWVTGWGDVDNNVHLPPPYPLKEVEVPVVENHLCNAEYHTGLHTGHSFQIVRDDMLCAGSENHDSCQGDSGGPLVCKVNGT

SEQ ID NO: 13726 - protein, 235 aa, Homo sapiens
MLSLLLLALPVLASPAYVAPAPGQALQQTGIVGGQEAPRSKWPWQVSLRVRGPYWMHFCGGSLIHPQWVLTAAHCVEPDIKDLAALRVQLREQHLYYQDQLLPVSRIIVHPQFYIIQTGADIALLELEEPVNISSHIHTVTLPPASETFPPGMPCWVTGWGDVDNNVHLPPPYPLKEVEVPVVENHLCNAEYHTGLHTGHSFQIVRDDMLCAGSENHDSCQGDSGGPLVCKVNGT

SEQ ID NO: 13727 - protein, 42 aa, Homo sapiens
MVGKLKQNLLLACLVISSVTVFYLGQHAMECHHRIEERSQPV

SEQ ID NO: 13728 - protein, 140 aa, Homo sapiens
MVGKLKQNLLLACLVISSVTVFYLGQHAMECHHRIEERSQPVKLESTRTTVRTGLDLKANKTFAYHKDMPLIFIGGVPRSGTTLMRAMLDAHPDIRCGEETRVIPRILALKQMWSRSSKEKIRLDEAGVTDEVLDSAMQA

SEQ ID NO: 13729 - protein, 370 aa, Homo sapiens
MVGKLKQNLLLACLVISSVTVFYLGQHAMECHHRIEERSQPVKLESTRTTVRTGLDLKANKTFAYHKDMPLIFIGGVPRSGTTLMRAMLDAHPDIRCGEETRVIPRILALKQMWSRSSKEKIRLDEAGVTDEVLDSAMQAFLLEIIVKHGEPAPYLCNKDPFALKSLTYLSRLFPNAKFLLMVRDGRASVHSMISRKVTIAGFDLNSYRDCLTKWNRAIETMYNQCMEVGYKKCMLVHYEQLVLHPERWMRTLLKFLQIPWNHSVLHHEEMIGKAGGVSLSKVERSTDQVIKPVNVGALSKWVGKIPPDVLQDMAVIAPMLAKLGYDPYANPPNYGKPDPKIIENTRRVYKGEFQLPDFLKEKPQTEQVE

SEQ ID NO: 13730 - protein, 168 aa, Homo sapiens
DFLGIAWSDAVLHHEDLIGKPGGVSLSKIERSTDQVIKPVNLEALSKWTGHIPGDVVRDMAQIAPMLAQLGYDPYANPPNYGNPDPFVINNTQRVSVHLYLWKCTLGDMGLLQMWKLQPPEEMFSLSIPGHLICSCLMDTVNYMIACISILLGLQGSSKPTGSLSLIL

SEQ ID NO: 13731 - protein, 47 aa, Homo sapiens
MRLSVRRVLLAAGCALVLVLAVQLGQQVLECRAVLAGLRSPRGAMRP

SEQ ID NO: 13732 - protein, 48 aa, Homo sapiens
MRLSVRRVLLAAGCALVLVLAVQLGQQVLECRAVLAGLRSPRGAMRPE

SEQ ID NO: 13733 - protein, 64 aa, Homo sapiens
MRLSVRRVLLAAGCALVLVLAVQLGQQVLECRAVLAGLRSPRGAMRPEQEELVMVGTNHVEYRY

SEQ ID NO: 13734 - protein, 120 aa, Homo sapiens
MRLSVRRVLLAAGCALVLVLAVQLGQQVLECRAVLAGLRSPRGAMRPEQEELVMVGTNHVEYRYGKAMPLIFVGGVPRSGTTLMRAMLDAHPEVRCGEETRIIPRVLAMRQAWSKSGREK

SEQ ID NO: 13735 - protein, 142 aa, Homo sapiens
MRLSVRRVLLAAGCALVLVLAVQLGQQVLECRAVLAGLRSPRGAMRPEQEELVMVGTNHVEYRYGKAMPLIFVGGVPRSGTTLMRAMLDAHPEVRCGEETRIIPRVLAMRQAWSKSGREKLRLDEAGVTDEVLDAAMQAFIL

SEQ ID NO: 13736 - protein, 377 aa, Homo sapiens
MRLSVRRVLLAAGCALVLVLAVQLGQQVLECRAVLAGLRSPRGAMRPEQEELVMVGTNHVEYRYGKAMPLIFVGGVPRSGTTLMRAMLDAHPEVRCGEETRIIPRVLAMRQAWSKSGREKLRLDEAGVTDEVLDAAMQAFILEVIAKHGEPARVLCNKDPFTLKSSVYLSRLFPNSKFLLMVRDGRASVHSMITRKVTIAGFDLSSYRDCLTKWNKAIEVMYAQCMEVGKEKCLPVYYEQLVLHPRRSLKLILDFLGIAWSDAVLHHEDLIGKPGGVSLSKIERSTDQVIKPVNLEALSKWTGHIPGDVVRDMAQIAPMLAQLGYDPYANPPNYGNPDPFVINNTQRVLKGDYKTPANLKGYFQVNQNSTSSHLGSS

SEQ ID NO: 13737 - protein, 377 aa, Homo sapiens; identical to SEQ ID NO: 13736

SEQ ID NO: 13738 - protein, 377 aa, Homo sapiens; identical to SEQ ID NO: 13736

SEQ ID NO: 13739 - protein, 333 aa, Homo sapiens
MSPWSWFLLQTLCLLPTGAASRRGAPGTANCELKPQQSELNSFLWTIKRDPPSYFFGTIHVPYTRVWDFIPDNSKEAFLQSSIVYFELDLTDPYTISALTSCQMLPQGENLQDVLPRDIYCRLKRHLEYVKLMMPLWMTPDQRGKGLYADYLFNAIAGNWERKRPVWVMLMVNSLTEVDIKSRGVPVLDLFLAQEAERLRKQTGAVEKVEEQCHPLNGLNFSQVIFALNQTLLQQESLRAGSLQIPYTTEDLIKHYNCGDLSSVILSHDSSQVPNFINATLPPQERITAQEIDSYLRRELIYKRNERIGKRVKALLEEFPDKGFFFAFGAASQ

SEQ ID NO: 13740 - protein, 505 aa, Homo sapiens
MSPWSWFLLQTLCLLPTGAASRRGAPGTANCELKPQQSELNSFLWTIKRDPPSYFFGTIHVPYTRVWDFIPDNSKEAFLQSSIVYFELDLTDPYTISALTSCQMLPQGENLQDVLPRDIYCRLKRHLEYVKLMMPLWMTPDQRGKGLYADYLFNAIAGNWERKRPVWVMLMVNSLTEVDIKSRGVPVLDLFLAQEAERLRKQTGAVEKVEEQCHPLNGLNFSQVIFALNQTLLQQESLRAGSLQIPYTTEDLIKHYNCGDLSSVILSHDSSQVPNFINATLPPQERITAQEIDSYLRRELIYKRNERIGKRVKALLEEFPDKGFFFAFGAGHFMGNNTVLDVLRREGYEVEHAPAGRPIHKGKSKKTSTRPTLSTIFAPKVPTLEVPAPEAVSSGHSTLPPLVSRPGSADTPSEAEQRFRKKRRRSQRRPRLRQFSDLWVRLEESDIVPQLQVPVLDRHISTELRLPRRGHSHHSQMVASSACLSLWTPVFWVLVLAFQTETPLL

SEQ ID NO: 13741 - protein, 456 aa, Homo sapiens
MSPWSWFLLQTLCLLPTGAASRRGAPGTANCELKPQQSELNSFLWTIKRDPPSYFFGTIHVPYTRVWDFIPDNSKEAFLQSSIVYFELDLTDPYTISALTSCQMLPQGENLQDVLPRDIYCRLKRHLEYVKLMMPLWMTPDQRGKGLYADYLFNAIAGNWERKRPVWVMLMVNSLTEVDIKSRGVPVLDLFLAQEAERLRKQTGAVEKVEEQCHPLNGLNFSQVPNFINATLPPQERITAQEIDSYLRRELIYKRNERIGKRVKALLEEFPDKGFFFAFGAGHFMGNNTVLDVLRREGYEVEHAPAGRPIHKGKSKKTSTRPTLSTIFAPKVPTLEVPAPEAVSSGHSTLPPLVSRPGSADTPSEAEQRFRKKRRRSQRRPRLRQFSDLWVRLEESDIVPQLQVPVLDRHISTELRLPRRGHSHHSQMVASSACLSLWTPVFWVLVLAFQTETPLL

SEQ ID NO: 13742 - protein, 517 aa, Homo sapiens
MHAALAGPLLAALLATARARPQPPDGGQCRPPGSQRDLNSFLWTIRRDPPAYLFGTIHVPYTRVWDFIPDNSKAAFQASTRVYFELDLTDPYTISALASCQLLPHGENLQDVLPHELYWRLKRHLDYVKLMMPSWMTPAQRGKGLYADYLFNAIAGNWERKRPVWVMLMVNSLTERDVRFRGVPVLDLYLAQQAEKMKKTTGAVEQVEEQCHPLNNGLNFSQVLFALNQTLLQQESVRAGSLQASYTTEDLIKHYNCGDLSAVIFNHDTSQLPNFINTTLPPHEQVTAQEIDSYFRQELIYKRNERMGKRVMALLRENEDKICFFAFGAGHFLGNNTVIDILRQAGLEVDHTPAGQAIHSPAPQSPAPSPEGTSTSPAPVTPAAAVPEAPSVTPTAPPEDEDPALSPHLLLPDSLSQLEEFGRQRKWHKRQSTHQRPRQFNDLWVRIEDSTTASPPPLPLQPTHSSGTAKPPFQLSDQLQQQDPPGPASSSAPTLGLLPAIATTIAVCFLLHSLGPS

SEQ ID NO: 13743 - protein, 37 aa, Homo sapiens
MPGRTWELCLLLLLGLGLGSQEALPPPCERTSPADLH

SEQ ID NO: 13744 - protein, 552 aa, Homo sapiens
MPGRTWELCLLLLLGLGLGSQEALPPPCESEIYCHGELLNQVQMAKLYQDDKQFVDMPLSIAPEQVLQTFTELSRDHNHSIPREQLQAFVHEHFQAKGQELQPWTPADWKDSPQFLQKISDAKLRAWAGQLHQLWKKLGKKMKPEVLSHPERFSLIYSEHPFIVPGGRFVEFYYCYGHVPNGGRVYYLQRSQPPLLTLMMDCYLTHTNDTAFLQENIETLALELDFWTKNRTVSVSLEGKNYLLNRYYVPYGGPRPESYSKDVELADTLPEGDREALWAELKAGAESGWDFSSRWLIGGPNPNSLSGIRTSKLVPVDLNAFLCQAEELMSNFYSRLGNDSQATKYRILRSQRLAALNTVLWDEQTGAWFDYDLEKKKKNREFYPSNLTPLWAGCFSDPGVADKALKYLEDNRILTYQYGIPTSLQKTGQQWDFPNAWAPLQDLVIRGLAKAPLRRAQEVAFQLAQNWIRTNFDVYSQKSAMYEKYDVSNGGQPGGGGEYEVQEGFGWTNGVVLMLLDRYGDRLTSGAKLAFLEPHCLAATLLPSLLLSLLPW

SEQ ID NO: 13745 - protein, 583 aa, Homo sapiens
MPGRTWELCLLLLLGLGLGSQEALPPPCESEIYCHGELLNQVQMAKLYQDDKQFVDMPLSIAPEQVLQTFTELSRDHNHSIPREQLQAFVHEHFQAKGQELQPWTPADWKDSPQFLQKISDAKLRAWAGQLHQLWKKLGKKMKPEVLSHPERFSLIYSEHPFIVPGGRFVEFYYWDSYWVMEGLLLSEMAETVKGMLQNFLDLVKTYGHVPNGGRVYYLQRSQPPLLTLMMDCYLTHTNDTAFLQENIETLALELDFWTKNRTVSVSLEGKNYLLNRYYVPYGGPRPESYSKDVELADTLPEGDREALWAELKAGAESGWDFSSRWLIGGPNPNSLSGIRTSKLVPVDLNAFLCQAEELMSNFYSRLGNDSQATKYRILRSQRLAALNTVLWDEQTGAWFDYDLEKKKKNREFYPSNLTPLWAGCFSDPGVADKALKYLEDNRILTYQYGIPTSLQKTGQQWDFPNAWAPLQDLVIRGLAKAPLRRAQEVAFQLAQNWIRTNFDVYSQKSAMYEKYDVSNGGQPGGGGEYEVQEGFGWTNGVVLMLLDRYGDRLTSGAKLAFLEPHCLAATLLPSLLLSLLPW

SEQ ID NO: 13746 - protein, 150 aa, Homo sapiens
MRKTRLWGLLWMLFVSELRAATKLTEEKYELKEGQTLDVKCDYTLEKFASSQKAWQIIRDGEMPKTLACTERPSKNSHPVQVGRIILEDYHDHGLLRVRMVNLQVEDSGLYQCVIYQPPKEPHMLFDRIRLVVTKGFRCSTLSFSWLVDS

SEQ ID NO: 13747 - protein, 250 aa, Homo sapiens
MRKTRLWGLLWMLFVSELRAATKLTEEKYELKEGQTLDVKCDYTLEKFASSQKAWQIIRDGEMPKTLACTERPSKNSHPVQVGRIILEDYHDHGLLRVRMVNLQVEDSGLYQCVIYQPPKEPHMLFDRIRLVVTKGFSGTPGSNENSTQNVYKIPPTTTKALCPLYTSPRTVTQAPPKSTADVSTPDSEINLTNVTDIIREKSMTFGIRRLDVESHPLPPLHTGHFRISQFFSQAGTQSLHSCYKGKPTP

SEQ ID NO: 13748 - protein, 234 aa, Homo sapiens
MRKTRLWGLLWMLFVSELRAATKLTEEKYELKEGQTLDVKCDYTLEKFASSQKAWQIIRDGEMPKTLACTERPSKNSHPVQVGRIILEDYHDHGLLRVRMVNLQVEDSGLYQCVIYQPPKEPHMLFDRIRLVVTKGFSGTPGSNENSTQNVYKIPPTTTKALCPLYTSPRTVTQAPPKSTADVSTPDSEINLTNVTDIIRVPVFNIVILLAGGFLSKSLVFSVLFAVTLRSFVP

SEQ ID NO: 13749 - protein, 225 aa, Homo sapiens
MRKTRLWGLLWMLFVSELRAATKLTEEKYELKEGQTLDVKCDYTLEKFASSQKAWQIIRDGEMPKTLACTERPSKNSHPVQVGRIILEDYHDHGLLRVRMVNLQVEDSGLYQCVIYQPPKEPHMLFDRIRLVVTKGFSGTPGSNENSTQNVYKIPPTTTKALCPLYTSPRTVTQAPPKSTADVSTPDSEINLTNVTDIIRYSFQVPGPLVWTLSPLFPSLCAERM

SEQ ID NO: 13750 - protein, 219 aa, Homo sapiens
MEPLRLLILLFVTELSGAHNTTVFQGVAGQSLQVSCPYDSMKHWGRRKAWCRQLGEKGPCQRVVSTHNLWLLSFLRRWNGSTAITDDTLGGTLTITLRNLQPHDAGLYQCQSLHGSEADTLRKVLVEVLADPLDHRDAGDLWFPGESESFEDAHVEHSISRAERHVKEDDGRKSPGEVPPGTSPACILATWPPGLLVLLWQETTLPEHCFSWTLEAGTG

SEQ ID NO: 13751 - protein, 222 aa, Homo sapiens
MEPLRLLILLFVTELSGAHNTTVFQGVAGQSLQVSCPYDSMKHWGRRKAWCRQLGEKGPCQRVVSTHNLWLLSFLRRWNGSTAITDDTLGGTLTITLRNLQPHDAGLYQCQSLHGSEADTLRKVLVEVLADPLDHRDAGDLWFPGESESFEDAHVEHSISRPSQGSHLPSCLSKEPLGRRNPLPTHFHPSPPGLHLSHQDSSSQRPLGCSLAWTEARDTSTQ

SEQ ID NO: 13752 - protein, 230 aa, Homo sapiens
MEPLRLLILLFVTELSGAHNTTVFQGVAGQSLQVSCPYDSMKHWGRRKAWCRQLGEKGPCQRVVSTHNLWLLSFLRRWNGSTAITDDTLGGTLTITLRNLQPHDAGLYQCQSLHGSEADTLRKVLVEVLADPLDHRDAGDLWFPGESESFEDAHVEHSISRSLLEGEIPFPPTSILLLLACIFLIKILAASALWAAAWHGQKPGTHPPSELDCGHDPGYQLQTLPGLRDT

SEQ ID NO: 13753 - protein, 238 aa, Homo sapiens
MPGPWLLLALALTLNLTGVPGGRAQPEAAQQEAVTAAEHPGLDDFLRQVERLLFLRENIQRLQGDQASQIFQSDWLSKRQHPGKREEEEEEGVEEEEEEEGGAVGPHKRQHPGRREDEASWSVDVTQHKRQHPGRRSPWLAYAVPKRQHPGRRLADPKAQRSWEEEEEEEEREEDLMPEKRQHPGKRALGGPCGPQGAYGQAGLLLGLLDDLSRSQGAEEKRQHPGRRAAWVREPLEE

SEQ ID NO: 13754 - protein, 242 aa, Homo sapiens
MPGPWLLLALALTLNLTGVPGGRAQPEAAQQEAVTAAEHPGLDDFLRQVERLLFLRENIQRLQGDQGEHSASQIFQSDWLSKRQHPGKREEEEEEGVEEEEEEEGGAVGPHKRQHPGRREDEASWSVDVTQHKRQHPGRRSPWLAYAVPKRQHPGRRLADPKAQRSWEEEEEEEEREEDLMPEKRQHPGKRALGGPCGPQGAYGQAGLLLGLLDDLSRSQGAEEKRQHPGRRAAWVREPLEE

SEQ ID NO: 13755 - protein, 1050 aa, Homo sapiens
MEVAVEKAVAAAAAASAAASGGPSAAPSGENEAESRQGPDSERGGEAARLNLLDTCAVCHQNIQSRAPKLLPCLHSFCQRCLPAPQRYLMLPAPMLGSAETPPPVPAPGSPVSGSSPFATQVGVIRCPVCSQECAERHIIDNFFVKDTTEVPSSTVEKSNQVCTSCEDNAEANGFCVECVEWLCKTCIRAHQRVKFTKDHTVRQKEEVSPEAVGVTSQRPVFCPFHKKEQLKLYCETCDKLTCRDCQLLEHKEHRYQFIEEAFQNQKVIIDTLITKLMEKTKYIKFTGNQIQNRIIEVNQNQKQVEQDIKVAIFTLMVEINKKGKALLHQLESLAKDHRMKLMQQQQEVAGLSKQLEHVMHFSKWAVSSGSSTALLYSKRLITYRLRHLLRARCDASPVTNNTIQFHCDPSFWAQNIINLGSLVIEDKESQPQMPKQNPVVEQNSQPPSGLSSNQLSKFPTQISLAQLRLQHMQQQVMAQRQQVQRRPAPVGLPNPRMQGPIQQPSISHQQPPPRLINFQNHSPKPNGPVLPPHPQQLRYPPNQNIPRQAIKPNPLQMAFLAQQAIKQWQISSGQGTPSTTNSTSSTPSSPTITSAAGYDGKAFGSPMIDLSSPVGGSYNLPSLPDIDCSSTIMLDNIVRKDTNIDHGQPRPPSNRTVQSPNSSVPSPGLAGPVTMTSVHPPIRSPSASSVGSRGSSGSSSKPAGADSTHKVPVVMLEPIRIKQENSGPPENYDFPVVIVKQESDEESRPQNANYPRSILTSLLLNSSQSSTSEETVLRSDAPDSTGDQPGLHQDNSSNGKSEWLDPSQKSPLHVGETRKEDDPNEDWCAVCQNGGELLCCEKCPKVFHLSCHVPTLTNFPSGEWICTFCRDLSKPEVEYDCDAPSHNSEKKKTEGLVKLTPIDKRKCERLLLFLYCHEMSLAFQDPVPLTVPDYYKIIKNPMDLSTIKKRLQEDYSMYSKPEDFVADFRLIFQNCAEFNEPDSEVANAGIKLENYFEELLKNLYPEKRFPKPEFRNESEDNKFSDDSDDDFVQPRKKRLKSIEERQLLK

SEQ ID NO: 13756 - protein, 1016 aa, Homo sapiens
MEVAVEKAVAAAAAASAAASGGPSAAPSGENEAESRQGPDSERGGEAARLNLLDTCAVCHQNIQSRAPKLLPCLHSFCQRCLPAPQRYLMLPAPMLGSAETPPPVPAPGSPVSGSSPFATQVGVIRCPVCSQECAERHIIDNFFVKDTTEVPSSTVEKSNQVCTSCEDNAEANGFCVECVEWLCKTCIRAHQRVKFTKDHTVRQKEEVSPEAVGVTSQRPVFCPFHKKEQLKLYCETCDKLTCRDCQLLEHKEHRYQFIEEAFQNQKVIIDTLITKLMEKTKYIKFTGNQIQNRIIEVNQNQKQVEQDIKVAIFTLMVEINKKGKALLHQLESLAKDHRMKLMQQQQEVAGLSKQLEHVMHFSKWAVSSGSSTALLYSKRLITYRLRHLLRARCDASPVTNNTIQFHCDPSFWAQNIINLGSLVIEDKESQPQMPKQNPVVEQNSQPPSGLSSNQLSKFPTQISLAQLRLQHMQQQQPPPRLINFQNHSPKPNGPVLPPHPQQLRYPPNQNIPRQAIKPNPLQMAFLAQQAIKQWQISSGQGTPSTTNSTSSTPSSPTITSAAGYDGKAFGSPMIDLSSPVGGSYNLPSLPDIDCSSTIMLDNIVRKDTNIDHGQPRPPSNRTVQSPNSSVPSPGLAGPVTMTSVHPPIRSPSASSVGSRGSSGSSSKPAGADSTHKVPVVMLEPIRIKQENSGPPENYDFPVVIVKQESDEESRPQNANYPRSILTSLLLNSSQSSTSEETVLRSDAPDSTGDQPGLHQDNSSNGKSEWLDPSQKSPLHVGETRKEDDPNEDWCAVCQNGGELLCCEKCPKVFHLSCHVPTLTNFPSGEWICTFCRDLSKPEVEYDCDAPSHNSEKKKTEGLVKLTPIDKRKCERLLLFLYCHEMSLAFQDPVPLTVPDYYKIIKNPMDLSTIKKRLQEDYSMYSKPEDFVADFRLIFQNCAEFNEPDSEVANAGIKLENYFEELLKNLYPEKRFPKPEFRNESEDNKFSDDSDDDFVQPRKKRLKSIEERQLLK

SEQ ID NO: 13757 - protein, 460 aa, Homo sapiens
IYFQLHRALKMIVDPVEPHGEMKFQWDLNAWTKSAEAFGKIVAERPGTNSTGPAPMAPPRAPGPLSKQGSGSSQPMEVQEGYGFGSEPHVSGVKRSRSGEGEVSGLMRKVPRVSLERLDLDLTADSQPPVFKVFPGSTTEDYNLIVIERGAAAAATGQPGTAPAGTPGAPPLAGMAIVKEEETEAAIGAPPTATEGPETKPVLMALAEGPGAEGPRLASPSGSTSSGLEVVAPEGTSAPGGGPGTLDDSATICRVCQKPGDLVMCNQCEFCFHLDCHLPALQDVPGEEWSCSLCHVLPDLKEEDGSLSLDGADSTGVVAKLSPANQRKCERVLLALFCHEPCRPLHQLATDSTFSLDQPGGTLDLTLIRARLQEKLSPPYSSPQEFAQDVGRMFKQFNKLTEDKADVQSIIGLQRFFETRMNEAFGDTKFSAVLVEPPPMSLPGAGLSSQELSGGPGDGP

SEQ ID NO: 13758 - protein, 753 aa, Homo sapiens
MAASAAAASAAAASAASGSPGPGEGSAGGEKRSTAPSAAASASASAAASSPAGGGAEALELLEHCGVCRERLRPEREPRLLPCLHSACSACLGPAAPAAANSSGDGGAAGDGTGPAKSRDGERTVYCNVHKHEPLVLFCESCDTLTCRDCQLNAHKDHQYQFLEDAVRNQRKLLASLVKRLGDKHATLQKSTKEVRSSIRQVSDVQKRVQVDVKMAILQIMKELNKRGRVLVNDAQKVTEGQQERLERQHWTMTKIQKHQEHILRFASWALESDNNTALLLSKKLIYFQLHRALKMIVDPVEPHGEMKFQWDLNAWTKSAEAFGKIVAERPGTNSTGPAPMAPPRAPGPLSKQGSGSSQPMEVQEGYGFGSGDDPYSSAEPHVSGVKRSRSGEGEVSGLMRKVPRVSLERLDLDLTADSQPPVFKVFPGSTTEDYNLIVIERGAAAAATGQPGTAPAGTPGAPPLAGMAIVKEEETEAAIGAPPTATEGPETKPVLMALAEGPGAEGPRLASPSGSTSSGLEVVAPEGTSAPGGGPGTLDDSATICRVCQKPGDLVMCNQCEFCFHLDCHLPALQDVPGEEWSCSLCHVLPDLKEEDGSLSLDGADSTGVVAKLSPANQRKCERVLLALFCHEPCRPLHQLATDSTFSLDQPGGTLDLTLIRARLQEKLSPPYSSPQEFAQDVGRMFKQFNKLTEDKADVQSIIGLQRFFETRMNEAFGDTKFSAVLVEPPPMSLPGAGLSSQELSGGPGDGP

SEQ ID NO: 13759 - protein, 835 aa, Homo sapiens
MAASAAAASAAAASAASGSPGPGEGSAGGEKRSTAPSAAASASASAAASSPAGGGAEALELLEHCGVCRERLRPEREPRLLPCLHSACSACLGPAAPAAANSSGDGGAAGDGTVVDCPVCKQQCFSKDIVENYFMRDSGSKAATDAQDANQCCTSCEDNAPATSYCVECSEPLCETCVEAHQRVKYTKDHTVRSTGPAKSRDGERTVYCNVHKHEPLVLFCESCDTLTCRDCQLNAHKDHQYQFLEDAVRNQRKLLASLVKRLGDKHATLQKSTKEVRSSIRQVSDVQKRVQVDVKMAILQIMKELNKRGRVLVNDAQKVTEGQQERLERQHWTMTKIQKHQEHILRFASWALESDNNTALLLSKKLIYFQLHRALKMIVDPVEPHGEMKFQWDLNAWTKSAEAFGKIVAERPGTNSTGPAPMAPPRAPGPLSKQGSGSSQPMEVQEGYGFGSGDDPYSSAEPHVSGVKRSRSGEGEVSGLMRKVPRVSLERLDLDLTADSQPPVFKVFPGSTTEDYNLIVIERGAAAAATGQPGTAPAGTPGAPPLAGMAIVKEEETEAAIGAPPTATEGPETKPVLMALAEGPGAEGPRLASPSGSTSSGLEVVAPEGTSAPGGGPGTLDDSATICRVCQKPGDLVMCNQCEFCFHLDCHLPALQDVPGEEWSCSLCHVLPDLKEEDGSLSLDGADSTGVVAKLSPANQRKCERVLLALFCHEPCRPLHQLATDSTFSLDQPGGTLDLTLIRARLQEKLSPPYSSPQEFAQDVGRMFKQFNKLTEDKADVQSIIGLQRFFETRMNEAFGDTKFSAVLVEPPPMSLPGAGLSSQELSGGPGDGP

SEQ ID NO: 13760 - protein, 61 aa, Homo sapiens
MRDSGSKAATDAQDANQCCTSCEDNAPATSYCVECSEPLCETCVEAHQRVKYTKDHTVRST

SEQ ID NO: 13761 - protein, 178 aa, Homo sapiens
MRDSGSKAATDAQDANQCCTSCEDNAPATSYCVECSEPLCETCVEAHQRVKYTKDHTVRSTGPAKSRDGERTVYCNVHKHEPLVLFCESCDTLTCRDCQLNAHKDHQYQFLEDAVRNQRKLLASLVKRLGDKHATLQKSTKEVRSSIRQVSDVQKRVQVDVKMAILQIMKELNKRGRV

SEQ ID NO: 13762 - protein, 162 aa, Homo sapiens
MRLGAQRPASVWSGGGAERGITLYKVVDCPVCKQQCFSKDIVENYFMRDSGSKAATDAQDANQCCTSCEDNAPATSYCVECSEPLCETCVEAHQRVKYTKDHTVRSTGPAKSRDGERTVYCNVHKHEPLVLFCESCDTLTCRDCQLNAHKDHQYQFLEDAVR

SEQ ID NO: 13763 - protein, 2546 aa, Homo sapiens
IKAPIEDLDLEGQKLLQRIQSSESFPKKNSGSGNADLQNLLPKVSTMLDRLHSTRQHLHQMWHVRKLKLDQCFQLRLFEQDAEKMFDWITHNKGLFLNSYTEIGTSHPHAMELQTQHNHFAMNCMNVYVNINRIMSVANRLVESGHYASQQIRQIASQLEQEWKAFAAALDERSTLLDMSSIFHQKAEKYMSNVDSWCKACGEVDLPSELQDLEDAIHHHQGIYEHITLAYSEVSQDGKSLLDKLQRPLTPGSSDSLTASANYSKAVHHVLDVIHEVLHHQRQLENIWQHRKVRLHQRLQLCVFQQDVQQVLDWIENHGEAFLSKHTGVGKSLHRARALQKRHEDFEEVAQNTYTNADKLLEAAEQLAQTGECDPEEIYQAAHQLEDRIQDFVRRVEQRKILLDMSVSFHTHVKELWTWLEELQKELLDDVYAESVEAVQDLIKRFGQQQQTTLQVTVNVIKEGEDLIQQLRDSAISSNKTPHNSSINHIETVLQQLDEAQSQMEELFQERKIKLELFLQLRIFERDAIDIISDLESWNDELSQQMNDFDTEDLTIAEQRLQHHADKALTMNNLTFDVIHQGQDLLQYVNEVQASGVELLCDRDVDMATRVQDLLEFLHEKQQELDLAAEQHRKHLEQCVQLRHLQAEVKQVLGWIRNGESMLNAGLITASSLQEAEQLQREHEQFQHAIEKTHQSALQVQQKAEAMLQANHYDMDMIRDCAEKVASHWQQLMLKMEDRLKLVNASVAFYKTSEQVCSVLESLEQEYKREEDWCGGADKLGPNSETDHVTPMISKHLEQKEAFLKACTLARRNADVFLKYLHRNSVNMPGMVTHIKAPEQQVKNILNELFQRENRVLHYWTMRKRRLDQCQQYVVFERSAKQALEWIHDNGEFYLSTHTSTGSSIQHTQELLKEHEEFQITAKQTKERVKLLIQLADGFCEKGHAHAAEIKKCVTAVDKRYRDFSLRMEKYRTSLEKALGISSDSNKSSKSLQLDIIPASIPGSEVKLRDAAHELNEEKRKSARRKEFIMAELIQTEKAYVRDLRECMDTYLWEMTSGVEEIPPGIVNKELIIFGNMQEIYEFHNNIFLKELEKYEQLPEDVGHCFVTWADKFQMYVTYCKNKPDSTQLILEHAGSYFDEIQQRHGLANSISSYLIKPVQRITKYQLLLKELLTCCEEGKGEIKDGLEVMLSVPKRANDAMHLSMLEGFDENIESQGELILQESFQVWDPKTLIRKGRERHLFLFEMSLVFSKEVKDSSGRSKYLYKSKLFTSELGVTEHVEGDPCKFALWVGRTPTSDNKIVLKASSIENKQDWIKHIREVIQERTIHLKGALKEPIHIPKTAPATRQKGRRDGEDLDSQGDGSSQPDTISIASRTSQNTLDSDKLSGGCELTVVIHDFTACNSNELTIRRGQTVEVLERPHDKPDWCLVRTTDRSPAAEGLVPCGSLCIAHSRSSMEMEGIFNHKDSLSVSSNDASPPASVASLQPHMIGAQSSPGPKRPGNTLRKWLTSPVRRLSSGKADGHVKKLAHKHKKSREVRKSADAGSQKDSDDSAATPQDETVEERGRNEGLSSGTLSKSSSSGMQSCGEEEGEEGADAVPLPPPMAIQQHSLLQPDSQDDKASSRLLVRPTSSETPSAAELVSAIEELVKSKMALEDRPSSLLVDQGDSSSPSFNPSDNSLLSSSSPIDEMEERKSSSLKRRHYVLQELVETERDYVRDLGYVVEGYMALMKEDGVPDDMKGKDKIVFGNIHQIYDWHRDFFLGELEKCLEDPEKLGSLFVKHERRLHMYIAYCQNKPKSEHIVSEYIDTFFEDLKQRLGHRLQLTDLLIKPVQRIMKYQLLLKDFLKYSKKASLDTSELERAVEVMCIVPRRCNDMMNVGRLQGFDGKIVAQGKLLLQDTFLVTDQDAGLLPRCRERRIFLFEQIVIFSEPLDKKKGFSMPGFLFKNSIKVSCLCLEENVENDPCKFALTSRTGDVVETFILHSSSPSVRQTWIHEINQILENQRNFLNALTSPIEYQRNHSGGGGGGGSGGSGGGGGSGGGGAPSGGSGHSGGPSSCGGAPSTSRSRPSRIPQPVRHHPPVLVSSAASSQAEADKMSGTSTPGPSLPPPGAAPEAGPSAPSRRPPGADAEGSEREAEPIPKMKVLESPRKGAANASGSSPDAPAKDARASLGTLPLGKPRAGAASPLNSPLSSAVPSLGKEPFPPSSPLQKGGSFWSSIPASPASRPGSFTFPGDSDSLQRQTPRHAAPGKDTDRMSTCSSASEQSVQSTQSNGSESSSSSNISTMLVTHDYTAVKEDEINVYQGEVVQILASNQQNMFLVFRAATDQCPAAEGWIPGFVLGHTSAVIVENPDGTLKKSTSWHTALRLRKKSEKKDKDGKREGKLENGYRKSREGLSNKVSVKLLNPNYIYDVPPEFVIPLSEVTCETGETVVLRCRVCGRPKASITWKGPEHNTLNNDGHYSISYSDLGEATLKIVGVTTEDDGIYTCIAVNDMGSASSSASLRVLGPGMDGIMVTWKDNFDSFYSEVAELGRANWNNWSPY

SEQ ID NO: 13764 - protein, 1508 aa, Homo sapiens
MAEGFRKNDEMKAMDVLPILKEKVAYLSGGRDKRGGPILTFPARSNHDRIRQEDLRRLISYLACIPSEEVCKRGFTVIVDMRGSKWDSIKPLLKILQESFPCCIHVALIIKPDNFWQKQRTNFGSSKFEFETNMVSLEGLTKVVDPSQLTPEFDGCLEYNHEEWIEIRVAFEDYISNATHMLSRLEELQDILAKKELPQDLEGARNMIEEHSQLKKKVIKAPIEDLDLEGQKLLQRIQSSESFPKKNSGSGNADLQNLLPKVSTMLDRLHSTRQHLHQMWHVRKLKLDQCFQLRLFEQDAEKMFDWITHNKGLFLNSYTEIGTSHPHAMELQTQHNHFAMNCMNVYVNINRIMSVANRLVESGHYASQQIRQIASQLEQEWKAFAAALDERSTLLDMSSIFHQKAEKYMSNVDSWCKACGEVDLPSELQDLEDAIHHHQGIYEHITLAYSEVSQDGKSLLDKLQRPLTPGSSDSLTASANYSKAVHHVLDVIHEVLHHQRQLENIWQHRKVRLHQRLQLCVFQQDVQQVLDWIENHGEAFLSKHTGVGKSLHRARALQKRHEDFEEVAQNTYTNADKLLEAAEQLAQTGECDPEEIYQAAHQLEDRIQDFVRRVEQRKILLDMSVSFHTHVKELWTWLEELQKELLDDVYAESVEAVQDLIKRFGQQQQTTLQVTVNVIKEGEDLIQQLRDSAISSNKTPHNSSINHIETVLQQLDEAQSQMEELFQERKIKLELFLQLRIFERDAIDIISDLESWNDELSQQMNDFDTEDLTIAEQRLQHHADKALTMNNLTFDVIHQGQDLLQYVNEVQASGVELLCDRDVDMATRVQDLLEFLHEKQQELDLAAEQHRKHLEQCVQLRHLQAEVKQVLGWIRNGESMLNAGLITASSLQEAEQLQREHEQFQHAIEKTHQSALQVQQKAEAMLQANHYDMDMIRDCAEKVASHWQQLMLKMEDRLKLVNASVAFYKTSEQVCSVLESLEQEYKREEDWCGGADKLGPNSETDHVTPMISKHLEQKEAFLKACTLARRNADVFLKYLHRNSVNMPGMVTHIKAPEQQVKNILNELFQRENRVLHYWTMRKRRLDQCQQYVVFERSAKQALEWIHDNGEFYLSTHTSTGSSIQHTQELLKEHEEFQITAKQTKERVKLLIQLADGFCEKGHAHAAEIKKCVTAVDKRYRDFSLRMEKYRTSLEKALGISSDSNKSSKSLQLDIIPASIPGSEVKLRDAAHELNEEKRKSARRKEFIMAELIQTEKAYVRDLRECMDTYLWEMTSGVEEIPPGIVNKELIIFGNMQEIYEFHNNIFLKELEKYEQLPEDVGHCFVTWADKFQMYVTYCKNKPDSTQLILEHAGSYFDEIQQRHGLANSISSYLIKPVQRITKYQLLLKELLTCCEEGKGEIKDGLEVMLSVPKRANDAMHLSMLEGFDENIESQGELILQESFQVWDPKTLIRKGRERHLFLFEMSLVFSKEVKDSSGRSKYLYKSKLFVSIGVQNCKSKGNTIAVFL

SEQ ID NO: 13765 - protein, 255 aa, Homo sapiens
MALEDRPSSLLVDQGDSSSPSFNPSDNSLLSSSSPIDEMEERKSSSLKRRHYVLQELVETERDYVRDLGYVVEGYMALMKEDGVPDDMKGKDKIVFGNIHQIYDWHRDFFLGELEKCLEDPEKLGSLFVKHERRLHMYIAYCQNKPKSEHIVSEYIDTFFEDLKQRLGHRLQLTDLLIKPVQRIMKYQLLLKDFLKYSKKASLDTSELERAVEVMCIVPRRCNDMMNVGRLQGFDGRVVALCHRFKETFREICWF

SEQ ID NO: 13766 - protein, 2309 aa, Homo sapiens
MKAMDVLPILKEKVAYLSGGRDKRGGPILTFPARSNHDRIRQEDLRRLISYLACIPSEEVCKRGFTVIVDMRGSKWDSIKPLLKILQESFPCCIHVALIIKPDNFWQKQRTNFGSSKFEFETNMVSLEGLTKVVDPSQLTPEFDGCLEYNHEEWIEIRVAFEDYISNATHMLSRLEELQDILAKKELPQDLEGARNMIEEHSQLKKKVIKAPIEDLDLEGQKLLQRIQSSESFPKKNSGSGNADLQNLLPKVSTMLDRLHSTRQHLHQMWHVRKLKLDQCFQLRLFEQDAEKMFDWITHNKGLFLNSYTEIGTSHPHAMELQTQHNHFAMNCMNVYVNINRIMSVANRLVESGHYASQQIRQIASQLEQEWKAFAAALDERSTLLDMSSIFHQKAEKYMSNVDSWCKACGEVDLPSELQDLEDAIHHHQGIYEHITLAYSEVSQDGKSLLDKLQRPLTPGSSDSLTASANYSKAVHHVLDVIHEVLHHQRQLENIWQHRKVRLHQRLQLCVFQQDVQQVLDWIENHGEAFLSKHTGVGKSLHRARALQKRHEDFEEVAQNTYTNADKLLEAAEQLAQTGECDPEEIYQAAHQLEDRIQDFVRRVEQRKILLDMSVSFHTHVKELWTWLEELQKELLDDVYAESVEAVQDLIKRFGQQQQTTLQVTVNVIKEGEDLIQQLRDSAISSNKTPHNSSINHIETVLQQLDEAQSQMEELFQERKIKLELFLQLRIFERDAIDIISDLESWNDELSQQMNDFDTEDLTIAEQRLQHHADKALTMNNLTFDVIHQGQDLLQYVNEVQASGVELLCDRDVDMATRVQDLLEFLHEKQQELDLAAEQHRKHLEQCVQLRHLQAEVKQVLGWIRNGESMLNAGLITASSLQEAEQLQREHEQFQHAIEKTHQSALQVQQKAEAMLQANHYDMDMIRDCAEKVASHWQQLMLKMEDRLKLVNASVAFYKTSEQVCSVLESLEQEYKREEDWCGGADKLGPNSETDHVTPMISKHLEQKEAFLKACTLARRNADVFLKYLHRNSVNMPGMVTHIKAPEQQVKNILNELFQRENRVLHYWTMRKRRLDQCQQYVVFERSAKQALEWIHDNGEFYLSTHTSTGSSIQHTQELLKEHEEFQITAKQTKERVKLLIQLADGFCEKGHAHAAEIKKCVTAVDKRYRDFSLRMEKYRTSLEKALGISSDSNKSSKSLQLDIIPASIPGSEVKLRDAAHELNEEKRKSARRKEFIMAELIQTEKAYVRDLRECMDTYLWEMTSGVEEIPPGIVNKELIIFGNMQEIYEFHNNIFLKELEKYEQLPEDVGHCFVTWADKFQMYVTYCKNKPDSTQLILEHAGSYFDEIQQRHGLANSISSYLIKPVQRITKYQLLLKELLTCCEEGKGEIKDGLEVMLSVPKRANDAMHLSMLEGFDENIESQGELILQESFQVWDPKTLIRKGRERHLFLFEMSLVFSKEVKDSSGRSKYLYKSKLFTSELGVTEHVEGDPCKFALWVGRTPTSDNKIVLKASSIENKQDWIKHIREVIQERTIHLKGALKEPIHIPKTAPATRQKGRRDGEDLDSQGDGSSQPDTISIASRTSQNTLDSDKLSGGCELTVVIHDFTACNSNELTIRRGQTVEVLERPHDKPDWCLVRTTDRSPAAEGLVPCGSLCIAHSRSSMEMEGIFNHKDSLSVSSNDASPPASVASLQPHMIGAQSSPGPKRPGNTLRKWLTSPVRRLSSGKADGHVKKLAHKHKKSREVRKSADAGSQKDSDDSAATPQDETVEERGRNEGLSSGTLSKSSSSGMQSCGEEEGEEGADAVPLPPPMAIQQHSLLQPDSQDDKASSRLLVRPTSSETPSAAELVSAIEELVKSKMALEDRPSSLLVDQGDSSSPSFNPSDNSLLSSSSPIDEMEERKSSSLKRRHYVLQELVETERDYVRDLGYVVEGYMALMKEDGVPDDMKGKDKIVFGNIHQIYDWHRDFFLGELEKCLEDPEKLGSLFVKHERRLHMYIAYCQNKPKSEHIVSEYIDTFFEDLKQRLGHRLQLTDLLIKPVQRIMKYQLLLKDFLKYSKKASLDTSELERAVEVMCIVPRRCNDMMNVGRLQGFDGKIVAQGKLLLQDTFLVTDQDAGLLPRCRERRIFLFEQIVIFSEPLDKKKGFSMPGFLFKNSIKVSCLCLEENVENDPCKFALTSRTGDVVETFILHSSSPSVRQTWIHEINQILENQRNFLNALTSPIEYQRNHSGGGGGGGSGGSGGGGGSGGGGAPSGGSGHSGGPSSCGGAPSTSRSRPSRIPQPVRHHPPVLVSSAASSQAEADKMSE

SEQ ID NO: 13767 - protein, 596 aa, Homo sapiens
MLPSQAQGLLWWVFPLFPASSLSYPPVSYRADGLARNTFLKACSESSSSSNISTMLVTHDYTAVKEDEINVYQGEVVQILASNQQNMFLVFRAATDQCPAAEGWIPGFVLGHTSAVIVENPDGTLKKSTSWHTALRLRKKSEKKDKDGKREGKLENGYRKSREGLSNKVSVKLLNPNYIYDVPPEFVIPLSEVTCETGETVVLRCRVCGRPKASITWKGPEHNTLNNDGHYSISYSDLGEATLKIVGVTTEDDGIYTCIAVNDMGSASSSASLRVLGPGMDGIMVTWKDNFDSFYSEVAELGRGRFSVVKKCDQKGTKRAVATKFVNKKLMKRDQVTHELGILQSLQHPLLVGLLDTFETPTSYILVLEMADQGRLLDCVVRWGSLTEGKIRAHLGEVLEAVRYLHNCRIAHLDLKPENILVDESLAKPTIKLADFGDAVQLNTTYYIHQLLGNPEFAAPEIILGNPVSLTSDTWSVGVLTYVLLSGVSPFLDDSVEETCLNICRLDFSFPDDYFKGVSQKAKEFVCFLLQEDPAKRPSAALALQEQWLQAGNGRSTGVLDTSRLTSFIERRKHQNDVRPIRSIKNFLQSRLLPRV

SEQ ID NO: 13768 - protein, 458 aa, Homo sapiens
MPNGLKPVDTLDSLSSVSSAYCSGGQPGTCKYWILDLDSLSVSSNDASPPASVASLQPHMIGAQSSPGPKRPGNTLRKWLTSPVRRLSSGKADGHVKKLAHKHKKSREVRKSADAGSQKDSDDSAATPQDETVEERGRNEGLSSGTLSKSSSSGMQSCGEEEGEEGADAVPLPPPMAIQQHSLLQPDSQDDKASSRLLVRPTSSETPSAAELVSAIEELVKSKMALEDRPSSLLVDQGDSSSPSFNPSDNSLLSSSSPIDEMEERKSSSLKRRHYVLQELVETERDYVRDLGYVVEGYMALMKEDGVPDDMKGKDKIVFGNIHQIYDWHRDFFLGELEKCLEDPEKLGSLFVKHERRLHMYIAYCQNKPKSEHIVSEYIDTFFEDLKQRLGHRLQLTDLLIKPVQRIMKYQLLLKDFLKYSKKASLDTSELERAVEVMCIVPRRCNDMMNVGRLQGFD

SEQ ID NO: 13769 - protein, 3097 aa, Homo sapiens
MSGSSGGAAAPAASSGPAAAASAAGSGCGGGAGEGAEEAAKDLADIAAFFRSGFRKNDEMKAMDVLPILKEKVAYLSGGRDKRGGPILTFPARSNHDRIRQEDLRRLISYLACIPSEEVCKRGFTVIVDMRGSKWDSIKPLLKILQESFPCCIHVALIIKPDNFWQKQRTNFGSSKFEFETNMVSLEGLTKVVDPSQLTPEFDGCLEYNHEEWIEIRVAFEDYISNATHMLSRLEELQDILAKKELPQDLEGARNMIEEHSQLKKKVIKAPIEDLDLEGQKLLQRIQSSESFPKKNSGSGNADLQNLLPKVSTMLDRLHSTRQHLHQMWHVRKLKLDQCFQLRLFEQDAEKMFDWITHNKGLFLNSYTEIGTSHPHAMELQTQHNHFAMNCMNVYVNINRIMSVANRLVESGHYASQQIRQIASQLEQEWKAFAAALDERSTLLDMSSIFHQKAEKYMSNVDSWCKACGEVDLPSELQDLEDAIHHHQGIYEHITLAYSEVSQDGKSLLDKLQRPLTPGSSDSLTASANYSKAVHHVLDVIHEVLHHQRQLENIWQHRKVRLHQRLQLCVFQQDVQQVLDWIENHGEAFLSKHTGVGKSLHRARALQKRHEDFEEVAQNTYTNADKLLEAAEQLAQTGECDPEEIYQAAHQLEDRIQDFVRRVEQRKILLDMSVSFHTHVKELWTWLEELQKELLDDVYAESVEAVQDLIKRFGQQQQTTLQVTVNVIKEGEDLIQQLRDSAISSNKTPHNSSINHIETVLQQLDEAQSQMEELFQERKIKLELFLQLRIFERDAIDIISDLESWNDELSQQMNDFDTEDLTIAEQRLQHHADKALTMNNLTFDVIHQGQDLLQYVNEVQASGVELLCDRDVDMATRVQDLLEFLHEKQQELDLAAEQHRKHLEQCVQLRHLQAEVKQVLGWIRNGESMLNAGLITASSLQEAEQLQREHEQFQHAIEKTHQSALQVQQKAEAMLQANHYDMDMIRDCAEKVASHWQQLMLKMEDRLKLVNASVAFYKTSEQVCSVLESLEQEYKREEDWCGGADKLGPNSETDHVTPMISKHLEQKEAFLKACTLARRNADVFLKYLHRNSVNMPGMVTHIKAPEQQVKNILNELFQRENRVLHYWTMRKRRLDQCQQYVVFERSAKQALEWIHDNGEFYLSTHTSTGSSIQHTQELLKEHEEFQITAKQTKERVKLLIQLADGFCEKGHAHAAEIKKCVTAVDKRYRDFSLRMEKYRTSLEKALGISSDSNKSSKSLQLDIIPASIPGSEVKLRDAAHELNEEKRKSARRKEFIMAELIQTEKAYVRDLRECMDTYLWEMTSGVEEIPPGIVNKELIIFGNMQEIYEFHNNIFLKELEKYEQLPEDVGHCFVTWADKFQMYVTYCKNKPDSTQLILEHAGSYFDEIQQRHGLANSISSYLIKPVQRITKYQLLLKELLTCCEEGKGEIKDGLEVMLSVPKRANDAMHLSMLEGFDENIESQGELILQESFQVWDPKTLIRKGRERHLFLFEMSLVFSKEVKDSSGRSKYLYKSKLFTSELGVTEHVEGDPCKFALWVGRTPTSDNKIVLKASSIENKQDWIKHIREVIQERTIHLKGALKEPIHIPKTAPATRQKGRRDGEDLDSQGDGSSQPDTISIASRTSQNTLDSDKLSGGCELTVVIHDFTACNSNELTIRRGQTVEVLERPHDKPDWCLVRTTDRSPAAEGLVPCGSLCIAHSRSSMEMEGIFNHKDSLSVSSNDASPPASVASLQPHMIGAQSSPGPKRPGNTLRKWLTSPVRRLSSGKADGHVKKLAHKHKKSREVRKSADAGSQKDSDDSAATPQDETVEERGRNEGLSSGTLSKSSSSGMQSCGEEEGEEGADAVPLPPPMAIQQHSLLQPDSQDDKASSRLLVRPTSSETPSAAELVSAIEELVKSKMALEDRPSSLLVDQGDSSSPSFNPSDNSLLSSSSPIDEMEERKSSSLKRRHYVLQELVETERDYVRDLGYVVEGYMALMKEDGVPDDMKGKDKIVFGNIHQIYDWHRDFFLGELEKCLEDPEKLGSLFVKHERRLHMYIAYCQNKPKSEHIVSEYIDTFFEDLKQRLGHRLQLTDLLIKPVQRIMKYQLLLKDFLKYSKKASLDTSELERAVEVMCIVPRRCNDMMNVGRLQGFDGKIVAQGKLLLQDTFLVTDQDAGLLPRCRERRIFLFEQIVIFSEPLDKKKGFSMPGFLFKNSIKVSCLCLEENVENDPCKFALTSRTGDVVETFILHSSSPSVRQTWIHEINQILENQRNFLNALTSPIEYQRNHSGGGGGGGSGGSGGGGGSGGGGAPSGGSGHSGGPSSCGGAPSTSRSRPSRIPQPVRHHPPVLVSSAASSQAEADKMSGTSTPGPSLPPPGAAPEAGPSAPSRRPPGADAEGSEREAEPIPKMKVLESPRKGAANASGSSPDAPAKDARASLGTLPLGKPRAGAASPLNSPLSSAVPSLGKEPFPPSSPLQKGGSFWSSIPASPASRPGSFTFPGDSDSLQRQTPRHAAPGKDTDRMSTCSSASEQSVQSTQSNGSESSSSSNISTMLVTHDYTAVKEDEINVYQGEVVQILASNQQNMFLVFRAATDQCPAAEGWIPGFVLGHTSAVIVENPDGTLKKSTSWHTALRLRKKSEKKDKDGKREGKLENGYRKSREGLSNKVSVKLLNPNYIYDVPPEFVIPLSEVTCETGETVVLRCRVCGRPKASITWKGPEHNTLNNDGHYSISYSDLGEATLKIVGVTTEDDGIYTCIAVNDMGSASSSASLRVLGPGMDGIMVTWKDNFDSFYSEVAELGRGRFSVVKKCDQKGTKRAVATKFVNKKLMKRDQVTHELGILQSLQHPLLVGLLDTFETPTSYILVLEMADQGRLLDCVVRWGSLTEGKIRAHLGEVLEAVRYLHNCRIAHLDLKPENILVDESLAKPTIKLADFGDAVQLNTTYYIHQLLGNPEFAAPEIILGNPVSLTSDTWSVGVLTYVLLSGVSPFLDDSVEETCLNICRLDFSFPDDYFKGVSQKAKEFVCFLLQEDPAKRPSAALALQEQWLQAGNGRSTGVLDTSRLTSFIERRKHQNDVRPIRSIKNFLQSRLLPRV

SEQ ID NO: 13770 - protein, 227 aa, Homo sapiens
MPGCRISACGPGAQEGTAEQRSPPPPWDPMPSSQPPPPTPTLTPTPTPGQSPPLPDAAGASAGAAEDQELQRWRQGASGIAGLAGPGGGSGAAAGAGGRALELAEARRRLLEVEGRRRLVSELESRVLQLHRVFLAAELRLAHRAESLSRLSGGVAQAELYLAAHGSRLKKGPRRGRRGRPPALLASALGLGGCVPWGAGRLRRGHGPEPDSPFRRSPPRGPASPQR

SEQ ID NO: 13771 - protein, 50 aa, Homo sapiens
  VARIANT 1: note = misc_feature - Xaa can be any naturally occurring amino acid
XGRPPALLASALGLGGCVPWGAGRLRRGHGPEPDSPFRRSPPRGPASPQR

SEQ ID NO: 13772 - protein, 156 aa, Homo sapiens
MRLRMELGAPEEMGQVPPLDSRPSSPALYFTHDASLVHKSPDPFGAVAAQKFSLAHSMLAISGHLDSDDDSGSGSLVGIDNKIEQAMDLVKSHLMFAVREEVEVLKEQIRELAERNAALEQENGLLRALASPEQLAQLPSSGVPRLGPPAPNGPSV

SEQ ID NO: 13773 - protein, 395 aa, Homo sapiens
MSGGKKKSSFQITSVTTDYEGPGSPGASDPPTPQPPTGPPPRLPNGEPSPDPGGKGTPRNGSPPPGAPSSRFRVVKLPHGLGEPYRRGRWTCVDVYERDLEPHSFGGLLEGIRGASGGAGGRSLDSRLELASLGLGAPTPPSGLSQGPTSWLRPPPTSPGPQARSFTGGLGQLVVPSKAKAEKPPLSASSPQQRPPEPETGESAGTSRAATPLPSLRVEAEAGGSGARTPPLSRRKAVDMRLRMELGAPEEMGQVPPLDSRPSSPALYFTHDASLVHKSPDPFGAVAAQKFSLAHSMLAISGHLDSDDDSGSGSLVGIDNKIEQAMDLVKSHLMFAVREEVEVLKEQIRELAERNAALEQENGLLRALASPEQLAQLPSSGVPRLGPPAPNGPSV

SEQ ID NO: 13774 - protein, 168 aa, Homo sapiens
  VARIANT 1: note = misc_feature - Xaa can be any naturally occurring amino acid
XHCLLSACLAPARPCSARGALSPPGIPFTASLSIGGVSKDPFPLGMAQPGVSVKSLVSSYETRVVGMAPGLPRKRGCASSPCSPRGASPIRGTSGPPPHRGLGGPGQRPSTRRGMDKTLLSLILYCHSGSGSLVGIDNKIEQAMPSRHWAGDEAPTPLTLCLSRGPQD

SEQ ID NO: 13775 - protein, 211 aa, Homo sapiens
  VARIANT 1: note = misc_feature - Xaa can be any naturally occurring amino acid
XLLSACLAPARPCSARGALSPPGIPFTASLSIGGVSKDPFPLGMAQPGVSVKSLVSSYETRVVGMAPGLPRKRGCASSPCSPRGASPIRGTSGPPPHRGLGGPGQRPSTRRGMDKTLLSLILYCHSGSGSLVGIDNKIEQAMDLVKSHLMFAVREEVEVLKEQIRELAERNAALEQENGLLRALASPEQLAQLPSSGVPRLGPPAPNGPSV

SEQ ID NO: 13776 - protein, 138 aa, Homo sapiens
MTALFLMSMLFGLTCGQAMSFCIPTEYTMHIERRECAYCLTINTTICAGYCMTRDINGKLFLPKYALSQDVCTYRDFIYRTVEIPGCPLHVAPYFSYPVALSCKCGKCNTDYSDCIHEAIKTNYCTKPQKSYLVGFSV

SEQ ID NO: 13777 - protein, 138 aa, Homo sapiens; identical to SEQ ID NO: 13776

SEQ ID NO: 13778 - protein, 231 aa, Homo sapiens
MRPADLLQLVLLLDLPRDLGGMGCSSPPCECHQEEDFRVTCKDIQRIPSLPPSTQTLKLIETHLRTIPSHAFSNLPNISRIYVSIDVTLQQLESHSFYNLSKVTHIEIRNTRNLTYIDPDALKELPLLKFLGIFNTGLKMFPDLTKVYSTDIFFILEITDNPYMTSIPVNAFQGLCNETLTLKLYNNGFTSVQGYAFNGTKLDAVYLNKNKYLTVIDKDAFGGVYSGPSLL

SEQ ID NO: 13779 - protein, 764 aa, Homo sapiens
MRPADLLQLVLLLDLPRDLGGMGCSSPPCECHQEEDFRVTCKDIQRIPSLPPSTQTLKLIETHLRTIPSHAFSNLPNISRIYVSIDVTLQQLESHSFYNLSKVTHIEIRNTRNLTYIDPDALKELPLLKFLGIFNTGLKMFPDLTKVYSTDIFFILEITDNPYMTSIPVNAFQGLCNETLTLKLYNNGFTSVQGYAFNGTKLDAVYLNKNKYLTVIDKDAFGGVYSGPSLLDVSQTSVTALPSKGLEHLKELIARNTWTLKKLPLSLSFLHLTRADLSYPSHCCAFKNQKKIRGILESLMCNESSMQSLRQRKSVNALNSPLHQEYEENLGDSIVGYKEKSKFQDTHNNAHYYVFFEEQEDEIIGFGQELKNPQEETLQAFDSHYDYTICGDSEDMVCTPKSDEFNPCEDIMGYKFLRIVVWFVSLLALLGNVFVLLILLTSHYKLNVPRFLMCNLAFADFCMGMYLLLIASVDLYTHSEYYNHAIDWQTGPGCNTAGFFTVFASELSVYTLTVITLERWYAITFAMRLDRKIRLRHACAIMVGGWVCCFLLALLPLVGISSYAKVSICLPMDTETPLALAYIVFVLTLNIVAFVIVCCCYVKIYITVRNPQYNPGDKDTKIAKRMAVLIFTDFICMAPISFYALSAILNKPLITVSNSKILLVLFYPLNSCANPFLYAIFTKAFQRDVFILLSKFGICKRQAQAYRGQRVPPKNSTDIQVQKVTHEMRQGLHNMEDVYELIENSHLTPKKQGQISEEYMQTVL

SEQ ID NO: 13780 - protein, 764 aa, Homo sapiens; identical to SEQ ID NO: 13779

SEQ ID NO: 13781 - protein, 253 aa, Homo sapiens
MRPADLLQLVLLLDLPRDLGGMGCSSPPCECHQEEDFRVTCKDIQRIPSLPPSTQTLKLIETHLRTIPSHAFSNLPNISRIYVSIDVTLQQLESHSFYNLSKVTHIEIRNTRNLTYIDPDALKELPLLKFLGIFNTGLKMFPDLTKVYSTDIFFILEITDNPYMTSIPVNAFQGLCNETLTLKLYNNGFTSVQGYAFNGTKLDAVYLNKNKYLTVIDKDAFGGVYSGPSLLLPLGRKSLSFETQKAPRSSMPS

SEQ ID NO: 13782 - protein, 274 aa, Homo sapiens
MRPADLLQLVLLLDLPRDLGGMGCSSPPCECHQEEDFRVTCKDIQRIPSLPPSTQTLKLIETHLRTIPSHAFSNLPNISRIYVSIDVTLQQLESHSFYNLSKVTHIEIRNTRNLTYIDPDALKELPLLKFLGIFNTGLKMFPDLTKVYSTDIFFILEITDNPYMTSIPVNAFQGLCNETLTLKLYNNGFTSVQGYAFNGTKLDAVYLNKNKYLTVIDKDAFGGVYSGPSLLVENVAVSGKGFCKSLFSWLYRLPLGRKSLSFETQKAPRSSMPS

SEQ ID NO: 13783 - protein, 112 aa, Homo sapiens
MRPADLLQLVLLLDLPRDLGGMGCSSPPCECHQEEDFRVTCKDIQRIPSLPPSTQTLKLIETHLRTIPSHAFSNLPNISRIYVSIDVTLQQLESHSFYNLSKVTHITDTDAL

SEQ ID NO: 13784 - protein, 89 aa, Homo sapiens
MRPADLLQLVLLLDLPRDLGGMGCSSPPCECHQEEDFRVTCKDIQRIPSLPPSTQTLYWRRERKKVWELEIKFNIEGDILNPSQEERKS

SEQ ID NO: 13785 - protein, 399 aa, Homo sapiens
  VARIANT 1: note = misc_feature - Xaa can be any naturally occurring amino acid
XGQELKNPQEETLQAFDSHYDYTICGDSEDMVCTPKSDEFNPCEDIMGYKFLRIVVWFVSLLALLGNVFVLLILLTSHYKLNVPRFLMCNLAFADFCMGMYLLLIASVDLYTHSEYYNHAIDWQTGPGCNTAGFFTVFASELSVYTLTVITLERWYAITFAMRLDRKIRLRHACAIMVGGWVCCFLLALLPLVGISSYAKVSICLPMDTETPLALAYIVFVLTLNIVAFVIVCCCYVKIYITVRNPQYNPGDKDTKIAKRMAVLIFTDFICMAPISFYALSAILNKPLITVSNSKILLVLFYPLNSCANPFLYAIFTKAFQRDVFILLSKFGICKRQAQAYRGQRVPPKNSTDIQVQKVTHEMRQGLHNMEDVYELIENSHLTPKKQGQISEEYMQTVL

SEQ ID NO: 13786 - protein, 105 aa, Homo sapiens
MPWPLLLLLAVSGAQTTRPCFPGCQCEVETFGLFDSFSLTRVDCSGLGPHIMPVPIPLDTAHLDLSSNRLEMVNESVLAGPGYTTLAGLDLSHNLLTSISPTAFS

SEQ ID NO: 13787 - protein, 150 aa, Homo sapiens
MPWPLLLLLAVSGAQTTRPCFPGCQCEVETFGLFDSFSLTRVDCSGLGPHIMPVPIPLDTAHLDLSSNRLEMVNESVLAGPGYTTLAGLDLSHNLLTSISPTAFSRLRYLESLDLSHNGLTALPAESFTSSPLSDVNLSHNQLREVSVSA

SEQ ID NO: 13788 - protein, 353 aa, Homo sapiens
MPWPLLLLLAVSGAQTTRPCFPGCQCEVETFGLFDSFSLTRVDCSGLGPHIMPVPIPLDTAHLDLSSNRLEMVNESVLAGPGYTTLAGLDLSHNLLTSISPTAFSRLRYLESLDLSHNGLTALPAESFTSSPLSDVNLSHNQLREVSVSAFTTHSQGRALHVDLSHNLIHRLVPHPTRAGLPAPTIQSLNLAWNRLHAVPNLRDLPLRYLSLDGNPLAVIGPGAFAGLGGLTHLSLASLQRLPELAPSGFRELPGLQVLDLSGNPKLNWAGAEVFSGLSSLQELDLSGTNLVPLPEALLLHLPALQSVSVGQDVRCRRLVREGTYPRRPGSSPKVALHCVDTRDSAARGPTIL

SEQ ID NO: 13789 - protein, 353 aa, Homo sapiens; identical to SEQ ID NO: 13788

SEQ ID NO: 13790 - protein, 353 aa, Homo sapiens; identical to SEQ ID NO: 13788

SEQ ID NO: 13791 - protein, 63 aa, Homo sapiens
MFAMKTKAALAIWCPGYSETQINATQAMKKRRKRKVTTNKCLEQVSQLQGLWRRFNRPLLKQQ

SEQ ID NO: 13792 - protein, 159 aa, Homo sapiens
MFPFALLYVLSVSFRKIFILQLVGLVLTYDFTNCDFEKIKAAYLSTISKDLITYMSGTKSTEFNNTVSCSNRPHCLTEIQSLTFNPTAGCASLAKEMFAMKTKAALAIWCPGYSETQINATQAMKKRRKRKVTTNKCLEQVSQLQGLWRRFNRPLLKQQ

SEQ ID NO: 13793 - protein, 159 aa, Homo sapiens
MKCLGQSKKEEVSFRKIFILQLVGLVLTYDFTNCDFEKIKAAYLSTISKDLITYMSGTKSTEFNNTVSCSNRPHCLTEIQSLTFNPTAGCASLAKEMFAMKTKAALAIWCPGYSETQINATQAMKKRRKRKVTTNKCLEQVSQLQGLWRRFNRPLLKQQ

SEQ ID NO: 13794 - protein, 189 aa, Homo sapiens
MGQCGITSSKTVLVFLNLIFWFVIILLLVFVTEVVVVVLGYVYRAKVENEVDRSIQKVYKTYNGTNPDAASRAIDYVQRQLHCCGIHNYSDWENTDWFKETKNQSVPLSCCRETASNCNGSLAHPSDLYAEGCEALVVKKLQEIMMHVIWAALAFAAIQLLGMLCACIVLCRRSRDPAYELLITGGTYA

SEQ ID NO: 13795 - protein, 253 aa, Homo sapiens
MGQCGITSSKTVLVFLNLIFWGAAGILCYVGAYVFITYDDYDHFFEDVYTLIPAVVIIAVGALLFIIGLIGCCATIRESRCGLATFVIILLLVFVTEVVVVVLGYVYRAKVENEVDRSIQKVYKTYNGTNPDAASRAIDYVQRQLHCCGIHNYSDWENTDWFKETKNQSVPLSCCRETASNCNGSLAHPSDLYAEGCEALVVKKLQEIMMHVIWAALAFAAIQLLGMLCACIVLCRRSRDPAYELLITGGTYA

SEQ ID NO: 13796 - protein, 228 aa, Homo sapiens
MGQCGITSSKTVLVFLNLIFWGAAGILCYVGAYVFITYDDYDHFFEDVYTLIPAVVIIAVGALLFIIGLIGCCATIRESRCGLATVENEVDRSIQKVYKTYNGTNPDAASRAIDYVQRQLHCCGIHNYSDWENTDWFKETKNQSVPLSCCRETASNCNGSLAHPSDLYAEGCEALVVKKLQEIMMHVIWAALAFAAIQLLGMLCACIVLCRRSRDPAYELLITGGTYA

SEQ ID NO: 13797 - protein, 164 aa, Homo sapiens
MGQCGITSSKTVLVFLNLIFWVENEVDRSIQKVYKTYNGTNPDAASRAIDYVQRQLHCCGIHNYSDWENTDWFKETKNQSVPLSCCRETASNCNGSLAHPSDLYAEGCEALVVKKLQEIMMHVIWAALAFAAIQLLGMLCACIVLCRRSRDPAYELLITGGTYA

SEQ ID NO: 13798 - protein, 45 aa, Homo sapiens
MMHVIWAALAFAAIQLLGMLCACIVLCRRSRDPAYELLITGGTYA

SEQ ID NO: 13799 - protein, 45 aa, Homo sapiens; identical to SEQ ID NO: 13798

SEQ ID NO: 13800 - protein, 72 aa, Homo sapiens
MIILGLVFIFQFVISCSCLAINRSKQTDVINASWWVMSNKTRDELERSFDCCGLFNLTTLYQQDYDFCTAIC

SEQ ID NO: 13801 - protein, 86 aa, Homo sapiens
MIILGLVFIFQFVISCSCLAINRSKQTDVINASWWVMSNKTRDELERSFDCCGLFNLTTLYQQDYDFCTAICKSQSPTCQMCGEKF

SEQ ID NO: 13802 - protein, 126 aa, Homo sapiens
MVCGGFACSKNALCALNVVYMLVSLLLIGVAAWGKGLGLVSSIHIIGGVIAVGVFLLLIAVAGLICKSQSPTCQMCGEKFLKHSDEALKILGGVGLFFSFTEILGVWLAMRFRNQKDPRANPSAFL

SEQ ID NO: 13803 - protein, 128 aa, Homo sapiens
MVCGGFACSKNALCALNVVYMLVSLLLIGVAAWGKGLGLVSSIHIIGGVIAVGVFLLLIAVAGLVGAVNHHQVLLFFYMIILGLVFIFQFVISCSCLAINRSKQIILRCTASGLLGYLLPLGCLVNFP

SEQ ID NO: 13804 - protein, 113 aa, Homo sapiens
MVCGGFACSKNALCALNVVYMLVSLLLIGVAAWGKGLGLVSSIHIIGGVIAVGVFLLLIAVAGLVGAVNHHQVLLFFYMIILGLVFIFQFVISCSCLAINRSKQMSSMLLGGS

SEQ ID NO: 13805 - protein, 210 aa, Homo sapiens
MVCGGFACSKNALCALNVVYMLVSLLLIGVAAWGKGLGLVSSIHIIGGVIAVGVFLLLIAVAGLVGAVNHHQVLLFFYMIILGLVFIFQFVISCSCLAINRSKQTDVINASWWVMSNKTRDELERSFDCCGLFNLTTLYQQDYDFCTAICKSQSPTCQMCGEKFLKHSDEALKILGGVGLFFSFTEILGVWLAMRFRNQKDPRANPSAFL

SEQ ID NO: 13806 - protein, 127 aa, Homo sapiens
MVCGGFACSKNALCALNVVYMTDVINASWWVMSNKTRDELERSFDCCGLFNLTTLYQQDYDFCTAICKSQSPTCQMCGEKFLKHSDEALKILGGVGLFFSFTEILGVWLAMRFRNQKDPRANPSAFL

SEQ ID NO: 13807 - protein, 38 aa, Homo sapiens
MSALLSLCFVLPLAAPGHGTQGWEPCTACSSLKAWAEC

SEQ ID NO: 13808 - protein, 669 aa, Homo sapiens
MSALLSLCFVLPLAAPGHGTQGWEPCTDLRPLDILAEVVPSDGATSGIRIVQVHGARGLQLSVAAPRTMSFPASRIFSQCDLFPEEFSIVVTLRVPNLPPKRNEYLLTVVAEESDLLLLGLRLSPAQLHFLFLREDTAGAWQTRVSFRSPALVDGRWHTLVLAVSAGVFSLTTDCGLPVDIMADVPFPATLSVKGARFFVGSRRRAKGLFMGLVRQLVLLPGSDATPRLCPSRNAPLAVLSIPRVLQALTGKPEDNEVLKYPYETNIRVTLGPQPPCTEVEDAQFWFDASRKGLYLCVGNEWVSVLAAKERLDYVEEHQNLSTNSETLGIEVFRIPQVGLFVATANRKATSAVYKWTEEKFVSYQNIPTHQAQAWRHFTIGKKIFLAVANFEPDEKGQEFSVIYKWSHRKLKFTPYQSIATHSARDWEAFEVDGEHFLAVANHREGDNHNIDSVIYKWNPATRLFEANQTIATSGAYDWEFFSVGPYSFLVVANTFNGTSTKVHSHLYIRLLGSFQLFQSFPTFGAADWEVFQIGERIFLAVANSHSYDVEMQVQNDSYVINSVIYELNVTAQAFVKFQDILTCSALDWEFFSVGEDYFLVVANSFDGRTFSVNSIIYRWQGYEGFVAVHSLPTVGCRDWEAFSTTAGAYLIYSSAKEPLSRVLRLRTR

SEQ ID NO: 13809 - protein, 669 aa, Homo sapiens; identical to SEQ ID NO: 13808

SEQ ID NO: 13810 - protein, 601 aa, Homo sapiens
MSFPASRIFSQCDLFPEEFSIVVTLRVPNLPPKRNEYLLTVVAEESDLLLLGLRLSPAQLHFLFLREDTAGAWQTRVSFRSPALVDGRWHTLVLAVSAGVFSLTTDCGLPVDIMADVPFPATLSVKGARFFVGSRRRAKGLFMGLVRQLVLLPGSDATPRLCPSRNAPLAVLSIPRVLQALTGKPEDNEVLKYPYETNIRVTLGPQPPCTEVEDAQFWFDASRKGLYLCVGNEWVSVLAAKERLDYVEEHQNLSTNSETLGIEVFRIPQVGLFVATANRKATSAVYKWTEEKFVSYQNIPTHQAQAWRHFTIGKKIFLAVANFEPDEKGQEFSVIYKWSHRKLKFTPYQSIATHSARDWEAFEVDGEHFLAVANHREGDNHNIDSVIYKWNPATRLFEANQTIATSGAYDWEFFSVGPYSFLVVANTFNGTSTKVHSHLYIRLLGSFQLFQSFPTFGAADWEVFQIGERIFLAVANSHSYDVEMQVQNDSYVINSVIYELNVTAQAFVKFQDILTCSALDWEFFSVGEDYFLVVANSFDGRTFSVNSIIYRWQGYEGFVAVHSLPTVGCRDWEAFSTTAGAYLIYSSAKEPLSRVLRLRTR

SEQ ID NO: 13811 - protein, 123 aa, Homo sapiens
DIAVKWRRIADPDQPVLWLDQMPARSLSRGFNNHINLIRGQVINMRYLEYFEKILHFIKDRILVYHGANNPKGLLEVREALEKVHKVEDLLPIMKVTLASEWQSMFLEEKKTNSTFLKRTQNY

SEQ ID NO: 13812 - protein, 166 aa, Homo sapiens
MAPAGCCCCCCFWGGAVAAAGAARRVLLLLLLGVLSAGLRPGALATEHYSPLSLLKQELQHRQQQEAPAGGGGCSPQSGDWGDQYSAECGAIAYVLIGSGLYDEAIRHFSTMLQILSPLGRINEAVNDLTKAIQLQPSARLYRHRGTLYFISEDYATAHEDFQQSL

SEQ ID NO: 13813 - protein, 860 aa, Homo sapiens
MAPAGCCCCCCFWGGAVAAAGAARRVLLLLLLGVLSAGLRPGALATEHYSPLSLLKQELQHRQQQEAPAGGGGCSPQSGDWGDQYSAECGESSFLNFHDSDCEPKGSSPCDSLLSLNTEKILSQAKSIAEQKRFPFATDNDSTNEELAIAYVLIGSGLYDEAIRHFSTMLQEEPDLVSAIYGRGIAYGKKGLHDIKNAELALFELSRVITLEPDRPEVFEQRAEILSPLGRINEAVNDLTKAIQLQPSARLYRHRGTLYFISEDYATAHEDFQQSLELNKNQPIAMLYKGLTFFHRGLLKEAIESFKEALKQKVDFIDAYKSLGQAYRELGNFEAATESFQKALLLNQNHVQTLQLRGMMLYHHGSLQEALKNFKRCLQLEPYNEVCQYMKGLSHVAMGQFYEGIKAQTKVMLNDPLPGQKASPEYLKVKYLREYSRYLHAHLDTPLTEYNIDVDLPGSFKDHWAKNLPFLIEDYEEQPGLQPHIKDVLHQNFESYKPEVQELICVADRLGSLMQYETPGFLPNKRIHRAMGLAALEVMQAVQRTWTNSKVRMNGKTRLMQWRDMFDIAVKWRRIADPDQPVLWLDQMPARSLSRGFNNHINLIRGQVINMRYLEYFEKILHFIKDRILVYHGANNPKGLLEVREALEKVHKVEDLLPIMKQFNTKTKDGFTVNTKVPSLKDQGKEYDGFTITITGDKVGNILFSVETQTTEERTQLYHAEIDALYKDLTAKGKVLILSSEFGEADAVCNLILSLVYYFYNLMPLSRGSSVIAYSVIVGALMASGKEVAGKIPKGKLVDFEAMTAPGSEAFSKVAKSWMNLKSISPSYKTLPSVSETFPTLRSMIEVLNTDSSPRCLKKL

SEQ ID NO: 13814 - protein, 806 aa, Homo sapiens
MAPAGCCCCCCFWGGAVAAAGAARRVLLLLLLGVLSAGLRPGALATEHYSPLSLLKQELQHRQQQEAPAGGGGCSPQSGDWGDQYSAECGESSFLNFHDSDCEPKGSSPCDSLLSLNTEKILSQAKSIAEQKRFPFATDNDSTNEELAIAYVLIGSGLYDEAIRHFSTMLQILSPLGRINEAVNDLTKAIQLQPSARLYRHRGTLYFISEDYATAHEDFQQSLELNKNQPIAMLYKGLTFFHRGLLKEAIESFKEALKQKVDFIDAYKSLGQAYRELGNFEAATESFQKALLLNQNHVQTLQLRGMMLYHHGSLQEALKNFKRCLQLEPYNEVCQYMKGLSHVAMGQFYEGIKAQTKVMLNDPLPGQKASPEYLKVKYLREYSRYLHAHLDTPLTEYNIDVDLPGSFKDHWAKNLPFLIEDYEEQPGLQPHIKDVLHQNFESYKPEVQELICVADRLGSLMQYETPGFLPNKRIHRAMGLAALEVMQAVQRTWTNSKVRMNGKTRLMQWRDMFDIAVKWRRIADPDQPVLWLDQMPARSLSRGFNNHINLIRGQVINMRYLEYFEKILHFIKDRILVYHGANNPKGLLEVREALEKVHKVEDLLPIMKFNTKTKDGFTVNTKVPSLKDQGKEYDGFTITITGDKVGNILFSVETQTTEERTQLYHAEIDALYKDLTAKGKVLILSSEFGEADAVCNLILSLVYYFYNLMPLSRGSSVIAYSVIVGALMASGKEVAGKIPKGKLVDFEAMTAPGSEAFSKVAKSWMNLKSISPSYKTLPSVSETFPTLRSMIEVLNTDSSPRCLKKL

SEQ ID NO: 13815 - protein, 255 aa, Homo sapiens
MAPAGCCCCCCFWGGAVAAAGAARRVLLLLLLGVLSAGLRPGALATEHYSPLSLLKQELQHRQQQEAPAGGGGCSPQSGDWGDQYSAECGESSFLNFHDSDCEPKGSSPCDSLLSLNTEKILSQAKSIAEQKRFPFATDNDSTNEELAIAYVLIGSGLYDEAIRHFSTMLQILSPLGRINEAVNDLTKAIQLQPSARLYRHRGTLYFISENEVESCAVIRQEPRNQRLLKAEEKSDFEELWRPSMLKLLNPSKKL

SEQ ID NO: 13816 - protein, 150 aa, Homo sapiens
MAPAGCCCCCCFWGGAVAAAGAARRVLLLLLLGVLSAGLRPGALATEHYSPLSLLKQELQHRQQQEAPAGGGGCSPQSGDWGDQYSAECGESSFLNFHDSDCEPKGSSPCDSLLSLNTEKILSQAKSIAEQKRFPFATDNDSTNEELDIY

SEQ ID NO: 13817 - protein, 186 aa, Homo sapiens
  VARIANT 1: note = misc_feature - Xaa can be any naturally occurring amino acid
XWGGAVAAAGAARRVLLLLLLGVLSAGLRPGALATEHYSPLSLLKQELQHRQQQEAPAGGGGCSPQSGDWGDQYSAECGESSFLNFHDSDCEPKGSSPCDSLLSLNTEKILSQAKSIAEQKRFPFATDNDSTNEELAIAYVLIGSGLYDEAIRHFSTMLQEAIESFKEALKQKVDFIDAYKSLGQA

SEQ ID NO: 13818 - protein, 149 aa, Homo sapiens
GRGGSMFRLLSWSLGRGFLRAAGRRCRGCSARLLPGLAGGPGPEVQVPPSRVAPHGRGPGLLPLLAALAWFSRPAAAEEEEQQGADGAAAEDGADEAEAEIIQLLKRAKLSIMKDEPEEAELILHDALRLAYQTDNKKAITYTYDLINW

SEQ ID NO: 13819 - protein, 380 aa, Homo sapiens
MFRLLSWSLGRGFLRAAGRRCRGCSARLLPGLAGGPGPEVQVPPSRVAPHGRGPGLLPLLAALAWFSRPAAAEEEEQQGADGAAAEDGADEAEAEIIQLLKRAKLSIMKDEPEEAELILHDALRLAYQTDNKKAITYTYDLMANLAFIRGQLENAEQLFKATMSYLLGGGMKQEDNAIIEISLKLASIYAAQNRQEFAVAGYEFCISTLEEKIEREKELAEDIMSVEEKANTHLLLGMCLDACARYLLFSKQPSQAQRMYEKALQISEEIQGERHPQTIVLMSDLATTLDAQGRFDEAYIYMQRASDLARQINHPELHMVLSNLAAVLMHRERYTQAKEIYQEALKQAKLKKDEISVQHIREELAELSKKSRPLTNSVKL

SEQ ID NO: 13820 - protein, 99 aa, Homo sapiens
SKQPSQAQRMYEKALQISEEIQGERHPQTIVLMSDLATTLDAQGRFDEAYIYMQRASDLARQINHPELHMVLSNLAAVLMHRAATTVLGPSKEAKATLG

SEQ ID NO: 13821 - protein, 63 aa, Homo sapiens
  VARIANT 1: note = misc_feature - Xaa can be any naturally occurring amino acid
XGERHPQTIVLMSDLATTLDAQGRFDEAYIYMQRASDLARQINHPELHMVLSNLAAVLMHRGR

SEQ ID NO: 13822 - protein, 166 aa, Homo sapiens
  VARIANT 1: note = misc_feature - Xaa can be any naturally occurring amino acid
XQERVWPAVRRGRGGSMFRLLSWSLGRGFLRAAGRRCRGCSARLLPGLAGGPGPEVQVPPSRVAPHGRGPGLLPLLAALAWFSRPAAAEEEEQQGADGAAAEDGADEAEAEIIQLLKRAKVRRLRALRPAERGSLCERGLGVAAHYSLRLAEEWMEAPRVKLPRMS

SEQ ID NO: 13823 - protein, 172 aa, Homo sapiens
  VARIANT 1: note = misc_feature - Xaa can be any naturally occurring amino acid
XRRVVGGQERVWPAVRRGRGGSMFRLLSWSLGRGFLRAAGRRCRGCSARLLPGLAGGPGPEVQVPPSRVAPHGRGPGLLPLLAALAWFSRPAAAEEEEQQGADGAAAEDGADEAEAEIIQLLKRAKVRRLRALRPAERGSLCERGLGVAAHYSLRLAEEWMEAPRVKLPRMS

SEQ ID NO: 13824 - protein, 239 aa, Homo sapiens
MQRGALSPVLMLSAAPEPPPRPPPALSPPGSGPGSGSRHGSARPGPTPEPSGSLGAALDSSLRAAVAFKAEGQRCYREKKFREAIGKYHRALLQLKAAQGARPSGLPAPAPGPTSSPGPARLSEEQRRLVESTEVECYDSLTACLLQSELVNYERVREYCLKVLEKQQGNFKATYRAGIAFYHLGDYARALRYLQEARSREPTDTNVLRYIQLTQLKMNRCSLQREDSGAGSQTRDVIG

SEQ ID NO: 13825 - protein, 800 aa, Homo sapiens
MAAAASVTGRVTWAASPMRSLGLGRRLSLPGPRLDAVTAAVNPSLSDHGNGLGRGTRGSGCSGGSLVADWGGGAAAAAAVALALAPALSTMRRGSSESELAARWEAEAVAAAKAAAKAEAEATAETVAEQVRVDAGAAGEPECKAGEEQPKVLAPAPAQPSAAEEGNTQVLQRPPPTLPPSKPKPVQGLCPHGKPRDKGRSCKRSSGHGSGENGSQRPVTVDSSKARTSLDALKISIRQLKWKEFPFGRRLPCDIYWHGVSFHDNDIFSGQVNKFPGMTEMVRKITLSRAVRTMQNLFPEEYNFYPRSWILPDEFQLFVAQVQMVKDDDPSWKPTFIVKPDGGCQGDGIYLIKDPSDIRLAGTLQSRPAVVQEYICKPLLIDKLKFDIRLYVLLKSLDPLEIYIAKDGLSRFCTEPYQEPTPKNLHRIFMHLTNYSLNIHSGNFIHSDSASTGSKRTFSSILCRLSSKGVDIKKVWSDIISVVIKTVIALTPELKVFYQSDIPTGRPGPTCFQILGFDILLMKNLKPILLEVNANPSMRIEHEHELSPGVFENVPSLVDEEVKVAVIRDTLRLMDPLKKKRENQSQQLEKPFAGKEDALDGELTSAPDCNANPEAHLPSICLKQVFPKYAKQFNYLRLVDRMANLFIRFLGIKGTMKLGPTGFRTFIRSCKLSSSSLSMAAVDILYIDITRRWNSMTLDQRDSGMCLQAFVEAFFFLAQRKFKMLPLHEQVASLIDLCEYHLSLLDEKRLVCGRGVPSGGRPPHRGPPQEPSPSAQPAGDNPPPRTSCANKLSHPRHTLS

SEQ ID NO: 13826 - protein, 538 aa, Homo sapiens
MAAAASVTGRVTWAASPMRSLGLGRRLSLPGPRLDAVTAAVNPSLSDHGNGLGRGTRGSGCSGGSLVADWGGGAAAAAAVALALAPALSTMRRGSSESELAARWEAEAVAAAKAAAKAEAEATAETVAEQVRVDAGAAGEPECKAGEEQPKVLAPAPAQPSAAEEGNTQVLQRPPPTLPPSKPKPVQGLCPHGKPRDKGRSCKRSSGHGSGENGSQRPVTVDSSKARTSLDALKISIRQLKWKEFPFGRRLPCDIYWHGVSFHDNDIFSGQVNKFPGMTEMVRKITLSRAVRTMQNLFPEEYNFYPRSWILPDEFQLFVAQVQMVKDDDPSWKPTFIVKPDGGCQGDGIYLIKDPSDIRLAGTLQSRPAVVQEYICKPLLIDKLKFDIRLYVLLKSLDPLEIYIAKDGLSRFCTEPYQEPTPKNLHRIFMHLTNYSLNIHSGNFIHSDSASTGSKRTFSSILCRLSSKGVDIKKVWSDIISVVIKTVIALTPELKVFYQSDIPTGRPGPTCFQVTIASSQPAFPALTGLKRALWLRVG

SEQ ID NO: 13827 - protein, 239 aa, Homo sapiens
  VARIANT 1: note = misc_feature - Xaa can be any naturally occurring amino acid
XSDHGNGLGRGTRGSGCSGGSLVADWGGGAAAAAAVALALAPALSTMRRGSSESELAARWEAEAVAAAKAAAKAEAEATAETVAEQVRVDAGAAGEPECKAGEEQPKVLAPAPAQPSAAEEGNTQVLQRPPPTLPPSKPKPVQGLCPHGKPRDKGRSCKRSSGHGSGENGSQRPVTVDSSKARTSLDALKISIRQLKWKEFPFGRRLPCDIYWHGVSFHDNDIFSGQVNKFPGSNGERR

SEQ ID NO: 13828 - protein, 122 aa, Homo sapiens
  VARIANT 1: note = misc_feature - Xaa can be any naturally occurring amino acid
XSSGHGSGENGSQRPVTVDSSKARTSLDALKISIRQLKWKEFPFGRRLPCDIYWHGVSFHDNDIFSGQVNKFPGMTEMVRKITLSRAVRTMQNLFPEESTSANLSLSTSSSLIFVCMSYSSP

SEQ ID NO: 13829 - protein, 66 aa, Homo sapiens
  VARIANT 1: note = misc_feature - Xaa can be any naturally occurring amino acid
XVTVDSSKARTSLDALKISIRQLKWKEFPFGRRLPCDIYWHGVSFHDNDIFSGQVNKFPGSNGERR

SEQ ID NO: 13830 - protein, 185 aa, Homo sapiens
MASHRLLLLCLAGLVFVSEAGPTGTGESKCPLMVKVLDAVRGSPAINVAVHVFRKAADDTWEPFASGKTSESGELHGLTTEEEFVEGIYKVEIDTKSYWKALGISPFHEHAEVSIQTFESFETDGCHGNRIQTCSSWSELQTSGFHQNVDVVFTANDSGPRRYTIAALLSPYSYSTTAVVTNPKE

SEQ ID NO: 13831 - protein, 147 aa, Homo sapiens
MASHRLLLLCLAGLVFVSEAGPTGTGESKCPLMVKVLDAVRGSPAINVAVHVFRKAADDTWEPFASGKTSESGELHGLTTEEEFVEGIYKVEIDTKSYWKALGISPFHEHAEVVFTANDSGPRRYTIAALLSPYSYSTTAVVTNPKE

SEQ ID NO: 13832 - protein, 139 aa, Homo sapiens
MASHRLLLLCLAGLVFVSEAGPTGTGESKCPLMVKVLDAVRGSPAINVAVHVFRKAADDTWEPFASGKTSESGELHGLTTEEEFVEGIYKVEIDTKSYWKALGISPFHEHAEVVFTANDSGPRRYYSYSTTAVVTNPKE

SEQ ID NO: 13833 - protein, 75 aa, Homo sapiens
MKLHYVAVLTLAILMFLTWLPESLSCNKALCASDVSKCLIQELCQCRPGEGNCSCCKECMLCLGALWDECCDCVD

SEQ ID NO: 13834 - protein, 223 aa, Homo sapiens
MKLHYVAVLTLAILMFLTWLPESLSCNKALCASDVSKCLIQELCQCRPGEGNCSCCKECMLCLGALWDECCDCVGMCNPRNYSDTPPTSKSTVEELHEPIPSLFRALTEGDTQLNWNIVSFPVAEELSHHENLVSFLETVNQPHHQNVSVPSNNVHAPYSSDKEHMCTVVYFDDCMSIHQCKISCESMGASKYRWFHNACCECIGPECIDYGSKTVKCMNCMF

SEQ ID NO: 13835 - protein, 184 aa, Homo sapiens
MKLHYVAVLTLAILMFLTWLPESLSCNKALCASDVSKCLIQELCQCRPGEGNCSCCKECMLCLGALWDECCDCVGMCNPRNYSDTPPTSKSTVEELHEPIPSLFRALTEGDTQLNWNIVSFPVAEELSHHENLVSFLETVNQPHHQNVSVPSNNVHAPYSSDKGNCQQLTFSIPPPHVVCPCNL

SEQ ID NO: 13836 - protein, 56 aa, Homo sapiens
METRPRLGATCLLGFSFLLLVISSDGHNGLGKGFGDHIHWRTLEDGKKEAAARIHV

SEQ ID NO: 13837 - protein, 55 aa, Homo sapiens
METRPRLGATCLLGFSFLLLVISSDGHNGLGKGFGDHIHWRTLEDGKKEAAARPY

SEQ ID NO: 13838 - protein, 172 aa, Homo sapiens
METRPRLGATCLLGFSFLLLVISSDGHNGLGKGFGDHIHWRTLEDGKKEAAASGLPLMVIIHKSWCGACKALKPKFAESTEISELSHNFVMVNLEDEEEPKDEDFSPDGGYIPRILFLDPSGKVHPEIINENGNPSYKYFYVSAEQVVQGMKEAQERLTGDAFRKKHLEDEL

SEQ ID NO: 13839 - protein, 179 aa, Homo sapiens
MKNRRETRETPGNPQLAVAEESGRLWSEEQPAHPLQVGAVYLGEEELLHDPMGQDRAAEEANAVLGLDTQGDHMVMLSVIPGEAEDKVSSEPSGVTCGAGGAEDSRCNVRESLFSLDGAGAHFPDREEEYYTEPEVAESDAAPTEDSNNTESLKSPKVNCEERNITGLENFTLKILNMS

SEQ ID NO: 13840 - protein, 44 aa, Homo sapiens
MVPAAGRRPPRVMRLLGWCCRGKWSLMVRGAACSPSPGGGCVPG

SEQ ID NO: 13841 - protein, 155 aa, Homo sapiens
MVPAAGRRPPRVMRLLGWWQVLLWVLGLPVRGVEEESGRLWSEEQPAHPLQVGAVYLGEEELLHDPMGQDRAAEEANAVLGLDTQGDHMVMLSVIPGEAEDKVSSEPSGVTCGAGGAEDSRCNVRESLFSLDGAGAHFPDREEEYYTEPEVAESD

SEQ ID NO: 13842 - protein, 44 aa, Homo sapiens
MVPAAGRRPPRVMRLLGWWQVLLWVLGLPVRGVEGPYGFSEPKR

SEQ ID NO: 13843 - protein, 360 aa, Homo sapiens
MVPAAGRRPPRVMRLLGWWQVLLWVLGLPVRGVEVAEESGRLWSEEQPAHPLQVGAVYLGEEELLHDPMGQDRAAEEANAVLGLDTQGDHMVMLSVIPGEAEDKVSSEPSGVTCGAGGAEDSRCNVRESLFSLDGAGAHFPDREEEYYTEPEVAESDAAPTEDSNNTESLKSPKVNCEERNITGLENFTLKILNMSQDLMDFLNPNGSDCTLVLFYTPWCRFSASLAPHFNSLPRAFPALHFLALDASQHSSLSTRFGTVAVPNILLFQGAKPMARFNHTDRTLETLKIFIFNQTGIEAKKNVVVTQADQIGPLPSTLIKSVDWLLVFSLFFLISFIMYATIRTESIRWLIPGQEQEHVE

SEQ ID NO: 13844 - protein, 344 aa, Homo sapiens
  VARIANT 1: note = misc_feature - Xaa can be any naturally occurring amino acid
XFPGVSWMEAGQQRVVEKVAEESGRLWSEEQPAHPLQVGAVYLGEEELLHDPMGQDRAAEEANAVLGLDTQGDHMVMLSVIPGEAEDKVSSEPSGVTCGAGGAEDSRCNVRESLFSLDGAGAHFPDREEEYYTEPEVAESDAAPTEDSNNTESLKSPKVNCEERNITGLENFTLKILNMSQDLMDFLNPNGSDCTLVLFYTPWCRFSASLAPHFNSLPRAFPALHFLALDASQHSSLSTRFGTVAVPNILLFQGAKPMARFNHTDRTLETLKIFIFNQTGIEAKKNVVVTQADQIGPLPSTLIKSVDWLLVFSLFFLISFIMYATIRTESIRWLIPGQEQEHVE

SEQ ID NO: 13845 - protein, 115 aa, Homo sapiens
  VARIANT 1: note = misc_feature - Xaa can be any naturally occurring amino acid
XLALDASQHSRFGTVAVPNILLFQGAKPMARFNHTDRTLETLKIFIFNQTGIEAKKNVVVTQADQIGPLPSTLIKSVDWLLVFSLFFLISFIMYATIRTESIRWLIPGQEQEHVE

SEQ ID NO: 13846 - protein, 324 aa, Homo sapiens
MEDAKVYVAKVDCTAHSDVCSAQGVRGYPTLKLFKPGQEAVKYQGPRDFQTLENWMLQTLNEEPVTPEPEVEPPSAPELKQGLYELSASNFELHVAQGDHFIKFFAPWCGHCKALAPTWEQLALGLEHSETVKIGKVDCTQHYELCSGNQVRGYPTLLWFRDGKKVDQYKGKRDLESLREYVESQLQRTETGATETVTPSEAPVLAAEPEADKGTVLALTENNFDDTIAEGITFIKFYAPWCGHCKTLAPTWEELSKKEFPGLAGVKIAEVDCTAERNICSKYSVRGYPTLLLFRGGKKVSEHSGGRDLDSLHRFVLSQAKDEL

SEQ ID NO: 13847 - protein, 432 aa, Homo sapiens
MPARPGRLLPLLARPAALTALLLLLLGHGGGGRWGARAQEAAAAAADGPPAADGEDGQDPHSKHLYTADMFTHGIQSAAHFVMFFAPWCGHCQRLQPTWNDLGDKYNSMEDAKVYVAKVDCTAHSDVCSAQGVRGYPTLKLFKPGQEAVKYQGPRDFQTLENWMLQTLNEEPVTPEPEVEPPSAPELKQGLYELSASNFELHVAQGDHFIKFFAPWCGHCKALAPTWEQLALGLEHSETVKIGKVDCTQHYELCSGNQVRGYPTLLWFRDGKKVDQYKGKRDLESLREYVESQLQRTETGATETVTPSEAPVLAAEPEADKGTVLALTENNFDDTIAEGITFIKFYAPWCGHCKTLAPTWEELSKKEFPGLAGVKIAEVDCTAERNICSKYSVRGYPTLLLFRGGKKVSEHSGGRDLDSLHRFVLSQAKDEL

SEQ ID NO: 13848 - protein, 500 aa, Homo sapiens
MAAMAVALRGLGGRFRWRTQAVAGGVRGAARGAAAAQLGRKVAVVDYVEPSPQGTRWGLGGTCVNVGCIPKKLMHQAALLGGLIQDAPNYGWEVAQPVPHDWRKMAEAVQNHVKSLNWGHRVQLQDRKVKYFNIKASFVDEHTVCGVAKGGKEILLSADHIIIATGGRPRYPTHIEGALEYGITSDDIFWLKESPGKTLVVGASYVALECAGFLTGIGLDTTIMMRSIPLRGFDQQMSSMVIEHMASHGTRFLRGCAPSRVRRLPDGQLQVTWEDSTTGKEDTGTFDTVLWAIGRVPDTRSLNLEKAGVDTSPDTQKILVDSREATSVPHIYAIGDVVEGRPELTPIAIMAGRLLVQRLFGGSSDLMDYDNVPTTVFTPLEYGCVGLSEEEAVARHGQEHVEVYHAHYKPLEFTVAGRDASQCYVKMVCLREPPQLVLGLHFLGPNAGEVTQGFALGIKCGASYAQVMRTVGIHPTCSEEVVKLRISKRSGLDPTVTGCG

SEQ ID NO: 13849 - protein, 338 aa, Homo sapiens
MAAMAVALRGLGGRFRWRTQAVAGGVRGAARGAAAGQRDYDLLVVGGGSGGLACAKEAAQLGRKVAVVDYVEPSPQGTRWGLGGTCVNVGCIPKKLMHQAALLGGLIQDAPNYGWEVAQPVPHDWRKMAEAVQNHVKSLNWGHRVQLQDRKVKYFNIKASFVDEHTVCGVAKGGKEILLSADHIIIATGGRPRYPTHIEGALEYGITSDDIFWLKESPGKTLVVGASYVALECAGFLTGIGLDTTIMMRSIPLRGFDQQMSSMVIEHMASHGTRFLRGCAPSRVRRLPDGQLQVTWEDSTTGKEDTGTFDTVLWAIAPCISACLPTTVGHAGKNQRRD

SEQ ID NO: 13850 - protein, 523 aa, Homo sapiens
MAAMAVALRGLGGRFRWRTQAVAGGVRGAARGAAAGQRDYDLLVVGGGSGGLACAKEAAQLGRKVAVVDYVEPSPQGTRWGLGGTCVNVGCIPKKLMHQAALLGGLIQDAPNYGWEVAQPVPHDWRKMAEAVQNHVKSLNWGHRVQLQDRKVKYFNIKASFVDEHTVCGVAKGGKEILLSADHIIIATGGRPRYPTHIEGALEYGITSDDIFWLKESPGKTLVVGASYVALECAGFLTGIGLDTTIMMRSIPLRGFDQQMSSMVIEHMASHGTRFLRGCAPSRVRRLPDGQLQVTWEDSTTGKEDTGTFDTVLWAIGRVPDTRSLNLEKAGVDTSPDTQKILVDSREATSVPHIYAIGDVVEGRPELTPIAIMAGRLLVQRLFGGSSDLMDYDNVPTTVFTPLEYGCVGLSEEEAVARHGQEHVEVYHAHYKPLEFTVAGRDASQCYVKMVCLREPPQLVLGLHFLGPNAGEVTQGFALGIKCGASYAQVMRTVGIHPTCSEEVVKLRISKRSGLDPTVTGCG

SEQ ID NO: 13851 - protein, 463 aa, Homo sapiens
MAAMAVALRGLGGRFRWRTQAVAGGVRGAARGAAAGQRDYDLLVVGGGSGGLACAKEGTRWGLGGTCVNVGCIPKKLMHQAALLGGLIQDAPNYGWEVAQPVPHDWRKMAEAVQNHVKSLNWGHRVQLQDRKVKYFNIKASFVDEHTVCGVAKGGKEILLSADHIIIATGGRPRYPTHIEGALEYGITSDDIFWLKESPGKTLVVGASYVALECAGFLTGIGLDTTIMMRSIPLRGFDQQMSSMVIEHMASHGTRFLRGCAPSRVRRLPDGQLQVTWEDSTTGKEDTGTFDTVLWAIGRVPDTRSLNLEKAGVDTSPDTQKILVDSREATSVPHIYAIGDVVEGRPELTPIAIMAGRLLVQRLFGGSSDLMDYDNVPTTVFTPLEYGCVGLSEEEAVARHGQEHVEVYHAHYKPLEFTVAGRDASQCYVKMVCLREPPQLVLGLHFLGPNAGEVTQGFALGIK

SEQ ID NO: 13852 - protein, 522 aa, Homo sapiens
MAAMAVALRGLGGRFRWRTQAVAGGVRGAARGAAGQRDYDLLVVGGGSGGLACAKEAAQLGRKVAVVDYVEPSPQGTRWGLGGTCVNVGCIPKKLMHQAALLGGLIQDAPNYGWEVAQPVPHDWRKMAEAVQNHVKSLNWGHRVQLQDRKVKYFNIKASFVDEHTVCGVAKGGKEILLSADHIIIATGGRPRYPTHIEGALEYGITSDDIFWLKESPGKTLVVGASYVALECAGFLTGIGLDTTIMMRSIPLRGFDQQMSSMVIEHMASHGTRFLRGCAPSRVRRLPDGQLQVTWEDSTTGKEDTGTFDTVLWAIGRVPDTRSLNLEKAGVDTSPDTQKILVDSREATSVPHIYAIGDVVEGRPELTPIAIMAGRLLVQRLFGGSSDLMDYDNVPTTVFTPLEYGCVGLSEEEAVARHGQEHVEVYHAHYKPLEFTVAGRDASQCYVKMVCLREPPQLVLGLHFLGPNAGEVTQGFALGIKCGASYAQVMRTVGIHPTCSEEVVKLRISKRSGLDPTVTGCG

SEQ ID NO: 13853 - protein, 306 aa, Homo sapiens
MEAGQRDYDLLVVGGGSGGLACAKEAAQLGRKVAVVDYVEPSPQGTRWGLGGTCVNVGCIPKKLMHQAALLGGLIQDAPNYGWEVAQPVPHDWRKMAEAVQNHVKSLNWGHRVQLQDRKVKYFNIKASFVDEHTVCGVAKGGKEILLSADHIIIATGGRPRYPTHIEGALEYGITSDDIFWLKESPGKTLVVGASYVALECAGFLTGIGLDTTIMMRSIPLRGFDQQMSSMVIEHMASHGTRFLRGCAPSRVRRLPDGQLQVTWEDSTTGKEDTGTFDTVLWAIAPCISACLPTTVGHAGKNQRRD

SEQ ID NO: 13854 - protein, 493 aa, Homo sapiens
MEDQAGQRDYDLLVVGGGSGGLACAKEAAQLGRKVAVVDYVEPSPQGTRWGLGGTCVNVGCIPKKLMHQAALLGGLIQDAPNYGWEVAQPVPHDWRKMAEAVQNHVKSLNWGHRVQLQDRKVKYFNIKASFVDEHTVCGVAKGGKEILLSADHIIIATGGRPRYPTHIEGALEYGITSDDIFWLKESPGKTLVVGASYVALECAGFLTGIGLDTTIMMRSIPLRGFDQQMSSMVIEHMASHGTRFLRGCAPSRVRRLPDGQLQVTWEDSTTGKEDTGTFDTVLWAIGRVPDTRSLNLEKAGVDTSPDTQKILVDSREATSVPHIYAIGDVVEGRPELTPIAIMAGRLLVQRLFGGSSDLMDYDNVPTTVFTPLEYGCVGLSEEEAVARHGQEHVEVYHAHYKPLEFTVAGRDASQCYVKMVCLREPPQLVLGLHFLGPNAGEVTQGFALGIKCGASYAQVMRTVGIHPTCSEEVVKLRISKRSGLDPTVTGCG

SEQ ID NO: 13855 - protein, 427 aa, Homo sapiens
MHQAALLGGLIQDAPNYGWEVAQPVPHDWRKMAEAVQNHVKSLNWGHRVQLQDRKVKYFNIKASFVDEHTVCGVAKGGKEILLSADHIIIATGGRPRYPTHIEGALEYGITSDDIFWLKESPGKTLVVGASYVALECAGFLTGIGLDTTIMMRSIPLRGFDQQMSSMVIEHMASHGTRFLRGCAPSRVRRLPDGQLQVTWEDSTTGKEDTGTFDTVLWAIGRVPDTRSLNLEKAGVDTSPDTQKILVDSREATSVPHIYAIGDVVEGRPELTPIAIMAGRLLVQRLFGGSSDLMDYDNVPTTVFTPLEYGCVGLSEEEAVARHGQEHVEVYHAHYKPLEFTVAGRDASQCYVKMVCLREPPQLVLGLHFLGPNAGEVTQGFALGIKCGASYAQVMRTVGIHPTCSEEVVKLRISKRSGLDPTVTGCG

SEQ ID NO: 13856 - protein, 164 aa, Homo sapiens
MKTGRPELTPIAIMAGRLLVQRLFGGSSDLMDYDNVPTTVFTPLEYGCVGLSEEEAVARHGQEHVEVYHAHYKPLEFTVAGRDASQCYVKMVCLREPPQLVLGLHFLGPNAGEVTQGFALGIKCGASYAQVMRTVGIHPTCSEEVVKLRISKRSGLDPTVTGCG

SEQ ID NO: 13857 - protein, 179 aa, Homo sapiens
MKTVAGALLSLVMGQPSEGRPELTPIAIMAGRLLVQRLFGGSSDLMDYDNVPTTVFTPLEYGCVGLSEEEAVARHGQEHVEVYHAHYKPLEFTVAGRDASQCYVKMVCLREPPQLVLGLHFLGPNAGEVTQGFALGIKCGASYAQVMRTVGIHPTCSEEVVKLRISKRSGLDPTVTGCG

SEQ ID NO: 13858 - protein, 211 aa, Homo sapiens
MPLRRTSSRGNAGRPELTPIAIMAGRLLVQRLFGGSSDLMDYDNVPTTVFTPLEYGCVGLSEEEAVARHGQEHVEVYHAHYKPLEFTVAGRDASQCYVKMVCLREPPQLVLGLHFLGPNAGEVTQGFALGIKCGASYAQVMRTVGIHPTCSEEVVKLRISKRSGLDPTVTGCGMAAGQVWGASTLSWSACEMVSVERKCWTGGPCAPQGWL

SEQ ID NO: 13859 - protein, 361 aa, Homo sapiens
QQMSSMVIEHMASHGTRFLRGCAPSRVRRLPDGQLQVTWEDSTTGKEDTGTFDTVLWAIGRVPDTRSLNLEKAGVDTSPDTQKILVDSREATSVPHIYAIGDVVEGRPELTPIAIMAGRLLVQRLFGGSSDLMDYDNVPTTVFTPLEYGCVGLSEEEAVARHGQEHVEVYHAHYKPLEFTVAGRDASQCYVKMVCLREPPQLVLGLHFLGPNAGEVTQGFALGIKCGASYAQVMRTVGIHPTCSEEVVKLRISKRSGLDPTVTGCGMAAGQVWGASTLSWSACEMVSVERKCWTGGPCAPQGWLRGLSTSPLHLSASAAGHPPPGSWCQMMTTWVETYPVGTHVRAPWHFCNANKEGTFSE

SEQ ID NO: 13860 - protein, 171 aa, Homo sapiens
  VARIANT 1: note = misc_feature - Xaa can be any naturally occurring amino acid
XGVAKGGKEILLSADHIIIATGGRPRYPTHIEGALEYGITSDDIFWLKESPGKTLVVGASYVALECAGFLTGIGLDTTIMMRSIPLRGFDQQMSSMVIEHMASHGTRFLRGCAPSRVRRLPDGQLQVTWEDSTTGKEDTGTFDTVLWAIGLPHPAGCQAGWPLPSAPREQP

SEQ ID NO: 13861 - protein, 247 aa, Homo sapiens
MAQVPPPASGERHAGTEDGPIRRNPAGNVARPMVQRLPEPQDVAQCLEVGLFDTPPFYSNSTNSFRNTVEGYSDPTGKYDPAVRSLHNLAHLFLNGTGGQTHLSPNDPIFVLLHTFTDAVFDEWLRRYNADISTFPLENAPIGHNRQYNMVPFWPPVTNTEMFVTAPDNLGYTYEIQWPSREFSVPEIIAIAVVGALLLVALIFGTASYLIRARRSMDEANQPLLTDQYQCYAEEYEKLQNPNQSVV

SEQ ID NO: 13862 - protein, 102 aa, Homo sapiens
MSAPKLLSLGCIFFPLLLFQQARAQFPRQCATVEALRSGMCCPDLSPVSGPGTDRCGSSSGRGRCEAVTADSRPHSPQYPHDGRDDREVWPLRFFNRTCHCN

SEQ ID NO: 13863 - protein, 537 aa, Homo sapiens
MSAPKLLSLGCIFFPLLLFQQARAQFPRQCATVEALRSGMCCPDLSPVSGPGTDRCGSSSGRGRCEAVTADSRPHSPQYPHDGRDDREVWPLRFFNRTCHCNGNFSGHNCGTCRPGWRGAACDQRVLIVRRNLLDLSKEEKNHFVRALDMAKRTTHPLFVIATRRSEEILGPDGNTPQFENISIYNYFVWTHYYSVKKTFLGVGQESFGEVDFSHEGPAFLTWHRYHLLRLEKDMQEMLQEPSFSLPYWNFATGKNVCDICTDDLMGSRSNFDSTLISPNSVFSQWRVVCDSLEDYDTLGTLCNSTEDGPIRRNPAGNVARPMVQRLPEPQDVAQCLEVGLFDTPPFYSNSTNSFRNTVEGYSDPTGKYDPAVRSLHNLAHLFLNGTGGQTHLSPNDPIFVLLHTFTDAVFDEWLRRYNADISTFPLENAPIGHNRQYNMVPFWPPVTNTEMFVTAPDNLGYTYEIQWPSREFSVPEIIAIAVVGALLLVALIFGTASYLIRARRSMDEANQPLLTDQYQCYAEEYEKLQNPNQSVV

SEQ ID NO: 13864 - protein, 43 aa, Homo sapiens
GGMINWNRLFPPLRQRQNVNYQGGRQSEPAAPPLEVSEEQTNE

SEQ ID NO: 13865 - protein, 309 aa, Homo sapiens
MCFFFSLQEEFLDKHTLMRVLSSGGKLGSRGEGAQLCCWMLLFSWRVSGGQQTRRLCRRAFCWSPVPSPSCSPSSCLTARSSLCMTFTQSRTTSSLAPVFALFVPFYCSIPRVQVAQILGPLSITNKTLIYILGLQLFTSGSYIWIVAISGLMSGLCYDSKMFQVHQVLCIPSWMAKFFSWTLEPIFSSSEPTSEARIGMGATLDIQRQQRMELLDRQLMFSQFAQGRRQRQQQGGMINWNRLFPPLRQRQNVNYQGGRQSEPAAPPLEVSEEQVARLMEMGFSRGDALEALRASNNDLNVATNFLLQH

SEQ ID NO: 13866 - protein, 344 aa, Homo sapiens
MFTSTGSSGLYKAPLSKSLLLVPSALSLLLALLLPHCQKLFVYDLHAVKNDFQIWRLICGRIICLDLKDTFCSSLLIYNFRIFERRYGSRKFASFLLGSWVLSALFDFLLIEAMQYFFGITAASNLPSGFLAPVFALFVPFYCSIPRVQVAQILGPLSITNKTLIYILGLQLFTSGSYIWIVAISGLMSGLCYDSKMFQVHQVLCIPSWMAKFFSWTLEPIFSSSEPTSEARIGMGATLDIQRQQRMELLDRQLMFSQFAQGRRQRQQQGGMINWNRLFPPLRQRQNVNYQGGRQSEPAAPPLEVSEEQVARLMEMGFSRGDALEALRASNNDLNVATNFLLQH

SEQ ID NO: 13867 - protein, 204 aa, Homo sapiens
MFTSTGSSGLYKAPLSKSLLLVPSALSLLLALLLPHCQKLFVYDLHAVKNDFQMSGLCYDSKMFQVHQVLCIPSWMAKFFSWTLEPIFSSSEPTSEARIGMGATLDIQRQQRMELLDRQLMFSQFAQGRRQRQQQGGMINWNRLFPPLRQRQNVNYQGGRQSEPAAPPLEVSEEQVARLMEMGFSRGDALEALRASNNDLNVAT

SEQ ID NO: 13868 - protein, 135 aa, Homo sapiens
MGTKPRRPPRPHLVSPDKAPLSKSLLLVPSALSLLLALLLPHCQKLFVYDLHAVKNDFQIWRLICGRIICLDLKDTFCSSLLIYNFRIFERRYGSRKFASFLLGSWVLSALFDFLLIEAMQYFFGITAASNLPSG

SEQ ID NO: 13869 - protein, 212 aa, Homo sapiens
MKLLTLQPPGMLWLMERGGLGKPRGPRHRGLLRVRLGRFISRLLLWEPLGGGQAWGSGEGTQSLPRMGQPRISPWEAVGAPPGRGAHPISPLFPSQMCTPANTPATPPNFPDALTMFSRLKASESFHSGGSGSPMAATATSPPPHFPHAATSSSAASSWPTAASPPGGPQHHQPQPPLWTPTPPSPASDWPPLAPQQATSEPRAHPAMEAER

SEQ ID NO: 13870 - protein, 52 aa, Homo sapiens
MMCTPANTPATPPNFPDALTMFSRLKASESFHSGGSGSPMAATATSPPPHFP

SEQ ID NO: 13871 - protein, 117 aa, Homo sapiens
MMCTPANTPATPPNFPDALTMFSRLKASESFHSGGSGSPMAATATSPPPHFPHAATSSSAASSWPTAASPPGGPQHHQPQPPLWTPTPPSPASDWPPLAPQQATSEPRAHPAMEAER

SEQ ID NO: 13872 - protein, 67 aa, Homo sapiens
MSVNMDELKHQRCCSLQRKGLWETPGLFPPPPSACLLGLPACLPCTWGYPHPLPFPLLTKEKNEFQT

SEQ ID NO: 13873 - protein, 156 aa, Homo sapiens
MSVNMDELKHQVMINQFVLTAGCAADQAKQLLQAAHWQFEMCTPANTPATPPNFPDALTMFSRLKASESFHSGGSGSPMAATATSPPPHFPHAATSSSAASSWPTAASPPGGPQHHQPQPPLWTPTPPSPASDWPPLAPQQATSEPRAHPAMEAER

SEQ ID NO: 13874 - protein, 94 aa, Homo sapiens
MSVNMDELKHQVMINQFVLTAGCAADQAKQLLQAAHWQFESSQGHPQPQRSLGTRAAAGPAGAWRVSRGLSSCRQPSAPFSRRPTSPTATITTR

SEQ ID NO: 13875 - protein, 152 aa, Homo sapiens
MSVNMDELKHQVMINQFVLTAGCAADQAKQLLQAAHWQFETALSAFFQETNIPYSHHHHQMASESFHSGGSGSPMAATATSPPPHFPHAATSSSAASSWPTAASPPGGPQHHQPQPPLWTPTPPSPASDWPPLAPQQATSEPRAHPAMEAER

SEQ ID NO: 13876 - protein, 177 aa, Homo sapiens
MSVNMDELKHQVMINQFVLTAGCAADQAKQLLQAAHWQFETALSAFFQETNIPYSHHHHQMMCTPANTPATPPNFPDALTMFSRLKASESFHSGGSGSPMAATATSPPPHFPHAATSSSAASSWPTAASPPGGPQHHQPQPPLWTPTPPSPASDWPPLAPQQATSEPRAHPAMEAER

SEQ ID NO: 13877 - protein, 122 aa, Homo sapiens
MSVNMDELKHQVMINQFVLTAGCAADQAKQLLQAAHWQFEVRGAGAGRGPGPRAECVPRGRRAGADGVDACRLCAPSGPQTRPAFPTAVPGVRIPRARGGRRQPSAPFSRRPTSPTATITTR

SEQ ID NO: 13878 - protein, 117 aa, Homo sapiens
HNRIPYQSPVSSSESAPGTIMNGHGGGRSQQTLDTPKTTGPPSALPSVSSLPSTTSCTALLPSTSQHTGDLTSSPLSQLSSMPVWRAPLPTSPQPPSPRQRPPSQVPHPQAPACPVA

SEQ ID NO: 13879 - protein, 412 aa, Homo sapiens
MMTSVSSDHCRGAREKPQISAAQSTQPQKQVVQATAEQMRLAQVIFDKNDSDFEAKVKQLMEVTGKNQDECIVALHDCNGDVNKAINILLEGNSDTTSWETVGCKKKNFAKENSENKENREKKSEKESSRGRGNNNRKGRGGNRGREFRGEENGIDCNQVDKPSDRGKRARGRELASNTHNIAQDLSNKSSYGLKGAWKNSVEEWTTEDWTEDLSETKVFTASSAPAENHILPGQSIDLVALLQKPVPHSQASEANSFETSQQQGFGQALVFTNSQHNNQMAPGTGSSTAVNSCSPQSLSSVLGSGFGELAPPKMANITSSQILDQLKAPSLGQFTTTPSTQQNSTSHPTTTTSWDLKPPTSQSSVLSHLDFKSQPEPSPVLSQLSQRQQHQSQAVTVPPPGLESFPSQAKL

SEQ ID NO: 13880 - protein, 1119 aa, Homo sapiens
MMTSVSSDHCRGAREKPQISAAQSTQPQKQVVQATAEQMRLAQVIFDKNDSDFEAKVKQLMEVTGKNQDECIVALHDCNGDVNKAINILLEGNSDTTSWETVGCKKKNFAKENSENKENREKKSEKESSRGRGNNNRKGRGGNRGREFRGEENGIDCNQVDKPSDRGKRARGRGFGRGRGRGAGRFSTQGMGTFNPADYSDSTSTDVCGTKLVVWEAAQNGADEGTELASNTHNIAQDLSNKSSYGLKGAWKNSVEEWTTEDWTEDLSETKVFTASSAPAENHILPGQSIDLVALLQKPVPHSQASEANSFETSQQQGFGQALVFTNSQHNNQMAPGTGSSTAVNSCSPQSLSSVLGSGFGELAPPKMANITSSQILDQLKAPSLGQFTTTPSTQQNSTSHPTTTTSWDLKPPTSQSSVLSHLDFKSQPEPSPVLSQLSQRQQHQSQAVTVPPPGLESFPSQAKLRESTPGDSPSTVNKLLQLPSTTIENISVSVHQPQPKHIKLAKRRIPPASKIPASAVEMPGSADVTGLNVQFGALEFGSEPSLSEFGSAPSSENSNQIPISLYSKSLSEPLNTSLSMTSAVQNSTYTTSVITSCSLTSSSLNSASPVAMSSSYDQSSVHNRIPYQSPVSSSESAPGTIMNGHGGGRSQQTLDTPKTTGPPSALPSVSSLPSTTSCTALLPSTSQHTGDLTSSPLSQLSSSLSSHQSSLSAHAALSSSTSHTHASVESASSHQSSATFSTAATSVSSSASSGASLSSSMNTANSLCLGGTPASASSSSSRAAPLVTSGKAPPNLPQGVPPLLHNQYLVGPGGLLPAYPIYGYDELQMLQSRLPVDYYGIPFAAPTALASRDGSLANNPYPGDVTKFGRGDSASPAPATTPAQPQQSQSQTHHTAQQPFVNPALPPGYSYTGLPYYTGMPSAFQYGPTMFVPPASAKQHGVNLSTPTPPFQQASGYGQHGYSTGYDDLTQGTAAGDYSKGGYAGSSQAPNKSAGSGPGKGVSVSSSTTGLPDMTGSVYNKTQTFDKQGFHAGTPPPFSLPSVLGSTGPLASGAAPGYAPPPFLHILPAHQQPHSQLLHHHLPQDAQSGSGQRSQPSSLQPKSQASKPAYGNSPYWTN

SEQ ID NO: 13881 - protein, 1119 aa, Homo sapiens; identical to SEQ ID NO: 13880

SEQ ID NO: 13882 - protein, 358 aa, Homo sapiens
MNTANSLCLGGTPASASSSSSRAAPLVTSGKAPPNLPQGVPPLLHNQYLVGPGGLLPAYPIYGYDELQMLQSRLPVDYYGIPFAAPTALASRDGSLANNPYPGDVTKFGRGDSASPAPATTPAQPQQSQSQTHHTAQQPFVNPALPPGYSYTGLPYYTGMPSAFQYGPTMFVPPASAKQHGVNLSTPTPPFQQASGYGQHGYSTGYDDLTQGTAAGDYSKGGYAGSSQAPNKSAGSGPGKGVSVSSSTTGLPDMTGSVYNKTQTFDKQGFHAGTPPPFSLPSVLGSTGPLASGAAPGYAPPPFLHILPAHQQPHSQLLHHHLPQDAQSGSGQRSQPSSLQPKSQASKPAYGNSPYWTN

SEQ ID NO: 13883 - protein, 176 aa, Homo sapiens
MRLAQVIFDKNDSDFEAKVKQLMEVTGKNQDECIVALHDCNGDVNKAINILLEGNSDTTSWETVGCKKKNFAKENSENKENREKKSEKESSRGRGNNNRKGRGGNRGREFRGEENGIDCNQVDKPSDRGKRARGRELASNTHNIAQDLSNKSSYGLKGAWKNSVEEWTTEDWTEDH

SEQ ID NO: 13884 - protein, 278 aa, Homo sapiens
  VARIANT 1: note = misc_feature - Xaa can be any naturally occurring amino acid
XEKESSRGRGNNNRKGRGGNRGREFRGEENGIDCNQVDKPSDRGKRARGRGFGRGRGRGAGRFSTQGMGTFNPADYSDSTSTDVCGTKLVVWEAAQNGADEGTGAWKNSVEEWTTEDWTEDLSETKVFTASSAPAENHILPGQSIDLVALLQKPVPHSQASEANSFETSQQQGFGQALVFTNSQHNNQMAPGTGSSTAVNSCSPQSLSSVLGSGFGELAPPKMANITSSQILDQLKAPSLGQFTTTPSTQQNSTSHPTTTTSWDLKPPTSQSSVLSHL

SEQ ID NO: 13885 - protein, 270 aa, Homo sapiens
MASRGVVGIFFLSAVPLVCLELRRGIPDIGIKDFLLLCGRILLLLALLTLTISVTTSWLNSFKSPQVYLKEEEEKNEKRQKLVRKKQQEAQGEKASRYIENVLKPHQEMKLRKLEERFYQMTGEAWKLSSGHKLGGDEGTSQTSFETSNREAAKSQNLPKPLTEFPSPAEQPTCKEIPDLPEEPSQTAEEVVTVALRCPSGNVLRRRFLKSYSSQVLFDWMTRIGYHISLYSLSTSFPRRPLAVEGGQSLEDIGITVDTVLILEEKEQTN

SEQ ID NO: 13886 - protein, 229 aa, Homo sapiens
MASRGVVGIFFLSAVPLVCLELRRGIPDIGIKDFLLLCGRILLLLALLTLTISVTTSWLNSFKSPQVYLKEEEEKNEKRQKLVRKKQQEAQGEKGDEGTSQTSFETSNREAAKSQNLPKPLTEFPSPAEQPTCKEIPDLPEEPSQTAEEVVTVALRCPSGNVLRRRFLKSYSSQVLFDWMTRIGYHISLYSLSTSFPRRPLAVEGGQSLEDIGITVDTVLILEEKEQTN

SEQ ID NO: 13887 - protein, 42 aa, Homo sapiens
MASRGVVGIFFLSAVPLVCLELRRGIPDIGKCDFFPSTVTAG

SEQ ID NO: 13888 - protein, 233 aa, Homo sapiens
MASRGVVGIFFLSAVPLVCLELRRGIPDIVYLKEEEEKNEKRQKLVRKKQQEAQGEKASRYIENVLKPHQEMKLRKLEERFYQMTGEAWKLSSGHKLGGDEGTSQTSFETSNREAAKSQNLPKPLTEFPSPAEQPTCKEIPDLPEEPSQTAEEVVTVALRCPSGNVLRRRFLKSYSSQVLFDWMTRIGYHISLYSLSTSFPRRPLAVEGGQSLEDIGITVDTVLILEEKEQTN

SEQ ID NO: 13889 - protein, 248 aa, Homo sapiens
MCQREKRWQLGVLTQTVGPWPRPVAYLSKQLDGVFKGWPPCLRALAATALLVQEADKLTLGQNRNIKAPHAVVTLMNTKGHHWLMSARLTKYQSLLCENPRITIEVCNTLNPATLFPVSESPVEHDCVEVLDSVYSSRPDLRDQPWASVDWELYVDGSSFINPQGERFAGYAVVTLDTVVEARSLPQGTSAQKAELIALIRALELSEGIKDFLLLCGRILLLLALLTLTISVTTSWLNSFKSPQVYLK

SEQ ID NO: 13890 - protein, 310 aa, Homo sapiens
MLYSGTWRTVGIRCPRKKAQICQQQECCIERPPLRLRGFGAALTTTPRLHRPCPPTSGADFTSRNLFPPGIKDFLLLCGRILLLLALLTLTISVTTSWLNSFKSPQVYLKEEEEKNEKRQKLVRKKQQEAQGEKASRYIENVLKPHQEMKLRKLEERFYQMTGEAWKLSSGHKLGGDEGTSQTSFETSNREAAKSQNLPKPLTEFPSPAEQPTCKEIPDLPEEPSQTAEEVVTVALRCPSGNVLRRRFLKSYSSQVLFDWMTRIGYHISLYSLSTSFPRRPLAVEGGQSLEDIGITVDTVLILEEKEQTN

SEQ ID NO: 13891 - protein, 94 aa, Homo sapiens
  VARIANT 1: note = misc_feature - Xaa can be any naturally occurring amino acid
XIKDFLLLCGRILLLLALLTLTISVTTSWLNSFKSPQVYLKEEEEKNEKRQKLVRKKQQEAQGEKASRYIENVLKPHQEMKLRKLEERFYQMTG

SEQ ID NO: 13892 - protein, 138 aa, Homo sapiens
MTWRQAVLLSCFSAVVLLSMLREGTSVSVGTMQMAGEEASEDAKQKIFMQESDASNFLKRRGKRSPKSRDEVNVENRQKLRVDELRREYYEEQRNEFENFVEEQNDEQEERSREAVEQWRQWHYDGLHPSYLYNRHHT

SEQ ID NO: 13893 - protein, 116 aa, Homo sapiens
MTWRQAVLLSCFSAVVLLSNAKQKIFMQESDASNFLKRRGKRSPKSRDEVNVENRQKLRVDELRREYYEEQRNEFENFVEEQNDEQEERSREAVEQWRQWHYDGLHPSYLYNRHHT

SEQ ID NO: 13894 - protein, 124 aa, Homo sapiens
MRQAGRAALLAALLLLVQLCPGSSQRSPEAAGVQDPSLRWSPGARNQGGGARALLLLLAERFPRRAGPGRLGLGTAGERPRRDNPSLSIDLTFHLLRTLLELARTQSQRERAEQNRIIFDSVGK

SEQ ID NO: 13895 - protein, 112 aa, Homo sapiens
MTRCALLLLMVLMLGRVLVVPVTPIPTFQLRPQNSPQTTPRPAASESPSAAPTWPWAAQSHCSPTRHPGSRIVLSLDVPIGLLQILLEQARARAAREQATTNARILARVGHC

SEQ ID NO: 13896 - protein, 161 aa, Homo sapiens
MLMPVHFLLLLLLLLGGPRTGLPHKFYKAKPIFSCLNTALSEAEKGQWEDASLLSKRSFHYLRSRDASSGEEEEGKEKKTFPISGARGGARGTRYRYVSQAQPRGKPRQDTAKSPHRTKFTLSLDVPTNIMNLLFNIAKAKNLRAQAAANAHLMAQIGRKK

SEQ ID NO: 13897 - protein, 1516 aa, Homo sapiens
MAPAKATNVVRLLLGSTALWLSQLGSGTVAASKSVTAHLAAKWPETPLLLEASEFMAEESNEKFWQFLETVQELAIYKQTESDYSYYNLILKKAGQFLDNLHINLLKFAFSIRAYSPAIQMFQQIAADEPPPDGCNAFVVIHKKHTCKINEIKKLLKKAASRTRPYLFKGDHKFPTNKENLPVVILYAEMGTRTFSAFHKVLSEKAQNEEILYVLRHYIQKPSSRKMYLSGYGVELAIKSTEYKALDDTQVKTVTNTTVEDETETNEVQGFLFGKLKEIYSDLRDNLTAFQKYLIESNKQMMPLKVWELQDLSFQAASQIMSAPVYDSIKLMKDISQNFPIKARSLTRIAVNQHMREEIKENQKDLQVRFKIQPGDARLFINGLRVDMDVYDAFSILDMLKLEGKMMNGLRNLGINGEDMSKFLKLNSHIWEYTYVLDIRHSSIMWINDLENDDLYITWPTSCQKLLKPVFPGSVPSIRRNFHNLVLFIDPAQEYTLDFIKLADVFYSHEVPLRIGFVFILNTDDEVDGANDAGVALWRAFNYIAEEFDISEAFISIVHMYQKVKKDQNILTVDNVKSVLQNTFPHANIWDILGIHSKYDEERKAGASFYKMTGLGPLPQALYNGEPFKHEEMNIKELKMAVLQRMMDASVYLQREVFLGTLNDRTNAIDFLMDRNNVVPRINTLILRTNQQYLNLISTSVTADVEDFSTFFFLDSQDKSAVIAKNMYYLTQDDESIISAVTLWIIADFDKPSGRKLLFNALKHMKTSVHSRLGIIYNPTSKINEENTAISRGILAAFLTQKNMFLRSFLGQLAKEEIATAIYSGDKIKTFLIEGMDKNAFEKKYNTVGVNIFRTHQLFCQDVLKLRPGEMGIVSNGRFLGPLDEDFYAEDFYLLEKITFSNLGEKIKGIVENMGINANNMSDFIMKVDALMSSVPKRASRYDVTFLRENHSVIKTNPQENDMFFNVIAIVDPLTREAQKMAQLLVVLGKIINMKIKLFMNCRGRLSEAPLESFYRFVLEPELMSGANDVSSLGPVAKFLDIPESPLLILNMITPEGWLVETVHSNCDLDNIHLKDTEKTVTAEYELEYLLLEGQCFDKVTEQPPRGLQFTLGTKNKPAVVDTIVMAHHGYFQLKANPGAWILRLHQGKSEDIYQIVGHEGTDSQADLEDIIVVLNSFKSKILKVKVKKETDKIKEDILTDEDEKTKGLWDSIKSFTVSLHKENKKEKDVLNIFSVASGHLYERFLRIMMLSVLRNTKTPVKFWLLKNYLSPTFKEVIPHMAKEYGFRYELVQYRWPRWLRQQTERQRIIWGYKILFLDVLFPLAVDKIIFVDADQIVRHDLKELRDFDLDGAPYGYTPFCDSRREMDGYRFWKTGYWASHLLRRKYHISALYVVDLKKFRRIGAGDRLRSQYQALSQDPNSLSNLDQDLPNNMIYQVAIKSLPQDWLWCETWCDDESKQRAKTIDLCNNPKTKESKLKAAARIVPEWVEYDAEIRQLLDHLENKKQDTILTHDEL

SEQ ID NO: 13898 - protein, 278 aa, Homo sapiens
MAPAKATNVVRLLLGSTALWLSQLGSGTVAASKSVTAHLAAKWPETPLLLEASEFMAEESNEKFWQFLETVQELAIYKQTESDYSYYNLILKKAGQFLDNLHINLLKFAFSIRAYSPAIQMFQQIAADEPPPDGCNAFVVIHKKHTCKINEIKKLLKKAASRTRPYLFKGDHKFPTNKENLPVVILYAEMGTRTFSAFHKVLSEKAQNEEILYVLRHYIQKPSSRKMYLSGYGVELAIKSTEYKALDDTQVKTVTNTTVEDETETNEVQGFLFGKLKS

SEQ ID NO: 13899 - protein, 280 aa, Homo sapiens
MAPAKATNVVRLLLGSTALWLSQLGSGTVAASKSVTAHLAAKWPETPLLLEASEFMAEESNEKFWQFLETVQELAIYKQTESDYSYYNLILKKAGQFLDNLHINLLKFAFSIRAYSPAIQMFQQIAADEPPPDGCNAFVVIHKKHTCKINEIKKLLKKAASRTRPYLFKGDHKFPTNKENLPVVILYAEMGTRTFSAFHKVLSEKAQNEEILYVLRHYIQKPSSRKMYLSGYGVELAIKSTEYKALDDTQVKTVTNTTVEDETETNEVQGFLFGKLKLVY

SEQ ID NO: 13900 - protein, 372 aa, Homo sapiens
MAPAKATNVVRLLLGSTALWLSQLGSGTVAASKSVTAHLAAKWPETPLLLEASEFMAEESNEKFWQFLETVQELAIYKQTESDYSYYNLILKKAGQFLDNLHINLLKFAFSIRAYSPAIQMFQQIAADEPPPDGCNAFVVIHKKHTCKINEIKKLLKKAASRTRPYLFKGDHKFPTNKENLPVVILYAEMGTRTFSAFHKVLSEKAQNEEILYVLRHYIQKPSSRKMYLSGYGVELAIKSTEYKALDDTQVKTVTNTTVEDETETNEVQGFLFGKLKEIYSDLRDNLTAFQKYLIESNKQMMPLKVWELQDLSFQAASQIMSAPVYDSIKLMKDISQNFPIKARLRMNILICLFQSTLNVKNLRSRHLYNKT

SEQ ID NO: 13901 - protein, 280 aa, Homo sapiens [sequence omitted]

SEQ ID NO: 13902 - protein, 278 aa, Homo sapiens; identical to SEQ ID NO: 13898

SEQ ID NO: 13903 - protein, 530 aa, Homo sapiens
MARAGWTSPVPLCVCLLLTCGFAEAGKLLVVPMDGSHWFTMQSVVEKLILRGHEVVVVMPEVSWQLERSLNCTVKTYSTSYTLEDQNREFMVFAHAQWKAQAQSIFSLLMSSSSGFLDLFFSHCRSLFNDRKLVEYLKESSFDAVFLDPFDTCGLIVAKYFSLPSVVFTRGIFCHHLEEGAQCPAPLSYVPNDLLGFSDAMTFKERVWNHIVHLEDHLFCQYLFRNALEIASEILQTPVTAYDLYSHTSIWLLRTDFVLDYPKPVMPNMIFIGGINCHQGKPLPMEFEAYINASGEHGIVVFSLGSMVSEIPEKKAMAIADALGKIPQTVLWRYTGTRPSNLANNTILVKWLPQNDLLGHPMTRAFITHAGSHGVYESICNGVPMVMMPLFGDQMDNAKRMETKGAGVTLNVLEMTSEDLENALKAVINDKSYKENIMRLSSLHKDRPVEPLDLAVFWVEFVMRHKGAPHLRPAAHDLTWYQYHSLDVIGFLLAVVLTVAFITFKCCAYGYRKCLGKKGRVKKAHKSKTH

SEQ ID NO: 13904 - protein, 441 aa, Homo sapiens
MARAGWTSPVPLCVCLLLTCGFAEAGKLLVVPMDGSHWFTMQSVVEKLILRGHEVVVVMPEVSWQLERSLNCTVKTYSTSYTLEDQNREFMVFAHAQWKAQAQSIFSLLMSSSSGFLDLFFSHCRSLFNDRKLVEYLKESSFDAVFLDPFDTCGLIVAKYFSLPSVVFTRGIFCHHLEEGAQCPAPLSYVPNDLLGFSDAMTFKERVWNHIVHLEDHLFCQYLFRNALEIASEILQTPVTAYDLYSHTSIWLLRTDFVLDYPKPVMPNMIFIGGINCHQGKPLPMEFEAYINASGEHGIVVFSLGSMVSEIPEKKAMAIADALGKIPQTVLWRYTGTRPSNLANNTILVKWLPQNDLLGHPMTRAFITHAGSHGVYESICNGVPMVMMPLFGDQMDNAKRMETKGAGVTLNVLEMTSEDLENALKAVINDKRKKQQSGRQM

SEQ ID NO: 13905 - protein, 158 aa, Homo sapiens
MLNNLLLFSLQISLIGTTLGGNVLIWPMEGSHWLNVKIIIDELIKKEHNVTVLVASGALFITPTSNPSLTFEIYKVPFGKERIEGVIKDFVLTWLENRPSPSTIWRFYQEMAKVIKDFHMVSQEICDGVLKNQQLMAKLKKSKFEVLVSDPVFPCGDI

SEQ ID NO: 13906 - protein, 693 aa, Homo sapiens
MLNNLLLFSLQISLIGTTLGGNVLIWPMEGSHWLNVKIIIDELIKKEHNVTVLVASGALFITPTSNPSLTFEIYKVPFGKERIEGVIKDFVLTWLENRPSPSTIWRFYQEMAKVIKDFHMVSQEICDGVLKNQQLMAKLKKSKFEVLVSDPVFPCGDIVALKLGIPFMYSLRFSPASTVEKHCGKVPYPPSYVPAVLSELTDQMSFTDRIRNFISYHLQDYMFETLWKSWDSYYSKALDGSHWLNIKIILEELIQRNHNVTVLASSATLFINSNPDSPVNFEVIPVSYKKSNIDSLIEHMIMLWIDHRPTPLTIWAFYKELGKLLDTFFQINIQLCDGVLKNPKLMARLQKGGFDVLVADPVTICGDLVALKLGIPFMYTLRFSPASTVERHCGKIPAPVSYVPAALSELTDQMTFGERIKNTISYSLQDYIFQSYWGEWNSYYSKILGRPTTLCETMGKAEIWLIRTYWDFEFPRPYLPNFEFVGGLHCKPAKPLPKVLWRYKGKKPATLGNNTQLFDWIPQNDLLGHPKTKAFITHGGTNGIYEAIYHGVPMVGVPMFADQPDNIAHMKAKGAAVEVNLNTMTSVDLLSALRTVINEPSYKENAMRLSRIHHDQPVKPLDRAVFWIEFVMRHKGAKHLRVAAHDLTWFQYHSLDVIGFLLVCVTTAIFLVIQCCLFSCQKFGKIGKKKKRE

SEQ ID NO: 13907 - protein, 527 aa, Homo sapiens
MLNNLLLFSLQISLIGTTLGGNVLIWPMEGSHWLNVKIIIDELIKKEHNVTVLVASGALFITPTSNPSLTFEIYKVPFGKERIEGVIKDFVLTWLENRPSPSTIWRFYQEMAKVIKDFHMVSQEICDGVLKNQQLMAKLKKSKFEVLVSDPVFPCGDIVALKLGIPFMYSLRFSPASTVEKHCGKVPYPPSYVPAVLSELTDQMSFTDRIRNFISYHLQDYMFETLWKSWDSYYSKALGGLLLCCPGWSAVADLGSLQPLLPGFKRFSRLSLHCSWDYRLPAGRPTTLCETMGKAEIWLIRTYWDFEFPRPYLPNFEFVGGLHCKPAKPLPKVLWRYKGKKPATLGNNTQLFDWIPQNDLLGHPKTKAFITHGGTNGIYEAIYHGVPMVGVPMFADQPDNIAHMKAKGAAVEVNLNTMTSVDLLSALRTVINEPSYKENAMRLSRIHHDQPVKPLDRAVFWIEFVMRHKGAKHLRVAAHDLTWFQYHSLDVIGFLLVCVTTAIFLVIQCCLFSCQKFGKIGKKKKRE

SEQ ID NO: 13908 - protein, 483 aa, Homo sapiens
MLNNLLLFSLQISLIGTTLGGNVLIWPMEGSHWLNVKIIIDELIKKEHNVTVLVASGALFITPTSNPSLTFEIYKVPFGKERIEGVIKDFVLTWLENRPSPSTIWRFYQEMAKVIKDFHMVSQEICDGVLKNQQLMAKLKKSKFEVLVSDPVFPCGDIVALKLGIPFMYSLRFSPASTVEKHCGKVPYPPSYVPAVLSELTDQMSFTDRIRNFISYHLQDYMFETLWKSWDSYYSKALGRPTTLCETMGKAEIWLIRTYWDFEFPRPYLPNFEFVGGLHCKPAKPLPKVLWRYKGKKPATLGNNTQLFDWIPQNDLLGHPKTKAFITHGGTNGIYEAIYHGVPMVGVPMFADQPDNIAHMKAKGAAVEVNLNTMTSVDLLSALRTVINEPSYKENAMRLSRIHHDQPVKPLDRAVFWIEFVMRHKGAKHLRVAAHDLTWFQYHSLDVIGFLLVCVTTAIFLVIQCCLFSCQKFGKIGKKKKRE

SEQ ID NO: 13909 - protein, 527 aa, Homo sapiens
MLNNLLLFSLQISLIGTTLGGNVLIWPMEGSHWLNVKIIIDELIKKEHNVTVLVASGALFITPTSNPSLTFEIYKVPFGKERIEGVIKDFVLTWLENRPSPSTIWRFYQEMAKVIKDFHMVSQEICDGVLKNQQLMAKLKKSKFEVLVSDPVFPCGDIVALKLGIPFMYSLRFSPASTVEKHCGKVPYPPSYVPAVLSELTDQMSFTDRIRNFISYHLQDYMFETLWKSWDSYYSKALGRPTTLCETMGKAEIWLIRTYWDFEFPRPYLPNFEFVGGLHCKPAKPLPKEMEEFIQSSGKNGVVVFSLGSMVKNLTEEKANLIASALAQIPQKVLWRYKGKKPATLGNNTQLFDWIPQNDLLGHPKTKAFITHGGTNGIYEAIYHGVPMVGVPMFADQPDNIAHMKAKGAAVEVNLNTMTSVDLLSALRTVINEPSYKENAMRLSRIHHDQPVKPLDRAVFWIEFVMRHKGAKHLRVAAHDLTWFQYHSLDVIGFLLVCVTTAIFLVIQCCLFSCQKFGKIGKKKKRE

SEQ ID NO: 13910 - protein, 529 aa, Homo sapiens
MTLKWTSVLLLIHLSCYFSSGSCGKVLVWAAEYSHWMNMKTILKELVQRGHEVTVLASSASILFDPNDASTLKFEVYPTSLTKTEFENIIMQQVKRWSDIRKDSFWLYFSQEQEILWELYDIFRNFCKDVVSNKKVMKKLQESRFDIVFADAVFPCGELLAALLNIRFVYSLRFTPGYTIERHSGGLIFPPSYIPIVMSKLSDQMTFMERVKNMIYVLYFDFWFQMSDMKKWDQFYSEVLGRPTTLFETMGKADIWLMRNSWSFQFPHPFLPNVDFVGGFHCKPAKPLPKEMEEFVQSSGENGVVVFSLGSVISNMTAERANVIATALAKIPQKVLWRFDGNKPDALGLNTRLYKWIPQNDLLGHPKTRAFITHGGANGIYEAIYHGIPMVGIPLFFDQPDNIAHMKAKGAAVRLDFNTMSSTDLLNALKTVINDPLYKENIMKLSRIQHDQPVKPLDRAVFWIEFVMPHKGAKHLRVAAHDLTWFQYHSLDVIGFLLACVATVIFIITKFCLFCFWKFARKGKKGKRD

SEQ ID NO: 13911 - protein, 529 aa, Homo sapiens
MALKWTSVLLLIHLGCYFSSGSCGKVLVWTGEYSHWMNMKTILKELVQRGHEVTVLASSASILFDPNDAFTLKLEVYPTSLTKTEFENIIMQQVKRWSDIQKDSFWLYFSQEQEILWEFHDIFRNFCKDVVSNKKVMKKLQESRFDIIFADAFFPCGELLAALLNIPFVYSLCFTPGYTIERHSGGLIFPPSYIPVVMSKLSDQMTFMERVKNMIYVLYFDFWFQMCDMKKWDQFYSEVLGRPTTLFETMGKADIWLMRNSWSFQFPHPFLPNIDFVGGLHCKPAKPLPKEMEEFVQSSGENGVVVFSLGSVISNMTAERANVIATALAKIPQKVLWRFDGNKPDALGLNTRLYKWIPQNDLLGLPKTRAFITHGGANGIYEAIYHGIPMVGIPLFWDQPDNIAHMKAKGAAVRLDFHTMSSTDLLNALKTVINDPSYKENVMKLSIIQHDQPVKPLHRAVFWIEFVMCHKGAKHLRVAARDLTWFQYHSLDVIGFLLACVATVIFVVTKFCLFCFWKFARKGKKGKRD

SEQ ID NO: 13912 - protein, 335 aa, Homo sapiens
MALKWTSVLLLIHLGCYFSSGSCGKVLVWTGEYSHWMNMKTILKELVQRGHEVTVLASSASILFDPNDAFTLKLEVYPTSLTKTEFENIIMQQVKRWSDIQKDSFWLYFSQEQEILWEFHDIFRNFCKDVVSNKKVMKKLQESRFDIIFADAFFPCGELLAALLNIPFVYSLCFTPGYTIERHSGGLIFPPSYIPVVMSKLSDQMTFMERVKNMIYVLYFDFWFQMCDMKKWDQFYSEVLGRPTTLFETMGKADIWLMRNSWSFQFPHPFLPNIDFVGGLHCKPAKPLPKEMEEFVQSSGENGVVVFSLGSVISNMTAERANVIATALAKIPQKI

SEQ ID NO: 13913 - protein, 54 aa, Homo sapiens
MSMKWTSALLLIQLSCYFSSGSCGKVLVWPTEFSHWMNIKTILDELVQRGHEVT

SEQ ID NO: 13914 - protein, 528 aa, Homo sapiens
MSMKWTSALLLIQLSCYFSSGSCGKVLVWPTEFSHWMNIKTILDELVQRGHEVTVLASSASISFDPNSPSTLKFEVYPVSLTKTEFEDIIKQLVKRWAELPKDTFWSYFSQVQEIMWTFNDILRKFCKDIVSNKKLMKKLQESRFDVVLADAVFPFGELLAELLKIPFVYSLRFSPGYAIEKHSGGLLFPPSYVPVVMSELSDQMTFIERVKNMIYVLYFEFWFQIFDMKKWDQFYSEVLGRPTTLSETMAKADIWLIRNYWDFQFPHPLLPNVEFVGGLHCKPAKPLPKEMEEFVQSSGENGVVVFSLGSMVSNTSEERANVIASALAKIPQKVLWRFDGNKPDTLGLNTRLYKWIPQNDLLGHPKTRAFITHGGANGIYEAIYHGIPMVGVPLFADQPDNIAHMKAKGAAVSLDFHTMSSTDLLNALKTVINDPLYKENAMKLSRIHHDQPVKPLDRAVFWIEFVMRHKGAKHLRVAAHDLTWFQYHSLDVTGFLLACVATVIFIITKCLFCVWKFVRTGKKGKRD

SEQ ID NO: 13915 - protein, 369 aa, Homo sapiens
MSMKWTSALLLIQLSCYFSSGSCGKVLVWPTEFSHWMNIKTILDELVQRGHEVTVLASSASISFDPNSPSTLKFEVYPVSLTKTEFEDIIKQLVKRWAELPKDTFWSYFSQVQEIMWTFNDILRKFCKDIVSNKKLMKKLQESRFDVVLADAVFPFGELLAELLKIPFVYSLRFSPGYAIEKHSGGLLFPPSYVPVVMSELSDQMTFIERVKNMIYVLYFEFWFQIFDMKKWDQFYSEVLGRPTTLSETMAKADIWLIRNYWDFQFPHPLLPNVEFVGGLHCKPAKPLPKEMEEFVQSSGENGVVVFSLGSMVSNTSEERANVIASALAKIPQKVLWRFDGNKPDTLGLNTRLYKWIPQNDLLDIKRML

SEQ ID NO: 13916 - protein, 369 aa, Homo sapiens [sequence omitted]

SEQ ID NO: 13917 - protein, 156 aa, Homo sapiens
MGKADVWLIRNSWNFQFPYPLLPNVDFVGGLHCKPAKPLPKEMEDFVQSSGENGVVVFSLGSMVSNMTEERANVIASALAQIPQKVLWRFDGNKPDTLGLNTRLYKWIPQNDLLGHPKTRAFITHGGANGIYEAIYHGIPMVGIPLFADQPDNIAH

SEQ ID NO: 13918 - protein, 529 aa, Homo sapiens
MSVKWTSVILLIQLSFCFSSGNCGKVLVWAAEYSHWMNIKTILDELIQRGHEVTVLASSASILFDPNNSSALKIEIYPTSLTKTELENFIMQQIKRWSDLPKDTFWLYFSQVQEIMSIFGDITRKFCKDVVSNKKFMKKVQESRFDVIFADAIFPCSELLAELFNIPFVYSLSFSPGYTFEKHSGGFIFPPSYVPVVMSELTDQMTFMERVKNMIYVLYFDFWFEIFDMKKWDQFYSEVLGRPTTLSETMGKADVWLIRNSWNFQFPYPLLPNVDFVGGLHCKPAKPLPKEMEDFVQSSGENGVVVFSLGSMVSNMTEERANVIASALAQIPQKVLWRFDGNKPDTLGLNTRLYKWIPQNDLLGHPKTRAFITHGGANGIYEAIYHGIPMVGIPLFADQPDNIAHMKARGAAVRVDFNTMSSTDLLNALKRVINDPSYKENVMKLSRIQHDQPVKPLDRAVFWIEFVMRHKGAKHLRVAAHDLTWFQYHSLDVIGFLLVCVATVIFIVTKCCLFCFWKFARKAKKGKND

SEQ ID NO: 13919 - protein, 369 aa, Homo sapiens
MSVKWTSVILLIQLSFCFSSGNCGKVLVWAAEYSHWMNIKTILDELIQRGHEVTVLASSASILFDPNNSSALKIEIYPTSLTKTELENFIMQQIKRWSDLPKDTFWLYFSQVQEIMSIFGDITRKFCKDVVSNKKFMKKVQESRFDVIFADAIFPCSELLAELFNIPFVYSLSFSPGYTFEKHSGGFIFPPSYVPVVMSELTDQMTFMERVKNMIYVLYFDFWFEIFDMKKWDQFYSEVLGRPTTLSETMGKADVWLIRNSWNFQFPYPLLPNVDFVGGLHCKPAKPLPKEMEDFVQSSGENGVVVFSLGSMVSNMTEERANVIASALAQIPQKVLWRFDGNKPDTLGLNTRLYKWIPQNDLLDIKRML

SEQ ID NO: 13920 - protein, 335 aa, Homo sapiens
MSVKWTSVILLIQLSFCFSSGNCGKVLVWAAEYSHWMNIKTILDELIQRGHEVTVLASSASILFDPNNSSALKIEIYPTSLTKTELENFIMQQIKRWSDLPKDTFWLYFSQVQEIMSIFGDITRKFCKDVVSNKKFMKKVQESRFDVIFADAIFPCSELLAELFNIPFVYSLSFSPGYTFEKHSGGFIFPPSYVPVVMSELTDQMTFMERVKNMIYVLYFDFWFEIFDMKKWDQFYSEVLGRPTTLSETMGKADVWLIRNSWNFQFPYPLLPNVDFVGGLHCKPAKPLPKEMEDFVQSSGENGVVVFSLGSMVSNMTEERANVIASALAQIPQKI

SEQ ID NO: 13921 - protein, 252 aa, Homo sapiens
MLHQSGKFLIPDIKEEEKSYQVIRWFSPEDHQKRIKKHFDSYIETALDGRKESEALVKLMEIFGTQCSYLLSRKDIMDSLKNENYDLVFVEAFDFCSFLIAEKLVKPFVAILPTTFGSLDFGLPSPLSYVPVFPSLLTDHMDFWGRVKNFLMFFSFSRSQWDMQSTFDNTIKEHFPEGSRPVLSHLLLKAELWFVNSDFAFDFARPLLPNTVYIGGLMEKPIKPVPQNGQPALFTTPSLFSSGVYPEPLRWL

SEQ ID NO: 13922 - protein, 252 aa, Homo sapiens; identical to SEQ ID NO: 13921

SEQ ID NO: 13923 - protein, 402 aa, Homo sapiens
MVGQRVLLLVAFLLSGVLLSEAAKILTISTLDIKEEEKSYQVIRWFSPEDHQKRIKKHFDSYIETALDGRKESEALVKLMEIFGTQCSYLLSRKDIMDSLKNENYDLVFVEAFDFCSFLIAEKLVKPFVAILPTTFGSLDFGLPSPLSYVPVFPSLLTDHMDFWGRVKNFLMFFSFSRSQWDMQSTFDNTIKEHFPEGSRPVLSHLLLKAELWFVNSDFAFDFARPLLPNTVYIGGLMEKPIKPVPQDLDNFIANFGDAGFVLVAFGSMLNTHQSQEVLKKMHNAFAHLPQGVIWTCQSSHWPRDVHLATNVKIVDWLPQSDLLAHPSIRLFVTHGGQNSVMEAIRHGVPMVGLPVNGDQHGNMVRVVAKNYGVSIRLNQVTADTLTLTMKQVIEDKRYVAL

SEQ ID NO: 13924 - protein, 57 aa, Homo sapiens
MVGQRVLLLVAFLLSGVLLSEAAKILTISTLGECLAGEFPDRRVPDPRTARAPANGD

SEQ ID NO: 13925 - protein, 523 aa, Homo sapiens
MVGQRVLLLVAFLLSGVLLSEAAKILTISTLGGSHYLLLDRVSQILQEHGHNVTMLHQSGKFLIPDIKEEEKSYQVIRWFSPEDHQKRIKKHFDSYIETALDGRKESEALVKLMEIFGTQCSYLLSRKDIMDSLKNENYDLVFVEAFDFCSFLIAEKLVKPFVAILPTTFGSLDFGLPSPLSYVPVFPSLLTDHMDFWGRVKNFLMFFSFSRSQWDMQSTFDNTIKEHFPEGSRPVLSHLLLKAELWFVNSDFAFDFARPLLPNTVYIGGLMEKPIKPVPQDLDNFIANFGDAGFVLVAFGSMLNTHQSQEVLKKMHNAFAHLPQGVIWTCQSSHWPRDVHLATNVKIVDWLPQSDLLAHPSIRLFVTHGGQNSVMEAIRHGVPMVGLPVNGDQHGNMVRVVAKNYGVSIRLNQVTADTLTLTMKQVIEDKRYKSAVVAASVILHSQPLSPAQRLVGWIDHILQTGGATHLKPYAFQQPWHEQYLIDVFVFLLGLTLGTMWLCGKLLGVVARWLRGARKVKKT

SEQ ID NO: 13926 - protein, 436 aa, Homo sapiens
MVGQRVLLLVAFLLSGVLLSEAAKILTISTLGGSHYLLLDRVSQILQEHGHNVTMLHQSGKFLIPDIKEEEKSYQVIRWFSPEDHQKRIKKHFDSYIETALDGRKESEALVKLMEIFGTQCSYLLSRKDIMDSLKNENYDLVFVEAFDFCSFLIAEKLVKPFVAILPTTFGSLDFGLPSPLSYVPVFPSLLTDHMDFWGRVKNFLMFFSFSRSQWDMQSTFDNTIKEHFPEGSRPVLSHLLLKAELWFVNSDFAFDFARPLLPNTVYIGGLMEKPIKPVPQDLDNFIANFGDAGFVLVAFGSMLNTHQSQEVLKKMHNAFAHLPQGVIWTCQSSHWPRDVHLATNVKIVDWLPQSDLLAHPSIRLFVTHGGQNSVMEAIRHGVPMVGLPVNGDQHGNMVRVVAKNYGVSIRLNQVTADTLTLTMKQVIEDKRYVAL

SEQ ID NO: 13927 - protein, 489 aa, Homo sapiens
MAGQRVLLLVGFLLPGVLLSEAAKILTISTVDFKKEEKSYQVISWLAPEDHQREFKKSFDFFLEETLGGRGKFENLLNVLEYLALQCSHFLNRKDIMDSLKNENFDMVIVETFDYCPFLIAEKLGKPFVAILSTSFGSLEFGLPIPLSYVPVFRSLLTDHMDFWGRVKNFLMFFSFCRRQQHMQSTFDNTIKEHFTEGSRPVLSHLLLKAELWFINSDFAFDFARPLLPNTVYVGGLMEKPIKPVPQDLENFIAKFGDSGFVLVTLGSMVNTCQNPEIFKEMNNAFAHLPQGVIWKCQCSHWPKDVHLAANVKIVDWLPQSDLLAHPSIRLFVTHGGQNSIMEAIQHGVPMVGIPLFGDQPENMVRVEAKKFGVSIQLKKLKAETLALKMKQIMEDKRYKSAAVAASVILRSHPLSPTQRLVGWIDHVLQTGGATHLKPYVFQQPWHEQYLLDVFVFLLGLTLGTLWLCGKLLGMAVWWLRGARKVKET

SEQ ID NO: 13928 - protein, 138 aa, Homo sapiens
MAGQRVLLLVGFLLPGVLLSEAAKILTISTVGGSHYLLMDRVSQILQDHGHNVTMLNHKRGPFMPDFKKEEKSYQVISWLAPEDHQREFKKSFDFFLEETLGGRGKFENLLNVLEYLALQCSHFLNRKDIMDSLKNEN

SEQ ID NO: 13929 - protein, 523 aa, Homo sapiens
MAGQRVLLLVGFLLPGVLLSEAAKILTISTVGGSHYLLMDRVSQILQDHGHNVTMLNHKRGPFMPDFKKEEKSYQVISWLAPEDHQREFKKSFDFFLEETLGGRGKFENLLNVLEYLALQCSHFLNRKDIMDSLKNENFDMVIVETFDYCPFLIAEKLGKPFVAILSTSFGSLEFGLPIPLSYVPVFRSLLTDHMDFWGRVKNFLMFFSFCRRQQHMQSTFDNTIKEHFTEGSRPVLSHLLLKAELWFINSDFAFDFARPLLPNTVYVGGLMEKPIKPVPQDLENFIAKFGDSGFVLVTLGSMVNTCQNPEIFKEMNNAFAHLPQGVIWKCQCSHWPKDVHLAANVKIVDWLPQSDLLAHPSIRLFVTHGGQNSIMEAIQHGVPMVGIPLFGDQPENMVRVEAKKFGVSIQLKKLKAETLALKMKQIMEDKRYKSAAVAASVILRSHPLSPTQRLVGWIDHVLQTGGATHLKPYVFQQPWHEQYLLDVFVFLLGLTLGTLWLCGKLLGMAVWWLRGARKVKET

SEQ ID NO: 13930 - protein, 120 aa, Homo sapiens
MAGQRVLLLVGFLLPGVLLSEAAKILTISTVGGSHYLLMDRVSQILQDHGHNVTMLNHKRGPFMPDFKKEEKSYQVISWLAPEDHQREFKKSFDFFLEETLGGRTWRTSLPSLGTLVLSL

SEQ ID NO: 13931 - protein, 141 aa, Homo sapiens
MKSYTPYFILLWSAVGIAKAAKIIIVPPIMFESHMYIFKTLASALHERGHHTVFLLSEGRDIAPSNHYSLQRYPGIFNSTTSDAFLQSKMRNIFSGRLTAIELFDILDHYTKNCDLMVGNHALIQGLKKEKFDLLLVDPND

SEQ ID NO: 13932 - protein, 541 aa, Homo sapiens
MKSYTPYFILLWSAVGIAKAAKIIIVPPIMFESHMYIFKTLASALHERGHHTVFLLSEGRDIAPSNHYSLQRYPGIFNSTTSDAFLQSKMRNIFSGRLTAIELFDILDHYTKNCDLMVGNHALIQGLKKEKFDLLLVDPNDMCGFVIAHLLGVKYAVFSTGLWYPAEVGAPAPLAYVPEFNSLLTDRMNLLQRMKNTGVYLISRLGVSFLVLPKYERIMQKYNLLPEKSMYDLVHGSSLWMLCTDVALEFPRPTLPNVVYVGGILTKPASPLPEDLQRWVNGANEHGFVLVSFGAGVKYLSEDIANKLAGALGRLPQKVIWRFSGPKPKNLGNNTKLIEWLPQNDLLGHSKIKAFLSHGGLNSIFETIYHGVPVVGIPLFGDHYDTMTRVQAKGMGILLEWKTVTEKELYEALVKVINNPSYRQRAQKLSEIHKDQPGHPVNRTIYWIDYIIRHNGAHHLRAAVHQISFCQYFLLDIAFVLLLGAALLYFLLSWVTKFIYRKIKSLWSRNKHSTVNGHYHNGILNGKYKRNGHIKHEKKVK

SEQ ID NO: 13933 - protein, 541 aa, Homo sapiens; identical to SEQ ID NO: 13932

SEQ ID NO: 13934 - protein, 244 aa, Homo sapiens
MAAAASPAILPRLAILPYLLFDWSGTGRADAHSLWYNFTIIHLPRHGQQWCEVQSQVDQKNFLSYDCGSDKVLSMGHLEEQLYATDAWGKQLEMLREVGQRLRLELADTELEDFTPSGPLTLQVRMSCECEADGYIRGSWQFSFDGRKFLLFDSNNRKWTVVHAGARRMKEKWEKDSGLTTFFKMVSMRDCKSWLRDFLMHRKKRLEPTAPPTMAPGLAQPKAIATTLSPWSFLIILCFILPGI

SEQ ID NO: 13935 - protein, 244 aa, Homo sapiens; identical to SEQ ID NO: 13934

SEQ ID NO: 13936 - protein, 29 aa, Homo sapiens
MGQPSLTWMLMVVVASWFITTAATDTSEA

SEQ ID NO: 13937 - protein, 673 aa, Homo sapiens
MGQPSLTWMLMVVVASWFITTAATDTSEARTKYNCPARWSWRTPQRGGDTEQGPDEDFTSQGRWCSECHSNATCTEDEAVTTCTCQEGFTGDGLTCVDLDECAIPGAHNCSANSSCVNTPGSFSCVCPEGFRLSPGLGCTDVDECAEPGLSHCHALATCVNVVGSYLCVCPAGYRGDGWHCECSPGSCGPGLDCVPEGDALVCADPCQAHRTLDEYWRSTEYGEGYACDTDLRGWYRFVGQGGARMAETCVPVLRCNTAAPMWLNGTHPSSDEGIVSRKACAHWSGHCCLWDASVQVKACAGGYYVYNLTAPPECHLAYCTDPSSVEGTCEECSIDEDCKSNNGRWHCQCKQDFNITDISLLEHRLECGANDMKVSLGKCQLKSLGFDKVFMYLSDSRCSGFNDRDNRDWVSVVTPARDGPCGTVLTRNETHATYSNTLYLADEIIIRDLNIKINFACSYPLDMKVSLKTALQPMVSALNIRVGGTGMFTVRMALFQTPSYTQPYQGSSVTLSTEAFLYVGTMLDGGDLSRFALLMTNCYATPSSNATDPLKYFIIQDRCPHTRDSTIQVVENGESSQGRFSVQMFRFAGNYDLVYLHCEVYLCDTMNEKCKPTCSGTRFRSGSVIDQSRVLNLGPITRKGVQATVSRAFSSLGLLKVWLPLLLSATLTLTFQ

SEQ ID NO: 13938 - protein, 161 aa, Homo sapiens
MGQPSLTWMLMVVVASWFITTAATDTSEARTKYNCPARWSWRTPQRGGDTEQGPDEDFTSQGSRKHKMCKEREGQQVHRKSYQRWCSECHSNATCTEDEAVTTCTCQEGFTGDGLTCVDLDECAIPGAHNCSANSSCVNTPGSFSCVCPEGFRLSPGLGCT

SEQ ID NO: 13939 - protein, 161 aa, Homo sapiens
MGQPSLTWMLMVVVASWFITTAATDTSEARTKYNCPARWSWRTPQRGGDTEQGWCSECHSNATCTEDEAVTTCTCQEGFTGDGLTCVDLDECAIPGAHNCSANSSCVNTPGSFSCVCPEGFRLSPGLGCTDVDECAEPGLSHCHALATCVNVVGSYLCVCP

SEQ ID NO: 13940 - protein, 86 aa, Homo sapiens
MGQPSLTWMLMVVVASWFITTAATDTSEARWCSECHSNATCTEDEAVTTCTCQEGFTGDGLTCVDLDECAIPGAHNCSANSSCVNT

SEQ ID NO: 13941 - protein, 88 aa, Homo sapiens
MGQPSLTWMLMVVVASWFITTAATDTSEARWCSECHSNATCTEDEAVTTCTCQEGFTGDGLTCVDLDECAIPGAHNCSANSSCVNTPG

SEQ ID NO: 13942 - protein, 103 aa, Homo sapiens
MGQPSLTWMLMVVVASWFITTAATDTSEARWCSECHSNATCTEDEAVTTCTCQEGFTGDGLTCVDLDECAIPGAHNCSANSSCVNTPGSFSCVCPEGFRLSPG

SEQ ID NO: 13943 - protein, 125 aa, Homo sapiens
MGQPSLTWMLMVVVASWFITTAATDTSEARWCSECHSNATCTEDEAVTTCTCQEGFTGDGLTCVDLDECAIPGAHNCSANSSCVNTPGSFSCVCPEGFRLSPGLGCTDVDECAEPGLSHCHALAT

SEQ ID NO: 13944 - protein, 640 aa, Homo sapiens
MGQPSLTWMLMVVVASWFITTAATDTSEARWCSECHSNATCTEDEAVTTCTCQEGFTGDGLTCVDLDECAIPGAHNCSANSSCVNTPGSFSCVCPEGFRLSPGLGCTDVDECAEPGLSHCHALATCVNVVGSYLCVCPAGYRGDGWHCECSPGSCGPGLDCVPEGDALVCADPCQAHRTLDEYWRSTEYGEGYACDTDLRGWYRFVGQGGARMAETCVPVLRCNTAAPMWLNGTHPSSDEGIVSRKACAHWSGHCCLWDASVQVKACAGGYYVYNLTAPPECHLAYCTDPSSVEGTCEECSIDEDCKSNNGRWHCQCKQDFNITDISLLEHRLECGANDMKVSLGKCQLKSLGFDKVFMYLSDSRCSGFNDRDNRDWVSVVTPARDGPCGTVLTRNETHATYSNTLYLADEIIIRDLNIKINFACSYPLDMKVSLKTALQPMVSALNIRVGGTGMFTVRMALFQTPSYTQPYQGSSVTLSTEAFLYVGTMLDGGDLSRFALLMTNCYATPSSNATDPLKYFIIQDRCPHTRDSTIQVVENGESSQGRFSVQMFRFAGNYDLVYLHCEVYLCDTMNEKCKPTCSGTRFRSGSVIDQSRVLNLGPITRKGVQATVSRAFSSLGLLKVWLPLLLSATLTLTFQ

SEQ ID NO: 13945 - protein, 640 aa, Homo sapiens; identical to SEQ ID NO: 13944

SEQ ID NO: 13946 - protein, 689 aa, Homo sapiens
MRHIMTRLTLPFWLQDTRHQRQREKFKGPTRLSFGQVLSRPEVAGRAERMGQPSLTWMLMVVVASWFITTAATDTSEARWCSECHSNATCTEDEAVTTCTCQEGFTGDGLTCVDLDECAIPGAHNCSANSSCVNTPGSFSCVCPEGFRLSPGLGCTDVDECAEPGLSHCHALATCVNVVGSYLCVCPAGYRGDGWHCECSPGSCGPGLDCVPEGDALVCADPCQAHRTLDEYWRSTEYGEGYACDTDLRGWYRFVGQGGARMAETCVPVLRCNTAAPMWLNGTHPSSDEGIVSRKACAHWSGHCCLWDASVQVKACAGGYYVYNLTAPPECHLAYCTDPSSVEGTCEECSIDEDCKSNNGRWHCQCKQDFNITDISLLEHRLECGANDMKVSLGKCQLKSLGFDKVFMYLSDSRCSGFNDRDNRDWVSVVTPARDGPCGTVLTRNETHATYSNTLYLADEIIIRDLNIKINFACSYPLDMKVSLKTALQPMVSALNIRVGGTGMFTVRMALFQTPSYTQPYQGSSVTLSTEAFLYVGTMLDGGDLSRFALLMTNCYATPSSNATDPLKYFIIQDRCPHTRDSTIQVVENGESSQGRFSVQMFRFAGNYDLVYLHCEVYLCDTMNEKCKPTCSGTRFRSGSVIDQSRVLNLGPITRKGVQATVSRAFSSLGLLKVWLPLLLSATLTLTFQ

SEQ ID NO: 13947 - protein, 138 aa, Homo sapiens
MRHIMTRLTLPFWLQVLSRPEVAGRAERMGQPSLTWMLMVVVASWFITTAATDTSEARWCSECHSNATCTEDEAVTTCTCQEGFTGDGLTCVDLDECAIPGAHNCSANSSCVNTPGSFSCVCPEGFRLSPGLGCTDVD

SEQ ID NO: 13948 - protein, 890 aa, Homo sapiens
DDDFFHELPETFPSDPPEPLPHFLIEPEEAYIVKNKPVNLYCKASPATQIYFKCNSEWVHQKDHIVDERVDETSGLIVREVSIEISRQQVEELFGPEDYWCQCVAWSSAGTTKSRKAYVRIAYLRKTFEQEPLGKEVSLEQEVLLQCRPPEGIPVAEVEWLKNEDIIDPVEDRNFYITIDHNLIIKQARLSDTANYTCVAKNIVAKRKSTTATVIVYVNGGWSTWTEWSVCNSRCGRGYQKRTRTCTNPAPLNGGAFCEGQSVQKIACTTLCPVDGRWTPWSKWSTCGTECTHWRRRECTAPAPKNGGKDCDGLVLQSKNCTDGLCMQTAPDSDDVALYVGIVIAVIVCLAISVVVALFVYRKNHRDFESDIIDSSALNGGFQPVNIKAARQDLLAVPPDLTSAAAMYRGPVYALHDVSDKIPMTNSPILDPLPNLKIKVYNTSGAVTPQDDLSEFTSKLSPQMTQSLLENEALSLKNQSLARQTDPSCTAFGSFNSLGGHLIVPNSGVSLLIPAGAIPQGRVYEMYVTVHRKETMRPPMDDSQTLLTPVVSCGPPGALLTRPVVLTMHHCADPNTEDWKILLKNQAAQGQWEDVVVVGEENFTTPCYIQLDAEACHILTENLSTYALVGHSTTKAAAKRLKLAIFGPLCCSSLEYSIRVYCLDDTQDALKEILHLERQMGGQLLEEPKALHFKGSTHNLRLSIHDIAHSLWKSKLLAKYQEIPFYHVWSGSQRNLHCTFTLERFSLNTVELVCKLCVRQVEGEGQIFQLNCTVSEEPTGIDLPLLDPANTITTVTGPSAFSIPLPIRQKLCSSLDAPQTRGHDWRMLAHKLNLDRYLNYFATKSSPTGVILDLWEAQNFPDGNLSMLAAVLEEMGRHETVVSLAAEGQY

SEQ ID NO: 13949 - protein, 931 aa, Homo sapiens
MRKGLRATAARCGLGLGYLLQMLVLPALALLSASGTGSAAQDDDFFHELPETFPSDPPEPLPHFLIEPEEAYIVKNKPVNLYCKASPATQIYFKCNSEWVHQKDHIVDERVDETSGLIVREVSIEISRQQVEELFGPEDYWCQCVAWSSAGTTKSRKAYVRIAYLRKTFEQEPLGKEVSLEQEVLLQCRPPEGIPVAEVEWLKNEDIIDPVEDRNFYITIDHNLIIKQARLSDTANYTCVAKNIVAKRKSTTATVIVYVNGGWSTWTEWSVCNSRCGRGYQKRTRTCTNPAPLNGGAFCEGQSVQKIACTTLCPVDGRWTPWSKWSTCGTECTHWRRRECTAPAPKNGGKDCDGLVLQSKNCTDGLCMQTAPDSDDVALYVGIVIAVIVCLAISVVVALFVYRKNHRDFESDIIDSSALNGGFQPVNIKAARQDLLAVPPDLTSAAAMYRGPVYALHDVSDKIPMTNSPILDPLPNLKIKVYNTSGAVTPQDDLSEFTSKLSPQMTQSLLENEALSLKNQSLARQTDPSCTAFGSFNSLGGHLIVPNSGVSLLIPAGAIPQGRVYEMYVTVHRKETMRPPMDDSQTLLTPVVSCGPPGALLTRPVVLTMHHCADPNTEDWKILLKNQAAQGQWEDVVVVGEENFTTPCYIQLDAEACHILTENLSTYALVGHSTTKAAAKRLKLAIFGPLCCSSLEYSIRVYCLDDTQDALKEILHLERQMGGQLLEEPKALHFKGSTHNLRLSIHDIAHSLWKSKLLAKYQEIPFYHVWSGSQRNLHCTFTLERFSLNTVELVCKLCVRQVEGEGQIFQLNCTVSEEPTGIDLPLLDPANTITTVTGPSAFSIPLPIRQKLCSSLDAPQTRGHDWRMLAHKLNLDRYLNYFATKSSPTGVILDLWEAQNFPDGNLSMLAAVLEEMGRHETVVSLAAEGQY

SEQ ID NO: 13950 - protein, 260 aa, Homo sapiens
MRKGLRATAARCGLGLGYLLQMLVLPALALLSASGTGSAAQDDDFFHELPETFPSDPPEPLPHFLIEPEEAYIVKNKPVNLYCKASPATQIYFKCNSEWVHQKDHIVDERVDETSGLIVREVSIEISRQQVEELFGPEDYWCQCVAWSSAGTTKSRKAYVRIAYLRKTFEQEPLGKEVSLEQEVLLQCRPPEGIPVAEVEWLKNEDIIDPVEDRNFYITIDHNLIIKQARLSDTANYTCVAKNIVAKRKSTTATVIVYGP

SEQ ID NO: 13951 - protein, 597 aa, Homo sapiens
MRKGLRATAARCGLGLGYLLQMLVLPALALLSASGTGSAAQDDDFFHELPETFPSDPPEPLPHFLIEPEEAYIVKNKPVNLYCKASPATQIYFKCNSEWVHQKDHIVDERVDETSGLIVREVSIEISRQQVEELFGPEDYWCQCVAWSSAGTTKSRKAYVRIAYLRKTFEQEPLGKEVSLEQEVLLQCRPPEGIPVAEVEWLKNEDIIDPVEDRNFYITIDHNLIIKQARLSDTANYTCVAKNIVAKRKSTTATVIVYVNGGWSTWTEWSVCNSRCGRGYQKRTRTCTNPAPLNGGAFCEGQSVQKIACTTLCPVDGRWTPWSKWSTCGTECTHWRRRECTAPAPKNGGKDCDGLVLQSKNCTDGLCMQSFIYPISTEQRTQNEYGFSSAPDSDDVALYVGIVIAVIVCLAISVVVALFVYRKNHRDFESDIIDSSALNGGFQPVNIKAARQDLLAVPPDLTSAAAMYRGPVYALHDVSDKIPMTNSPILDPLPNLKIKVYNTSGAVTPQDDLSEFTSKLSPQMTQSLLENEALSLKNQSLARQTDPSCTAFGSFNSLGGHLIVPNSGVSLLIPAGAIPQGRVYEMYVTVHRKETMR

SEQ ID NO: 13952 - protein, 745 aa, Homo sapiens
MRKGLRATAARCGLGLGYLLQMLVLPALALLSASGTGSAAQDDDFFHELPETFPSDPPEPLPHFLIEPEEAYIVKNKPVNLYCKASPATQIYFKCNSEWVHQKDHIVDERVDETSGLIVREVSIEISRQQVEELFGPEDYWCQCVAWSSAGTTKSRKAYVRIAYLRKTFEQEPLGKEVSLEQEVLLQCRPPEGIPVAEVEWLKNEDIIDPVEDRNFYITIDHNLIIKQARLSDTANYTCVAKNIVAKRKSTTATVIVYVNGGWSTWTEWSVCNSRCGRGYQKRTRTCTNPAPLNGGAFCEGQSVQKIACTTLCPVDGRWTPWSKWSTCGTECTHWRRRECTAPAPKNGGKDCDGLVLQSKNCTDGLCMQSFIYPISTEQRTQNEYGFSSAPDSDDVALYVGIVIAVIVCLAISVVVALFVYRKNHRDFESDIIDSSALNGGFQPVNIKAARQDLLAVPPDLTSAAAMYRGPVYALHDVSDKIPMTNSPILDPLPNLKIKVYNTSGAVTPQDDLSEFTSKLSPQMTQSLLENEALSLKNQSLARQTDPSCTAFGSFNSLGGHLIVPNSGVSLLIPAGAIPQGRVYEMYVTVHRKETMRPPMDDSQTLLTPVVSCGPPGALLTRPVVLTMHHCADPNTEDWKILLKNQAAQGQWEDVVVVGEENFTTPCYIQLDAEACHILTENLSTYALVGHSTTKAAAKRLKLAIFGPLCCSSLEYSIRVYCLDDTQDALKEILHLERQMGGQLL

SEQ ID NO: 13953 - protein, 265 aa, Homo sapiens
MGLPWGQPHLGLQMLLLALNCLRPSLSLELVPYTPQITAWDLEGKVTATTFSLEQPRCVFDGLASASDTVWLVVAFSNASRGFQNPETLADIPASPQLLTDGHYMTLPLSPDQLPCGDPMAGSGGAPVLRVGHDHGCHQQPFCNAPLPGPGPYREDPRIHRHLARAAKWQHDRHYLHPLFSGRPPTLGLLGSLYHALLQPVVAGGGPGAAADRLLHGQALHDPPHPTQRGRHTAGGLQAWPGPPPQPQPLAWPLCMGLGEMGRWE

SEQ ID NO: 13954 - protein, 276 aa, Homo sapiens
MGLPWGQPHLGLQMLLLALNCLRPSLSLELVPYTPQITAWDLEGKVTATTFSLEQPRCVFDGLASASDTVWLVVAFSNASRGFQNPETLADIPASPQLLTDGHYMTLPLSPDQLPCGDPMAGSGGAPVLRVGHDHGCHQQPFCNAPLPGPGPYRVKFLLMDTRGSPRAETKWSDPITLHQGKTPGSIDTWPGRRSGSMIVITSILSSLAGLLLLAFLAASTMRFSSLWWPEEAPEQLRIGSFMGKRYMTHHIPPREAATLPVGCKPGLDPLPSLSP

SEQ ID NO: 13955 - protein, 320 aa, Homo sapiens
MGLPWGQPHLGLQMLLLALNCLRPSLSLGEWGSWMDASSQTQGAGGPAGVIGPWAPAPLRLGEAAPGTPTPVSVAHLLSPVATELVPYTPQITAWDLEGKVTATTFSLEQPRCVFDGLASASDTVWLVVAFSNASRGFQNPETLADIPASPQLLTDGHYMTLPLSPDQLPCGDPMAGSGGAPVLRVGHDHGCHQQPFCNAPLPGPGPYREDPRIHRHLARAAKWQHDRHYLHPLFSGRPPTLGLLGSLYHALLQPVVAGGGPGAAADRLLHGQALHDPPHPTQRGRHTAGGLQAWPGPPPQPQPLAWPLCMGLGEMGRWE

SEQ ID NO: 13956 - protein, 920 aa, Homo sapiens
MATVAANPAAAAAAVAAAAAVTEDREPQHEELPGLDSQWRQIENGESGRERPLRAGESWFLVEKHWYKQWEAYVQGGDQDSSTFPGCINNATLFQDEINWRLKEGLVEGEDYVLLPAAAWHYLVSWYGLEHGQPPIERKVIELPNIQKVEVYPVELLLVRHNDLGKSHTVQFSHTDSIGLVLRTARERFLVEPQEDTRLWAKNSEGSLDRLYDTHITVLDAALETGQLIIMETRKKDGTWPSAQLHVMNNNMSEEDEDFKGQPGICGLTNLGNTCFMNSALQCLSNVPQLTEYFLNNCYLEELNFRNPLGMKGEIAEAYADLVKQAWSGHHRSIVPHVFKNKVGHFASQFLGYQQHDSQELLSFLLDGLHEDLNRVKKKEYVELCDAAGRPDQEVAQEAWQNHKRRNDSVIVDTFHGLFKSTLVCPDCGNVSVTFDPFCYLSVPLPISHKRVLEVFFIPMDPRRKPEQHRLVVPKKGKISDLCVALSKHTGISPERMMVADVFSHRFYKLYQLEEPLSSILDRDDIFVYEVSGRIEAIEGSREDIVVPVYLRERTPARDYNNSYYGLMLFGHPLLVSVPRDRFTWEGLYNVLMYRLSRYVTKPNSDDEDDGDEKEDDEEDKDDVPGPSTGGSLRDPEPEQAGPSSGVTNRCPFLLDNCLGTSQWPPRRRRKQLFTLQTVNSNGTSDRTTSPEEVHAQPYIAIDWEPEMKKRYYDEVEAEGYVKHDCVGYVMKKAPVRLQECIELFTTVETLEKENPWYCPSCKQHQLATKKLDLWMLPEILIIHLKRFSYTKFSREKLDTLVEFPIRDLDFSEFVIQPQNESNPELYKYDLIAVSNHYGGMRDGHYTTFACNKDSGQWHYFDDNSVSPVNENQIESKAAYVLFYQRQDVARRLLSPAGSSGAPASPACSSPPSSEFMDVN

SEQ ID NO: 13957 - protein, 963 aa, Homo sapiens
MAVAPRLFGGLCFRFRDQNPEVAVEGRLPISHSCVGCRRERTAMATVAANPAAAAAAVAAAAAVTEDREPQHEELPGLDSQWRQIENGESGRERPLRAGESWFLVEKHWYKQWEAYVQGGDQDSSTFPGCINNATLFQDEINWRLKEGLVEGEDYVLLPAAAWHYLVSWYGLEHGQPPIERKVIELPNIQKVEVYPVELLLVRHNDLGKSHTVQFSHTDSIGLVLRTARERFLVEPQEDTRLWAKNSEGSLDRLYDTHITVLDAALETGQLIIMETRKKDGTWPSAQLHVMNNNMSEEDEDFKGQPGICGLTNLGNTCFMNSALQCLSNVPQLTEYFLNNCYLEELNFRNPLGMKGEIAEAYADLVKQAWSGHHRSIVPHVFKNKVGHFASQFLGYQQHDSQELLSFLLDGLHEDLNRVKKKEYVELCDAAGRPDQEVAQEAWQNHKRRNDSVIVDTFHGLFKSTLVCPDCGNVSVTFDPFCYLSVPLPISHKRVLEVFFIPMDPRRKPEQHRLVVPKKGKISDLCVALSKHTGISPERMMVADVFSHRFYKLYQLEEPLSSILDRDDIFVYEVSGRIEAIEGSREDIVVPVYLRERTPARDYNNSYYGLMLFGHPLLVSVPRDRFTWEGLYNVLMYRLSRYVTKPNSDDEDDGDEKEDDEEDKDDVPGPSTGGSLRDPEPEQAGPSSGVTNRCPFLLDNCLGTSQWPPRRRRKQLFTLQTVNSNGTSDRTTSPEEVHAQPYIAIDWEPEMKKRYYDEVEAEGYVKHDCVGYVMKKAPVRLQECIELFTTVETLEKENPWYCPSCKQHQLATKKLDLWMLPEILIIHLKRFSYTKFSREKLDTLVEFPIRDLDFSEFVIQPQNESNPELYKYDLIAVSNHYGGMRDGHYTTFACNKDSGQWHYFDDNSVSPVNENQIESKAAYVLFYQRQDVARRLLSPAGSSGAPASPACSSPPSSEFMDVN

SEQ ID NO: 13958 - protein, 49 aa, Homo sapiens
METRKKDGTWPSAQLHVMNNNMSEEDEDFKGQPGICGLTNLGNTCFMNS

SEQ ID NO: 13959 - protein, 140 aa, Homo sapiens
METRKKDGTWPSAQLHVMNNNMSEEDEDFKGQPGICGLTNLGNTCFMNSALQCLSNVPQLTEYFLNNCYLEELNFRNPLGMKGEIAEAYADLVKQAWSGHHRSIVPHVFKNKVGHFASQFLGYQQHDSQELLSFLLDGLH

SEQ ID NO: 13960 - protein, 494 aa, Homo sapiens
MPLYSVTVKWGKEKFEGVELNTDEPPMVFKAQLFALTGVQPARQKVMVKGGTLKDDDWGNIKIKNGMTLLMMGSADALPEEPSAKTVFVEDMTEEQLASAMELPCGLTNLGNTCYMNATVQCIRSVPELKDALKRYAGALRASGEMASAQYITAALRDLFDSMDKTSSSIPPIILLQFLHMAFPQFAEKGEQGQYLQQDANECWIQMMRVLQQKLEAIEDDSVKETDSSSASAATPSKKKSLIDQFFGVEFETTMKCTESEEEEVTKGKENQLQLSCFINQEVKYLFTGLKLRLQEEITKQSPTLQRNALYIKSSKISRLPAYLTIQMVRFFYKEKESVNAKVLKDVKFPLMLDMYELCTPELQEKMVSFRSKFKDLEDKKVNQQPNTSDKKSSPQKEVKYEPFSFADDIGSNNCGYYDLQAVLTHQGRSSSSGHYVSWVKRKQDEWIKFDDDKVSIVTPEDILRLSGGGDWHIAYVLLYGPRRVEIMEEESEQ

SEQ ID NO: 13961 - protein, 459 aa, Homo sapiens
MPLYSVTVKWGKEKFEGVELNTDEPPMVFKAQLFALTGVQPARQKVMVKGGTLKDDDWGNIKIKNMELPCGLTNLGNTCYMNATVQCIRSVPELKDALKRYAGALRASGEMASAQYITAALRDLFDSMDKTSSSIPPIILLQFLHMAFPQFAEKGEQGQYLQQDANECWIQMMRVLQQKLEAIEDDSVKETDSSSASAATPSKKKSLIDQFFGVEFETTMKCTESEEEEVTKGKENQLQLSCFINQEVKYLFTGLKLRLQEEITKQSPTLQRNALYIKSSKISRLPAYLTIQMVRFFYKEKESVNAKVLKDVKFPLMLDMYELCTPELQEKMVSFRSKFKDLEDKKVNQQPNTSDKKSSPQKEVKYEPFSFADDIGSNNCGYYDLQAVLTHQGRSSSSGHYVSWVKRKQDEWIKFDDDKVSIVTPEDILRLSGGGDWHIAYVLLYGPRRVEIMEEESEQ

SEQ ID NO: 13962 - protein, 483 aa, Homo sapiens
MPLYSVTVKWGKEKFEGVELNTDEPPMVFKAQLFALTGVQPARQKVMVKGGTLKGMTLLMMGSADALPEEPSAKTVFVEDMTEEQLASAMELPCGLTNLGNTCYMNATVQCIRSVPELKDALKRYAGALRASGEMASAQYITAALRDLFDSMDKTSSSIPPIILLQFLHMAFPQFAEKGEQGQYLQQDANECWIQMMRVLQQKLEAIEDDSVKETDSSSASAATPSKKKSLIDQFFGVEFETTMKCTESEEEEVTKGKENQLQLSCFINQEVKYLFTGLKLRLQEEITKQSPTLQRNALYIKSSKISRLPAYLTIQMVRFFYKEKESVNAKVLKDVKFPLMLDMYELCTPELQEKMVSFRSKFKDLEDKKVNQQPNTSDKKSSPQKEVKYEPFSFADDIGSNNCGYYDLQAVLTHQGRSSSSGHYVSWVKRKQDEWIKFDDDKVSIVTPEDILRLSGGGDWHIAYVLLYGPRRVEIMEEESEQ

SEQ ID NO: 13963 - protein, 448 aa, Homo sapiens
MPLYSVTVKWGKEKFEGVELNTDEPPMVFKAQLFALTGVQPARQKVMVKGGTLKMELPCGLTNLGNTCYMNATVQCIRSVPELKDALKRYAGALRASGEMASAQYITAALRDLFDSMDKTSSSIPPIILLQFLHMAFPQFAEKGEQGQYLQQDANECWIQMMRVLQQKLEAIEDDSVKETDSSSASAATPSKKKSLIDQFFGVEFETTMKCTESEEEEVTKGKENQLQLSCFINQEVKYLFTGLKLRLQEEITKQSPTLQRNALYIKSSKISRLPAYLTIQMVRFFYKEKESVNAKVLKDVKFPLMLDMYELCTPELQEKMVSFRSKFKDLEDKKVNQQPNTSDKKSSPQKEVKYEPFSFADDIGSNNCGYYDLQAVLTHQGRSSSSGHYVSWVKRKQDEWIKFDDDKVSIVTPEDILRLSGGGDWHIAYVLLYGPRRVEIMEEESEQ

SEQ ID NO: 13964 - protein, 20 aa, Homo sapiens
MVFKAQLFALTGVQPARQKV

SEQ ID NO: 13965 - protein, 28 aa, Homo sapiens
MVFKAQLFALTGVQPARQKVMVKGGTLK

SEQ ID NO: 13966 - protein, 33 aa, Homo sapiens
  VARIANT 1: note = misc_feature - Xaa can be any naturally occurring amino acid
XALTGVQPARQKVMVKGGTLKDFHEITFFKNRE

SEQ ID NO: 13967 - protein, 106 aa, Homo sapiens
HWTAYLRNKVDTYVEFPLRGLDMKCYLLEPENSGPESCLYDLAAVVVHHGSGVGSGHYTAYATHEGRWFHFNDSTVTLTDEETVVKAKAYILFYVEHQAKAGSDKL

SEQ ID NO: 13968 - protein, 56 aa, Homo sapiens
MECPHLSSSVCIAPDSAKFPNGSPSSWCCSAFKCLSGVTVLCPQRVLYVAQAGLEL

SEQ ID NO: 13969 - protein, 56 aa, Homo sapiens; identical to SEQ ID NO: 13968

SEQ ID NO: 13970 - protein, 132 aa, Homo sapiens
MECPHLSSSVCIAPDSAKFPNGSPSSWCCSEMEFHHFTKAGLELLDSSNLPASASQSVGTTVCRSNKSPWVCLTCSSVHCGRYVNGHAKKHYEDAQVPLTNHKKSEKQDKVQHTVCMDCSSYSTYCYRCDDF

SEQ ID NO: 13971 - protein, 79 aa, Homo sapiens
MECPHLSSSVCIAPDSAKFPNGSPSSWCCSGAINSRTPMNSCATFWTTYTWNFRAVSTVFPAQQFCRRILLCLQVTSVA

SEQ ID NO: 13972 - protein, 55 aa, Homo sapiens
MECPHLSSSVCIAPDSAKFPNGSPSSWCCSVCRSNKSPWVCLTCSSVHCGRIWGT

SEQ ID NO: 13973 - protein, 520 aa, Homo sapiens
MECPHLSSSVCIAPDSAKFPNGSPSSWCCSVCRSNKSPWVCLTCSSVHCGRYVNGHAKKHYEDAQVPLTNHKKSEKQDKVQHTVCMDCSSYSTYCYRCDDFVVNDTKLGLVQKVREHLQNLENSAFTADRHKKRKLLENSTLNSKLLKVNGSTTAICATGLRNLGNTCFMNAILQSLSNIEQFCCYFKELPAVELRNGKTAGRRTYHTRSQGDNNVSLVEEFRKTLCALWQGSQTAFSPESLFYVVWKIMPNFRGYQQQDAHEFMRYLLDHLHLELQGGFNGVSRSAILQENSTLSASNKCCINGASTVVTAIFGGILQNEVNCLICGTESRKFDPFLDLSLDIPSQFRSKRSKNQENGPVCSLRDCLRSFTDLEELDETELYMCHKCKKKQKSTKKFWIQKLPKVLCLHLKRFHWTAYLRNKVDTYVEFPLRGLDMKCYLLEPENSGPESCLYDLAAVVVHHGSGVGSGHYTAYATHEGRWFHFNDSTVTLTDEETVVKAKAYILFYVEHQAKAGSDKL

SEQ ID NO: 13974 - protein, 133 aa, Homo sapiens
MECPHLSSSVCIAPDSAKFPNGSPSSWCCSVCRSNKSPWVCLTCSSVHCGSYRCDDFVVNDTKLGLVQKVREHLQNLENSAFTADRHKKRKLLENSTLNSKLLKVNGSTTAICATGLRNLGNTCFMNAILQSL

SEQ ID NO: 13975 - protein, 476 aa, Homo sapiens
MECPHLSSSVCIAPDSAKFPNGSPSSWCCSVCRSNKSPWVCLTCSSVHCGSYRCDDFVVNDTKLGLVQKVREHLQNLENSAFTADRHKKRKLLENSTLNSKLLKVNGSTTAICATGLRNLGNTCFMNAILQSLSNIEQFCCYFKELPAVELRNGKTAGRRTYHTRSQGDNNVSLVEEFRKTLCALWQGSQTAFSPESLFYVVWKIMPNFRGYQQQDAHEFMRYLLDHLHLELQGGFNGVSRSAILQENSTLSASNKCCINGASTVVTAIFGGILQNEVNCLICGTESRKFDPFLDLSLDIPSQFRSKRSKNQENGPVCSLRDCLRSFTDLEELDETELYMCHKCKKKQKSTKKFWIQKLPKVLCLHLKRFHWTAYLRNKVDTYVEFPLRGLDMKCYLLEPENSGPESCLYDLAAVVVHHGSGVGSGHYTAYATHEGRWFHFNDSTVTLTDEETVVKAKAYILFYVEHQAKAGSDKL

SEQ ID NO: 13976 - protein, 431 aa, Homo sapiens
MENTEGYRCDDFVVNDTKLGLVQKVREHLQNLENSAFTADRHKKRKLLENSTLNSKLLKVNGSTTAICATGLRNLGNTCFMNAILQSLSNIEQFCCYFKELPAVELRNGKTAGRRTYHTRSQGDNNVSLVEEFRKTLCALWQGSQTAFSPESLFYVVWKIMPNFRGYQQQDAHEFMRYLLDHLHLELQGGFNGVSRSAILQENSTLSASNKCCINGASTVVTAIFGGILQNEVNCLICGTESRKFDPFLDLSLDIPSQFRSKRSKNQENGPVCSLRDCLRSFTDLEELDETELYMCHKCKKKQKSTKKFWIQKLPKVLCLHLKRFHWTAYLRNKVDTYVEFPLRGLDMKCYLLEPENSGPESCLYDLAAVVVHHGSGVGSGHYTAYATHEGRWFHFNDSTVTLTDEETVVKAKAYILFYVEHQAKAGSDKL

SEQ ID NO: 13977 - protein, 503 aa, Homo sapiens
MMQLVYCVFFFLLVCRSNKSPWVCLTCSSVHCGRYVNGHAKKHYEDAQVPLTNHKKSEKQDKVQHTVCMDCSSYSTYCYRCDDFVVNDTKLGLVQKVREHLQNLENSAFTADRHKKRKLLENSTLNSKLLKVNGSTTAICATGLRNLGNTCFMNAILQSLSNIEQFCCYFKELPAVELRNGKTAGRRTYHTRSQGDNNVSLVEEFRKTLCALWQGSQTAFSPESLFYVVWKIMPNFRGYQQQDAHEFMRYLLDHLHLELQGGFNGVSRSAILQENSTLSASNKCCINGASTVVTAIFGGILQNEVNCLICGTESRKFDPFLDLSLDIPSQFRSKRSKNQENGPVCSLRDCLRSFTDLEELDETELYMCHKCKKKQKSTKKFWIQKLPKVLCLHLKRFHWTAYLRNKVDTYVEFPLRGLDMKCYLLEPENSGPESCLYDLAAVVVHHGSGVGSGHYTAYATHEGRWFHFNDSTVTLTDEETVVKAKAYILFYVEHQAKAGSDKL

SEQ ID NO: 13978 - protein, 39 aa, Homo sapiens
MQSPPHLAVCRSNKSPWVCLTCSSVHCGRYVNGHAKKHY

SEQ ID NO: 13979 - protein, 126 aa, Homo sapiens
MQSPPHLAVCRSNKSPWVCLTCSSVHCGRYVNGHAKKHYEDAQVPLTNHKKSEKQDKVQHTVCMDCSSYSTYCYRCDDFVVNDTKLGLVQKVREHLQNLENSAFTADRHKKRKLLENSTLNSKLLK

SEQ ID NO: 13980 - protein, 498 aa, Homo sapiens
MQSPPHLAVCRSNKSPWVCLTCSSVHCGRYVNGHAKKHYEDAQVPLTNHKKSEKQDKVQHTVCMDCSSYSTYCYRCDDFVVNDTKLGLVQKVREHLQNLENSAFTADRHKKRKLLENSTLNSKLLKVNGSTTAICATGLRNLGNTCFMNAILQSLSNIEQFCCYFKELPAVELRNGKTAGRRTYHTRSQGDNNVSLVEEFRKTLCALWQGSQTAFSPESLFYVVWKIMPNFRGYQQQDAHEFMRYLLDHLHLELQGGFNGVSRSAILQENSTLSASNKCCINGASTVVTAIFGGILQNEVNCLICGTESRKFDPFLDLSLDIPSQFRSKRSKNQENGPVCSLRDCLRSFTDLEELDETELYMCHKCKKKQKSTKKFWIQKLPKVLCLHLKRFHWTAYLRNKVDTYVEFPLRGLDMKCYLLEPENSGPESCLYDLAAVVVHHGSGVGSGHYTAYATHEGRWFHFNDSTVTLTDEETVVKAKAYILFYVEHQAKAGSDKL

SEQ ID NO: 13981 - protein, 443 aa, Homo sapiens
  VARIANT 1: note = misc_feature - Xaa can be any naturally occurring amino acid
XKVQHTVCMDCSSYSTYCYRCDDFVVNDTKLGLVQKVREHLQNLENSAFTADRHKKRKLLENSTLNSKLLKVNGSTTAICATGLRNLGNTCFMNAILQSLSNIEQFCCYFKELPAVELRNGKTAGRRTYHTRSQGDNNVSLVEEFRKTLCALWQGSQTAFSPESLFYVVWKIMPNFRGYQQQDAHEFMRYLLDHLHLELQGGFNGVSRSAILQENSTLSASNKCCINGASTVVTAIFGGILQNEVNCLICGTESRKFDPFLDLSLDIPSQFRSKRSKNQENGPVCSLRDCLRSFTDLEELDETELYMCHKCKKKQKSTKKFWIQKLPKVLCLHLKRFHWTAYLRNKVDTYVEFPLRGLDMKCYLLEPENSGPESCLYDLAAVVVHHGSGVGSGHYTAYATHEGRWFHFNDSTVTLTDEETVVKAKAYILFYVEHQAKAGSDKL

SEQ ID NO: 13982 - protein, 6 aa, Homo sapiens
  VARIANT 1: note = misc_feature - Xaa can be any naturally occurring amino acid
XSYSTY

SEQ ID NO: 13983 - protein, 211 aa, Homo sapiens
KNADHLLHLKTKGPENIICSCISPCGSWIAYSTVSRFFLYRLNYEHDNISLKRVSKMPAFLRSALQILFSEDSTKLFVASNQGALHIVQLSGGSFKHLHAFQPQSGTVEAMCLLAVSPDGNWLAASGTSAGVHVYNVKQLKLHCTVPAYNFPVTAMAIAPNTNNLVIAHSDQQPLLFMDLLDERTLVAVERPLDDIIAQLPPPIKKKKFGT

SEQ ID NO: 13984 - protein, 182 aa, Homo sapiens
MASVDLSYCSFLHLLLLCSPILACPPLNGIRCVAYNNQSNRLAVSRTDGTVEIYNLSANYFQEKFFPGHESRATEALCWAEGQRLFSAGLNGEIMEYDLQALNIKYAMDAFGGPIWSMAASPSGSQLLVGCEDGSVKLFQITPDKIQFERNFDRQKSRILSLSWHPSGTHIAAGSIDYISVF

SEQ ID NO: 13985 - protein, 79 aa, Homo sapiens
MEYDLQALNIKYAMDAFGGPIWSMAASPSGSQLLVGCEDGSVKLFQITPDKIQFERNFDRQKSRILSLSWHPSGTHIAA

SEQ ID NO: 13986 - protein, 143 aa, Homo sapiens
MEYDLQALNIKYAMDAFGGPIWSMAASPSGSQLLVGCEDGSVKLFQITPDKIQFERNFDRQKSRILSLSWHPSGTHIAAGSIDYISVFDVKSGSAVHKMIVDRQYMGVSKRKCIVWGVAFLSDGTIISVDSAGKVQFWDSATG

SEQ ID NO: 13987 - protein, 148 aa, Homo sapiens
MGEFKVHRVRFFNYVPSGIRCVAYNNQSNRLAVSRTDGTVEIYNLSANYFQEKFFPGHESRATEALCWAEGQRLFSAGLNGEIMEYDLQALNIKYAMDAFGGPIWSMAASPSGSQLLVGCEDGSVKLFQITPDKIQFERNFDRQKSRI

SEQ ID NO: 13988 - protein, 571 aa, Homo sapiens
MGEFKVHRVRFFNYVPSGIRCVAYNNQSNRLAVSRTDGTVEIYNLSANYFQEKFFPGHESRATEALCWAEGQRLFSAGLNGEIMEYDLQALNIKYAMDAFGGPIWSMAASPSGSQLLVGCEDGSVKLFQITPDKIQFERNFDRQKSRILSLSWHPSGTHIAAGSIDYISVFDVKSGSAVHKMIVDRQYMGVSKRKCIVWGVAFLSDGTIISVDSAGKVQFWDSATGTLVKSHLIANADVQSIAVADQEDSFVVGTAEGTVFHFQLVPVTSNSSEKQWVRTKPFQHHTHDVRTVAHSPTALISGGTDTHLVFRPLMEKVEVKNYDAALRKITFPHRCLISCSKKRQLLLFQFAHHLELWRLGSTVATGTVEAMCLLAVSPDGNWLAASGTSAGVHVYNVKQLKLHCTVPAYNFPVTAMAIAPNTNNLVIAHSDQQVFEYSIPDKQYTDWSRTVQKQGFHHLWLQRDTPITHISFHPKRPMHILLHDAYMFCIIDKSLPLPNDKTLLYNPFPPTNESDVIRRRTAHAFKISKIYKPLLFMDLLDERTLVAVERPLDDIIAQLPPPIKKKKFGT

SEQ ID NO: 13989 - protein, 686 aa, Homo sapiens
MGEFKVHRVRFFNYVPSGIRCVAYNNQSNRLAVSRTDGTVEIYNLSANYFQEKFFPGHESRATEALCWAEGQRLFSAGLNGEIMEYDLQALNIKYAMDAFGGPIWSMAASPSGSQLLVGCEDGSVKLFQITPDKIQFERNFDRQKSRILSLSWHPSGTHIAAGSIDYISVFDVKSGSAVHKMIVDRQYMGVSKRKCIVWGVAFLSDGTIISVDSAGKVQFWDSATGTLVKSHLIANADVQSIAVADQEDSFVVGTAEGTVFHFQLVPVTSNSSEKQWVRTKPFQHHTHDVRTVAHSPTALISGGTDTHLVFRPLMEKVEVKNYDAALRKITFPHRCLISCSKKRQLLLFQFAHHLELWRLGSTVATGKNGDTLPLSKNADHLLHLKTKGPENIICSCISPCGSWIAYSTVSRFFLYRLNYEHDNISLKRVSKMPAFLRSALQILFSEDSTKLFVASNQGALHIVQLSGGSFKHLHAFQPQSGTVEAMCLLAVSPDGNWLAASGTSAGVHVYNVKQLKLHCTVPAYNFPVTAMAIAPNTNNLVIAHSDQQVFEYSIPDKQYTDWSRTVQKQGFHHLWLQRDTPITHISFHPKRPMHILLHDAYMFCIIDKSLPLPNDKTLLYNPFPPTNESDVIRRRTAHAFKISKIYKPLLFMDLLDERTLVAVERPLDDIIAQLPPPIKKKKFGT

SEQ ID NO: 13990 - protein, 625 aa, Homo sapiens
MGEFKVHRVRFFNYVPSGIRCVAYNNQSNRLAVSRTDGTVEIYNLSANYFQEKFFPGHESRATEALCWAEGQRLFSAGLNGEIMEYDLQALNIKYAMDAFGGPIWSMAASPSGSQLLVGCEDGSVKLFQITPDKIQFERNFDRQKSRILSLSWHPSGTHIAAGSIDYISVFDVKSGSAVHKMIVDRQYMGVSKRKCIVWGVAFLSDGTIISVDSAGKVQFWDSATGTLVKSHLIANADVQSIAVADQEDSFVVGTAEGTVFHFQLVPVTSNSSEKQWVRTKPFQHHTHDVRTVAHSPTALISGGTDTHLVFRPLMEKVEVKNYDAALRKITFPHRCLISCSKKRQLLLFQFAHHLELWRLGSTVATGKNGDTLPLSKNADHLLHLKTKGPENIICSCISPCGSWIAYSTVSRFFLYRLNYEHDNISLKRVSKMPAFLRSALQILFSEDSTKLFVASNQGALHIVQLSGGSFKHLHAFQPQSGTVEAMCLLAVSPDGNWLAASGTSAGVHVYNVKQLKLHCTVPAYNFPVTAMAIAPNTNNLVIAHSDQQVFEYSIPDKQYTDWSRTVQKQGFHHLWLQRDTPITHISFHPKRPMHILLHDAYMFCIIDKSLVSSSLLPPKSSSES

SEQ ID NO: 13991 - protein, 198 aa, Homo sapiens
MVFLQFFPGHESRATEALCWAEGQRLFSAGLNGEIMEYDLQALNIKYAMDAFGGPIWSMAASPSGSQLLVGCEDGSVKLFQITPDKIQFERNFDRQKSRILSLSWHPSGTHIAAGSIDYISVFDVKSGSAVHKMIVDRQYMGVSKRKCIVWGVAFLSDGTIISVDSAGKVQFWDSATGTLVKSHLIANADVQSIAVAD

SEQ ID NO: 13992 - protein, 700 aa, Homo sapiens
RSTSGAEPESARARGAGAERGEHREGERGAAGIRCVAYNNQSNRLAVSRTDGTVEIYNLSANYFQEKFFPGHESRATEALCWAEGQRLFSAGLNGEIMEYDLQALNIKYAMDAFGGPIWSMAASPSGSQLLVGCEDGSVKLFQITPDKIQFERNFDRQKSRILSLSWHPSGTHIAAGSIDYISVFDVKSGSAVHKMIVDRQYMGVSKRKCIVWGVAFLSDGTIISVDSAGKVQFWDSATGTLVKSHLIANADVQSIAVADQEDSFVVGTAEGTVFHFQLVPVTSNSSEKQWVRTKPFQHHTHDVRTVAHSPTALISGGTDTHLVFRPLMEKVEVKNYDAALRKITFPHRCLISCSKKRQLLLFQFAHHLELWRLGSTVATGKNGDTLPLSKNADHLLHLKTKGPENIICSCISPCGSWIAYSTVSRFFLYRLNYEHDNISLKRVSKMPAFLRSALQILFSEDSTKLFVASNQGALHIVQLSGGSFKHLHAFQPQSGTVEAMCLLAVSPDGNWLAASGTSAGVHVYNVKQLKLHCTVPAYNFPVTAMAIAPNTNNLVIAHSDQQVFEYSIPDKQYTDWSRTVQKQGFHHLWLQRDTPITHISFHPKRPMHILLHDAYMFCIIDKSLPLPNDKTLLYNPFPPTNESDVIRRRTAHAFKISKIYKPLLFMDLLDERTLVAVERPLDDIIAQLPPPIKKKKFGT

SEQ ID NO: 13993 - protein, 139 aa, Homo sapiens
METNVFHLMLCVTSARTHKSTSLCFGHFNSYPSLPLIHDLLLEISFQLSAPHEDARLTPEELERASLLQILPEMLGAERGDILRKADSSTNIFNPRGNLRKFQDFSGQDPNILLSHLLARIWKPYKKRETPDCFWKYCV

SEQ ID NO: 13994 - protein, 139 aa, Homo sapiens
MYKLASCCLLFIGFLNPLLSLPLLDSREISFQLSAPHEDARLTPEELERASLLQILPEMLGAERGDILRKADSSTNIFNPRGNLRKFQDFSGQDPNILLSHLLARIWKPYKKQRRKLRQDLRLWKKEPGLRIFKNYVWV

SEQ ID NO: 13995 - protein, 124 aa, Homo sapiens
MYKLASCCLLFIGFLNPLLSLPLLDSREISFQLSAPHEDARLTPEELERASLLQILPEMLGAERGDILRKADSSTNIFNPRGNLRKFQDFSGQDPNILLSHLLARIWKPYKKRETPDCFWKYCV

SEQ ID NO: 13996 - protein, 38 aa, Homo sapiens
MNKILSSTVCFGLLTLLSVLSFLQSVHGRPYLTQGNEI

SEQ ID NO: 13997 - protein, 81 aa, Homo sapiens
MNKILSSTVCFGLLTLLSVLSFLQSVHGRPYLTQGNEIFPDKKYTNREELLLALLNKNFDFQRPFNTAGKAKRTASGGEGF

SEQ ID NO: 13998 - protein, 81 aa, Homo sapiens; identical to SEQ ID NO: 13997

SEQ ID NO: 13999 - protein, 119 aa, Homo sapiens
MNKILSSTVCFGLLTLLSVLSFLQSVHGRPYLTQGNEIFPDKKYTNREELLLALLNKNFDFQRPFNTDLALPNKLEELNQLEKLKEQLVEEKDSETSYAVDGLFSSHPSKRACFWKYCV

SEQ ID NO: 14000 - protein, 119 aa, Homo sapiens; identical to SEQ ID NO: 13999

SEQ ID NO: 14001 - protein, 132 aa, Homo sapiens
MNKILSSTVCFGLLTLLSVLSFLQSVHGRPYLTQGNEIFPDKKYTNREELLLALLNKNFDFQRPFNTDLALPNKLEELNQLEKLKEQLVEEKDSETSYAVDGLFSSHPSKRALSSRTLIQLNCLQHCQNRRG

SEQ ID NO: 14002 - protein, 1240 aa, Homo sapiens
MKSCAVSLTTAAVAFGDEAKKMAEGKASRESEEESVSLTVEEREALGGMDSRLFGFVRLHEDGARTKTLLGKAVRCYESLILKAEGKVESDFFCQLGHFNLLLEDYSKALSAYQRYYSLQADYWKNAAFLYGLGLVYFYYNAFHWAIKAFQDVLYVDPSFCRAKEIHLRLGLMFKVNTDYKSSLKHFQLALIDCNPCTLSNAEIQFHIAHLYETQRKYHSAKEAYEQLLQTENLPAQVKATVLQQLGWMHHNMDLVGDKATKESYAIQYLQKSLEADPNSGQSWYFLGRCYSSIGKVQDAFISYRQSIDKSEASADTWCSIGVLYQQQNQPMDALQAYICAVQLDHGHAAAWMDLGTLYESCNQPQDAIKCYLNAARSKRCSNTSTLAARIKFLQNGSDNWNGGQSLSHHPVQQVYSLCLTPQKLQHLEQLRANRDNLNPAQKHQLEQLESQFVLMQQMRHKEVAQVRTTGIHNGAITDSSLPTNSVSNRQPHGALTRVSSVSQPGVRPACVEKLLSSGAFSAGCIPCGTSKILGSTDTILLGSNCIAGSESNGNVPYLQQNTHTLPHNHTDLNSSTEEPWRKQLSNSAQGLHKSQSSCLSGPNEEQPLFSTGSAQYHQATSTGIKKANEHLTLPSNSVPQGDADSHLSCHTATSGGQQGIMFTKESKPSKNRSLVPETSRHTGDTSNGCADVKGLSNHVHQLIADAVSSPNHGDSPNLLIADNPQLSALLIGKANGNVGTGTCDKVNNIHPAVHTKTDHSVASSPSSAISTATPSPKSTEQRSINSVTSLNSPHSGLHTVNGEGLGKSQSSTKVDLPLASHRSTSQILPSMSVSICPSSTEVLKACRNPGKNGLSNSCILLDKCPPPRPPTSPYPPLPKDKLNPPTPSIYLENKRDAFFPPLHQFCTNPKNPVTVIRGLAGALKLDLGLFSTKTLVEANNEHMVEVRTQLLQPADENWDPTGTKKIWRCESNRSHTTIAKYAQYQASSFQESLREENEKRTQHKDHSDNESTSSENSGRRRKGPFKTIKFGTNIDLSDNKKWKLQLHELTKLPAFARVVSAGNLLTHVGHTILGMNTVQLYMKVPGSRTPGHQENNNFCSVNINIGPGDCEWFVVPEDYWGVLNDFCEKNNLNFLMSSWWPNLEDLYEANVPVYRFIQRPGDLVWINAGTVHWVQAVGWCNNIAWNVGPLTACQYKLAVERYEWNKLKSVKSPVPMVHLSWNMARNIKVSDPKLFEMIK

SEQ ID NO: 14003 - protein, 1079 aa, Homo sapiens
MKSCAVSLTTAAVAFGDEAKKMAEGKASRESEEESVSLTVEEREALGGMDSRLFGFVRLHEDGARTKTLLGKAVRCYESLILKAEGKVESDFFCQLGHFNLLLEDYSKALSAYQRYYSLQADYWKNAAFLYGLGLVYFYYNAFHWAIKAFQDVLYVDPSFCRAKEIHLRLGLMFKVNTDYKSSLKHFQLALIDCNPCTLSNAEIQFHIAHLYETQRKYHSAKEAYEQLLQTENLPAQVKATVLQQLGWMHHNMDLVGDKATKESYAIQYLQKSLEADPNSGQSWYFLGRCYSSIGKVQDAFISYRQSIDKSEASADTWCSIGVLYQQQNQPMDALQAYICAVQLDHGHAAAWMDLGTLYESCNQPQDAIKCYLNAARSKRCSNTSTLAARIKFLQNGSDNWNGGQSLSHHPVQQVYSLCLTPQKLQHLEQLRANRDNLNPAQKHQLEQLESQFVLMQQMRHKEVAQVRTTGIHNGAITDSSLPTNSVSNRQPHGALTRVSSVSQPGVRPACVEKLLSSGAFSAGCIPCGTSKILGSTDTILLGSNCIAGSESNGNVPYLQQNTHTLPHNHTDLNSSTEEPWRKQLSNSAQGLHKSQSSCLSGPNEEQPLFSTGSAQYHQATSTGIKKANEHLTLPSNSVPQGDADSHLSCHTATSGGQQGIMFTKESKPSKNRSLVPETSRHTGDTSNGCADVKGLSNHVHQLIADAVSSPNHGDSPNLLIADNPQLSALLIGKANGNVGTGTCDKVNNIHPAVHTKTDHSVASSPSSAISTATPSPKSTEQRSINSVTSLNSPHSGLHTVNGEGLGKSQSSTKVDLPLASHRSTSQILPSMSVSICPSSTEVLKACRNPGKNGLSNSCILLDKCPPPRPPTSPYPPLPKDKLNPPTPSIYLENKRDAFFPPLHQFCTNPKNPVTVIRGLAGALKLDLGLFSTKTLVEANNEHMVEVRTQLLQPADENWDPTGTKKIWRCESNRSHTTIAKYAQYQASSFQESLRAGMQWCDLSSLQPPPPGFKRFSHLSLPNSWNYRHLPSCPTNFCIFVETGFHHVGQACLELLTSGGLLASASQSAGITGVSHHAR

SEQ ID NO: 14004 - protein, 1347 aa, Homo sapiens
MKSCAVSLTTAAVAFGDEAKKMAEGKASRESEEESVSLTVEEREALGGMDSRLFGFVRLHEDGARTKTLLGKAVRCYESLILKAEGKVESDFFCQLGHFNLLLEDYSKALSAYQRYYSLQADYWKNAAFLYGLGLVYFYYNAFHWAIKAFQDVLYVDPSFCRAKEIHLRLGLMFKVNTDYKSSLKHFQLALIDCNPCTLSNAEIQFHIAHLYETQRKYHSAKEAYEQLLQTENLPAQVKATVLQQLGWMHHNMDLVGDKATKESYAIQYLQKSLEADPNSGQSWYFLGRCYSSIGKVQDAFISYRQSIDKSEASADTWCSIGVLYQQQNQPMDALQAYICAVQLDHGHAAAWMDLGTLYESCNQPQDAIKCYLNAARSKRCSNTSTLAARIKFLQNGSDNWNGGQSLSHHPVQQVYSLCLTPQKLQHLEQLRANRDNLNPAQKHQLEQLESQFVLMQQMRHKEVAQVRTTGIHNGAITDSSLPTNSVSNRQPHGALTRVSSVSQPGVRPACVEKLLSSGAFSAGCIPCGTSKILGSTDTILLGSNCIAGSESNGNVPYLQQNTHTLPHNHTDLNSSTEEPWRKQLSNSAQGLHKSQSSCLSGPNEEQPLFSTGSAQYHQATSTGIKKANEHLTLPSNSVPQGDADSHLSCHTATSGGQQGIMFTKESKPSKNRSLVPETSRHTGDTSNGCADVKGLSNHVHQLIADAVSSPNHGDSPNLLIADNPQLSALLIGKANGNVGTGTCDKVNNIHPAVHTKTDHSVASSPSSAISTATPSPKSTEQRSINSVTSLNSPHSGLHTVNGEGLGKSQSSTKVDLPLASHRSTSQILPSMSVSICPSSTEVLKACRNPGKNGLSNSCILLDKCPPPRPPTSPYPPLPKDKLNPPTPSIYLENKRDAFFPPLHQFCTNPKNPVTVIRGLAGALKLDLGLFSTKTLVEANNEHMVEVRTQLLQPADENWDPTGTKKIWRCESNRSHTTIAKYAQYQASSFQESLREENEKRTQHKDHSDNESTSSENSGRRRKGPFKTIKFGTNIDLSDNKKWKLQLHELTKLPAFARVVSAGNLLTHVGHTILGMNTVQLYMKVPGSRTPGHQENNNFCSVNINIGPGDCEWFVVPEDYWGVLNDFCEKNNLNFLMSSWWPNLEDLYEANVPVYRFIQRPGDLVWINAGTVHWVQAVGWCNNIAWNVGPLTACQYKLAVERYEWNKLKSVKSPVPMVHLSWNMARNIKVSDPKLFEMIKYCLLKILKQYQTLREALVAAGKEVIWHGRTNDEPAHYCSICEVEVFNLLFVTNESNTQKTYIVHCHDCARKTSKSLENFVVLEQYKMEDLIQVYDQFTLALSLSSSS

SEQ ID NO: 14005 - protein, 1392 aa, Homo sapiens
MKSCAVSLTTAAVAFGDEAKKMAEGKASRESEEESVSLTVEEREALGGMDSRLFGFVRLHEDGARTKTLLGKAVRCYESLILKAEGKVESDFFCQLGHFNLLLEDYSKALSAYQRYYSLQADYWKNAAFLYGLGLVYFYYNAFHWAIKAFQDVLYVDPSFCRAKEIHLRLGLMFKVNTDYKSSLKHFQLALIDCNPCTLSNAEIQFHIAHLYETQRKYHSAKEAYEQLLQTENLPAQVKATVLQQLGWMHHNMDLVGDKATKESYAIQYLQKSLEADPNSGQSWYFLGRCYSSIGKVQDAFISYRQSIDKSEASADTWCSIGVLYQQQNQPMDALQAYICAVQLDHGHAAAWMDLGTLYESCNQPQDAIKCYLNAARSKRCSNTSTLAARIKFLQAQLCNLPQSSLQNKTKLLPSIEEAWSLPIPAELTSRQGAMNTAQQNGSDNWNGGQSLSHHPVQQVYSLCLTPQKLQHLEQLRANRDNLNPAQKHQLEQLESQFVLMQQMRHKEVAQVRTTGIHNGAITDSSLPTNSVSNRQPHGALTRVSSVSQPGVRPACVEKLLSSGAFSAGCIPCGTSKILGSTDTILLGSNCIAGSESNGNVPYLQQNTHTLPHNHTDLNSSTEEPWRKQLSNSAQGLHKSQSSCLSGPNEEQPLFSTGSAQYHQATSTGIKKANEHLTLPSNSVPQGDADSHLSCHTATSGGQQGIMFTKESKPSKNRSLVPETSRHTGDTSNGCADVKGLSNHVHQLIADAVSSPNHGDSPNLLIADNPQLSALLIGKANGNVGTGTCDKVNNIHPAVHTKTDHSVASSPSSAISTATPSPKSTEQRSINSVTSLNSPHSGLHTVNGEGLGKSQSSTKVDLPLASHRSTSQILPSMSVSICPSSTEVLKACRNPGKNGLSNSCILLDKCPPPRPPTSPYPPLPKDKLNPPTPSIYLENKRDAFFPPLHQFCTNPKNPVTVIRGLAGALKLDLGLFSTKTLVEANNEHMVEVRTQLLQPADENWDPTGTKKIWRCESNRSHTTIAKYAQYQASSFQESLREENEKRTQHKDHSDNESTSSENSGRRRKGPFKTIKFGTNIDLSDNKKWKLQLHELTKLPAFARVVSAGNLLTHVGHTILGMNTVQLYMKVPGSRTPGHQENNNFCSVNINIGPGDCEWFVVPEDYWGVLNDFCEKNNLNFLMSSWWPNLEDLYEANVPVYRFIQRPGDLVWINAGTVHWVQAVGWCNNIAWNVGPLTACQYKLAVERYEWNKLKSVKSPVPMVHLSWNMARNIKVSDPKLFEMIKYCLLKILKQYQTLREALVAAGKEVIWHGRTNDEPAHYCSICEVEVFNLLFVTNESNTQKTYIVHCHDCARKTSKSLENFVVLEQYKMEDLIQVYDQFTLALSLSSSS

SEQ ID NO: 14006 - protein, 1389 aa, Homo sapiens
MKSCAVSLTTAAVAFGDEAKKMAEGKASRESEEESVSLTVEEREALGGMDSRLFGFVRLHEDGARTKTLLGKAVRCYESLILKAEGKVESDFFCQLGHFNLLLEDYSKALSAYQRYYSLQADYWKNAAFLYGLGLVYFYYNAFHWAIKAFQDVLYVDPSFCRAKEIHLRLGLMFKVNTDYKSSLKHFQLALIDCNPCTLSNAEIQFHIAHLYETQRKYHSAKEAYEQLLQTENLPAQVKATVLQQLGWMHHNMDLVGDKATKESYAIQYLQKSLEADPNSGQSWYFLGSVLYQQQNQPMDALQAYICAVQLDHGHAAAWMDLGTLYESCNQPQDAIKCYLNAARSKRCSNTSTLAARIKFLQAQLCNLPQSSLQNKTKLLPSIEEAWSLPIPAELTSRQGAMNTAQQQSLSLHMITSSQVEGLSSPAKKKRTSSPTKNGSDNWNGGQSLSHHPVQQVYSLCLTPQKLQHLEQLRANRDNLNPAQKHQLEQLESQFVLMQQMRHKEVAQVRTTGIHNGAITDSSLPTNSVSNRQPHGALTRVSSVSQPGVRPACVEKLLSSGAFSAGCIPCGTSKILGSTDTILLGSNCIAGSESNGNVPYLQQNTHTLPHNHTDLNSSTEEPWRKQLSNSAQGLHKSQSSCLSGPNEEQPLFSTGSAQYHQATSTGIKKANEHLTLPSNSVPQGDADSHLSCHTATSGGQQGIMFTKESKPSKNRSLVPETSRHTGDTSNGCADVKGLSNHVHQLIADAVSSPNHGDSPNLLIADNPQLSALLIGKANGNVGTGTCDKVNNIHPAVHTKTDHSVASSPSSAISTATPSPKSTEQRSINSVTSLNSPHSGLHTVNGEGLGKSQSSTKVDLPLASHRSTSQILPSMSVSICPSSTEVLKACRNPGKNGLSNSCILLDKCPPPRPPTSPYPPLPKDKLNPPTPSIYLENKRDAFFPPLHQFCTNPKNPVTVIRGLAGALKLDLGLFSTKTLVEANNEHMVEVRTQLLQPADENWDPTGTKKIWRCESNRSHTTIAKYAQYQASSFQESLREENEKRTQHKDHSDNESTSSENSGRRRKGPFKTIKFGTNIDLSDNKKWKLQLHELTKLPAFARVVSAGNLLTHVGHTILGMNTVQLYMKVPGSRTPGHQENNNFCSVNINIGPGDCEWFVVPEDYWGVLNDFCEKNNLNFLMSSWWPNLEDLYEANVPVYRFIQRPGDLVWINAGTVHWVQAVGWCNNIAWNVGPLTACQYKLAVERYEWNKLKSVKSPVPMVHLSWNMARNIKVSDPKLFEMIKYCLLKILKQYQTLREALVAAGKEVIWHGRTNDEPAHYCSICEVEVFNLLFVTNESNTQKTYIVHCHDCARKTSKSLENFVVLEQYKMEDLIQVYDQFTLALSLSSSS

SEQ ID NO: 14007 - protein, 1335 aa, Homo sapiens
MKSCAVSLTTAAVAFGDEAKKMAEGKASRESEEESVSLTVEEREALGGMDSRLFGFVRLHEDGARTKTLLGKAVRCYESLILKAEGKVESDFFCQLGHFNLLLEDYSKALSAYQRYYSLQADYWKNAAFLYGLGLVYFYYNAFHWAIKAFQDVLYVDPSFCRAKEIHLRLGLMFKVNTDYKSSLKHFQLALIDCNPCTLSNAEIQFHIAHLYETQRKYHSAKEAYEQLLQTENLPAQVKATVLQQLGWMHHNMDLVGDKATKESYAIQYLQKSLEADPNSGQSWYFLGRCYSSIGKVQDAFISYRQSIDKSEASADTWCSIGVLYQQQNQPMDALQAYICAVQLDHGHAAAWMDLGTLYESCNQPQDAIKCYLNAARSKRCSNTSTLAARIKFLQAQLCNLPQSSLQNKTKLLPSIEEAWSLPIPAELTSRQGAMNTAQQNGSDNWNGGQSLSHHPVQQVYSLCLTPQKLQHLEQLRANRDNLNPAQKHQLEQLESQFVLMQQMRHKEVAQVRTTGIHNGAITDSSLPTNSVSNRQPHGALTRVSSVSQPGVRPACVEKLLSSGAFSAGCIPCGTSKILGSTDTILLGSNCIAGSESNGNVPYLQQNTHTLPHNHTDLNSSTEEPWRKQLSNSAQGLHKSQSSCLSGPNEEQPLFSTGSAQYHQATSTGIKKANEHLTLPSNSVPQGDADSHLSCHTATSGGQQGIMFTKESKPSKNRSLVPETSRHTGDTSNGCADVKGLSNHVHQLIADAVSSPNHGDSPNLLIADNPQLSALLIGKANGNVGTGTCDKVNNIHPAVHTKTDHSVASSPSSAISTATPSPKSTEQRSINSVTSLNSPHSGLHTVNGEGLGKSQSSTKVDLPLASHRSTSQILPSMSVSICPSSTEVLKACRNPGKNGLSNSCILLDKCPPPRPPTSPYPPLPKDKLNPPTPSIYLENKRDAFFPPLHQFCTNPKNPVTVIRGLAGALKLDLGLFSTKTLVEANNEHMVEVRTQLLQPADENWDPTGTKKIWRCESNRSHTTIAKYAQYQASSFQESLREENEKRTQHKDHSDNESTSSENSGRRRKGPFKTIKFGTNIDLSDNKKWKLQLHELTKLPAFARVVSAGNLLTHVGHTILGMNTVQLYMKVPGSRTPGHQENNNFCSVNINIGPGDCEWFVVPEDYWGVLNDFCEKNNLNFLMSSWWPNLEDLYEANVPVYRFIQRPGDLVWINAGTVHWVQAVGWCNNIAWNVGPLTACQYKLAVERYEWNKLKSVKSPVPMVHLSWNMARNIKVSDPKLFEMIKYCLLKILKQYQTLREALVAAGKEVIWHGRTNDEPAHYCSICEALSLSSSS

SEQ ID NO: 14008 - protein, 1444 aa, Homo sapiens
MKSCAVSLTTAAVAFGDEAKKMAEGKASRESEEESVSLTVEEREALGGMDSRLFGFVRLHEDGARTKTLLGKAVRCYESLILKAEGKVESDFFCQLGHFNLLLEDYSKALSAYQRYYSLQADYWKNAAFLYGLGLVYFYYNAFHWAIKAFQDVLYVDPSFCRAKEIHLRLGLMFKVNTDYKSSLKHFQLALIDCNPCTLSNAEIQFHIAHLYETQRKYHSAKEAYEQLLQTENLPAQVKATVLQQLGWMHHNMDLVGDKATKESYAIQYLQKSLEADPNSGQSWYFLGRCYSSIGKVQDAFISYRQSIDKSEASADTWCSIGVLYQQQNQPMDALQAYICAVQLDHGHAAAWMDLGTLYESCNQPQDAIKCYLNAARSKRCSNTSTLAARIKFLQAQLCNLPQSSLQNKTKLLPSIEEAWSLPIPAELTSRQGAMNTAQQAYRAHDPNTEHVLNHSQTPILQQSLSLHMITSSQVEGLSSPAKKKRTSSPTKNGSDNWNGGQSLSHHPVQQVYSLCLTPQKLQHLEQLRANRDNLNPAQKHQLEQLESQFVLMQQMRHKEVAQVRTTGIHNGAITDSSLPTNSVSNRQPHGALTRVSSVSQPGVRPACVEKLLSSGAFSAGCIPCGTSKILGSTDTILLGSNCIAGSESNGNVPYLQQNTHTLPHNHTDLNSSTEEPWRKQLSNSAQGLHKSQSSCLSGPNEEQPLFSTGSAQYHQATSTGIKKANEHLTLPSNSVPQGDADSHLSCHTATSGGQQGIMFTKESKPSKNRSLVPETSRHTGDTSNGCADVKGLSNHVHQLIADAVSSPNHGDSPNLLIADNPQLSALLIGKANGNVGTGTCDKVNNIHPAVHTKTDHSVASSPSSAISTATPSPKSTEQRSINSVTSLNSPHSGLHTVNGEGLGKSQSSTKVDLPLASHRSTSQILPSMSVSICPSSTEVLKACRNPGKNGLSNSCILLDKCPPPRPPTSPYPPLPKDKLNPPTPSIYLENKRDAFFPPLHQFCTNPKNPVTVIRGLAGALKLDLGLFSTKTLVEANNEHMVEVRTQLLQPADENWDPTGTKKIWRCESNRSHTTIAKYAQYQASSFQESLREENEKRTQHKDHSDNESTSSENSGRRRKGPFKTIKFGTNIDLSDNKKWKLQLHELTKLPAFARVVSAGNLLTHVGHTILGMNTVQLYMKVPGSRTPGHQENNNFCSVNINIGPGDCEWFVVPEDYWGVLNDFCEKNNLNFLMSSWWPNLEDLYEANVPVYRFIQRPGDLVWINAGTVHWVQAVGWCNNIAWNVGPLTACQYKLAVERYEWNKLKSVKSPVPMVHLSWNMARNIKVSDPKLFEMIKYCLLKILKQYQTLREALVAAGKEVIWHGRTNDEPAHYCSICEVEVFNLLFVTNESNTQKTYIVHCHDCARKTSKSLENFVVLEQYKMEDLIQVYDQFTLALSLSSSS

SEQ ID NO: 14009 - protein, 1363 aa, Homo sapiens
MKSCAVSLTTAAVAFGDEAKKMAEGKASRESEEESVSLTVEEREALGGMDSRLFGFVRLHEDGARTKTLLGKAVRCYESLILKAEGKVESDFFCQLGHFNLLLEDYSKALSAYQRYYSLQADYWKNAAFLYGLGLVYFYYNAFHWAIKAFQDVLYVDPSFCRAKEIHLRLGLMFKVNTDYKSSLKHFQLALIDCNPCTLSNAEIQFHIAHLYETQRKYHSAKEAYEQLLQTENLPAQVKATVLQQLGWMHHNMDLVGDKATKESYAIQYLQKSLEADPNSGQSWYFLGRCYSSIGKVQDAFISYRQSIDKSEASADTWCSIGVLYQQQNQPMDALQAYICAVQLDHGHAAAWMDLGTLYESCNQPQDAIKCYLNAARSKRCSNTSTLAARIKFLQNGSDNWNGGQSLSHHPVQQVYSLCLTPQKLQHLEQLRANRDNLNPAQKHQLEQLESQFVLMQQMRHKEVAQVRTTGIHNGAITDSSLPTNSVSNRQPHGALTRVSSVSQPGVRPACVEKLLSSGAFSAGCIPCGTSKILGSTDTILLGSNCIAGSESNGNVPYLQQNTHTLPHNHTDLNSSTEEPWRKQLSNSAQAYLGHLTGFIQDNCNKGLHKSQSSCLSGPNEEQPLFSTGSAQYHQATSTGIKKANEHLTLPSNSVPQGDADSHLSCHTATSGGQQGIMFTKESKPSKNRSLVPETSRHTGDTSNGCADVKGLSNHVHQLIADAVSSPNHGDSPNLLIADNPQLSALLIGKANGNVGTGTCDKVNNIHPAVHTKTDHSVASSPSSAISTATPSPKSTEQRSINSVTSLNSPHSGLHTVNGEGLGKSQSSTKVDLPLASHRSTSQILPSMSVSICPSSTEVLKACRNPGKNGLSNSCILLDKCPPPRPPTSPYPPLPKDKLNPPTPSIYLENKRDAFFPPLHQFCTNPKNPVTVIRGLAGALKLDLGLFSTKTLVEANNEHMVEVRTQLLQPADENWDPTGTKKIWRCESNRSHTTIAKYAQYQASSFQESLREENEKRTQHKDHSDNESTSSENSGRRRKGPFKTIKFGTNIDLSDNKKWKLQLHELTKLPAFARVVSAGNLLTHVGHTILGMNTVQLYMKVPGSRTPGHQENNNFCSVNINIGPGDCEWFVVPEDYWGVLNDFCEKNNLNFLMSSWWPNLEDLYEANVPVYRFIQRPGDLVWINAGTVHWVQAVGWCNNIAWNVGPLTACQYKLAVERYEWNKLKSVKSPVPMVHLSWNMARNIKVSDPKLFEMIKYCLLKILKQYQTLREALVAAGKEVIWHGRTNDEPAHYCSICEVEVFNLLFVTNESNTQKTYIVHCHDCARKTSKSLENFVVLEQYKMEDLIQVYDQFTLALSLSSSS

SEQ ID NO: 14010 - protein, 1211 aa, Homo sapiens
MKSCAVSLTTAAVAFGDEAKKMAEGKASRESEEESVSLTVEEREALGGMDSRLFGFVRLHEDGARTKTLLGKAVRCYESLILKAEGKVESDFFCQLGHFNLLLEDYSKALSAYQRYYSLQADYWKNAAFLYGLGLVYFYYNAFHWAIKAFQDVLYVDPSFCRAKEIHLRLGLMFKVNTDYKSSLKHFQLALIDCNPCTLSNAEIQFHIAHLYETQRKYHSAKEAYEQLLQTENLPAQVKATVLQQLGWMHHNMDLVGDKATKESYAIQYLQKSLEADPNSGQSWYFLGRCYSSIGKVQDAFISYRQSIDKSEASADTWCSIGVLYQQQNQPMDALQAYICAVQLDHGHAAAWMDLGTLYESCNQPQDAIKCYLNAARSKRCSNTSTLAARIKFLQAQLCNLPQSSLQNKTKLLPSIEEAWSLPIPAELTSRQGAMNTAQQNGSDNWNGGQSLSHHPVQQVYSLCLTPQKLQHLEQLRANRDNLNPAQKHQLEQLESQFVLMQQMRHKEVAQGLHKSQSSCLSGPNEEQPLFSTGSAQYHQATSTGIKKANEHLTLPSNSVPQGDADSHLSCHTATSGGQQGIMFTKESKPSKNRSLVPETSRHTGDTSNGCADVKGLSNHVHQLIADAVSSPNHGDSPNLLIADNPQLSALLIGKANGNVGTGTCDKVNNIHPAVHTKTDHSVASSPSSAISTATPSPKSTEQRSINSVTSLNSPHSGLHTVNGEGLGKSQSSTKVDLPLASHRSTSQILPSMSVSICPSSTEVLKACRNPGKNGLSNSCILLDKCPPPRPPTSPYPPLPKDKLNPPTPSIYLENKRDAFFPPLHQFCTNPKNPVTVIRGLAGALKLDLGLFSTKTLVEANNEHMVEVRTQLLQPADENWDPTGTKKIWRCESNRSHTTIAKYAQYQASSFQESLREENEKRTQHKDHSDNESTSSENSGRRRKGPFKTIKFGTNIDLSDNKKWKLQLHELTKLPAFARVVSAGNLLTHVGHTILGMNTVQLYMKVPGSRTPGHQENNNFCSVNINIGPGDCEWFVVPEDYWGVLNDFCEKNNLNFLMSSWWPNLEDLYEANVPVYRFIQRPGDLVWINAGTVHWVQAVGWCNNIAWNVGPLTACQYKLAVERYEWNKLKSVKSPVPMVHLSWNMARNIKVSDPKLFEMIKYCLLKILKQYQTLREALVAAGKEVIWHGRTNDEPAHYCSICEALSLSSSS

SEQ ID NO: 14011 - protein, 1399 aa, Homo sapiens
MKSCAVSLTTAAVAFGDEAKKMAEGKASRESEEESVSLTVEEREALGGMDSRLFGFVRLHEDGARTKTLLGKAVRCYESLILKAEGKVESDFFCQLGHFNLLLEDYSKALSAYQRYYSLQADYWKNAAFLYGLGLVYFYYNAFHWAIKAFQDVLYVDPSFCRAKEIHLRLGLMFKVNTDYKSSLKHFQLALIDCNPCTLSNAEIQFHIAHLYETQRKYHSAKEAYEQLLQTENLPAQVKATVLQQLGWMHHNMDLVGDKATKESYAIQYLQKSLEADPNSGQSWYFLGRCYSSIGKVQDAFISYRQSIDKSEASADTWCSIGVLYQQQNQPMDALQAYICAVQLDHGHAAAWMDLGTLYESCNQPQDAIKCYLNAARSKRCSNTSTLAARIKFLQAYRAHDPNTEHVLNHSQTPILQQSLSLHMITSSQVEGLSSPAKKKRTSSPTKNGSDNWNGGQSLSHHPVQQVYSLCLTPQKLQHLEQLRANRDNLNPAQKHQLEQLESQFVLMQQMRHKEVAQVRTTGIHNGAITDSSLPTNSVSNRQPHGALTRVSSVSQPGVRPACVEKLLSSGAFSAGCIPCGTSKILGSTDTILLGSNCIAGSESNGNVPYLQQNTHTLPHNHTDLNSSTEEPWRKQLSNSAQGLHKSQSSCLSGPNEEQPLFSTGSAQYHQATSTGIKKANEHLTLPSNSVPQGDADSHLSCHTATSGGQQGIMFTKESKPSKNRSLVPETSRHTGDTSNGCADVKGLSNHVHQLIADAVSSPNHGDSPNLLIADNPQLSALLIGKANGNVGTGTCDKVNNIHPAVHTKTDHSVASSPSSAISTATPSPKSTEQRSINSVTSLNSPHSGLHTVNGEGLGKSQSSTKVDLPLASHRSTSQILPSMSVSICPSSTEVLKACRNPGKNGLSNSCILLDKCPPPRPPTSPYPPLPKDKLNPPTPSIYLENKRDAFFPPLHQFCTNPKNPVTVIRGLAGALKLDLGLFSTKTLVEANNEHMVEVRTQLLQPADENWDPTGTKKIWRCESNRSHTTIAKYAQYQASSFQESLREENEKRTQHKDHSDNESTSSENSGRRRKGPFKTIKFGTNIDLSDNKKWKLQLHELTKLPAFARVVSAGNLLTHVGHTILGMNTVQLYMKVPGSRTPGHQENNNFCSVNINIGPGDCEWFVVPEDYWGVLNDFCEKNNLNFLMSSWWPNLEDLYEANVPVYRFIQRPGDLVWINAGTVHWVQAVGWCNNIAWNVGPLTACQYKLAVERYEWNKLKSVKSPVPMVHLSWNMARNIKVSDPKLFEMIKYCLLKILKQYQTLREALVAAGKEVIWHGRTNDEPAHYCSICEVEVFNLLFVTNESNTQKTYIVHCHDCARKTSKSLENFVVLEQYKMEDLIQVYDQFTLALSLSSSS

SEQ ID NO: 14012 - protein, 1367 aa, Homo sapiens
MKSCAVSLTTAAVAFGDEAKKMAEGKASRESEEESVSLTVEEREALGGMDSRLFGFVRLHEDGARTKTLLGKAVRCYESLILKAEGKVESDFFCQLGHFNLLLEDYSKALSAYQRYYSLQADYWKNAAFLYGLGLVYFYYNAFHWAIKAFQDVLYVDPSFCRAKEIHLRLGLMFKVNTDYKSSLKHFQLALIDCNPCTLSNAEIQFHIAHLYETQRKYHSAKEAYEQLLQTENLPAQVKATVLQQLGWMHHNMDLVGDKATKESYAIQYLQKSLEADPNSGQSWYFLGRCYSSIGKVQDAFISYRQSIDKSEASADTWCSIGVLYQQQNQPMDALQAYICAVQLDHGHAAAWMDLGTLYESCNQPQDAIKCYLNAARSKRCSNTSTLAARIKFLQAQLCNLPQSSLQNKTKLLPSIEEAWSLPIPAELTSRQGAMNTAQQNGSDNWNGGQSLSHHPVQQVYSLCLTPQKLQHLEQLRANRDNLNPAQKHQLEQLESQFVLMQQMRHKEVAQVRTTGIHNGAITDSSLPTNSVSNRQPHGALTRVSSVSQPGVRPACVEKLLSSGAFSAGCIPCGTSKILGSTDTILLGSNCIAGSESNGNVPYLQQNTHTLPHNHTDLNSSTEEPWRKQLSNSAQGLHKSQSSCLSGPNEEQPLFSTGSAQYHQATSTGIKKANEHLTLPSNSVPQGDADSHLSCHTATSGGQQGIMFTKESKPSKNRSLVPETSRHTGDTSNGCADVKGLSNHVHQLIADAVSSPNHGDSPNLLIADNPQLSALLIGKANGNVGTGTCDKVNNIHPAVHTKTDHSVASSPSSAISTATPSPKSTEQRSINSVTSLNSPHSGLHTVNGEGLGKSQSSTKVDLPLASHRSTSQILPSMSVSICPSSTEVLKACRNPGKNGLSNSCILLDKCPPPRPPTSPYPPLPKDKLNPPTPSIYLENKRDAFFPPLHQFCTNPKNPVTVIRGLAGALKLDLGLFSTKTLVEANNEHMVEVRTQLLQPADENWDPTGTKKIWRCESNRSHTTIAKYAQYQASSFQESLREENEKRTQHKDHSDNESTSSEKWKLQLHELTKLPAFARVVSAGNLLTHVGHTILGMNTVQLYMKVPGSRTPGHQENNNFCSVNINIGPGDCEWFVVPEDYWGVLNDFCEKNNLNFLMSSWWPNLEDLYEANVPVYRFIQRPGDLVWINAGTVHWVQAVGWCNNIAWNVGPLTACQYKLAVERYEWNKLKSVKSPVPMVHLSWNMARNIKVSDPKLFEMIKYCLLKILKQYQTLREALVAAGKEVIWHGRTNDEPAHYCSICEVEVFNLLFVTNESNTQKTYIVHCHDCARKTSKSLENFVVLEQYKMEDLIQVYDQFTLALSLSSSS

SEQ ID NO: 14013 - protein, 207 aa, Homo sapiens
MKSCAVSLTTAAVAFGDEAKKMAEGKASRESEEESVSLTVEEREALGGMDSRLFGFVRLHEDGARTKTLLGKAVRCYESLILKAEGKVESDFFCQLGHFNLLLEDYSKALSAYQRYYSLQADYWKNAAFLYGLGLVYFYYNAFHWAIKAFQDVLYVDPSFCRAKEIHLRLGLMFKVNTDYKSSLKHFQLALIDCNPCTLSNAESKYF

SEQ ID NO: 14014 - protein, 1264 aa, Homo sapiens
MKSCAVSLTTAAVAFGDEAKKMAEGKASRESEEESVSLTVEEREALGGMDSRLFGFVRLHEDGARTKTLLGKNAAFLYGLGLVYFYYNAFHWAIKAFQDVLYVDPSFCRAKEIHLRLGLMFKVNTDYKSSLKRKYHSAKEAYEQLLQTENLPAQVKATVLQQLGWMHHNMDLVGDKATKESYAIQYLQKSLEADPNSGQSWYFLGRCYSSIGKVQDAFISYRQSIDKSEASADTWCSIGVLYQQQNQPMDALQAYICAVQLDHGHAAAWMDLGTLYESCNQPQDAIKCYLNAARSKRCSNTSTLAARIKFLQNGSDNWNGGQSLSHHPVQQVYSLCLTPQKLQHLEQLRANRDNLNPAQKHQLEQLESQFVLMQQMRHKEVAQVRTTGIHNGAITDSSLPTNSVSNRQPHGALTRVSSVSQPGVRPACVEKLLSSGAFSAGCIPCGTSKILGSTDTILLGSNCIAGSESNGNVPYLQQNTHTLPHNHTDLNSSTEEPWRKQLSNSAQGLHKSQSSCLSGPNEEQPLFSTGSAQYHQATSTGIKKANEHLTLPSNSVPQGDADSHLSCHTATSGGQQGIMFTKESKPSKNRSLVPETSRHTGDTSNGCADVKGLSNHVHQLIADAVSSPNHGDSPNLLIADNPQLSALLIGKANGNVGTGTCDKVNNIHPAVHTKTDHSVASSPSSAISTATPSPKSTEQRSINSVTSLNSPHSGLHTVNGEGLGKSQSSTKVDLPLASHRSTSQILPSMSVSICPSSTEVLKACRNPGKNGLSNSCILLDKCPPPRPPTSPYPPLPKDKLNPPTPSIYLENKRDAFFPPLHQFCTNPKNPVTVIRGLAGALKLDLGLFSTKTLVEANNEHMVEVRTQLLQPADENWDPTGTKKIWRCESNRSHTTIAKYAQYQASSFQESLREENEKRTQHKDHSDNESTSSENSGRRRKGPFKTIKFGTNIDLSDNKKWKLQLHELTKLPAFARVVSAGNLLTHVGHTILGMNTVQLYMKVPGSRTPGHQENNNFCSVNINIGPGDCEWFVVPEDYWGVLNDFCEKNNLNFLMSSWWPNLEDLYEANVPVYRFIQRPGDLVWINAGTVHWVQAVGWCNNIAWNVGPLTACQYKLAVERYEWNKLKSVKSPVPMVHLSWNMARNIKVSDPKLFEMIKYCLLKILKQYQTLREALVAAGKEVIWHGRTNDEPAHYCSICEVEVFNLLFVTNESNTQKTYIVHCHDCARKTSKSLENFVVLEQYKMEDLIQVYDQFTLALSLSSSS

SEQ ID NO: 14015 - protein, 190 aa, Homo sapiens
MVEPLREKIRDLEKSFTQKYPPVKFLSEKDRKRILITGGAGFVGSHLTDKLMMDGHEVTVVDNFFTGRKRNVEHWIGHENFELINHDVVEPLYIEVDQIYHLASPASPPNYMYNPIKTLKTNTIGTLNMLGLAKRVGARLLLASTSEVYGDPEVHPQSEDYWGHVNPIGPRACYDEGKRVAETMCYAYMK

SEQ ID NO: 14016 - protein, 420 aa, Homo sapiens
MVSKALLRLVSAVNRRRMKLLLGIALLAYVASVWGNFVNMRSIQENGELKIESKIEEMVEPLREKIRDLEKSFTQKYPPVKFLSEKDRKRILITGGAGFVGSHLTDKLMMDGHEVTVVDNFFTGRKRNVEHWIGHENFELINHDVVEPLYIEVDQIYHLASPASPPNYMYNPIKTLKTNTIGTLNMLGLAKRVGARLLLASTSEVYGDPEVHPQSEDYWGHVNPIGPRACYDEGKRVAETMCYAYMKQEGVEVRVARIFNTFGPRMHMNDGRVVSNFILQALQGEPLTVYGSGSQTRAFQYVSDLVNGLVALMNSNVSSPVNLGNPEEHTILEFAQLIKNLVGSGSEIQFLSEAQDDPQKRKPDIKKAKLMLGWEPVVPLEEGLNKAIHYFRKELEYQANNQYIPKPKPARIKKGRTRHS

SEQ ID NO: 14017 - protein, 425 aa, Homo sapiens
MVSKALLRLVSAVNRRRMKLLLGIALLAYVASVWGNFVNMSFLLNRSIQENGELKIESKIEEMVEPLREKIRDLEKSFTQKYPPVKFLSEKDRKRILITGGAGFVGSHLTDKLMMDGHEVTVVDNFFTGRKRNVEHWIGHENFELINHDVVEPLYIEVDQIYHLASPASPPNYMYNPIKTLKTNTIGTLNMLGLAKRVGARLLLASTSEVYGDPEVHPQSEDYWGHVNPIGPRACYDEGKRVAETMCYAYMKQEGVEVRVARIFNTFGPRMHMNDGRVVSNFILQALQGEPLTVYGSGSQTRAFQYVSDLVNGLVALMNSNVSSPVNLGNPEEHTILEFAQLIKNLVGSGSEIQFLSEAQDDPQKRKPDIKKAKLMLGWEPVVPLEEGLNKAIHYFRKELEYQANNQYIPKPKPARIKKGRTRHS

SEQ ID NO: 14018 - protein, 171 aa, Homo sapiens [sequence omitted]

SEQ ID NO: 14019 - protein, 52 aa, Homo sapiens
MYNPIKTLKTNTIGTLNMLGLAKRVGARLLLASTSEVYGDPEVHPQSEDYWG

SEQ ID NO: 14020 - protein, 121 aa, Homo sapiens
MYNPIKTLKTNTIGTLNMLGLAKRVGARLLLASTSEVYGDPEVHPQSEDYWGHVNPIGPRACYDEGKRVAETMCYAYMKQEGVEVRVARIFNTFGPRMHMNDGRVVSNFILQALQGEPLTV

SEQ ID NO: 14021 - protein, 134 aa, Homo sapiens
MYNPIKTLKTNTIGTLNMLGLAKRVGARLLLASTSEVYGDPEVHPQSEDYWGHVNPIGPRACYDEGKRVAETMCYAYMKQEGVEVRVARIFNTFGPRMHMNDGRVVSNFILQALQGEPLTVYGSGSQTRAFQYV

SEQ ID NO: 14022 - protein, 252 aa, Homo sapiens
MYNPIKTLKTNTIGTLNMLGLAKRVGARLLLASTSEVYGDPEVHPQSEDYWGHVNPIGPRACYDEGKRVAETMCYAYMKQEGVEVRVARIFNTFGPRMHMNDGRVVSNFILQALQGEPLTVYGSGSQTRAFQYVSDLVNGLVALMNSNVSSPVNLGNPEEHTILEFAQLIKNLVGSGSEIQFLSEAQDDPQKRKPDIKKAKLMLGWEPVVPLEEGLNKAIHYFRKELEYQANNQYIPKPKPARIKKGRTRHS

SEQ ID NO: 14023 - protein, 91 aa, Homo sapiens
MGPGEGNCWFCWCLCPWLLSGSWVHLISGKSPSLTRPVMGGGGGVEMFLQFCLPWQNLDPGKGKQGRSPSEKGLCSPLTRSLAQATSAPRA

SEQ ID NO: 14024 - protein, 365 aa, Homo sapiens
MPGGKKVAGGGSSGATPTSAAATAPSGVRRLETSEGTSAQRDEEPEEEGEEDLRDGGVPFFVNRGGLPVDEATWERMWKHVAKIHPDGEKVAQRIRGATDLPKIPIPSVPTFQPSTPVPERLEAVQRYIRELQYNHTGTQFFEIKKSRPLTGLMDLAKEMTKEALPIKCLEAVILGIYLTNSMPTLERFPISFKTYFSGNYFRHIVLGVNFAGRYGALGMSRREDLMYKPPAFRTLSELVLDFEAAYGRCWHVLKKVKLGQSVSHDPHSVEQIEWKHSVLDVERLGRDDFRKELERHARDMRLKIGKGTGPPSPTKDRKKDVSSPQRAQSSPHRRNSRSERRPSGDKKTSEPKAMPDLNGYQIRV

SEQ ID NO: 14025 - protein, 204 aa, Homo sapiens
MPGGKKVAGGGSSGATPTSAAATAPSGVRRLETSEGTSAQRDEEPEEEGEEDLRDGGVPFFVNRGGLPVDEATWERMWKHVAKIHPDGEKVAQRIRGATDLPKIPIPSVPTFQPSTPVPERLEAVQRYIRELQYNHTGTQFFEIKKSRPLTGLMDLAKEMTKEALPIKCLEAVILGMYPSSPEGEGSGLLWASASCSESEGGVG

SEQ ID NO: 14026 - protein, 3396 aa, Homo sapiens
MFINIKSILWMCSTLIVTHALHKVKVGKSPPVRGSLSGKVSLPCHFSTMPTLPPSYNTSEFLRIKWSKIEVDKNGKDLKETTVLVAQNGNIKIGQDYKGRVSVPTHPEAVGDASLTVVKLLASDAGLYRCDVMYGIEDTQDTVSLTVDGVVFHYRAATSRYTLNFEAAQKACLDVGAVIATPEQLFAAYEDGFEQCDAGWLADQTVRYPIRAPRVGCYGDKMGKAGVRTYGFRSPQETYDVYCYVDHLDGDVFHLTVPSKFTFEEAAKECENQDARLATVGELQAAWRNGFDQCDYGWLSDASVRHPVTVARAQCGGGLLGVRTLYRFENQTGFPPPDSRFDAYCFKPKEATTIDLSILAETASPSLSKEPQMVSDRTTPIIPLVDELPVIPTEFPPVGNIVSFEQKATVQPQAITDSLATKLPTPTGSTKKPWDMDDYSPSASGPLGKLDISEIKEEVLQSTTGVSHYATDSWDGVVEDKQTQESVTQIEQIEVGPLVTSMEILKHIPSKEFPVTETPLVTARMILESKTEKKMVSTVSELVTTGHYGFTLGEEDDEDRTLTVGSDESTLIFDQIPEVITVSKTSEDTIHTHLEDLESVSASTTVSPLIMPDNNGSSMDDWEERQTSGRITEEFLGKYLSTTPFPSQHRTEIELFPYSGDKILVEGISTVIYPSLQTEMTHRRERTETLIPEMRTDTYTDEIQEEITKSPFMGKTEEEVFSGMKLSTSLSEPIHVTESSVEMTKSFDFPTLITKLSAEPTEVRDMEEDFTATPGTTKYDENITTVLLAHGTLSVEAATVSKWSWDEDNTTSKPLESTEPSASSKLPPALLTTVGMNGKDKDIPSFTEDGADEFTLIPDSTQKQLEEVTDEDIAAHGKFTIRFQPTTSTGIAEKSTLRDSTTEEKVPPITSTEGQVYATMEGSALGEVEDVDLSKPVSTVPQFAHTSEVEGLAFVSYSSTQEPTTYVDSSHTIPLSVIPKTDWGVLVPSVPSEDEVLGEPSQDILVIDQTRLEATISPETMRTTKITEGTTQEEFPWKEQTAEKPVPALSSTAWTPKEAVTPLDEQEGDGSAYTVSEDELLTGSERVPVLETTPVGKIDHSVSYPPGAVTEHKVKTDEVVTLTPRIGPKVSLSPGPEQKYETEGSSTTGFTSSLSPFSTHITQLMEETTTEKTSLEDIDLGSGLFEKPKATELIEFSTIKVTVPSDITTAFSSVDRLHTTSAFKPSSAITKKPPLIDREPGEETTSDMVIIGESTSHVPPTTLEDIVAKETETDIDREYFTTSSPPATQPTRPPTVEDKEAFGPQALSTPQPPASTKFHPDINVYIIEVRENKTGRMSDLSVIGHPIDSESKEDEPCSEETDPVHDLMAEILPEFPDIIEIDLYHSEENEEEEEECANATDVTTTPSVQYINGKHLVTTVPKDPEAAEARRGQFESVAPSQNFSDSSESDTHPFVIAKTELSTAVQPNESTETTESLEVTWKPETYPETSEHFSGGEPDVFPTVPFHEEFESGTAKKGAESVTERDTEVGHQAHEHTEPVSLFPEESSGEIAIDQESQKIAFARATEVTFGEEVEKSTSVTYTPTIVPSSASAYVSEEEAVTLIGNPWPDDLLSTKESWVEATPRQVVELSGSSSIPITEGSGEAEEDEDTMFTMVTDLSQRNTTDTLITLDTSRIITESFFEVPATTIYPVSEQPSAKVVPTKFVSETDTSEWISSTTVEEKKRKEEEGTTGTASTFEVYSSTQRSDQLILPFELESPNVATSSDSGTRKSFMSLTTPTQSEREMTDSTPVFTETNTLENLGAQTTEHSSIHQPGVQEGLTTLPRSPASVFMEQGSGEAAADPETTTVSSFSLNVEYAIQAEKEVAGTLSPHVETTFSTEPTGLVLSTVMDRVVAENITQTSREIVISERLGEPNYGAEIRGFSTGFPLEEDFSGDFREYSTVSHPIAKEETVMMEGSGDAAFRDTQTSPSTVPTSVHISHISDSEGPSSTMVSTSAFPWEEFTSSAEGSGEQLVTVSSSVVPVLPSAVQKFSGTASSIIDEGLGEVGTVNEIDRRSTILPTAEVEGTKAPVEKEEVKVSGTVSTNFPQTIEPAKLWSRQEVNPVRQEIESETTSEEQIQEEKSFESPQNSPATEQTIFDSQTFTETELKTTDYSVLTTKKTYSDDKEMKEEDTSLVNMSTPDPDANGLESYTTLPEATEKSHFFLATALVTESIPAEHVVTDSPIKKEESTKHFPKGMRPTIQESDTELLFSGLGSGEEVLPTLPTESVNFTEVEQINNTLYPHTSQVESTSSDKIEDFNRMENVAKEVGPLVSQTDIFEGSGSVTSTTLIEILSDTGAEGPTVAPLPFSTDIGHPQNQTVRWAEEIQTSRPQTITEQDSNKNSSTAEINETTTSSTDFLARAYGFEMAKEFVTSAPKPSDLYYEPSGEGSGEVDIVDSFHTSATTQATRQESSTTFVSDGSLEKHPEVPSAKAVTADGFPTVSVMLPLHSEQNKSSPDPTSTLSNTVSYERSTDGSFQDRFREFEDSTLKPNRKKPTENIIIDLDKEDKDLILTITESTILEILPELTSDKNTIIDIDHTKPVYEDILGMQTDIDTEVPSEPHDSNDESNDDSTQVQEIYEAAVNLSLTEETFEGSADVLASYTQATHDESMTYEDRSQLDHMGFHFTTGIPAPSTETELDVLLPTATSLPIPRKSATVIPEIEGIKAEAKALDDMFESSTLSDGQAIADQSEIIPTLGQFERTQEEYEDKKHAGPSFQPEFSSGAEEALVDHTPYLSIATTHLMDQSVTEVPDVMEGSNPPYYTDTTLAVSTFAKLSSQTPSSPLTIYSGSEASGHTEIPQPSALPGIDVGSSVMSPQDSFKEIHVNIEATFKPSSEEYLHITEPPSLSPDTKLEPSEDDGKPELLEEMEASPTELIAVEGTEILQDFQNKTDGQVSGEAIKMFPTIKTPEAGTVITTADEIELEGATQWPHSTSASATYGVEAGVVPWLSPQTSERPTLSSSPEINPETQAALIRGQDSTIAASEQQVAARILDSNDQATVNPVEFNTEVATPPFSLLETSNETDFLIGINEESVEGTAIYLPGPDRCKMNPCLNGGTCYPTETSYVCTCVPGYSGDQCELDFDECHSNPCRNGATCVDGFNTFRCLCLPSYVGALCEQDTETCDYGWHKFQGQCYKYFAHRRTWDAAERECRLQGAHLTSILSHEEQMFVNRVGHDYQWIGLNDKMFEHDFRWTDGSTLQYENWRPNQPDSFFSAGEDCVVIIWHENGQWNDVPCNYHLTYTCKKGTVACGQPPVVENAKTFGKMKPRYEINSLIRYHCKDGFIQRHLPTIRCLGNGRWAIPKITCMNPSAYQRTYSMKYFKNSSSAKDNSINTSKHDHRWSRRWQESRR

SEQ ID NO: 14027 - protein, 2409 aa, Homo sapiens
MFINIKSILWMCSTLIVTHALHKVKVGKSPPVRGSLSGKVSLPCHFSTMPTLPPSYNTSEFLRIKWSKIEVDKNGKDLKETTVLVAQNGNIKIGQDYKGRVSVPTHPEAVGDASLTVVKLLASDAGLYRCDVMYGIEDTQDTVSLTVDGVVFHYRAATSRYTLNFEAAQKACLDVGAVIATPEQLFAAYEDGFEQCDAGWLADQTVRYPIRAPRVGCYGDKMGKAGVRTYGFRSPQETYDVYCYVDHLDGDVFHLTVPSKFTFEEAAKECENQDARLATVGELQAAWRNGFDQCDYGWLSDASVRHPVTVARAQCGGGLLGVRTLYRFENQTGFPPPDSRFDAYCFKRRMSDLSVIGHPIDSESKEDEPCSEETDPVHDLMAEILPEFPDIIEIDLYHSEENEEEEEECANATDVTTTPSVQYINGKHLVTTVPKDPEAAEARRGQFESVAPSQNFSDSSESDTHPFVIAKTELSTAVQPNESTETTESLEVTWKPETYPETSEHFSGGEPDVFPTVPFHEEFESGTAKKGAESVTERDTEVGHQAHEHTEPVSLFPEESSGEIAIDQESQKIAFARATEVTFGEEVEKSTSVTYTPTIVPSSASAYVSEEEAVTLIGNPWPDDLLSTKESWVEATPRQVVELSGSSSIPITEGSGEAEEDEDTMFTMVTDLSQRNTTDTLITLDTSRIITESFFEVPATTIYPVSEQPSAKVVPTKFVSETDTSEWISSTTVEEKKRKEEEGTTGTASTFEVYSSTQRSDQLILPFELESPNVATSSDSGTRKSFMSLTTPTQSEREMTDSTPVFTETNTLENLGAQTTEHSSIHQPGVQEGLTTLPRSPASVFMEQGSGEAAADPETTTVSSFSLNVEYAIQAEKEVAGTLSPHVETTFSTEPTGLVLSTVMDRVVAENITQTSREIVISERLGEPNYGAEIRGFSTGFPLEEDFSGDFREYSTVSHPIAKEETVMMEGSGDAAFRDTQTSPSTVPTSVHISHISDSEGPSSTMVSTSAFPWEEFTSSAEGSGEQLVTVSSSVVPVLPSAVQKFSGTASSIIDEGLGEVGTVNEIDRRSTILPTAEVEGTKAPVEKEEVKVSGTVSTNFPQTIEPAKLWSRQEVNPVRQEIESETTSEEQIQEEKSFESPQNSPATEQTIFDSQTFTETELKTTDYSVLTTKKTYSDDKEMKEEDTSLVNMSTPDPDANGLESYTTLPEATEKSHFFLATALVTESIPAEHVVTDSPIKKEESTKHFPKGMRPTIQESDTELLFSGLGSGEEVLPTLPTESVNFTEVEQINNTLYPHTSQVESTSSDKIEDFNRMENVAKEVGPLVSQTDIFEGSGSVTSTTLIEILSDTGAEGPTVAPLPFSTDIGHPQNQTVRWAEEIQTSRPQTITEQDSNKNSSTAEINETTTSSTDFLARAYGFEMAKEFVTSAPKPSDLYYEPSGEGSGEVDIVDSFHTSATTQATRQESSTTFVSDGSLEKHPEVPSAKAVTADGFPTVSVMLPLHSEQNKSSPDPTSTLSNTVSYERSTDGSFQDRFREFEDSTLKPNRKKPTENIIIDLDKEDKDLILTITESTILEILPELTSDKNTIIDIDHTKPVYEDILGMQTDIDTEVPSEPHDSNDESNDDSTQVQEIYEAAVNLSLTEETFEGSADVLASYTQATHDESMTYEDRSQLDHMGFHFTTGIPAPSTETELDVLLPTATSLPIPRKSATVIPEIEGIKAEAKALDDMFESSTLSDGQAIADQSEIIPTLGQFERTQEEYEDKKHAGPSFQPEFSSGAEEALVDHTPYLSIATTHLMDQSVTEVPDVMEGSNPPYYTDTTLAVSTFAKLSSQTPSSPLTIYSGSEASGHTEIPQPSALPGIDVGSSVMSPQDSFKEIHVNIEATFKPSSEEYLHITEPPSLSPDTKLEPSEDDGKPELLEEMEASPTELIAVEGTEILQDFQNKTDGQVSGEAIKMFPTIKTPEAGTVITTADEIELEGATQWPHSTSASATYGVEAGVVPWLSPQTSERPTLSSSPEINPETQAALIRGQDSTIAASEQQVAARILDSNDQATVNPVEFNTEVATPPFSLLETSNETDFLIGINEESVEGTAIYLPGPDRCKMNPCLNGGTCYPTETSYVCTCVPGYSGDQCELDFDECHSNPCRNGATCVDGFNTFRCLCLPSYVGALCEQDTETCDYGWHKFQGQCYKYFAHRRTWDAAERECRLQGAHLTSILSHEEQMFVNRVGHDYQWIGLNDKMFEHDFRWTDGSTLQYENWRPNQPDSFFSAGEDCVVIIWHENGQWNDVPCNYHLTYTCKKGTVACGQPPVVENAKTFGKMKPRYEINSLIRYHCKDGFIQRHLPTIRCLGNGRWAIPKITCMNPSAYQRTYSMKYFKNSSSAKDNSINTSKHDHRWSRRWQESRR

SEQ ID NO: 14028 - protein, 1642 aa, Homo sapiens
MFINIKSILWMCSTLIVTHALHKVKVGKSPPVRGSLSGKVSLPCHFSTMPTLPPSYNTSEFLRIKWSKIEVDKNGKDLKETTVLVAQNGNIKIGQDYKGRVSVPTHPEAVGDASLTVVKLLASDAGLYRCDVMYGIEDTQDTVSLTVDGVVFHYRAATSRYTLNFEAAQKACLDVGAVIATPEQLFAAYEDGFEQCDAGWLADQTVRYPIRAPRVGCYGDKMGKAGVRTYGFRSPQETYDVYCYVDHLDGDVFHLTVPSKFTFEEAAKECENQDARLATVGELQAAWRNGFDQCDYGWLSDASVRHPVTVARAQCGGGLLGVRTLYRFENQTGFPPPDSRFDAYCFKPKEATTIDLSILAETASPSLSKEPQMVSDRTTPIIPLVDELPVIPTEFPPVGNIVSFEQKATVQPQAITDSLATKLPTPTGSTKKPWDMDDYSPSASGPLGKLDISEIKEEVLQSTTGVSHYATDSWDGVVEDKQTQESVTQIEQIEVGPLVTSMEILKHIPSKEFPVTETPLVTARMILESKTEKKMVSTVSELVTTGHYGFTLGEEDDEDRTLTVGSDESTLIFDQIPEVITVSKTSEDTIHTHLEDLESVSASTTVSPLIMPDNNGSSMDDWEERQTSGRITEEFLGKYLSTTPFPSQHRTEIELFPYSGDKILVEGISTVIYPSLQTEMTHRRERTETLIPEMRTDTYTDEIQEEITKSPFMGKTEEEVFSGMKLSTSLSEPIHVTESSVEMTKSFDFPTLITKLSAEPTEVRDMEEDFTATPGTTKYDENITTVLLAHGTLSVEAATVSKWSWDEDNTTSKPLESTEPSASSKLPPALLTTVGMNGKDKDIPSFTEDGADEFTLIPDSTQKQLEEVTDEDIAAHGKFTIRFQPTTSTGIAEKSTLRDSTTEEKVPPITSTEGQVYATMEGSALGEVEDVDLSKPVSTVPQFAHTSEVEGLAFVSYSSTQEPTTYVDSSHTIPLSVIPKTDWGVLVPSVPSEDEVLGEPSQDILVIDQTRLEATISPETMRTTKITEGTTQEEFPWKEQTAEKPVPALSSTAWTPKEAVTPLDEQEGDGSAYTVSEDELLTGSERVPVLETTPVGKIDHSVSYPPGAVTEHKVKTDEVVTLTPRIGPKVSLSPGPEQKYETEGSSTTGFTSSLSPFSTHITQLMEETTTEKTSLEDIDLGSGLFEKPKATELIEFSTIKVTVPSDITTAFSSVDRLHTTSAFKPSSAITKKPPLIDREPGEETTSDMVIIGESTSHVPPTTLEDIVAKETETDIDREYFTTSSPPATQPTRPPTVEDKEAFGPQALSTPQPPASTKFHPDINVYIIEVRENKTGPDRCKMNPCLNGGTCYPTETSYVCTCVPGYSGDQCELDFDECHSNPCRNGATCVDGFNTFRCLCLPSYVGALCEQDTETCDYGWHKFQGQCYKYFAHRRTWDAAERECRLQGAHLTSILSHEEQMFVNRVGHDYQWIGLNDKMFEHDFRWTDGSTLQYENWRPNQPDSFFSAGEDCVVIIWHENGQWNDVPCNYHLTYTCKKGTVACGQPPVVENAKTFGKMKPRYEINSLIRYHCKDGFIQRHLPTIRCLGNGRWAIPKITCMNPSAYQRTYSMKYFKNSSSAKDNSINTSKHDHRWSRRWQESRR

SEQ ID NO: 14029 - protein, 1240 aa, Homo sapiens
MFINIKSILWMCSTLIVTHALHKVKVGKSPPVRGSLSGKVSLPCHFSTMPTLPPSYNTSEFLRIKWSKIEVDKNGKDLKETTVLVAQNGNIKIGQDYKGRVSVPTHPEAVGDASLTVVKLLASDAGLYRCDVMYGIEDTQDTVSLTVDGVVFHYRAATSRYTLNFEAAQKACLDVGAVIATPEQLFAAYEDGFEQCDAGWLADQTVRYPIRAPRVGCYGDKMGKAGVRTYGFRSPQETYDVYCYVDHLDGDVFHLTVPSKFTFEEAAKECENQDARLATVGELQAAWRNGFDQCDYGWLSDASVRHPVTVARAQCGGGLLGVRTLYRFENQTGFPPPDSRFDAYCFKRRMSDLSVIGHPIDSESKEDEPCSEETDPVHDLMAEILPEFPDIIEIDLYHSEENEEEEEECANATDVTTTPSVQYINGKHLVTTVPKDPEAAEARRGQFESVAPSQNFSDSSESDTHPFVIAKTELSTAVQPNESTETTESLEVTWKPETYPETSEHFSGGEPDVFPTVPFHEEFESGTAKKGAESVTERDTEVGHQAHEHTEPVSLFPEESSGEIAIDQESQKIAFARATEVTFGEEVEKSTSVTYTPTIVPSSASAYVSEEEAVTLIGNPWPDDLLSTKESWVEATPRQVVELSGSSSIPITEGSGEAEEDEDTMFTMVTDLSQRNTTDTLITLDTSRIITESFFEVPATTIYPVSEQPSAKVVPTKFVSETDTSEWISSTTVEEKKRKEEEGTTGTASTFEVYSSTQRSDQLILPFELESPNVATSSDSGTRKSFMSLTTPTQSEREMTDSTPVFTETNTLENLGAQTTEHSSIHQPGVQEGLTTLPRSPASVFMEQGSGEAAADPETTTVSSFSLNVEYAIQAEKEVAGTLSPHVETTFSTEPTGLVLSTVMDRVVAENITQTSREIVISERLGEPNYGAEIRGFSTGFPLEEDFSGDFREYSTVSHPIAKEETVMMEGSGDAAFRDTQTSPSTVPTSVHISHISDSEGPSSTMVSTSAFPWEEFTSSAEGSGEQLVTVSSSVVPVLPSAVQKFSGTASSIIDEGLGEVGTVNEIDRRSTILPTAEVEGTKAPVEKEEVKVSGTVSTNFPQTIEPAKLWSRQEVNPVRQEIESETTSEEQIQEEKSFESPQNSPATEQTIFDSQTFTETELKTTDYSVLTTKKTYSDDKEMKEEDTSLVNMSTPDPDANGLESYTTLPEATEKSHFFLATALVTESIPAEHVVTDSPI

SEQ ID NO: 14030 - protein, 655 aa, Homo sapiens
MFINIKSILWMCSTLIVTHALHKVKVGKSPPVRGSLSGKVSLPCHFSTMPTLPPSYNTSEFLRIKWSKIEVDKNGKDLKETTVLVAQNGNIKIGQDYKGRVSVPTHPEAVGDASLTVVKLLASDAGLYRCDVMYGIEDTQDTVSLTVDGVVFHYRAATSRYTLNFEAAQKACLDVGAVIATPEQLFAAYEDGFEQCDAGWLADQTVRYPIRAPRVGCYGDKMGKAGVRTYGFRSPQETYDVYCYVDHLDGDVFHLTVPSKFTFEEAAKECENQDARLATVGELQAAWRNGFDQCDYGWLSDASVRHPVTVARAQCGGGLLGVRTLYRFENQTGFPPPDSRFDAYCFKRPDRCKMNPCLNGGTCYPTETSYVCTCVPGYSGDQCELDFDECHSNPCRNGATCVDGFNTFRCLCLPSYVGALCEQDTETCDYGWHKFQGQCYKYFAHRRTWDAAERECRLQGAHLTSILSHEEQMFVNRVGHDYQWIGLNDKMFEHDFRWTDGSTLQYENWRPNQPDSFFSAGEDCVVIIWHENGQWNDVPCNYHLTYTCKKGTVACGQPPVVENAKTFGKMKPRYEINSLIRYHCKDGFIQRHLPTIRCLGNGRWAIPKITCMNPSAYQRTYSMKYFKNSSSAKDNSINTSKHDHRWSRRWQESRR

SEQ ID NO: 14031 - protein, 354 aa, Homo sapiens
MFINIKSILWMCSTLIVTHALHKVKVGKSPPVRGSLSGKVSLPCHFSTMPTLPPSYNTSEFLRIKWSKIEVDKNGKDLKETTVLVAQNGNIKIGQDYKGRVSVPTHPEAVGDASLTVVKLLASDAGLYRCDVMYGIEDTQDTVSLTVDGVVFHYRAATSRYTLNFEAAQKACLDVGAVIATPEQLFAAYEDGFEQCDAGWLADQTVRYPIRAPRVGCYGDKMGKAGVRTYGFRSPQETYDVYCYVDHLDGDVFHLTVPSKFTFEEAAKECENQDARLATVGELQAAWRNGFDQCDYGWLSDASVRHPVTVARAQCGGGLLGVRTLYRFENQTGFPPPDSRFDAYCFKRKCLIPF

SEQ ID NO: 14032 - protein, 1594 aa, Homo sapiens
MPTLPPSYNTSEFLRIKWSKIEVDKNGKDLKETTVLVAQNGNIKIGQDYKGRVSVPTHPEAVGDASLTVVKLLASDAGLYRCDVMYGIEDTQDTVSLTVDGVVFHYRAATSRYTLNFEAAQKACLDVGAVIATPEQLFAAYEDGFEQCDAGWLADQTVRYPIRAPRVGCYGDKMGKAGVRTYGFRSPQETYDVYCYVDHLDGDVFHLTVPSKFTFEEAAKECENQDARLATVGELQAAWRNGFDQCDYGWLSDASVRHPVTVARAQCGGGLLGVRTLYRFENQTGFPPPDSRFDAYCFKPKEATTIDLSILAETASPSLSKEPQMVSDRTTPIIPLVDELPVIPTEFPPVGNIVSFEQKATVQPQAITDSLATKLPTPTGSTKKPWDMDDYSPSASGPLGKLDISEIKEEVLQSTTGVSHYATDSWDGVVEDKQTQESVTQIEQIEVGPLVTSMEILKHIPSKEFPVTETPLVTARMILESKTEKKMVSTVSELVTTGHYGFTLGEEDDEDRTLTVGSDESTLIFDQIPEVITVSKTSEDTIHTHLEDLESVSASTTVSPLIMPDNNGSSMDDWEERQTSGRITEEFLGKYLSTTPFPSQHRTEIELFPYSGDKILVEGISTVIYPSLQTEMTHRRERTETLIPEMRTDTYTDEIQEEITKSPFMGKTEEEVFSGMKLSTSLSEPIHVTESSVEMTKSFDFPTLITKLSAEPTEVRDMEEDFTATPGTTKYDENITTVLLAHGTLSVEAATVSKWSWDEDNTTSKPLESTEPSASSKLPPALLTTVGMNGKDKDIPSFTEDGADEFTLIPDSTQKQLEEVTDEDIAAHGKFTIRFQPTTSTGIAEKSTLRDSTTEEKVPPITSTEGQVYATMEGSALGEVEDVDLSKPVSTVPQFAHTSEVEGLAFVSYSSTQEPTTYVDSSHTIPLSVIPKTDWGVLVPSVPSEDEVLGEPSQDILVIDQTRLEATISPETMRTTKITEGTTQEEFPWKEQTAEKPVPALSSTAWTPKEAVTPLDEQEGDGSAYTVSEDELLTGSERVPVLETTPVGKIDHSVSYPPGAVTEHKVKTDEVVTLTPRIGPKVSLSPGPEQKYETEGSSTTGFTSSLSPFSTHITQLMEETTTEKTSLEDIDLGSGLFEKPKATELIEFSTIKVTVPSDITTAFSSVDRLHTTSAFKPSSAITKKPPLIDREPGEETTSDMVIIGESTSHVPPTTLEDIVAKETETDIDREYFTTSSPPATQPTRPPTVEDKEAFGPQALSTPQPPASTKFHPDINVYIIEVRENKTGPDRCKMNPCLNGGTCYPTETSYVCTCVPGYSGDQCELDFDECHSNPCRNGATCVDGFNTFRCLCLPSYVGALCEQDTETCDYGWHKFQGQCYKYFAHRRTWDAAERECRLQGAHLTSILSHEEQMFVNRVGHDYQWIGLNDKMFEHDFRWTDGSTLQYENWRPNQPDSFFSAGEDCVVIIWHENGQWNDVPCNYHLTYTCKKGTVACGQPPVVENAKTFGKMKPRYEINSLIRYHCKDGFIQRHLPTIRCLGNGRWAIPKITCMNPSAYQRTYSMKYFKNSSSAKDNSINTSKHDHRWSRRWQESRR

SEQ ID NO: 14033 - protein, 111 aa, Homo sapiens
APMAEGGGQNHHEVVKFMDVYQRSYCHPIETLVDIFQEYPDEIEYIFKPSCVPLMRCGGCCNDEGLECVPTEESNITMQTCKCSCKNTDSRCKARQLELNERTCRCDKPRR

SEQ ID NO: 14034 - protein, 317 aa, Homo sapiens
LTDRQTDTAPSPSYHLLPGRRRTVDAAASRGQGPEPAPGGGVEGVGARGVALKLFVQLLGCSRFGGAVVRAGEAEPSGAARSASSGREEPQPEEGEEEEEKEEERGPQWRLGARKPGSWTGEAAVCADSAPAARAPQALARASGRGGRVARRGAEESGPPHSPSRRGSASRAGPGRASETMNFLLSWVHWSLALLLYLHHAKWSQAAPMAEGGGQNHHEVVKFMDVYQRSYCHPIETLVDIFQEYPDEIEYIFKPSCVPLMRCGGCCNDEGLECVPTEESNITMQIMRIKPHQGQHIGEMSFLQHNKCECRCDKPRR

SEQ ID NO: 14035 - protein, 327 aa, Homo sapiens
LTDRQTDTAPSPSYHLLPGRRRTVDAAASRGQGPEPAPGGGVEGVGARGVALKLFVQLLGCSRFGGAVVRAGEAEPSGAARSASSGREEPQPEEGEEEEEKEEERGPQWRLGARKPGSWTGEAAVCADSAPAARAPQALARASGRGGRVARRGAEESGPPHSPSRRGSASRAGPGRASETMNFLLSWVHWSLALLLYLHHAKWSQAAPMAEGGGQNHHEVVKFMDVYQRSYCHPIETLVDIFQEYPDEIEYIFKPSCVPLMRCGGCCNDEGLECVPTEESNITMQIMRIKPHQGQHIGEMSFLQHNKCECRPKKDRARQEKCDKPRR

SEQ ID NO: 14036 - protein, 412 aa, Homo sapiens
LTDRQTDTAPSPSYHLLPGRRRTVDAAASRGQGPEPAPGGGVEGVGARGVALKLFVQLLGCSRFGGAVVRAGEAEPSGAARSASSGREEPQPEEGEEEEEKEEERGPQWRLGARKPGSWTGEAAVCADSAPAARAPQALARASGRGGRVARRGAEESGPPHSPSRRGSASRAGPGRASETMNFLLSWVHWSLALLLYLHHAKWSQAAPMAEGGGQNHHEVVKFMDVYQRSYCHPIETLVDIFQEYPDEIEYIFKPSCVPLMRCGGCCNDEGLECVPTEESNITMQIMRIKPHQGQHIGEMSFLQHNKCECRPKKDRARQEKKSVRGKGKGQKRKRKKSRYKSWSVYVGARCCLMPWSLPGPHPCGPCSERRKHLFVQDPQTCKCSCKNTDSRCKARQLELNERTCRCDKPRR

SEQ ID NO: 14037 - protein, 389 aa, Homo sapiens
LTDRQTDTAPSPSYHLLPGRRRTVDAAASRGQGPEPAPGGGVEGVGARGVALKLFVQLLGCSRFGGAVVRAGEAEPSGAARSASSGREEPQPEEGEEEEEKEEERGPQWRLGARKPGSWTGEAAVCADSAPAARAPQALARASGRGGRVARRGAEESGPPHSPSRRGSASRAGPGRASETMNFLLSWVHWSLALLLYLHHAKWSQAAPMAEGGGQNHHEVVKFMDVYQRSYCHPIETLVDIFQEYPDEIEYIFKPSCVPLMRCGGCCNDEGLECVPTEESNITMQIMRIKPHQGQHIGEMSFLQHNKCECRPKKDRARQEKKSVRGKGKGQKRKRKKSRPCGPCSERRKHLFVQDPQTCKCSCKNTDSRCKARQLELNERTCRCDKPRR

SEQ ID NO: 14038 - protein, 354 aa, Homo sapiens
LTDRQTDTAPSPSYHLLPGRRRTVDAAASRGQGPEPAPGGGVEGVGARGVALKLFVQLLGCSRFGGAVVRAGEAEPSGAARSASSGREEPQPEEGEEEEEKEEERGPQWRLGARKPGSWTGEAAVCADSAPAARAPQALARASGRGGRVARRGAEESGPPHSPSRRGSASRAGPGRASETMNFLLSWVHWSLALLLYLHHAKWSQAAPMAEGGGQNHHEVVKFMDVYQRSYCHPIETLVDIFQEYPDEIEYIFKPSCVPLMRCGGCCNDEGLECVPTEESNITMQIMRIKPHQGQHIGEMSFLQHNKCECRPKKDRARQENPCGPCSERRKHLFVQDPQTCKCSCKNTDSRCKM

SEQ ID NO: 14039 - protein, 371 aa, Homo sapiens
LTDRQTDTAPSPSYHLLPGRRRTVDAAASRGQGPEPAPGGGVEGVGARGVALKLFVQLLGCSRFGGAVVRAGEAEPSGAARSASSGREEPQPEEGEEEEEKEEERGPQWRLGARKPGSWTGEAAVCADSAPAARAPQALARASGRGGRVARRGAEESGPPHSPSRRGSASRAGPGRASETMNFLLSWVHWSLALLLYLHHAKWSQAAPMAEGGGQNHHEVVKFMDVYQRSYCHPIETLVDIFQEYPDEIEYIFKPSCVPLMRCGGCCNDEGLECVPTEESNITMQIMRIKPHQGQHIGEMSFLQHNKCECRPKKDRARQENPCGPCSERRKHLFVQDPQTCKCSCKNTDSRCKARQLELNERTCRCDKPRR

SEQ ID NO: 14040 - protein, 395 aa, Homo sapiens
LTDRQTDTAPSPSYHLLPGRRRTVDAAASRGQGPEPAPGGGVEGVGARGVALKLFVQLLGCSRFGGAVVRAGEAEPSGAARSASSGREEPQPEEGEEEEEKEEERGPQWRLGARKPGSWTGEAAVCADSAPAARAPQALARASGRGGRVARRGAEESGPPHSPSRRGSASRAGPGRASETMNFLLSWVHWSLALLLYLHHAKWSQAAPMAEGGGQNHHEVVKFMDVYQRSYCHPIETLVDIFQEYPDEIEYIFKPSCVPLMRCGGCCNDEGLECVPTEESNITMQIMRIKPHQGQHIGEMSFLQHNKCECRPKKDRARQEKKSVRGKGKGQKRKRKKSRYKSWSVPCGPCSERRKHLFVQDPQTCKCSCKNTDSRCKARQLELNERTCRCDKPRR

SEQ ID NO: 14041 - protein, 371 aa, Homo sapiens
LTDRQTDTAPSPSYHLLPGRRRTVDAAASRGQGPEPAPGGGVEGVGARGVALKLFVQLLGCSRFGGAVVRAGEAEPSGAARSASSGREEPQPEEGEEEEEKEEERGPQWRLGARKPGSWTGEAAVCADSAPAARAPQALARASGRGGRVARRGAEESGPPHSPSRRGSASRAGPGRASETMNFLLSWVHWSLALLLYLHHAKWSQAAPMAEGGGQNHHEVVKFMDVYQRSYCHPIETLVDIFQEYPDEIEYIFKPSCVPLMRCGGCCNDEGLECVPTEESNITMQIMRIKPHQGQHIGEMSFLQHNKCECRPKKDRARQENPCGPCSERRKHLFVQDPQTCKCSCKNTDSRCKARQLELNERTCRSLTRKD

SEQ ID NO: 14042 - protein, 371 aa, Homo sapiens; identical to SEQ ID NO: 14039

SEQ ID NO: 14043 - protein, 327 aa, Homo sapiens; identical to SEQ ID NO: 14035

SEQ ID NO: 14044 - protein, 389 aa, Homo sapiens; identical to SEQ ID NO: 14037

SEQ ID NO: 14045 - protein, 371 aa, Homo sapiens; identical to SEQ ID NO: 14041

SEQ ID NO: 14046 - protein, 354 aa, Homo sapiens; identical to SEQ ID NO: 14038

SEQ ID NO: 14047 - protein, 395 aa, Homo sapiens; identical to SEQ ID NO: 14040

SEQ ID NO: 14048 - protein, 412 aa, Homo sapiens; identical to SEQ ID NO: 14036

SEQ ID NO: 14049 - protein, 163 aa, Homo sapiens
MAEGGGQNHHEVVKFMDVYQRSYCHPIETLVDIFQEYPDEIEYIFKPSCVPLMRCGGCCNDEGLECVPTEESNITMQIMRIKPHQGQHIGEMSFLQHNKCECRPKKDRARQENPCGPCSERRKHLFVQDPQTCKCSCKNTDSRCKARQLELNERTCRCDKPRR

SEQ ID NO: 14050 - protein, 137 aa, Homo sapiens
MNFLLSWVHWSLALLLYLHHAKWSQAAPMAEGGGQNHHEVVKFMDVYQRSYCHPIETLVDIFQEYPDEIEYIFKPSCVPLMRCGGCCNDEGLECVPTEESNITMQIMRIKPHQGQHIGEMSFLQHNKCECRCDKPRR

SEQ ID NO: 14051 - protein, 147 aa, Homo sapiens
MNFLLSWVHWSLALLLYLHHAKWSQAAPMAEGGGQNHHEVVKFMDVYQRSYCHPIETLVDIFQEYPDEIEYIFKPSCVPLMRCGGCCNDEGLECVPTEESNITMQIMRIKPHQGQHIGEMSFLQHNKCECRPKKDRARQEKCDKPRR

SEQ ID NO: 14052 - protein, 209 aa, Homo sapiens
MNFLLSWVHWSLALLLYLHHAKWSQAAPMAEGGGQNHHEVVKFMDVYQRSYCHPIETLVDIFQEYPDEIEYIFKPSCVPLMRCGGCCNDEGLECVPTEESNITMQIMRIKPHQGQHIGEMSFLQHNKCECRPKKDRARQEKKSVRGKGKGQKRKRKKSRPCGPCSERRKHLFVQDPQTCKCSCKNTDSRCKARQLELNERTCRCDKPRR

SEQ ID NO: 14053 - protein, 215 aa, Homo sapiens
MNFLLSWVHWSLALLLYLHHAKWSQAAPMAEGGGQNHHEVVKFMDVYQRSYCHPIETLVDIFQEYPDEIEYIFKPSCVPLMRCGGCCNDEGLECVPTEESNITMQIMRIKPHQGQHIGEMSFLQHNKCECRPKKDRARQEKKSVRGKGKGQKRKRKKSRYKSWSVPCGPCSERRKHLFVQDPQTCKCSCKNTDSRCKARQLELNERTCRCDKPRR

SEQ ID NO: 14054 - protein, 232 aa, Homo sapiens
MNFLLSWVHWSLALLLYLHHAKWSQAAPMAEGGGQNHHEVVKFMDVYQRSYCHPIETLVDIFQEYPDEIEYIFKPSCVPLMRCGGCCNDEGLECVPTEESNITMQIMRIKPHQGQHIGEMSFLQHNKCECRPKKDRARQEKKSVRGKGKGQKRKRKKSRYKSWSVYVGARCCLMPWSLPGPHPCGPCSERRKHLFVQDPQTCKCSCKNTDSRCKARQLELNERTCRCDKPRR

SEQ ID NO: 14055 - protein, 191 aa, Homo sapiens
MNFLLSWVHWSLALLLYLHHAKWSQAAPMAEGGGQNHHEVVKFMDVYQRSYCHPIETLVDIFQEYPDEIEYIFKPSCVPLMRCGGCCNDEGLECVPTEESNITMQIMRIKPHQGQHIGEMSFLQHNKCECRPKKDRARQENPCGPCSERRKHLFVQDPQTCKCSCKNTDSRCKARQLELNERTCRCDKPRR

SEQ ID NO: 14056 - protein, 191 aa, Homo sapiens
MNFLLSWVHWSLALLLYLHHAKWSQAAPMAEGGGQNHHEVVKFMDVYQRSYCHPIETLVDIFQEYPDEIEYIFKPSCVPLMRCGGCCNDEGLECVPTEESNITMQIMRIKPHQGQHIGEMSFLQHNKCECRPKKDRARQENPCGPCSERRKHLFVQDPQTCKCSCKNTDSRCKARQLELNERTCRSLTRKD

SEQ ID NO: 14057 - protein, 174 aa, Homo sapiens
MNFLLSWVHWSLALLLYLHHAKWSQAAPMAEGGGQNHHEVVKFMDVYQRSYCHPIETLVDIFQEYPDEIEYIFKPSCVPLMRCGGCCNDEGLECVPTEESNITMQIMRIKPHQGQHIGEMSFLQHNKCECRPKKDRARQENPCGPCSERRKHLFVQDPQTCKCSCKNTDSRCKM

SEQ ID NO: 14058 - protein, 323 aa, Homo sapiens
  VARIANT 1: note = misc_feature - Xaa can be any naturally occurring amino acid
XRGQGPEPAPGGGVEGVGARGVALKLFVQLLGCSRFGGAVVRAGEAEPSGAARSASSGREEPQPEEGEEEEEKEEERGPQWRLGARKPGSWTGEAAVCADSAPAARAPQALARASGRGGRVARRGAEESGPPHSPSRRGSASRAGPGRASETMNFLLSWVHWSLALLLYLHHAKWSQAAPMAEGGGQNHHEVVKFMDVYQRSYCHPIETLVDIFQEYPDEIEYIFKPSCVPLMRCGGCCNDEGLECVPTEESNITMQIMRIKPHQGQHIGEMSFLQHNKCECRPKKDRARQEKKSVRGKGKGQKRKRKKSRYKSWSVCDKPRR

SEQ ID NO: 14059 - protein, 207 aa, Homo sapiens
MSPLLRRLLLAALLQLAPAQAPVSQPDAPGHQRKVVSWIDVYTRATCQPREVVVPLTVELMGTVAKQLVPSCVTVQRCGGCCPDDGLECVPTGQHQVRMQILMIRYPSSQLGEMSLEEHSQCECRPKKKDSAVKPDRAATPHHRPQPRSVPGWDSAPGAPSPADITHPTPAPGPSAHAAPSTTSALTPGPAAAAADAAASSVAKGGA

SEQ ID NO: 14060 - protein, 188 aa, Homo sapiens
MSPLLRRLLLAALLQLAPAQAPVSQPDAPGHQRKVVSWIDVYTRATCQPREVVVPLTVELMGTVAKQLVPSCVTVQRCGGCCPDDGLECVPTGQHQVRMQILMIRYPSSQLGEMSLEEHSQCECRPKKKDSAVKPDSPRPLCPRCTQHHQRPDPRTCRCRCRRRSFLRCQGRGLELNPDTCRCRKLRR

SEQ ID NO: 14061 - protein, 32 aa, Homo sapiens
  VARIANT 1: note = misc_feature - Xaa can be any naturally occurring amino acid
XHAAPSTTSALTPGPAAAAADAAASSVAKGGA

SEQ ID NO: 14062 - protein, 419 aa, Homo sapiens
MHLLGFFSVACSLLAAALLPGPREAPAAAAAFESGLDLSDAEPDAGEATAYASKDLEEQLRSVSSVDELMTVLYPEYWKMYKCQLRKGGWQHNREQANLNSRTEETIKFAAAHYNTEILKSIDNEWRKTQCMPREVCIDVGKEFGVATNTFFKPPCVSVYRCGGCCNSEGLQCMNTSTSYLSKTLFEITVPLSQGPKPVTISFANHTSCRCMSKLDVYRQVHSIIRRSLPATLPQCQAANKTCPTNYMWNNHICRCLAQEDFMFSSDAGDDSTDGFHDICGPNKELDEETCQCVCRAGLRPASCGPHKELDRNSCQCVCKNKLFPSQCGANREFDENTCQCVCKRTCPRNQPLNPGKCACECTESPQKCLLKGKKFHHQTCSCYRRPCTNRQKACEPGFSYSEEVCRCVPSYWKRPQMS

SEQ ID NO: 14063 - protein, 354 aa, Homo sapiens
MYREWVVVNVFMMLYVQLVQGSSNEHGPVKRSSQSTLERSEQQIRAASSLEELLRITHSEDWKLWRCRLRLKSFTSMDSRSASHRSTRFAATFYDIETLKVIDEEWQRTQCSPRETCVEVASELGKSTNTFFKPPCVNVFRCGGCCNEESLICMNTSTSYISKQLFEISVPLTSVPELVPVKVANHTGCKCLPTAPRHPYSIIRRSIQIPEEDRCSHSKKLCPIDMLWDSNKCKCVLQEENPLAGTEDHSHLQEPALCGPHMMFDEDRCECVCKTPCPKDLIQHPKNCSCFECKESLETCCQKHKLFHPDTCSCEDRCPFHTRPCASGKTACAKHCRFPKEKRAAQGPHSRKNP

SEQ ID NO: 14064 - protein, 615 aa, Homo sapiens
MKALRLSASALFCLLLINGLGAAPPGRPEAQPPPLSSEHKEPVAGDAVPGPKDGSAPEVRGARNSEPQDEGELFQGVDPRALAAVLLQALDRPASPPAPSGSQQGPEEEAAEALLTETVRSQTHSLPAPESPEPAAPPRPQTPENGPEASDPSEELEALASLLQELRDFSPSSAKRQQETAAAETETRTHTLTRVNLESPGPERVWRASWGEFQARVPERAPLPPPAPSQFQARMPDSGPLPETHKFGEGVSSPKTHLGEALAPLSKAYQGVAAPFPKARRPESALLGGSEAGERLLQQGLAQVEAGRRQAEATRQAAAQEERLADLASDLLLQYLLQGGARQRGLGGRGLQEAAEERESAREEEEAEQERRGGEERVGEEDEEAAEAEAEAEEAERARQNALLFAEEEDGEAGAEDKRSQEETPGHRRKEAEGTEEGGEEEDDEEMDPQTIDSLIELSTKLHLPADDVVSIIEEVEEKRKRKKNAPPEPVPPPRAAPAPTHVRSPQPPPPAPAPARDELPDWNEVLPPWDREEDEVYPPGPYHPFPNYIRPRTLQPPSALRRRHYHHALPPSRHYPGREAQARRAQEEAEAEERRLQEQEELENYIEHVLLRRP

SEQ ID NO: 14065 - protein, 615 aa, Homo sapiens; identical to SEQ ID NO: 14064

SEQ ID NO: 14066 - protein, 377 aa, Homo sapiens
MKALRLSASALFCLLLINGLGAAPPGRPEAQPPPLSSEHKEPVAGDAVPGPKDGSAPEVRGARNSEPQDEGELFQGVDPRALAAVLLQALDRPASPPAPSGSQQGPEEEAAEALLTETVRSQTHSLPAPESPEPAAPPRPQTPENGPEASDPSEELEALASLLQELRDFSPSSAKRQQETAAAETETRTHTLTRVNLESPGPERVWRASWGEFQARVPERAPLPPPAPSQFQARMPDSGPLPETHKFGEGVSSPKTHLGEALAPLSKAYQGVAAPFPKARRPESALLGGSEAGERLLQQGLAQVEAGRRQAEATRQAAAQEERLADLASDLLLQFAAGRGPAARPCPLALPLSPGCVGTCQTPLPGPEPELPELTRG

SEQ ID NO: 14067 - protein, 169 aa, Homo sapiens
MDTRNKAQLLVLLTLLSVLFSQTSAWPLYRAPSALRLGDRIPFEGANEPDQVSLKEDIDMLQNALAENDTPYYDVSRNARHADGVFTSDFSKLLGQLSAKKYLESLMGKRVSNISEDPVPVKRHSDAVFTDNYTRLRKQMAVKKYLNSILNGKRSSEGESPDFPEELEK

SEQ ID NO: 14068 - protein, 170 aa, Homo sapiens
MDTRNKAQLLVLLTLLSVLFSQTSAWPLYRAPSALRLGDRIPFEGANEPDQVSLKEDIDMLQNALAENDTPYYDVSRNARHADGVFTSDFSKLLGQLSAKKYLESLMGKRVSSNISEDPVPVKRHSDAVFTDNYTRLRKQMAVKKYLNSILNGKRSSEGESPDFPEELEK

SEQ ID NO: 14069 - protein, 119 aa, Homo sapiens
  VARIANT 1: note = misc_feature - Xaa can be any naturally occurring amino acid
XVSLKEDIDMLQNALAENDTPYYDVSRNARHADGVFTSDFSKLLGQLSAKKYLESLMGKRVSSNISEDPVPVKRHSDAVFTDNYTRLRKQMAVKKYLNSILNGKRSEGESPDFPEELEK

SEQ ID NO: 14070 - protein, 422 aa, Homo sapiens
MPLWEAPSDHPANPPATLQGHTSLPGCQEEPARDPQSGLPQITSESSSFSEGSLPSWSSGPAGAKLNASHEGIGSSSDGNGDSKAATERVVSAMDTVRRKHPEITFYILVKAIYTLGYSVSLMSLATGSIILCLFRKLHCTRNYIHLNLFLSFILRAISVLVKDDVLYSSSGTLHCPDQPSSWVGCKLSLVFLQYCIMANFFWLLVEGLYLHTLLVAMLPPRRCFLAYLLIGWGLPTVCIGAWTAARLYLEDTGCWDTNDHSVPWWVIRIPILISIIVNFVLFISIIRILLQKLTSPDVGGNDQSQYKRLAKSTLLLIPLFGVHYMVFAVFPISISSKYQILFELCLGSFQGLVVAVLYCFLNSEVQCELKRKWRSRCPTPSASRDYRVCGSSFSRNGSEGALQFHRGSRAQSFLQTETSVI

SEQ ID NO: 14071 - protein, 438 aa, Homo sapiens
MRTLLPPALLTCWLLAPVNSIHPECRFHLEIQEEETKCAELLRSQTEKHKACSGVWDNITCWRPANVGETVTVPCPKVFSNFYSKAGNISKNCTSDGWSETFPDFVDACGYSDPEDESKITFYILVKAIYTLGYSVSLMSLATGSIILCLFRKLHCTRNYIHLNLFLSFILRAISVLVKDDVLYSSSGTLHCPDQPSSWVGCKLSLVFLQYCIMANFFWLLVEGLYLHTLLVAMLPPRRCFLAYLLIGWGLPTVCIGAWTAARLYLEDTGCWDTNDHSVPWWVIRIPILISIIVNFVLFISIIRILLQKLTSPDVGGNDQSQYKRLAKSTLLLIPLFGVHYMVFAVFPISISSKYQILFELCLGSFQGLVVAVLYCFLNSEVQCELKRKWRSRCPTPSASRDYRVCGSSFSRNGSEGALQFHRGSRAQSFLQTETSVI

SEQ ID NO: 14072 - protein, 77 aa, Homo sapiens
MRTLLPPALLTCWLLAPVNSIHPECRFHLEIQEEETKCAELLRSQTEKHKGHTKGFILIHAGGLKRILDPHTYPLAP

SEQ ID NO: 14073 - protein, 579 aa, Homo sapiens
MRTLLPPALLTCWLLAPVSAPATPAPRRLGPGSPLPRRALLPPVFAFLPGAGARAGSGRGSGVARGPELPPGEREALSSGPAGLRDSGWEAACALPRAPPSGVCWKRDRFFLDASTMSSFGAVPGAGSCGRLRGLRVSRGDRGWRWPQMPLGPSLYLLVNSIHPECRFHLEIQEEETKCAELLRSQTEKHKACSGVWDNITCWRPANVGETVTVPCPKVFSNFYSKAGNISKNCTSDGWSETFPDFVDACGYSDPEDESKITFYILVKAIYTLGYSVSLMSLATGSIILCLFRKLHCTRNYIHLNLFLSFILRAISVLVKDDVLYSSSGTLHCPDQPSSWVGCKLSLVFLQYCIMANFFWLLVEGLYLHTLLVAMLPPRRCFLAYLLIGWGLPTVCIGAWTAARLYLEDTGCWDTNDHSVPWWVIRIPILISIIVNFVLFISIIRILLQKLTSPDVGGNDQSQYKRLAKSTLLLIPLFGVHYMVFAVFPISISSKYQILFELCLGSFQGLVVAVLYCFLNSEVQCELKRKWRSRCPTPSASRDYRVCGSSFSRNGSEGALQFHRGSRAQSFLQTETSVI

SEQ ID NO: 14074 - protein, 347 aa, Homo sapiens
MGVVQYGDNPATHFNLKTHTNSRDLKTAIEKITQRGGLSNVGRAISFVTKNFFSKANGNRSGAPNVVVVMVDGWPTDKVEEASRLARESGINIFFITIEGAAENEKQYVVEPNFANKAVCRTNGFYSLHVQSWFGLHKTLQPLVKRVCDTDRLACSKTCLNSADIGFVIDGSSSVGTGNFRTVLQFVTNLTKEFEISDTDTRIGAVQYTYEQRLEFGFDKYSSKPDILNAIKRVGYWSGGTSTGAAINFALEQLFKKSKPNKRKLMILITDGRSYDDVRIPAMAAHLKGVITYAIGVAWAAQEELEVIATHPARDHSFFVDEFDNLHQYVPRIIQNICTEFNSQPRN

SEQ ID NO: 14075 - protein, 630 aa, Homo sapiens
MRTVVLTMKASVIEMFLAVPQINCDVKAGKIIDPEFIVKCPAGCQDPKYHVYGTDVYASYSSVCGAAVHSGVLDNSGGKILVRKVAGQSGYKGSYSNGVQSLSLPRWRESFIVLESKPKKGVTYPSALTYSSSKSPAAQAGETTKAYQRPPIPGTTAQPVTLMQLLAVTVAVATPTTLPRPSPSAASTTSIPRPQSVGHRSQEMGEMDSWKPGSVLLDEGLVPKEELSTQSLEPVSLGDPNCKIDLSFLIDGSTSIGKRRFRIQKQLLADVAQALDIGPAGPLMGVVQYGDNPATHFNLKTHTNSRDLKTAIEKITQRGGLSNVGRAISFVTKNFFSKANGNRSGAPNVVVVMVDGWPTDKVEEASRLARESGINIFFITIEGAAENEKQYVVEPNFANKAVCRTNGFYSLHVQSWFGLHKTLQPLVKRVCDTDRLACSKTCLNSADIGFVIDGSSSVGTGNFRTVLQFVTNLTKEFEISDTDTRIGAVQYTYEQRLEFGFDKYSSKPDILNAIKRVGYWSGGTSTGAAINFALEQLFKKSKPNKRKLMILITDGRSYDDVRIPAMAAHLKGVITYAIGVAWAAQEELEVIATHPARDHSFFVDEFDNLHQYVPRIIQNICTEFNSQPRN

SEQ ID NO: 14076 - protein, 657 aa, Homo sapiens
MRTVVLTMKASVIEMFLVLLVTGVHSNKETAKKIKRPKFTVPQINCDVKAGKIIDPEFIVKCPAGCQDPKYHVYGTDVYASYSSVCGAAVHSGVLDNSGGKILVRKVAGQSGYKGSYSNGVQSLSLPRWRESFIVLESKPKKGVTYPSALTYSSSKSPAAQAGETTKAYQRPPIPGTTAQPVTLMQLLAVTVAVATPTTLPRPSPSAASTTSIPRPQSVGHRSQEMDLWSTATYTSSQNRPRADPGIQRQDPSGAAFQKPVGADVSLDCKIDLSFLIDGSTSIGKRRFRIQKQLLADVAQALDIGPAGPLMGVVQYGDNPATHFNLKTHTNSRDLKTAIEKITQRGGLSNVGRAISFVTKNFFSKANGNRSGAPNVVVVMVDGWPTDKVEEASRLARESGINIFFITIEGAAENEKQYVVEPNFANKAVCRTNGFYSLHVQSWFGLHKTLQPLVKRVCDTDRLACSKTCLNSADIGFVIDGSSSVGTGNFRTVLQFVTNLTKEFEISDTDTRIGAVQYTYEQRLEFGFDKYSSKPDILNAIKRVGYWSGGTSTGAAINFALEQLFKKSKPNKRKLMILITDGRSYDDVRIPAMAAHLKGVITYAIGVAWAAQEELEVIATHPARDHSFFVDEFDNLHQYVPRIIQNICTEFNSQPRN

SEQ ID NO: 14077 - protein, 693 aa, Homo sapiens
MRTVVLTMKASVIEMFLVLLVTGVHSNKETAKKIKRPKFTVPQINCDVKAGKIIDPEFIVKCPAGCQDPKYHVYGTDVYASYSSVCGAAVHSGVLDNSGGKILVRKVAGQSGYKGSYSNGVQSLSLPRWRESFIVLESKPKKGVTYPSALTYSSSKSPAAQAGETTKAYQRPPIPGTTAQPVTLMQLLAVTVAVATPTTLPRPSPSAASTTSIPRPQSVGHRSQEMDLWSTATYTSSQNRPRADPGIQRQDPSGAAFQKPVGADVSLGEMDSWKPGSVLLDEGLVPKEELSTQSLEPVSLGDPNCKIDLSFLIDGSTSIGKRRFRIQKQLLADVAQALDIGPAGPLMGVVQYGDNPATHFNLKTHTNSRDLKTAIEKITQRGGLSNVGRAISFVTKNFFSKANGNRSGAPNVVVVMVDGWPTDKVEEASRLARESGINIFFITIEGAAENEKQYVVEPNFANKAVCRTNGFYSLHVQSWFGLHKTLQPLVKRVCDTDRLACSKTCLNSADIGFVIDGSSSVGTGNFRTVLQFVTNLTKEFEISDTDTRIGAVQYTYEQRLEFGFDKYSSKPDILNAIKRVGYWSGGTSTGAAINFALEQLFKKSKPNKRKLMILITDGRSYDDVRIPAMAAHLKGVITYAIGVAWAAQEELEVIATHPARDHSFFVDEFDNLHQYVPRIIQNICTEFNSQPRN

SEQ ID NO: 14078 - protein, 678 aa, Homo sapiens
MRTVVLTMKASVIEMFLVLLVTGVHSNKETAKKIKRPKFTVPQINCDVKAGKIIDPEFIVKCPAGCQDPKYHVYGTDVYASYSSVCGAAVHSGVLDNSGGKILVRKVAGQSGYKGSYSNGVQSLSLPRWRESFIVLESKPKKGVTYPSALTYSSSKSPAAQAGETTKAYQRPPIPGTTAQPVTLMQLLAVTVAVATPTTLPRPSPSAASTTSIPRPQSVGHRSQEMDLWSTATYTSSQNRPRADPGIQRQDPSGAAFQKPVGADVSLGLVPKEELSTQSLEPVSLGDPNCKIDLSFLIDGSTSIGKRRFRIQKQLLADVAQALDIGPAGPLMGVVQYGDNPATHFNLKTHTNSRDLKTAIEKITQRGGLSNVGRAISFVTKNFFSKANGNRSGAPNVVVVMVDGWPTDKVEEASRLARESGINIFFITIEGAAENEKQYVVEPNFANKAVCRTNGFYSLHVQSWFGLHKTLQPLVKRVCDTDRLACSKTCLNSADIGFVIDGSSSVGTGNFRTVLQFVTNLTKEFEISDTDTRIGAVQYTYEQRLEFGFDKYSSKPDILNAIKRVGYWSGGTSTGAAINFALEQLFKKSKPNKRKLMILITDGRSYDDVRIPAMAAHLKGVITYAIGVAWAAQEELEVIATHPARDHSFFVDEFDNLHQYVPRIIQNICTEFNSQPRN

SEQ ID NO: 14079 - protein, 656 aa, Homo sapiens
MRTVVLTMKASVIEMFLVLLVTGVHSNKETAKKIKRPKFTVPQINCDVKAGKIIDPEFIVKCPAGCQDPKYHVYGTDVYASYSSVCGAAVHSGVLDNSGGKILVRKVAGQSGYKGSYSNGVQSLSLPRWRESFIVLESKPKKGVTYPSALTYSSSKSPAAQAGETTKAYQRPPIPGTTAQPVTLMQLLAVTVAVATPTTLPRPSPSAASTTSIPRPQSVGHRSQEMDLWSTATYTSSQNRPRADPGLVPKEELSTQSLEPVSLGDPNCKIDLSFLIDGSTSIGKRRFRIQKQLLADVAQALDIGPAGPLMGVVQYGDNPATHFNLKTHTNSRDLKTAIEKITQRGGLSNVGRAISFVTKNFFSKANGNRSGAPNVVVVMVDGWPTDKVEEASRLARESGINIFFITIEGAAENEKQYVVEPNFANKAVCRTNGFYSLHVQSWFGLHKTLQPLVKRVCDTDRLACSKTCLNSADIGFVIDGSSSVGTGNFRTVLQFVTNLTKEFEISDTDTRIGAVQYTYEQRLEFGFDKYSSKPDILNAIKRVGYWSGGTSTGAAINFALEQLFKKSKPNKRKLMILITDGRSYDDVRIPAMAAHLKGVITYAIGVAWAAQEELEVIATHPARDHSFFVDEFDNLHQYVPRIIQNICTEFNSQPRN

SEQ ID NO: 14080 - protein, 203 aa, Homo sapiens
MRTVVLTMKASVIEMFLVLLVTGVHSNKETAKKIKRPKFTVPQINCDVKAGKIIDPEFIVKCPAGCQDPKYHVYGTDVYASYSSVCGAAVHSGVLDNSGGKILVRKVAGQSGYKGSYSNGVQSLSLPRWRESFIVLESKPKKGVTYPSALTYSSSKSPAAQAGKCSRVIESKPSESMNTRRVLGDSGEINILTGQAPLALAIF

SEQ ID NO: 14081 - protein, 134 aa, Homo sapiens
  VARIANT 1: note = misc_feature - Xaa can be any naturally occurring amino acid
XTSSQNRPRADPGIQRQDPSGAAFQKPVGADVSLGLVPKEELSTQSLEPVSLGDPNCKIDLSFLIDGSTSIGKRRFRIQKQLLADVAQALDIGPAGPLMGVVQYGPLHWYWKNSPGNGEEWVGRETAPISQLST

SEQ ID NO: 14082 - protein, 92 aa, Homo sapiens
MGSTWGSPGWVRLALCLTGLVLSLYALHVKAARARDRDYRALCDVGTAISCSRVFSSRLPADTLGLCPDAAELPGVSRWFCLPGLDPVLRAL

SEQ ID NO: 14083 - protein, 149 aa, Homo sapiens
MGSTWGSPGWVRLALCLTGLVLSLYALHVKAARARDRDYRALCDVGTAISCSRVFSSRVQGTGLTVLTWFHPTPPLCQVGQGFRAGGACAGTGQHPQSIQQHIRLHLLHTTAIVRLPADTLGLCPDAAELPGVSRWFCLPGLDPVLRAL

SEQ ID NO: 14084 - protein, 156 aa, Homo sapiens
MGSTWGSPGWVRLALCLTGLVLSLYALHVKAARARDRDYRALCDVGTAISCSRVFSSRWGRGFGLVEHVLGQDSILNQSNSIFGCIFYTLQLLLDGVSPCCPGWSQAICLPQPPKVLGGLQALPADTLGLCPDAAELPGVSRWFCLPGLDPVLRAL

SEQ ID NO: 14085 - protein, 163 aa, Homo sapiens
MGSTWGSPGWVRLALCLTGLVLSLYALHVKAARARDRDYRALCDVGTAISCSRVFSSRWGRGFGLVEHVLGQDSILNQSNSIFGCIFYTLQLLLGCLRTRWASVLMLLSSLVSLAGSVYLAWILFFVLYDFCIVCITTYAINVSLMWLSFRKVQEPQGKAKRH

SEQ ID NO: 14086 - protein, 160 aa, Homo sapiens
MIILESGIGVPGERTRGWTARGVVAQGLSYPAILVFEIRVRGKGPDSAGDWDYSGDSHVNWMPRNNGDQERRGGRMAVEIDDGLKDGAQVGQGFRAGGACAGTGQHPQSIQQHIRLHLLHTTAIVRLPADTLGLCPDAAELPGVSRWFCLPGLDPVLRAL

SEQ ID NO: 14087 - protein, 161 aa, Homo sapiens
MIVERLGYCQGCVWPKEWFCECMGERETDHQEALVRQDPGGWEAAARMVPEIVSGEMLGSRIGSPYSLDPLIRWSLGPGCCNSYNRTWHRVGQGFRAGGACAGTGQHPQSIQQHIRLHLLHTTAIVRLPADTLGLCPDAAELPGVSRWFCLPGLDPVLRAL

SEQ ID NO: 14088 - protein, 43 aa, Homo sapiens
MLLSSLVSLAGSVYLAWILFFVLYDFCIVCITTYAINVSLMWL

SEQ ID NO: 14089 - protein, 92 aa, Homo sapiens
  VARIANT 1: note = misc_feature - Xaa can be any naturally occurring amino acid
XQGCVWPKEWFCECMGERETDHQEALVRQDPGGWEAAARMVPEIVSGEMLGSRIGSPYSLDPLIRWSLGPGCCNSYNRTWHRVACGHAGPLS

SEQ ID NO: 14090 - protein, 845 aa, Homo sapiens
MGTSALWALWLLLALCWAPRESGATGTGRKAKCEPSQFQCTNGRCITLLWKCDGDEDCVDGSDEKNCVKKTCAESDFVCNNGQCVPSRWKCDGDPDCEDGSDESPEQCHMRTCRIHEISCGAHSTQCIPVSWRCDGENDCDSGEDEENCGNITCSPDEFTCSSGRCISRNFVCNGQDDCSDGSDELDCAPPTCGAHEFQCSTSSCIPISWVCDDDADCSDQSDESLEQCGRQPVIHTKCPASEIQCGSGECIHKKWRCDGDPDCKDGSDEVNCPSRTCRPDQFECEDGSCIHGSRQCNGIRDCVDGSDEVNCKNVNQCLGPGKFKCRSGECIDISKVCNQEQDCRDWSDEPLKECHINECLVNNGGCSHICKDLVIGYECDCAAGFELIDRKTCGDIDECQNPGICSQICINLKGGYKCECSRGYQMDLATGVCKAVGKEPSLIFTNRRDIRKIGLERKEYIQLVEQLRNTVALDADIAAQKLFWADLSQKAIFSASIDDKVGRHVKMIDNVYNPAAIAVDWVYKTIYWTDAASKTISVATLDGTKRKFLFNSDLREPASIAVDPLSGFVYWSDWGEPAKIEKAGMNGFDRRPLVTADIQWPNGITLDLIKSRLYWLDSKLHMLSSVDLNGQDRRIVLKSLEFLAHPLALTIFEDRVYWIDGENEAVYGANKFTGSELATLVNNLNDAQDIIVYHELVQPSGKNWCEEDMENGGCEYLCLPAPQINDHSPKYTCSCPSGYNVEENGRDCQRINVTTAVSEVSVPPKGTSAAWAILPLLLLVMAAVGGYLMWRNWQHKNMKSMNFDNPVYLKTTEEDLSIDIGRHSASVGHTYPAISVVSTDDDLA

SEQ ID NO: 14091 - protein, 873 aa, Homo sapiens
MGTSALWALWLLLALCWAPRESGATGTGRKAKCEPSQFQCTNGRCITLLWKCDGDEDCVDGSDEKNCVKKTCAESDFVCNNGQCVPSRWKCDGDPDCEDGSDESPEQCHMRTCRIHEISCGAHSTQCIPVSWRCDGENDCDSGEDEENCGNITCSPDEFTCSSGRCISRNFVCNGQDDCSDGSDELDCAPPTCGAHEFQCSTSSCIPISWVCDDDADCSDQSDESLEQCGRQPVIHTKCPASEIQCGSGECIHKKWRCDGDPDCKDGSDEVNCPSRTCRPDQFECEDGSCIHGSRQCNGIRDCVDGSDEVNCKNVNQCLGPGKFKCRSGECIDISKVCNQEQDCRDWSDEPLKECHINECLVNNGGCSHICKDLVIGYECDCAAGFELIDRKTCGDIDECQNPGICSQICINLKGGYKCECSRGYQMDLATGVCKAVGKEPSLIFTNRRDIRKIGLERKEYIQLVEQLRNTVALDADIAAQKLFWADLSQKAIFSASIDDKVGRHVKMIDNVYNPAAIAVDWVYKTIYWTDAASKTISVATLDGTKRKFLFNSDLREPASIAVDPLSGFVYWSDWGEPAKIEKAGMNGFDRRPLVTADIQWPNGITLDLIKSRLYWLDSKLHMLSSVDLNGQDRRIVLKSLEFLAHPLALTIFEDRVYWIDGENEAVYGANKFTGSELATLVNNLNDAQDIIVYHELVQPSGKNWCEEDMENGGCEYLCLPAPQINDHSPKYTCSCPSGYNVEENGRDCQSTATTVTYSETKDTNTTEISATSGLVPGGINVTTAVSEVSVPPKGTSAAWAILPLLLLVMAAVGGYLMWRNWQHKNMKSMNFDNPVYLKTTEEDLSIDIGRHSASVGHTYPAISVVSTDDDLA

SEQ ID NO: 14092 - protein, 173 aa, Homo sapiens
MGTSALWALWLLLALCWAPRESGATGTGRKAKCEPSQFQCTNGRCITLLWKCDGDEDCVDGSDEKNCVKKTCAESDFVCNNGQCVPSRWKCDGDPDCEDGSDESPEQCRNITCSPDEFTCSSGRCISRNFVCNGQDDCSDGSDELDCAPPTCGAHEFQCSTSSCIPISWVCDD

SEQ ID NO: 14093 - protein, 70 aa, Homo sapiens
MERGAGAKLLPLLLLLRATGFTCAQTDGRNGYTAVIEVTSGGPWGDWAWPEMCPDGFFASGFSLKLGRME

SEQ ID NO: 14094 - protein, 102 aa, Homo sapiens
MERGAGAKLLPLLLLLRATGFTCAQTDGRNGYTAVIEVTSGGPWGDWAWPEMCPDGFFASGFSLKVEPPQGIPGDDTALNGIRLHCARGNVLGNTHVLGRME

SEQ ID NO: 14095 - protein, 114 aa, Homo sapiens
MERGAGAKLLPLLLLLRATGFTCAQTDGRNGYTAVIEVTSGGPWGDWAWPEMCPDGFFASGFSLKVEPPQGIPGDDTALNGIRLHCARGNVLGNTHVVESQSGRWGAGVEDPLG

SEQ ID NO: 14096 - protein, 202 aa, Homo sapiens
MERGAGAKLLPLLLLLRATGFTCAQTDGRNGYTAVIEVTSGGPWGDWAWPEMCPDGFFASGFSLKVEPPQGIPGDDTALNGIRLHCARGNVLGNTHVVESQSGSWGEWSEPLWCRGGAYLVAFSLRVEAPTTLGDNTAANNVRFRCSDGEELQGPGLSWGDFGDWSDHCPKGACGLQTKIQGPRGLGDDTALNDARLFCCRS

SEQ ID NO: 14097 - protein, 513 aa, Homo sapiens
MTTQLPAYVAILLFYVSRASCQDTFTAAVYEHAAILPNATLTPVSREEALALMNRNLDILEGAITSAADQGAHIIVTPEDAIYGWNFNRDSLYPYLEDIPDPEVNWIPCNNRNRFGQTPVQERLSCLAKNNSIYVVANIGDKKPCDTSDPQCPPDGRYQYNTDVVFDSQGKLVARYHKQNLFMGENQFNVPKEPEIVTFNTTFGSFGIFTCFDILFHDPAVTLVKDFHVDTIVFPTAWMNVLPHLSAVEFHSAWAMGMRVNFLASNIHYPSKKMTGSGIYAPNSSRAFHYDMKTEEGKLLLSQLDSHPSHSAVVNWTSYASSIEALSSGNKEFKGTVFFDEFTFVKLTGVAGNYTVCQKDLCCHLSYKMSENIPNEVYALGAFDGLHTVEGRYYLQICTLLKCKTTNLNTCGDSAETASTRFEMFSLSGTFGTQYVFPEVLLSENQLAPGEFQVSTDGRLFSLKPTSGPVLTVTLFGRLYEKDWASNASSGLTAQARIIMLIVIAPIVCSLSW

SEQ ID NO: 14098 - protein, 102 aa, Homo sapiens
MNENIDILETAIKQAAEQGARIIVTPEDALYGWKFTRETVFPYLEDIPDPQVNWIPCQDPHRFGHTPVQARLSCLAKDNSIYVLANLGDKKPCNSRDSTCPP

SEQ ID NO: 14099 - protein, 131 aa, Homo sapiens
MNENIDILETAIKQAAEQGARIIVTPEDALYGWKFTRETVFPYLEDIPDPQVNWIPCQDPHRFGHTPVQARLSCLAKDNSIYVLANLGDKKPCNSRDSTCPPNGYFQYNTNVVYNTEGKLVARYHKVGKSH

SEQ ID NO: 14100 - protein, 467 aa, Homo sapiens
MNENIDILETAIKQAAEQGARIIVTPEDALYGWKFTRETVFPYLEDIPDPQVNWIPCQDPHRFGHTPVQARLSCLAKDNSIYVLANLGDKKPCNSRDSTCPPNGYFQYNTNVVYNTEGKLVARYHKYHLYSEPQFNVPEKPELVTFNTAFGRFGIFTCFDIFFYDPGVTLVKDFHVDTILFPTAWMNVLPLLTAIEFHSAWAMGMGVNLLVANTHHVSLNMTGSGIYAPNGPKVYHYDMKTELGKLLLSEVDSHPLSSLAYPTAVNWNAYATTIKPFPVQKNTFRGFISRDGFNFTELFENAGNLTVCQKELCCHLSYRMLQKEENEVYVLGAFTGLHGRRRREYWQVCTLLKCKTTNLTTCGRPVETASTRFEMFSLSGTFGTEYVFPEVLLTEIHLSPGKFEVLKDGRLVNKNGSSGPILTVSLFGRWYTKDSLYSSCGTSNSAITYLLIFILLMIIALQNIVML

SEQ ID NO: 14101 - protein, 101 aa, Homo sapiens
MVTSSFPISVAVFALITLQVGTQDSFIAAVYEHAVILPNKTETPVSQEDALNLMNENIDILETAIKQAAEQGARIIVTPEDALYGWKFTRETVFPYLEDIP

SEQ ID NO: 14102 - protein, 166 aa, Homo sapiens
MVTSSFPISVAVFALITLQVGTQDSFIAAVYEHAVILPNKTETPVSQEDALNLMNENIDILETAIKQAAEQGARIIVTPEDALYGWKFTRETVFPYLEDIPDPQVNWIPCQDPHRFGHTPVQARLSCLAKDNSIYVLANLGDKKPCNSRDSTCPPNGYFQYNTNVV

SEQ ID NO: 14103 - protein, 192 aa, Homo sapiens
MVTSSFPISVAVFALITLQVGTQDSFIAAVYEHAVILPNKTETPVSQEDALNLMNENIDILETAIKQAAEQGARIIVTPEDALYGWKFTRETVFPYLEDIPDPQVNWIPCQDPHRFGHTPVQARLSCLAKDNSIYVLANLGDKKPCNSRDSTCPPNGYFQYNTNVVYNTEGKLVARYHKETLQSVKRSFAVI

SEQ ID NO: 14104 - protein, 195 aa, Homo sapiens
MVTSSFPISVAVFALITLQVGTQDSFIAAVYEHAVILPNKTETPVSQEDALNLMNENIDILETAIKQAAEQGARIIVTPEDALYGWKFTRETVFPYLEDIPDPQVNWIPCQDPHRFGHTPVQARLSCLAKDNSIYVLANLGDKKPCNSRDSTCPPNGYFQYNTNVVYNTEGKLVARYHKEVVFMHQMVPKCIIMT

SEQ ID NO: 14105 - protein, 299 aa, Homo sapiens
MVTSSFPISVAVFALITLQVGTQDSFIAAVYEHAVILPNKTETPVSQEDALNLMNENIDILETAIKQAAEQGARIIVTPEDALYGWKFTRETVFPYLEDIPDPQVNWIPCQDPHRFGHTPVQARLSCLAKDNSIYVLANLGDKKPCNSRDSTCPPNGYFQYNTNVVYNTEGKLVARYHKVCTLLKCKTTNLTTCGRPVETASTRFEMFSLSGTFGTEYVFPEVLLTEIHLSPGKFEVLKDGRLVNKNGSSGPILTVSLFGRWYTKDSLYSSCGTSNSAITYLLIFILLMIIALQNIVML

SEQ ID NO: 14106 - protein, 184 aa, Homo sapiens
MVTSSFPISVAVFALITLQVGTQDSFIAAVYEHAVILPNKTETPVSQEDALNLMNENIDILETAIKQAAEQGARIIVTPEDALYGWKFTRETVFPYLEDIPDPQVNWIPCQDPHRFGHTPVQARLSCLAKDNSIYVLANLGDKKPCNSRDSTCPPNGYFQYNTNVVYNTEGKLVARYHKVGKSH

SEQ ID NO: 14107 - protein, 520 aa, Homo sapiens
MVTSSFPISVAVFALITLQVGTQDSFIAAVYEHAVILPNKTETPVSQEDALNLMNENIDILETAIKQAAEQGARIIVTPEDALYGWKFTRETVFPYLEDIPDPQVNWIPCQDPHRFGHTPVQARLSCLAKDNSIYVLANLGDKKPCNSRDSTCPPNGYFQYNTNVVYNTEGKLVARYHKYHLYSEPQFNVPEKPELVTFNTAFGRFGIFTCFDIFFYDPGVTLVKDFHVDTILFPTAWMNVLPLLTAIEFHSAWAMGMGVNLLVANTHHVSLNMTGSGIYAPNGPKVYHYDMKTELGKLLLSEVDSHPLSSLAYPTAVNWNAYATTIKPFPVQKNTFRGFISRDGFNFTELFENAGNLTVCQKELCCHLSYRMLQKEENEVYVLGAFTGLHGRRRREYWQVCTLLKCKTTNLTTCGRPVETASTRFEMFSLSGTFGTEYVFPEVLLTEIHLSPGKFEVLKDGRLVNKNGSSGPILTVSLFGRWYTKDSLYSSCGTSNSAITYLLIFILLMIIALQNIVML

SEQ ID NO: 14108 - protein, 290 aa, Homo sapiens
MVTSSFPISVAVFALITLQVGTQDSFIAAVYEHAVILPNKTETPVSQEDALNLMNENIDILETAIKQAAEQGARIIVTPEDALYGWKFTRETVFPYLEDIPDPQVNWIPCQDPHRFGHTPVQARLSCLAKDNSIYVLANLGDKKPCNSRDSTCPPNGYFQYNTNVVYNTEGKLVARYHKYHLYSEPQFNVPEKPELVTFNTAFGRFGIFTCFDIFFYDPGVTLVKDFHVDTILFPTAWMNVLPLLTAIEFHSAWAMGMGVNLLVANTHHVSLNMTVVFMHQMVPKCIIMT

SEQ ID NO: 14109 - protein, 219 aa, Homo sapiens
MVTSSFPISVAVFALITLQVGTQDSFIAAVYEHAVILPNKTETPVSQEDALNLMNENIDILETAIKQAAEQGARIIVTPEDALYGWKFTRETVFPYLEDIPDPQVNWIPCQDPHRFGHTPVQARLSCLAKDNSIYVLANLGDKKPCNSRDSTCPPNGYFQYNTNVVYNTEGKLVARYHKYHLYSEPQFNVPEKPELVTFNTAFGRKWYLCTKWSQSVSL

SEQ ID NO: 14110 - protein, 216 aa, Homo sapiens
MVTSSFPISVAVFALITLQVGTQDSFIAAVYEHAVILPNKTETPVSQEDALNLMNENIDILETAIKQAAEQGARIIVTPEDALYGWKFTRETVFPYLEDIPDPQVNWIPCQDPHRFGHTPVQARLSCLAKDNSIYVLANLGDKKPCNSRDSTCPPNGYFQYNTNVVYNTEGKLVARYHKYHLYSEPQFNVPEKPELVTFNTAFGSLDERFAPFDSY

SEQ ID NO: 14111 - protein, 119 aa, Homo sapiens
MVTSSFPISVAVFALITLQVGTQDSFIAAVYEHAVILPNKTETPVSQEDALNLMNENIDILETAIKQAAEQGARIIVTPEDALYGWKFTRETVFPYLEDIPDPQVNWIPCQDPHRSAHC

SEQ ID NO: 14112 - protein, 129 aa, Homo sapiens
MIISHFPKCVAVFALLALSVGALDTFIAAVYEHAVILPNRTETPVSKEEALLLMNKNIDVLEKAVKLAAKQGAHIIVTPEDGIYGWIFTRESIYPYLEDIPDPGVNWIPCRDPWREWNLRPRSSQGVPL

SEQ ID NO: 14113 - protein, 129 aa, Homo sapiens; identical to SEQ ID NO: 14112

SEQ ID NO: 14114 - protein, 207 aa, Homo sapiens
MIISHFPKCVAVFALLALSVGALDTFIAAVYEHAVILPNRTETPVSKEEALLLMNKNIDVLEKAVKLAAKQGAHIIVTPEDGIYGWIFTRESIYPYLEDIPDPGVNWIPCRDPWRFGNTPVQQRLSCLAKDNSIYVVANIGDKKPCNASDSQCPPDGRYQYNTDVVFDSQGKLLARYHKGVESTPQKQSRCTTMTWKQRVVSCCYQN

SEQ ID NO: 14115 - protein, 274 aa, Homo sapiens
MIISHFPKCVAVFALLALSVGALDTFIAAVYEHAVILPNRTETPVSKEEALLLMNKNIDVLEKAVKLAAKQGAHIIVTPEDGIYGWIFTRESIYPYLEDIPDPGVNWIPCRDPWRFGNTPVQQRLSCLAKDNSIYVVANIGDKKPCNASDSQCPPDGRYQYNTDVVFDSQGKLLARYHKYNLFAPEIQFDFPKDSELVTFDTPFGKFGIFTCFDIFSHDPAVVVVDEFQLTAFSTPQHGTTRCPSSRLFPSIQHGPRPWESIYLLQIPTTPACT

SEQ ID NO: 14116 - protein, 147 aa, Homo sapiens
MIISHFPKCVAVFALLALSVGALDTFIAAVYEHAVILPNRTETPVSKEEALLLMNKNIDVLEKAVKLAAKQGAHIIVTPEDGIYGWIFTRESIYPYLEDIPDPGVNWIPCRDPWRKSKKMNEPVSKELCYHCHSECNQYGQWKLYRT

SEQ ID NO: 14117 - protein, 117 aa, Homo sapiens
MIISHFPKCVAVFALLALSVGALDTFIAAVYEHAVILPNRTETPVSKEEALLLMNKNIDVLEKAVKLAAKQGAHIIVTPEDGIYGWIFTRESIYPYLEDIPDPGVNWIPCRDPWRNH

SEQ ID NO: 14118 - protein, 117 aa, Homo sapiens; identical to SEQ ID NO: 14117

SEQ ID NO: 14119 - protein, 117 aa, Homo sapiens; identical to SEQ ID NO: 14117

SEQ ID NO: 14120 - protein, 133 aa, Homo sapiens
MIISHFPKCVAVFALLALSVGALDTFIAAVYEHAVILPNRTETPVSKEEALLLMNKNIDVLEKAVKLAAKQGAHIIVTPEDGIYGWIFTRESIYPYLEDIPDPGVNWIPCRDPWSTIFLHLKFSLISPRIQNL

SEQ ID NO: 14121 - protein, 169 aa, Homo sapiens
MIISHFPKCVAVFALLALSVGALDTFIAAVYEHAVILPNRTETPVSKEEALLLMNKNIDVLEKAVKLAAKQQGAHIIVTPEDGIYGWIFTRESIYPYLEDIPDPGVNWIPCRDPWSMVQHAAPPLGCSLPFSMGQGHGSQSTCCKYPQHQHAHDREWNLRPRSSQGVPL

SEQ ID NO: 14122 - protein, 161 aa, Homo sapiens
MIISHFPKCVAVFALLALSVGALDTFIAAVYEHAVILPNRTETPVSKEEALLLMNKNIDVLEKAVKLAAKQVLPFYTCKGDLQFGQRVFGIHDKLFCPTCFEQGAHIIVTPEDGIYGWIFTRESIYPYLEDIPDPGVNWIPCRDPWREWNLRPRSSQGVPL

SEQ ID NO: 14123 - protein, 60 aa, Homo sapiens
  VARIANT 1: note = misc_feature - Xaa can be any naturally occurring amino acid
XTRESIYPYLEDIPDPGVNWIPCRDPWRKSKKMNEPVSKELCYHCHSECNQYGQWKLYRT

SEQ ID NO: 14124 - protein, 155 aa, Homo sapiens
MCTEAKKHCWYFEGLYPTYYICRSYEDCCGSRCCVRALSIQRLWYFWFLLMMGVLFCCGAGFFIRRRMYPPPLIEEPAFNVSYTRQPPNPGPGAQQPGPPYYTDPGGPGMNPVGNSMAMAFQVPPNSPQGSVACPPPPAYCNTPPPPYEQVVKAK

SEQ ID NO: 14125 - protein, 109 aa, Homo sapiens
MFLLMMGVLFCCGAGFFIRRRMYPPPLIEEPAFNVSYTRQPPNPGPGAQQPGPPYYTDPGGPGMNPVGNSMAMAFQVPPNSPQGSVACPPPPAYCNTPPPPYEQVVKAK

SEQ ID NO: 14126 - protein, 169 aa, Homo sapiens
MLSETLGYLSSVLLQCTEAKKHCWYFEGLYPTYYICRSYEDCCGSRCCVRALSIQRLWYFWFLLMMGVLFCCGAGFFIRRRMYPPPLIEEPAFNVSYTRQPPNPGPGAQQPGPPYYTDPGGPGMNPVGNSMAMAFQVPPNSPQGSVACPPPPAYCNTPPPPYEQVVKAK

SEQ ID NO: 14127 - protein, 22 aa, Homo sapiens
MMGVLFCCGAGFFIRRRMYPPP

SEQ ID NO: 14128 - protein, 53 aa, Homo sapiens
MMGVLFCCGAGFFIRRRMYPPPLIEEPAFNVSYTRQPPNPGPGAQQPGPPYYT

SEQ ID NO: 14129 - protein, 85 aa, Homo sapiens
MMGVLFCCGAGFFIRRRMYPPPLIEEPAFNVSYTRQPPNPGPGAQQPGPPYYTDPGGPGMNPVGNSMAMAFQVPPNSPQGSVACP

SEQ ID NO: 14130 - protein, 96 aa, Homo sapiens
MMGVLFCCGAGFFIRRRMYPPPLIEEPAFNVSYTRQPPNPGPGAQQPGPPYYTDPGGPGMNPVGNSMAMAFQVPPNSPQGSVACPPPPAYCNTPPP

SEQ ID NO: 14131 - protein, 105 aa, Homo sapiens
MMGVLFCCGAGFFIRRRMYPPPLIEEPAFNVSYTRQPPNPGPGAQQPGPPYYTDPGGPGMNPVGNSMAMAFQVPPNSPQGSVACPPPPAYCNTPPPPYEQVVKAK

SEQ ID NO: 14132 - protein, 105 aa, Homo sapiens; identical to SEQ ID NO: 14131

SEQ ID NO: 14133 - protein, 105 aa, Homo sapiens; identical to SEQ ID NO: 14131

SEQ ID NO: 14134 - protein, 170 aa, Homo sapiens
MRIRSLHPVQQTEPTTCTEAKKHCWYFEGLYPTYYICRSYEDCCGSRCCVRALSIQRLWYFWFLLMMGVLFCCGAGFFIRRRMYPPPLIEEPAFNVSYTRQPPNPGPGAQQPGPPYYTDPGGPGMNPVGNSMAMAFQVPPNSPQGSVACPPPPAYCNTPPPPYEQVVKAK

SEQ ID NO: 14135 - protein, 172 aa, Homo sapiens
MRRQPAKVAALLLGLLLECTEAKKHCWYFEGLYPTYYICRSYEDCCGSRCCVRALSIQRLWYFWFLLMMGVLFCCGAGFFIRRRMYPPPLIEEPAFNVSYTRQPPNPGPGAQQPGPPYYTDPGGPGMNPVGNSMAMAFQVPPNSPQGSVACPPPPAYCNTPPPPYEQVVKAK

SEQ ID NO: 14136 - protein, 163 aa, Homo sapiens
MRRTGSHAQCTEAKKHCWYFEGLYPTYYICRSYEDCCGSRCCVRALSIQRLWYFWFLLMMGVLFCCGAGFFIRRRMYPPPLIEEPAFNVSYTRQPPNPGPGAQQPGPPYYTDPGGPGMNPVGNSMAMAFQVPPNSPQGSVACPPPPAYCNTPPPPYEQVVKAK

SEQ ID NO: 14137 - protein, 144 aa, Homo sapiens
MSAPCPGLLSCSCCLSTAQPVLHQPPAMSSALGTTIRLTCTLRNDHDIGVYSVYWYQQRPGHPPRFLLRYFSQSDKSQGPQVPPRFSGSKDVARNRGYLSISELQPEDEAMYYCAMGARSSEKEEREREWEEEMEPTAARTRVP

SEQ ID NO: 14138 - protein, 145 aa, Homo sapiens
MSWAPVLLMLFVYCTGCGPQPVLHQPPAMSSALGTTIRLTCTLRNDHDIGVYSVYWYQQRPGHPPRFLLRYFSQSDKSQGPQVPPRFSGSKDVARNRGYLSISELQPEDEAMYYCAMGARSSEKEEREREWEEEMEPTAARTRVP

SEQ ID NO: 14139 - protein, 107 aa, Homo sapiens
MACRCLSFLLMGTFLSGQVAQLSCTLSPQHVTIRDYGVSWYQQRAGSAPRYLLYYRSEEDHHRPADIPDRFSAAKDEAHNACVLTISPVQPEDDADYYCSVGYGFSP

SEQ ID NO: 14140 - protein, 123 aa, Homo sapiens
MACRCLSFLLMGTFLSVSQTVLAQLDALLVFPGQVAQLSCTLSPQHVTIRDYGVSWYQQRAGSAPRYLLYYRSEEDHHRPADIPDRFSAAKDEAHNACVLTISPVQPEDDADYYCSVGYGFSP

SEQ ID NO: 14141 - protein, 271 aa, Homo sapiens
MAGAGSEARFAGLSLVQLNELLEDEGQLTEMVQKMEENVQLNKEMTLASNRSLAEGNLLYQPQLDTLKARLTQKYQELQVLFEAYQIKKTKLDRQSSSASLETLLALLQAEGAKIEEDTENMAEKFLDGELPLDSFIDVYQSKRKLAHMRRVKIEKLQEMVLKGQRLPQALAPLPPRLPELAPTAPLPYPAPEASGPPAVAPRRIPPPPPPVPAGRLATPFTAAMSSGQAVPYPGLQCPPLPPRVGLPTQQGFSSQFVSPYPPPLPQRPPP

SEQ ID NO: 14142 - protein, 285 aa, Homo sapiens
MAGAGSEARFAGLSLVQLNELLEDEGQLTEMVQKMEETQNVQLNKEMTLASNRSLAEGNLLYQPQLDTLKARLTQKYQELQVLFEAYQIKKTKLDRQSSSASLETLLALLQAEGAKIEEDTENMAEKFLDGELPLDSFIDVYQSKRKLAHMRRVKIEKLQEMVLKGQRLPQALAPLPPRLPELAPTAPLPYPAPEASGPPAVAPRRIPPPPPPVPAGRLATPFTAAMSSGQAVPYPGLQCPPLPPRVGLPTQQGFSSQFVSPYPPPLPQRPPPRLPPHQPGFILQ

SEQ ID NO: 14143 - protein, 184 aa, Homo sapiens
MQSGCVLELRNAGLVACLALITVFVAECCYGDSCQTQNVQLNKEMTLASNRSLAEGNLLYQPQLDTLKARLTQKYQELQVLFEAYQIKKTKLDRQSSSASLETLLALLQAEGAKIEEDTENMAEKFLDGELPLDSFIDVYQSKRKLAHMRRVKIEKLQEMVLKGQRLPQALAPLPPRLPELAPT

SEQ ID NO: 14144 - protein, 334 aa, Homo sapiens
MAAAAAAGPSPGSGPGDSPEGPEGEAPERRRKAHGMLKLYYGLSEGEAAGRPAGPDPLDPTDLNGAHFDPEVYLDKLRRECPLAQLMDSETDMVRQIRALDSDMQTLVYENYNKFISATDTIRKMKNDFRKMEDEMDRLATNMAVITDFSARISATLQDRHERITKLAGGRCRAGPAVGLSWGSGANVTLRPPGVHALLRKLQFLFELPSRLTKCVELGAYGQAVRYQGRAQAVLQQYQHLPSFRAIQDDCQVITARLAQQLRQRFREGGSGAPEQAECVELLLALGEPAEELCEEFLAHARGRLEKELRNLEAELGPSPPAPDVLEFTDHGGS

SEQ ID NO: 14145 - protein, 782 aa, Homo sapiens
MAAAAAAGPSPGSGPGDSPEGPEGEAPERRRKAHGMLKLYYGLSEGEAAGRPAGPDPLDPTDLNGAHFDPEVYLDKLRRECPLAQLMDSETDMVRQIRALDSDMQTLVYENYNKFISATDTIRKMKNDFRKMEDEMDRLATNMAVITDFSARISATLQDRHERITKLAGVHALLRKLQFLFELPSRLTKCVELGAYGQAVRYQGRAQAVLQQYQHLPSFRAIQDDCQVITARLAQQLRQRFREGGSGAPEQAECVELLLALGEPAEELCEEFLAHARGRLEKELRNLEAELGPSPPAPDVLEFTDHGGSGFVGGLCQVAAAYQELFAAQGPAGAEKLAAFARQLGSRYFALVERRLAQEQGGGDNSLLVRALDRFHRRLRAPGALLAAAGLADAATEIVERVARERLGHHLQGLRAAFLGCLTDVRQALAAPRVAGKEGPGLAELLANVASSILSHIKASLAAVHLFTAKEVSFSNKPYFRGEFCSQGVREGLIVGFVHSMCQTAQSFCDSPGEKGGATPPALLLLLSRLCLDYETATISYILTLTDEQFLVQDQFPVTPVSTLCAEARETARRLLTHYVKVQGLVISQMLRKSVETRDWLSTLEPRNVRAVMKRVVEDTTAIDVQVGLLYEEGVRKAQSSDSSKRTFSVYSSSRQQGRYAPSYTPSAPMDTNLLSNIQKLFSERIDVFSPVEFNKVSVLTGIIKISLKTLLECVRLRTFGRFGLQQVQVDCHFLQLYLWRFVADEELVHLLLDEVVASAALRCPDPVPMEPSVVEVICERG

SEQ ID NO: 14146 - protein, 163 aa, Homo sapiens
MAAAAAAGPSPGSGPGDSPEGPEGEAPERRRKAHGMLKLYYGLSEGEAAGRPAGPDPLDPTDLNGAHFDPEVYLDKLRRECPLAQLMDSETDMVRQIRALDSDMQTLVYENYNKFISATGSALDTQMRLGASGPCLGCLWSDGAVEAQWWQLAKHLRPASDLD

SEQ ID NO: 14147 - protein, 233 aa, Homo sapiens
MAAAAAAGPSPGSGPGDSPEGPEGEAPERRRKAHGMLKLYYGLSEGEAAGRPAGPDPLDPTDLNGAHFDPEVYLDKLRRECPLAQLMDSETDMVRQIRALDSDMQTLVYENYNKFISATGVHALLRKLQFLFELPSRLTKCVELGAYGQAVRYQGRAQAVLQQYQHLPSFRAIQDDCQVITARLAQQLRQRFREGGSGAPEQAECVELLLALGEPAEELCEEFLAHARGRLEK

SEQ ID NO: 14148 - protein, 81 aa, Homo sapiens
MAAAAAAGPSPGSGPGDSPEGPEGEAPERRRKAHGMLKLYYGLSEGEAAGRPAGPDPLDPTDLNGAHFDPEVYLDKTPSGR

SEQ ID NO: 14149 - protein, 81 aa, Homo sapiens [sequence omitted]

SEQ ID NO: 14150 - protein, 110 aa, Homo sapiens
MDSETDMVRQIRALDSDMQTLVYENYNKFISATDTIRKMKNDFRKMEDEMDRLATNMAVITDFSARISATLQDRHERITKLAGVHALLRKLQFLFELPSRLTKCVELGAY

SEQ ID NO: 14151 - protein, 255 aa, Homo sapiens
MDSETDMVRQIRALDSDMQTLVYENYNKFISATDTIRKMKNDFRKMEDEMDRLATNMAVITDFSARISATLQDRHERITKLAGVHALLRKLQFLFELPSRLTKCVELGAYGQAVRYQGRAQAVLQQYQHLPSFRAIQDDCQVITARLAQQLRQRFREGGSGAPEQAECVELLLALGEPAEELCEEFLAHARGRLEKELRNLEAELGPSPPAPDVLEFTDHGGSGFVGGLCQVAAAYQELFAAQGPAGAEKLAAFA

SEQ ID NO: 14152 - protein, 165 aa, Homo sapiens
MIMPLYSKLGDREKKKRKEKASRPWAAVGTMAAAAAAGPSPGSGPGDSPEGPEGEAPERRRKAHGMLKLYYGLSEGEAAGRPAGPDPLDPTDLNGAHFDPEVYLDKLRRECPLAQLMDSETDMVRQIRALDSDMQTLVYENYNKFISATDTIRKMKNDFRKMEDE

SEQ ID NO: 14153 - protein, 99 aa, Homo sapiens
VGLLYEEGVRKAQSSDSSKRTFSVYSSSRQQGRYAPSYTPSAPMDTNLLSNIQKLFSERIDVFSPVEFNKMTALILYPSLLIWPRRLSASSQLLPSCRC

SEQ ID NO: 14154 - protein, 72 aa, Homo sapiens
  VARIANT 1: note = misc_feature - Xaa can be any naturally occurring amino acid
XSQGVREGLIVGFVHSMCQTAQSFCDSPGEKGGATPPALLLLLSRLCLDYETATISYILTLTDEQFLVQVKH

SEQ ID NO: 14155 - protein, 199 aa, Homo sapiens
  VARIANT 1: note = misc_feature - Xaa can be any naturally occurring amino acid
XTAQSFCDSPGEKGGATPPALLLLLSRLCLDYETATISYILTLTDEQFLVQDQFPVTPVSTLCAEARETARRLLTHYVKVQGLVISQMLRKSVETRDWLSTLEPRNVRAVMKRVVEDTTAIDVQVGLLYEEGVRKAQSSDSSKRTFSVYSSSRQQGRYAPSYTPSAPMDTNLLSNIQKLFSERIDVFSPVEFNKVRLPT

SEQ ID NO: 14156 - protein, 168 aa, Homo sapiens
MVFAFWKVFLILSCLAGQVSVVQVTIPDGFVNVTVGSNVTLICIYTTTVASREQLSIQWSFFHKKEMEPISHSSCLSTEGMEEKAVSQCLKMTHARDARGRCSWTSEIYFSQGGQAVAIGQFKDRITGSNDPGNASITISHMQPADSGIYICDVNNPPDFLGQNQGIL

SEQ ID NO: 14157 - protein, 423 aa, Homo sapiens
MVFAFWKVFLILSCLAGQVSVVQVTIPDGFVNVTVGSNVTLICIYTTTVASREQLSIQWSFFHKKEMEPISHSSCLSTEGMEEKAVSQCLKMTHARDARGRCSWTSEIYFSQGGQAVAIGQFKDRITGSNDPGNASITISHMQPADSGIYICDVNNPPDFLGQNQGILNVSVLVKPSKPLCSVQGRPETGHTISLSCLSALGTPSPVYYWHKLEGRDIVPVKENFNPTTGILVIGNLTNFEQGYYQCTAINRLGNSSCEIDLTSSHPEVGIIVGALIGSLVGAAIIISVVCFARNKAKAKAKERNSKTIAELEPMTKINPRGESEAMPREDATQLEVTLPSSIHETGPDTIQEPDYEPKPTQEPAPEPAPGSEPMAVPDLDIELELEPETQSELEPEPEPEPESEPGVVVEPLSEDEKGVVKA

SEQ ID NO: 14158 - protein, 387 aa, Homo sapiens
MVFAFWKVFLILSCLAGQVSVVQVTIPDGFVNVTVGSNVTLICIYTTTVASREQLSIQWSFFHKKEMEPISIYFSQGGQAVAIGQFKDRITGSNDPGNASITISHMQPADSGIYICDVNNPPDFLGQNQGILNVSVLVKPSKPLCSVQGRPETGHTISLSCLSALGTPSPVYYWHKLEGRDIVPVKENFNPTTGILVIGNLTNFEQGYYQCTAINRLGNSSCEIDLTSSHPEVGIIVGALIGSLVGAAIIISVVCFARNKAKAKAKERNSKTIAELEPMTKINPRGESEAMPREDATQLEVTLPSSIHETGPDTIQEPDYEPKPTQEPAPEPAPGSEPMAVPDLDIELELEPETQSELEPEPEPEPESEPGVVVEPLSEDEKGVVKA

SEQ ID NO: 14159 - protein, 190 aa, Homo sapiens
MAAGGSAPEPRVLVCLGALLAGWVAVGLEAVVIGEVHENVTLHCGNISGLRGQVTWYRNNSEPVFLLSSNSSLRPAEPRFSLVDATSLHIESLSLGDEGIYTCQEILNVTQWFQVWLQVANPPPSAPQCWAQMASGSFMLQLTCRWDGGYPDPDFLWIEEPGGVIVGKSKLGVEMLSESQLSDGKKFKCV

SEQ ID NO: 14160 - protein, 540 aa, Homo sapiens
MAAGGSAPEPRVLVCLGALLAGWVAVGLEAVVIGEVHENVTLHCGNISGLRGQVTWYRNNSEPVFLLSSNSSLRPAEPRFSLVDATSLHIESLSLGDEGIYTCQEILNVTQWFQVWLQVASGPYQIEVHIVATGTLPNGTLYAARGSQVDFSCNSSSRPPPVVEWWFQALNSSSESFGHNLTVNFFSLLLISPNLQGNYTCLALNQLSKRHRKVTTELLVYYPPPSAPQCWAQMASGSFMLQLTCRWDGGYPDPDFLWIEEPGGVIVGKSKLGVEMLSESQLSDGKKFKCVTSHIVGPESGASCMVQIRGPSLLSEPMKTCFTGGNVTLTCQVSGAYPPAKILWLRNLTQPEVIIQPSSRHLITQDGQNSTLTIHNCSQDLDEGYYICRADSPVGVREMEIWLSVKEPLNIGGIVGTIVSLLLLGLAIISGLLLHYSPVFCWKVGNTSRGQNMDDVMVLVDSEEEEEEEEEEEEDAAVGEQEGAREREELPKEIPKQDHIHRVTALVNGNIEQMGNGFQDLQDDSSEEQSDIVQEEDRPV

SEQ ID NO: 14161 - protein, 126 aa, Homo sapiens
EFPFTDLKPKDAGRYFCAYKTTASHEWSESSEHLQLVVTDKHDELEAPSMKTGSSSEESTKRTSHSKLPEQEAAEADLSNMERVSLSTADPQGVTYAELSTSALSEAASDTTQEPPGSHEYAALKV

SEQ ID NO: 14162 - protein, 116 aa, Homo sapiens
MTAEFLSLLCLDTRTIFVAIFSCISILLLFLSVFIIYRCSQHSSSSEESTKRTSHSKLPEQEAAEADLSNMERVSLSTADPQGVTYAELSTSALSEAASDTTQEPPGSHEYAALKV

SEQ ID NO: 14163 - protein, 174 aa, Homo sapiens
MTAEFLSLLCLGLCLGYEDEKKNEKPPKPSLHAWPSSVVEAESNVTLKCQAHSQNVTFVLRKVNDSGYKQEQSSAENEAEFPFTDLKPKDAGRYFCAYKTTASHEWSESSEHLQLVVTDKHDELEAPSMKTDTRTIFVAIFSCISILLLFLSVFIIYRCSQHSELRERKGREGE

SEQ ID NO: 14164 - protein, 236 aa, Homo sapiens
MTAEFLSLLCLGLCLGYEDEKKNEKPPKPSLHAWPSSVVEAESNVTLKCQAHSQNVTFVLRKVNDSGYKQEQSSAENEAEFPFTDLKPKDAGRYFCAYKTTASHEWSESSEHLQLVVTDKHDELEAPSMKTDTRTIFVAIFSCISILLLFLSVFIIYRCSQHSSSSEESTKRTSHSKLPEQEAAEADLSNMERVSLSTADPQGVTYAELSTSALSEAASDTTQEPPGSHEYAALKV

SEQ ID NO: 14165 - protein, 205 aa, Homo sapiens
MTAEFLSLLCLGLCLGYEDEKKNEKPPKPSLHAWPSSVVEAESNVTLKCQAHSQNVTFVLRKVNDSGYKQEQSSAENEAEFPFTDLKPKDAGRYFCAYKTTASHEWSESSEHLQLVVTDKHDELEAPSMKTGSSSEESTKRTSHSKLPEQEAAEADLSNMERVSLSTADPQGVTYAELSTSALSEAASDTTQEPPGSHEYAALKV

SEQ ID NO: 14166 - protein, 143 aa, Homo sapiens
MTAEFLSLLCLGLCLGYEDEKKNEKPPKPSLHAWPSSVVEAESNVTLKCQAHSQNVTFVLRKVNDSGYKQEQSSAENEAEFPFTDLKPKDAGRYFCAYKTTASHEWSESSEHLQLVVTDKHDELEAPSMKTVAHVCNTRTLGR

SEQ ID NO: 14167 - protein, 229 aa, Homo sapiens
MTAEFLSLLCLGLCLGYEDEKKNEKPPKPSLHAWPSSVVEAESNVTLKCQAHSQNVTFVLRKVNDSGYKQEQSSAENEAEFPFTDLKPKDAGRYFCAYKTTASHEWSESSEHLQLVVTGSLPEPLLSVNVDPGMTPGLRTLRCLTPYNGTECIVIALLKMGIPEPLQVRQVRKNQTDFMLWNVTSNDSGNYSCVYYLSNSSHLASFPSNKLEIWVTDKHDELEAPSMKT

SEQ ID NO: 14168 - protein, 240 aa, Homo sapiens
MMGIFLVYVGFVFFSVLYVQQGLSSQAKFTEFPRNVTATEGQNVEMSCAFQSGSASVYLEIQWWFLRGPEDLDPGAEGAGAQVELLPDRDPDSDGTKISTVKVQGNDISHKLQISKVRKKDEGLYECRVTDANYGELQEHKAQAYLKVNANSHARRMQAFEASPMWLQDMKPRKNVSAAIPSSIHGSANQRTHSTSSPQVVAKIPKQSPQSAKSKSPVKSTERTAKLTLNSKHHPAPTVL

SEQ ID NO: 14169 - protein, 236 aa, Homo sapiens
MMGIFLVYVGFVFFSVLYVQQGLSSQAKFTEFPRNVTATEGQNVEMSCAFQSGSASVYLEIQWWFLRGPEDLDPGAEGAGAQVELLPDRDPDSDGTKISTVKVQGNDISHKLQISKVRKKDEGLYECRVTDANYGELQEHKAQAYLKVNANSHARRMQAFEASPMWLQDMKPRKNVSAAIPSSIHGSANQRTHSTSSPQVVAKIPKQSPQSGARIATSHGLSVLLLVCGFVKGALL

SEQ ID NO: 14170 - protein, 244 aa, Homo sapiens
MMGIFLVYVGFVFFSVLYVQQGLSSQAKFTEFPRNVTATEGQNVEMSCAFQSGSASVYLEIQWWFLRGPEDLDPGAEGAGAQVELLPDRDPDSDGTKISTVKVQGNDISHKLQISKVRKKDEGLYECRVTDANYGELQEHKAQAYLKVNANSHARRMQAFEASPMWLQDMKPRKNVSAAIPSSIHGSANQRTHSTSSPQVVAKIPKQSPQSGMETHFEPFILPLTNAPQKGQSYRVDRFMNGDF

SEQ ID NO: 14171 - protein, 309 aa, Homo sapiens
MMGIFLVYVGFVFFSVLYVQQGLSSQAKFTEFPRNVTATEGQNVEMSCAFQSGSASVYLEIQWWFLRGPEDLDPGAEGAGAQVELLPDRDPDSDGTKISTVKVQGNDISHKLQISKVRKKDEGLYECRVTDANYGELQEHKAQAYLKVNANSHARRMQAFEASPMWLQDMKPRKNVSAAIPSSIHGSANQRTHSTSSPQVVAKIPKQSPQSVSPILPEVKHLHRPPLLVLPFFSLSSLFSTDPLPTFPTSHRTVKRLPAPLPQPGHGSTPGVQSCVLAPPAKSKSPVKSTERTAKLTLNSKHHPAPTVL

SEQ ID NO: 14172 - protein, 285 aa, Homo sapiens
MEQRNRLGALGYLPPLLLHALLLFVADAAFTEVPKDVTVREGDDIEMPCAFRASGATSYSLEIQWWYLKEPPRELLHELALSVPGARSKVTNKDATKISTVRVQGNDISHRLRLSAVRLQDEGVYECRVSDYSDDDTQEHKAQAMLRVLSRFAPPNMQAAEAVSHIQSSGPRRHGPASAANANNAGAASRTTSEPGRGDKSPPPGSPPAAIDPAVPEAAAASAAHTPTTTVAAAAAASSASPPSGQAVLLRQRHGSGTGRSYTTDPLLSLLLLALHKFLRLLLGH

SEQ ID NO: 14173 - protein, 204 aa, Homo sapiens
MGAPLAVALGALHYLALFLQLGGATRPAGHAPWDNHVSGHALFTETPHDMTARTGEDVEMACSFRGSGSPSYSLEIQWWYVRSHRDWTDKQAWASNQLKASQQEDAGKEATKISVVKVVGSNISHKLRLSRVKPTDEGTYECRVIDFSDGKARHHKVKAYLRVQPGENSVLHLPEAPPAAPAPPPPKPGKELRKRSVDQEACSL

SEQ ID NO: 14174 - protein, 149 aa, Homo sapiens
MGAPLAVALGALHYLALFLQLGGATRPAGHAPWDNHVSGHALFTETPHDMTARTGEDVEMACSFRGSGSPSYSLEIQWWYVRSHRDWTDKQAWASNQVVKVVGSNISHKLRLSRVKPTDEGTYECRVIDFSDGKARHHKVKAYLRVQPG

SEQ ID NO: 14175 - protein, 132 aa, Homo sapiens
MGAPLAVALGALHYLALFLQLGGATRPAGHAPWDNHVSGHGGQGGGQQHLPQAAPVPGEAHGRRHLRVPRHRLQRRQGPAPQGQGLPAGAARGELRPASARSPSRRARPAAPQARQGAEEALGGPGGLQPLD

SEQ ID NO: 14176 - protein, 191 aa, Homo sapiens
MRLLALAAAALLARAPAPEVCAALNVTVSPGPVVDYLEGENATLLCHVSQKRRKDSLLAVRWFFAHSFDSQEALMVKMTKLRVVQYYGNFSRSAKRRRLRLLEEQRGALYRLSVLTLQPSDQGHYVCRVQEISRHRNKWTAWSNGSSATEMRGVSSHPVERGAFLGISLVILPHSLPFTADLTMASFLQSS

SEQ ID NO: 14177 - protein, 320 aa, Homo sapiens
MRLLALAAAALLARAPAPEVCAALNVTVSPGPVVDYLEGENATLLCHVSQKRRKDSLLAVRWFFAHSFDSQEALMVKMTKLRVVQYYGNFSRSAKRRRLRLLEEQRGALYRLSVLTLQPSDQGHYVCRVQEISRHRNKWTAWSNGSSATEMRVISLKASEESSFEKTKETWAFFEDLYVYAVLVCCVGILSILLFMLVIVWQSVFNKRKSRVRHYLVKCPQNSSGETVTSVTSLAPLQPKKGKRQKEKPDIPPAVPAKAPIAPTFHKPKLLKPQRKVTLPKIAEENLTYAELELIKPHRAAKGAPTSTVYAQILFEENKL

SEQ ID NO: 14178 - protein, 118 aa, Homo sapiens
MAPLRPLLILALLAWVALADQESCKGRCTEGFNVDKKCQCDELCSYYQSCCTDYTAECKPQVTRGDVFTMPEDEYTVYDDGEEKNNATVHEQVGGPSLTSDLQAQSKGNPEQTPVLKP

SEQ ID NO: 14179 - protein, 478 aa, Homo sapiens
MAPLRPLLILALLAWVALADQESCKGRCTEGFNVDKKCQCDELCSYYQSCCTDYTAECKPQVTRGDVFTMPEDEYTVYDDGEEKNNATVHEQVGGPSLTSDLQAQSKGNPEQTPVLKPEEEAPAPEVGASKPEGIDSRPETLHPGRPQPPAEEELCSGKPFDAFTDLKNGSLFAFRGQYCYELDEKAVRPGYPKLIRDVWGIEGPIDAAFTRINCQGKTYLFKGSQYWRFEDGVLDPDYPRNISDGFDGIPDNVDAALALPAHSYSGRERVYFFKGKQYWEYQFQHQPSQEECEGSSLSAVFEHFAMMQRDSWEDIFELLFWGRTSAGTRQPQFISRDWHGVPGQVDAAMAGRIYISGMAPRPSLAKKQRFRHRNRKGYRSQRGHSRGRNQNSRRPSRATWLSLFSSEESNLGANNYDDYRMDWLVPATCEPIQSVFFFSGDKYYRVNLRTRRVDTVDPPYPRSIAQYWLGCPAPGHL

SEQ ID NO: 14180 - protein, 167 aa, Homo sapiens
MFLLDSSASVSHYEFSRVREFVGQLVAPLPLGTGALRASLVHVGSRPYTEFPFGQHSSGEAAQDAVRASAQRMGDTHTGLALVYAKEQLFAEASGARPGVPKVLVWVTDGGSSDPVGPPMQELKDLGVTVFIVSTGRGNFLELSAAASAPAEKHLHFVDVDDLHIIV

SEQ ID NO: 14181 - protein, 64 aa, Homo sapiens
MLPWTALGLALSLRLALARSGAERGAQGPGRHRVHCQHRPRQLPGAVSRCLSPCREAPALCGRG

SEQ ID NO: 14182 - protein, 148 aa, Homo sapiens
MLPWTALGLALSLRLALARSGAERGPLGEGKHPLKESWGPGGPCLAVGLSGGPTPEAEHSSFPPGPPASAPRGDLMFLLDSSASVSHYEFSRVREFVGQLVAPLPLGTGALRASLVHVGSRPYTEFPFGQHSSGEAAQDAVRASAQRM

SEQ ID NO: 14183 - protein, 445 aa, Homo sapiens
MLPWTALGLALSLRLALARSGAERGPPASAPRGDLMFLLDSSASVSHYEFSRVREFVGQLVAPLPLGTGALRASLVHVGSRPYTEFPFGQHSSGEAAQDAVRASAQRMGDTHTGLALVYAKEQLFAEASGARPGVPKVLVWVTDGGSSDPVGPPMQELKDLGVTVFIVSTGRGNFLELSAAASAPAEKHLHFVDVDDLHIIVQELRGSILDAMRPQQLHATEITSSGFRLAWPPLLTADSGYYVLELVPSAQPGAARRQQLPGNATDWIWAGLDPDTDYDVALVPESNVRLLRPQILRVRTRPGEAGPGASGPESGAGPAPTQLAALPAPEEAGPERIVISHARPRSLRVSWAPALGSAAALGYHVQFGPLRGGEAQRVEVPAGRNCTTLQGLAPGTAYLVTVTAAFRSGRESALSAKACTPDGPRPRPRPVPRAPTPGTASREP

SEQ ID NO: 14184 - protein, 421 aa, Homo sapiens
MEAHVFQKDWTATSASARWPLEGRLTVVALKLSLECRVDLLFLLDSSAGTTLDGFLRAKVFVKRFVRAVLSEDSRARVGVATYSRELLVAVPVGEYQDVPDLVWSLDGIPFRGGPTLTGSALRQAAERGFGSATRTGQDRPRRVVVLLTESHSEDEVAGPARHARARELLLLGVGSEAVRAELEEITGSPKHVMVYSDPQDLFNQIPELQGKLCSRQRPGCRTQALDLVFMLDTSASVGPENFAQMQSFVRSCALQFEVNPDVTQVGLVVYGSQVQTAFGLDTKPTRAAMLRAISQAPYLGGVGSAGTALLHIYDKVMTVQRGARPGVPKAVVVLTGGRGAEDAAVPAQKLRNNGISVLVVGVGPVLSEGLRRLAGPRDSLIHVAAYADLRYHQDVLIEWLCGGEWGNPHPQGCPHGRPSA

SEQ ID NO: 14185 - protein, 755 aa, Homo sapiens
MPPFLLLEAVCVFLFSRVPPSLPLQEVHVSKETIGKISAASKMMWCSAAVDIMFLLDGSNSVGKGSFERSKHFAITVCDGLDISPERVRVGAFQFSSTPHLEFPLDSFSTQQEVKARIKRMVFKGGRTETELALKYLLHRGLPGGRNASVPQILIIVTDGKSQGDVALPSKQLKERGVTVFAVGVRFPRWEELHALASEPRGQHVLLAEQVEDATNGLFSTLSSSAICSSATPDCRVEAHPCEHRTLEMVREFAGNAPCWRGSRRTLAVLAAHCPFYSWKRVFLTHPATCYRTTCPGPCDSQPCQNGGTCVPEGLDGYQCLCPLAFGGEANCALKLSLECRVDLLFLLDSSAGTTLDGFLRAKVFVKRFVRAVLSEDSRARVGVATYSRELLVAVPVGEYQDVPDLVWSLDGIPFRGGPTLTGSALRQAAERGFGSATRTGQDRPRRVVVLLTESHSEDEVAGPARHARARELLLLGVGSEAVRAELEEITGSPKHVMVYSDPQDLFNQIPELQGKLCSRQRPGCRTQALDLVFMLDTSASVGPENFAQMQSFVRSCALQFEVNPDVTQVGLVVYGSQVQTAFGLDTKPTRAAMLRAISQAPYLGGVGSAGTALLHIYDKVMTVQRGARPGVPKAVVVLTGGRGAEDAAVPAQKLRNNGISVLVVGVGPVLSEGLRRLAGPRDSLIHVAAYADLRYHQDVLIEWLCGEAKQPVNLCKPSPCMNEGSCVLQNGSYRCKCRDGWEGPHCENRFLRRP

SEQ ID NO: 14186 - protein, 1024 aa, Homo sapiens
MLVTGPCLLAGLESPSHALRADAPPHASSAATICVTLAEGHHCDRALEILLHPSEPHQPHLMLEGGSLSSAEYEARVRARRDFQRLQRRDSDGDRQVWFLQRRFHKDILLNPVLALSFCPDLSSKPGHLGTATRELLFLLDSSSVAHKDAIVLAVKSLPPQTLINLAVFGTLVQPLFPESRPCSDDAVQLICESIETLQVPSGPPDVLAALDWAVGQPQHRAYPRQLFLLTAASPMAATTHRTLELMRWHRGTARCFSFGLGPTCHQLLQGLSALSRGQAYFLRPGQRLQPMLVQALRKALEPALSDISVDWFVPDTVEALLTPREIPALYPGDQLLGYCSLFRVDGFRSRPPGGQEPGWQSSGGSVFPSPEEAPSAASPGTEPTGTSEPLGTGTVSAELSSPWAARDSEQTGTDALTDPVTDPGPNPSDTAIWRRIFQSSYIREQYVLTHCSASPEPGPGSTGSSESPGSQGPGSPEGSAPLEPPSQQGCRSLAWGEPAGSRSCPLPAPTPAPFKVGALSTEVLGRQHRAALAGRSLSSPPGRANQVPGRPRKPSLGAILDGPSPEPGQQLGQGLDDSGNLLSPAPMDWDMLMEPPFLFTAVPPSGELAPPAVPPQAPRCHVVIRGLCGEQPMCWEVGVGLETLWGPGDGSQPPSPPVREAAWDQALHRLTAASVVRDNEQLALRGGAETTADRGHARRCWLRALQTSKVSSAPSCFTCPVAVDATTREVLPGALQVCSSEPAEPPGTPPASHSHLDAAPLPTVVYSKGLQRGSPAGAWDSDQNGNSKRALGDPATPTEGPRRPPPRPPCRLSMGRRHKLCSPDPGQANNSEGSDHDYLPLVRLQEAPGSFRLDAPFCAAVRISQERLCRASPFAVHRASLSPTSASLPWALLGPGVGQGDSATASCSPSPSSGSEGPGQVDSGRGSDTEASEGAEGLGGTDLRGRTWATAVALAWLEHRCAAAFDEWELTAAKADCWLRAQHLPDGLDLAALKAAARGLFLLLRHWDQNLQLHLLCYSPANV

SEQ ID NO: 14187 - protein, 1242 aa, Homo sapiens
MPGLYCPSSWTPLPLTDSWVRACANGPCLSVRARLTYRNPQPQPVDGVFVYPLAEAEVVSGFEAEAAGRRVSFQLQSRRRSQAACCRALGPGLGTPTPRRCAQGHLVLDLAQARSTLVLPTGIIAAAGTMTVTLHSSRELPSRPDGVLHVALPTVLTPLAPPGPPGPPRPPGLCDDSPTSCFGVGSLQEEGLAWEELAAPRDVFSGPARCPAPYTFSFEMLVTGPCLLAGLESPSHALRADAPPHASSAATICVTLAEGHHCDRALEILLHPSEPHQPHLMLEGGSLSSAEYEARVRARRDFQRLQRRDSDGDRQVWFLQRRFHKDILLNPVLALSFCPDLSSKPGHLGTATRELLFLLDSSSVAHKDAIVLAVKSLPPQTLINLAVFGTLVQPLFPESRPCSDDAVQLICESIETLQVPSGPPDVLAALDWAVGQPQHRAYPRQLFLLTAASPMAATTHRTLELMRWHRGTARCFSFGLGPTCHQLLQGLSALSRGQAYFLRPGQRLQPMLVQALRKALEPALSDISVDWFVPDTVEALLTPREIPALYPGDQLLGYCSLFRVDGFRSRPPGGQEPGWQSSGGSVFPSPEEAPSAASPGTEPTGTSEPLGTGTVSAELSSPWAARDSEQSTDALTDPVTDPGPNPSDTAIWRRIFQSSYIREQYVLTHCSASPEPGPGSTGSSESPGSQGPGSPEGSAPLEPPSQQGCRSLAWGEPAGSRSCPLPAPTPAPFKVGALSTEVLGRQHRAALAGRSLSSPPGRANQVPGRPRKPSLGAILDGPSPEPGQQLGQGLDDSGNLLSPAPMDWDMLMEPPFLFTAVPPSGELAPPAVPPQAPRCHVVIRGLCGEQPMCWEVGVGLETLWGPGDGSQPPSPPVREAAWDQALHRLTAASVVRDNEQLALRGGAETTADRGHARRCWLRALQTSKVSSAPSCFTCPVAVDATTREVLPGALQVCSSEPAEPPGTPPASHSHLDAAPLPTVVYSKGLQRGSPAGAWDSDQNGNSKRALGDPATPTEGPRRPPPRPPCRLSMGRRHKLCSPDPGQANNSEGSDHDYLPLVRLQEAPGSFRLDAPFCAAVRISQERLCRASPFAVHRASLSPTSASLPWALLGPGVGQGDSATASCSPSPSSGSEGPGQVDSGRGSDTEASEGAEGLGGTDLRGRTWATAVALAWLEHRCAAAFDEWELTAAKADCWLRAQHLPDGLDLAALKAAARGLFLLLRHWDQNLQLHLLCYSPANV

SEQ ID NO: 14188 - protein, 891 aa, Homo sapiens
MLPTEVPQSHPGPSALLLLQLLLPPTSAFFPNIWSLLAAPGSITHQDLTEEAALNVTLQLFLEQPPPGRPPLRLEDFLGRTLLADDLFAAYFGPGSSRRFRAALGEVSRANAAQDFLPTSRNDPDLHFDAERLGQGRARLVGALRETVVAARALDHTLARQRLGAALHALQDFYSHSNWVELGEQQPHPHLLWPRQELQNLAQVADPTCSDCEELSCPRNWLGFTLLTSGYFGTHPPKPPGKCSHGGHFDRSSSQPPRGGINKDSTSPGFSPHHMLHLQAAKLALLASIQAFSLLRSRLGDRDFSRLLDITPASSLSFVLDTTGSMGEEINAAKIQARHLVEQRRGSPMEPVHYVLVPFHDPGFGPVFTTSDPDSFWQQLNEIHALGGGDEPEMCLSALQLALLHTPPLSDIFVFTDASPKDAFLTNQVESLTQERRCRVTFLVTEDTSRVQGRARREILSPLRFEPYKAVALASGGEVIFTKDQHIRDVAAIVGESMAALVTLPLDPPVVVPGQPLVFSVDGLLQKITVRIHGDISSFWIKNPAGVSQGQEEGGGPLGHTRRFGQFWMVTMDDPPQTGTWEIQVTAEDTPGVRVQAQTSLDFLFHFGIPMEDGPHPGLYPLTQPVAGLQTQLLVEVTGLGSRANPGDPQPHFSHVILRGVPEGAELGQVPLEPVGPPERGLLAASLSPTLLSTPRPFSLELIGQDAAGRRLHRAAPQPSTVVPVLLELSGPSGFLAPGSKVPLSLRIASFSGPQDLDLRTFVNPSFSLTSNLSRAHLELNESAWGRLWLEVPDSAAPDSVVMVTVTAGGREANPVPPTHAFLRLLVSAPAPQDRHTTPTGSSDPILTTATPAFSPFTLVTQGRAGAGLAAGSPWWGTVGGVLLLLGLASW

SEQ ID NO: 14189 - protein, 325 aa, Homo sapiens
MPSSTAMAVGALSSSLLVTCCLMVALCSPSIPLEKLAQAPEQPGQEKREHASRDGPGRVNELGRPARDEGGSGRDWKSKSGRGLAGREPWSKLKQAWVSQGGGAKAGDLQVRPRGDTPQAEALAAAAQDAIGPELAPTPEPPEEYVYPDYRGKGCVDESGFVYAIGEKFAPGPSACPCLCTEEGPLCAQPECPRLHPRCIHVDTSQCCPQCKERKNYCEFRGKTYQTLEEFVVSPCERCRCEANGEVLCTVSACPQTECVDPVYEPDQCCPICKNGPNCFAETAVIPAGREVKTDECTICHCTYEEGTWRIERQAMCTRHECRQM

SEQ ID NO: 14190 - protein, 222 aa, Homo sapiens
MALHIHEACILLLVIPGLVTSAAISHEDYPADEGDQISSNDNLIFDDYRGKGCVDDSGFVYKLGERFFPGHSNCPCVCALDGPVCDQPECPKIHPKCTKVEHNGCCPECKEVKNFCEYHGKNYKILEEFKPSPCEWCRCEPSNEVHCVVADCAVPECVNPVYEPEQCCPVCKNGPNCFAGTTIIPAGIEVKVDECNICHCHNGDWWKPAQCSKRECQGKQTV

SEQ ID NO: 14191 - protein, 139 aa, Homo sapiens
MALHIHEACILLLVIPGLVTSAAISHEDYPADEGDQISSNDNLIFDDYRGKGCVDDSGFVYKLGERFFPGHSNCPCVCALDGPVCDQPECPKIHPKCTKVEHNGCCPECKEVKNFCEYHGKNYKILEEFKVQTALQERR

SEQ ID NO: 14192 - protein, 670 aa, Homo sapiens [sequence omitted]

SEQ ID NO: 14193 - protein, 420 aa, Homo sapiens
MPCPELACPREEWRLGPGQCCFTCQEPTPSTGCSLDDNGVEFPIGQIWSPGDPCELCICQADGSVSCKRTDCVDSCPHPIRIPGQCCPDCSAGCTYTGRIFYNNETFPSVLDPCLSCICLLGSVACSPVDCPITCTYPFHPDGECCPVCRDCNYEGRKVANGQVFTLDDEPCTRCTCQLGEVSCEKVPCQRACADPALLPGDCCSSCPDSLSPLEEKQGLSPHGNVAFSKAGRSLHGDTEAPVNCSSCPGPPTASPSRPVLHLLQLLLRTNLMKTQTLPTSPAGAHGPHSLALGLTATFPGEPGASPRLSPGPSTPPGAPTLPLASPGAPQPPPVTPERSFSASGAQIVSRWPPLPGTLLTEASALSMMDPSPSKTPITLLGPRVLSPTTSRLSTALAATTHPGPQQPPVGASRGEESTM

SEQ ID NO: 14194 - protein, 219 aa, Homo sapiens
MWAGLLLRAACVALLLPGAPARGYTGRKPPGHFAAERRRLGPHVCLSGFGSGCCPGWAPSMGGGHCTLPLCSFGCGSGICIAPNVCSCQDGEQGATCPETHGPCGEYGCDLTCNHGGCQEVARVCPVGFSMTETAVGIRCTDIDECVTSSCEGHCVNTEGGFVCECGPGMQLSADRHSCQDTDECLGTPCQQRCKNSIGSYKCSCRTGFHLHGNRHSCM

SEQ ID NO: 14195 - protein, 955 aa, Homo sapiens
MWAGLLLRAACVALLLPGAPARGYTGRKPPGHFAAERRRLGPHVCLSGFGSGCCPGWAPSMGGGHCTLPLCSFGCGSGICIAPNVCSCQDGEQGATCPETHGPCGEYGCDLTCNHGGCQEVARVCPVGFSMTETAVGIRCTDIDECVTSSCEGHCVNTEGGFVCECGPGMQLSADRHSCQDTDECLGTPCQQRCKNSIGSYKCSCRTGFHLHGNRHSCVDVNECRRPLERRVCHHSCHNTVGSFLCTCRPGFRLRADRVSCEAFPKAVLAPSAILQPRQHPSKMLLLLPEAGRPALSPGHSPPSGAPGPPAGVRTTRLPSPTPRLPTSSPSAPVWLLSTLLATPVPTASLLGNLRPPSLLQGEVMGTPSSPRGPESPRLAAGPSPCWHLGAMHESRSRWTEPGCSQCWCEDGKVTCEKVRCEAACSHPIPSRDGGCCPSCTGCFHSGVVRAEGDVFSPPNENCTVCVCLAGNVSCISPECPSGPCQTPPQTDCCTCVPVRCYFHGRWYADGAVFSGGGDECTTCVCQNGEVECSFMPCPELACPREEWRLGPGQCCFTCQEPTPSTGCSLDDNGVEFPIGQIWSPGDPCELCICQADGSVSCKRTDCVDSCPHPIRIPGQCCPDCSAGCTYTGRIFYNNETFPSVLDPCLSCICLLGSVACSPVDCPITCTYPFHPDGECCPVCRDCNYEGRKVANGQVFTLDDEPCTRCTCQLGEVSCEKVPCQRACADPALLPGDCCSSCPDSLSPLEEKQGLSPHGNVAFSKAGRSLHGDTEAPVNCSSCPGPPTASPSRPVLHLLQLLLRTNLMKTQTLPTSPAGAHGPHSLALGLTATFPGEPGASPRLSPGPSTPPGAPTLPLASPGAPQPPPVTPERSFSASGAQIVSRWPPLPGTLLTEASALSMMDPSPSKTPITLLGPRVLSPTTSRLSTALAATTHPGPQQPPVGASRGEESTM

SEQ ID NO: 14196 - protein, 173 aa, Homo sapiens
MWAGLLLRAACVALLLPGAPARGYTGRKPPGHFAAERRRLGPHVCLSGFGSGCCPGWAPSMGGGHCTLRKCLSLCPKSSPPAVCVASPQSLVRGADGRPQFLVSHLHFSSQPSAPSAVGVASASLPMSAPARMESKGPPAQKPMDHVGSTAVTLPATMEAVRRWPECAPWASR

SEQ ID NO: 14197 - protein, 1590 aa, Homo sapiens
MPGGACVLVIALMFLAWGEAQECSPGGHQFLRSPYRSVRFDSWHLQQSAVQDLICDHSLSPGWYRFLILDRPAEMPTKCVEMNHCGTQAPIWLSLRDSETLPSPGEIKQLTACATWQFLFSTTKDCCLFQIPVSVRNCGNFSVYLLQPTQGCMGYCAEAISDARLHPCGSDETETGGDCVRQLAASLPPPPAGRPEVLVELIESRLFCRCSFDVPATKNSVGFHIAWSRLSSQEVKEELTQETTVQAFSLLELDGINLRLGDRIFCSASVFFLENPHVQSVAIESQEFFAGFKLQPELSTISEDGKEYYLRIESTVPIICSEFSELDQECKISLKLKTIGQGREHLGLNLALSSCHVDLLQTSSCANGTCSHTFVYYTAVTDFSRDGDRVSNIVVQPIVNEDFLWNNYIPDSIQIKVKDVPTAYCYTFTDPHIITFDGRVYDNFKTGTFVLYKSMSRDFEVHVRQWDCRSLHYPVSCNCGFVAQEGGDIVTFDMCNGQLRESQPYLFIKSQDVTRNIKISESYLGRKVTIWFSSGAFIRADLGEWGMSLTIRAPSVDYRNTLGLCGTFDENPENDFHDKNGMQIDQNFNNYVAFINEWRILPGKSMSDTLPVSMTSPGKPSYCSCSLDTAAYPSSEDLDSVSRSEIALGCKDLNHVSLSSLIPELDVTSEYINSDTLVREINKHTSPEEYNLNLFLQEKKHINLTKLGLNVQKHPGNEKEDSLQYLANKKYTQGRGSHSQEMRYNRQNRWKRQNFHEFPPLFAFPSLSQTDLEELTYFFPEDHAEDVQQEFFPSWPTPSGLTEYSTLTLCQETLANSSIGRLCLAFLGKRLDSVIEMCVKDVLLKDDLSWAEAGVALLENECEKRIVEEGKYNTEEYGTSIEDILSVLKCPNLCSGNGQCMEWGCACSPSFSSYDCSDSYDKAPEITELGNAGFCDVQKYNCMMVRVFGKGFKELPSIKCEVTKLQYNSSEWMPGEPIYTQTVFHNSRAVDCQLPTDVQQFDTMDLVGGKPTGKWQLKVSNDGYKFSNPKITVIYDGACQVCGLYKNDSCTIKENVCIIDGLCYVEGDKNPTSPCLICRPKISRFTWSFLENNQPPVIQALQDKLQTFYGENFEYQFVAFDPEGSDIHFTLDSGPEGASVSSAGLFMWKTDLLTTQQITVRLNDDCDAETRVTIEVTVKSCDCLNGGSCVSDRNFSPGSGVYLCVCLPGFHGSLCEVDISGCQSNPCGLGSYISGFHSYSCDCPPELKVETQFVNQFTTQTVVLTRSDKSVNKEEDDKNAQGRKRHVKPTSGNAFTICKYPCGKSRECVAPNICKCKPGYIGSNCQTALCDPDCKNHGKCIKPNICQCLPGHGGATCDEEHCNPPCQHGGTCLAGNLCTCPYGFVGPRCETMVCNRHCENGGQCLTPDICQCKPGWYGPTCSTALCDPVCLNGGSCNKPNTCLCPNGFFGEHCQNAFCHPPCKNGGHCMRNNVCVCREGYTGRRFQKSICDPTCMNGGKCVGPSTCSCPSGWSGKRCNTPICLQKCKNGGECIAPSICHCPSSWEGVRCQIPICNPKCLYGGRCIFPNVCSCRTEYSGVKCEKKIQIRRH

SEQ ID NO: 14198 - protein, 1302 aa, Homo sapiens
MPGGACVLVIALMFLAWGEAQECSPGGHQFLRSPYRSVRFDSWHLQQSAVQDLICDHSLSPGWYRFLILDRPAEMPTKCVEMNHCGTQAPIWLSLRDSETLPSPGEIKQLTACATWQFLFSTTKDCCLFQIPVSVRNCGNFSVYLLQPTQGCMGYCAEAISDARLHPCGSDETETGGDCVRQLAASLPPPPAGRPEVLVELIESRLFCRCSFDVPATKNSVGFHIAWSRLSSQEVKEELTQETTVQAFSLLELDGINLRLGDRIFCSASVFFLENPHVQSVAIESQEFFAGFKLQPELSTISEDGKEYYLRIESTVPIICSEFSELDQECKISLKLKTIGQGREHLGLNLALSSCHVDLLQTSSCANGTCSHTFVYYTAVTDFSRDGDRVSNIVVQPIVNEDFLWNNYIPDSIQIKVKDVPTAYCYTFTDPHIITFDGRVYDNFKTGTFVLYKSMSRDFEVHVRQWDCRSLHYPVSCNCGFVAQEGGDIVTFDMCNGQLRESQPYLFIKSQDVTRNIKISESYLGRKVTIWFSSGAFIRADLGEWGMSLTIRAPSVDYRNTLGLCGTFDENPENDFHDKNGMQIDQNFNNYVAFINEWRILPGKSMSDTLPVSMTSPGKPSYCSCSLDTAAYPSSEDLDSVSRSEIALGCKDLNHVSLSSLIPELDVTSEYINSDTLVREINKHTSPEEYNLNLFLQEKKHINLTKLGLNVQKHPGNEKEDSLQYLANKKYTQGRGSHSQEMRYNRQNRWKRQNFHEFPPLFAFPSLSQTDLEELTYFFPEDHAEDVQQEFFPSWPTPSGLTEYSTLTLCQETLANSSIGRLCLAFLGKRLDSVIEMCVKDVLLKDDLSWAEAGVALLENECEKRIVEEGKYNTEEYGTSIEDILSVLKCPNLCSGNGQCMEWGCACSPSFSSYDCSDSYDKAPEITELGNAGFCDVQKYNCMMVRVFGKGFKELPSIKCEVTKLQYNSSEWMPGEPIYTQTVFHNSRAVDCQLPTDVQQFDTMDLVGGKPTGKWQLKVSNDGYKFSNPKITVIYDGACQVCGLYKNDSCTIKENVCIIDGLCYVEGDKNPTSPCLICRPKISRFTWSFLENNQPPVIQALQDKLQTFYGENFEYQFVAFDPEGSDIHFTLDSGPEGASVSSAGLFMWKTDLLTTQQITVRLNDDCDAETRVTIEVTVKSCDCLNGGSCVSDRNFSPGSGVYLCVCLPGFHGSLCEVDISGCQSNPCGLGSYISGFHSYSCDCPPELKGKNCQEDVDECDSKPCFEGVACLNTFGSYHCGSCPEGFYGDGKICHGKSFYFLL

SEQ ID NO: 14199 - protein, 352 aa, Homo sapiens
MPGGACVLVIALMFLAWGEAQECSPGGHQFLRSPYRSVRFDSWHLQQSAVQDLICDHSLSPGWYRFLILDRPAEMPTKCVEMNHCGTQAPIWLSLRDSETLPSPGEIKQLTACATWQFLFSTTKDCCLFQIPVSVRNCGNFSVYLLQPTQGCMGYCAEAISDARLHPCGSDETETGGDCVRQLAASLPPPPAGRPEVLVELIESRLFCRCSFDVPATKNSVGFHIAWSRLSSQEVKEELTQETTVQAFSLLELDGINLRLGDRIFCSASVFFLENPHVQSVAIESQEFFAGFKLQPELSTISEDGKEYYLRIESTVPIICSEFSELDQECKISLKLKTIGQDLVFFWGIYPC

SEQ ID NO: 14200 - protein, 170 aa, Homo sapiens
MPGGACVLVIALMFLAWGEAQECSPGGHQFLRSPYRSVRFDSWHLQQSAVQDLICDHSLSPGWYRFLILDRPAEMPTKCVEMNHCGTQAPIWLSLRDSETLPSPGEIKQLTACATWQFLFSTTKDCCLFQIPVSVRNCGNFSVYLLQPTQGCMGYCAEGFFAKIVKSPHT

SEQ ID NO: 14201 - protein, 944 aa, Homo sapiens
MSLTIRAPSVDYRNTLGLCGTFDENPENDFHDKNGMQIDQNFNNYVAFINEWRILPGKSMSDTLPVSMTSPGKPSYCSCSLDTAAYPSSEDLDSVSRSEIALGCKDLNHVSLSSLIPELDVTSEYINSDTLVREINKHTSPEEYNLNLFLQEKKHINLTKLGLNVQKHPGNEKEDSLQYLANKKYTQGRGSHSQEMRYNRQNRWKRQNFHEFPPLFAFPSLSQTDLEELTYFFPEDHAEDVQQEFFPSWPTPSGLTEYSTLTLCQETLANSSIGRLCLAFLGKRLDSVIEMCVKDVLLKDDLSWAEAGVALLENECEKRIVEEGKYNTEEYGTSIEDILSVLKCPNLCSGNGQCMEWGCACSPSFSSYDCSDSYDKAPEITELGNAGFCDVQKYNCMMVRVFGKGFKELPSIKCEVTKLQYNSSEWMPGEPIYTQTVFHNSRAVDCQLPTDVQQFDTMDLVGGKPTGKWQLKVSNDGYKFSNPKITVIYDGACQVCGLYKNDSCTIKENVCIIDGLCYVEGDKNPTSPCLICRPKISRFTWSFLENNQPPVIQALQDKLQTFYGENFEYQFVAFDPEGSDIHFTLDSGPEGASVSSAGLFMWKTDLLTTQQITVRLNDDCDAETRVTIEVTVKSCDCLNGGSCVSDRNFSPGSGVYLCVCLPGFHGSLCEVDISGCQSNPCGLGSYISGFHSYSCDCPPELKVETQFVNQFTTQTVVLTRSDKSVNKEEDDKNAQGRKRHVKPTSGNAFTICKYPCGKSRECVAPNICKCKPGYIGSNCQTALCDPDCKNHGKCIKPNICQCLPGHGGATCDEEHCNPPCQHGGTCLAGNLCTCPYGFVGPRCETMVCNRHCENGGQCLTPDICQCKPGWYGPTCSTALCDPVCLNGGSCNKPNTCLCPNGFFGEHCQNAFCHPPCKNGGHCMRNNVCVCREGYTGRRFQKRHL

SEQ ID NO: 14202 - protein, 166 aa, Homo sapiens
VTVKSCDCLNGGSCVSDRNFSPGSGVYLCVCLPGFHGSLCEVDISGCQSNPCGLGSYISGFHSYSCDCPPELKGKNCQEDVDECDSKPCFEGVACLNTFGSYHCGSCPEGFYGDGKICHVETQFVNQFTTQTVVLTRSDKSVNKEEDDKNAQGRKRHVKPTSGNAF

SEQ ID NO: 14203 - protein, 60 aa, Homo sapiens
MIPARFAGVLLALALILPETRCLQMPSPVGELRSIKVAQNCPILWGHRMRRKESKTWMDY

SEQ ID NO: 14204 - protein, 60 aa, Homo sapiens; identical to SEQ ID NO: 14203

SEQ ID NO: 14205 - protein, 2813 aa, Homo sapiens
MIPARFAGVLLALALILPGTLCAEGTRGRSSTARCSLFGSDFVNTFDGSMYSFAGYCSYLLAGGCQKRSFSIIGDFQNGKRVSLSVYLGEFFDIHLFVNGTVTQGDQRVSMPYASKGLYLETEAGYYKLSGEAYGFVARIDGSGNFQVLLSDRYFNKTCGLCGNFNIFAEDDFMTQEGTLTSDPYDFANSWALSSGEQWCERASPPSSSCNISSGEMQKGLWEQCQLLKSTSVFARCHPLVDPEPFVALCEKTLCECAGGLECACPALLEYARTCAQEGMVLYGWTDHSACSPVCPAGMEYRQCVSPCARTCQSLHINEMCQERCVDGCSCPEGQLLDEGLCVESTECPCVHSGKRYPPGTSLSRDCNTCICRNSQWICSNEECPGECLVTGQSHFKSFDNRYFTFSGICQYLLARDCQDHSFSIVIETVQCADDRDAVCTRSVTVRLPGLHNSLVKLKHGAGVAMDGQDVQLPLLKGDLRIQHTVTASVRLSYGEDLQMDWDGRGRLLVKLSPVYAGKTCGLCGNYNGNQGDDFLTPSGLAEPRVEDFGNAWKLHGDCQDLQKQHSDPCALNPRMTRFSEEACAVLTSPTFEACHRAVSPLPYLRNCRYDVCSCSDGRECLCGALASYAAACAGRGVRVAWREPGRCELNCPKGQVYLQCGTPCNLTCRSLSYPDEECNEACLEGCFCPPGLYMDERGDCVPKAQCPCYYDGEIFQPEDIFSDHHTMCYCEDGFMHCTMSGVPGSLLPDAVLSSPLSHRSKRSLSCRPPMVKLVCPADNLRAEGLECTKTCQNYDLECMSMGCVSGCLCPPGMVRHENRCVALERCPCFHQGKEYAPGETVKIGCNTCVCQDRKWNCTDHVCDATCSTIGMAHYLTFDGLKYLFPGECQYVLVQDYCGSNPGTFRILVGNKGCSHPSVKCKKRVTILVEGGEIELFDGEVNVKRPMKDETHFEVVESGRYIILLLGKALSVVWDRHLSISVVLKQTYQEKVCGLCGNFDGIQNNDLTSSNLQVEEDPVDFGNSWKVSSQCADTRKVPLDSSPATCHNNIMKQTMVDSSCRILTSDVFQDCNKLVDPEPYLDVCIYDTCSCESIGDCACFCDTIAAYAHVCAQHGKVVTWRTATLCPQSCEERNLRENGYECEWRYNSCAPACQVTCQHPEPLACPVQCVEGCHAHCPPGKILDELLQTCVDPEDCPVCEVAGRRFASGKKVTLNPSDPEHCQICHCDVVNLTCEACQEPGGLVVPPTDAPVSPTTLYVEDISEPPLHDFYCSRLLDLVFLLDGSSRLSEAEFEVLKAFVVDMMERLRISQKWVRVAVVEYHDGSHAYIGLKDRKRPSELRRIASQVKYAGSQVASTSEVLKYTLFQIFSKIDRPEASRITLLLMASQEPQRMSRNFVRYVQGLKKKKVIVIPVGIGPHANLKQIRLIEKQAPENKAFVLSSVDELEQQRDEIVSYLCDLAPEAPPPTLPPDMAQVTVGPGLLGVSTLGPKRNSMVLDVAFVLEGSDKIGEADFNRSKEFMEEVIQRMDVGQDSIHVTVLQYSYMVTVEYPFSEAQSKGDILQRVREIRYQGGNRTNTGLALRYLSDHSFLVSQGDREQAPNLVYMVTGNPASDEIKRLPGDIQVVPIGVGPNANVQELERIGWPNAPILIQDFETLPREAPDLVLQRCCSGEGLQIPTLSPAPDCSQPLDVILLLDGSSSFPASYFDEMKSFAKAFISKANIGPRLTQVSVLQYGSITTIDVPWNVVPEKAHLLSLVDVMQREGGPSQIGDALGFAVRYLTSEMHGARPGASKAVVILVTDVSVDSVDAAADAARSNRVTVFPIGIGDRYDAAQLRILAGPAGDSNVVKLQRIEDLPTMVTLGNSFLHKLCSGFVRICMDEDGNEKRPGDVWTLPDQCHTVTCQPDGQTLLKSHRVNCDRGLRPSCPNSQSPVKVEETCGCRWTCPCVCTGSSTRHIVTFDGQNFKLTGSCSYVLFQNKEQDLEVILHNGACSPGARQGCMKSIEVKHSALSVELHSDMEVTVNGRLVSVPYVGGNMEVNVYGAIMHEVRFNHLGHIFTFTPQNNEFQLQLSPKTFASKTYGLCGICDENGANDFMLRDGTVTTDWKTLVQEWTVQRPGQTCQPILEEQCLVPDSSHCQVLLLPLFAECHKVLAPATFYAICQQDSCHQEQVCEVIASYAHLCRTNGVCVDWRTPDFCAMSCPPSLVYNHCEHGCPRHCDGNVSSCGDHPSEGCFCPPDKVMLEGSCVPEEACTQCIGEDGVQHQFLEAWVPDHQPCQICTCLSGRKVNCTTQPCPTAKAPTCGLCEVARLRQNADQCCPEYECVCDPVSCDLPPVPHCERGLQPTLTNPGECRPNFTCACRKEECKRVSPPSCPPHRLPTLRKTQCCDEYECACNCVNSTVSCPLGYLASTATNDCGCTTTTCLPDKVCVHRSTIYPVGQFWEEGCDVCTCTDMEDAVMGLRVAQCSQKPCEDSCRSGFTYVLHEGECCGRCLPSACEVVTGSPRGDSQSSWKSVGSQWASPENPCLINECVRVKEEVFIQQRNVSCPQLEVPVCPSGFQLSCKTSACCPSCRCERMEACMLNGTVIGPGKTVMIDVCTTCRCMVQVGVISGFKLECRKTTCNPCPLGYKEENNTGECCGRCLPTACTIQLRGGQIMTLKRDETLQDGCDTHFCKVNERGEYFWEKRVTGCPPFDEHKCLAEGGKIMKIPGTCCDTCEEPECNDITARLQYVKVGSCKSEVEVDIHYCQGKCASKAMYSIDINDVQDQCSCCSPTRTEPMQVALHCTNGSVVYHEVLNAMECKCSPRKCSK

SEQ ID NO: 14206 - protein, 287 aa, Homo sapiens
MPALCLVLCWFQGLLGEVWNAVDSGHCLQTYSLHTEAVRAARWAPCGRRILSGGFDFALHLTDLETGTQLFSGRSDFRITTLKFHPKDHNIFLCGGFSSEMKAWDIRTGKVMRSYKATIQQTLDILFLREGSEFLSSTDASTRDSADRTIIAWDFRTSAKISNQIFHERFTCPSLALHPREPVFLAQTNGNYLALFSTVWPYRMSRRRRYEGHKVEGYSVGCECSPGGDLLVTGSADGRVLMYSFRTASRACTLQGHTQACVGTTYHPVLPSVLATCSWGGDMKIWH

SEQ ID NO: 14207 - protein, 544 aa, Homo sapiens
MTARTLSLMASLVAYDDSDSEAETEHAGSFNATGQQKDTSGVARPPGQDFASGTLDVPKAGAQPTKHGSCEDPGGYRLPLAQLGRSDWGSCPSQRLQWPGKEPQVTFPIKEPSCSSLWTSHVPASHMPLAAARFKQVKLSRNFPKSSFHAQSESETVGKNGSSFQKKKCEDCVVPYTPRRLRQRQALSTETGKGKDVEPQGPPAGRAPAPLYVGPGVSEFIQPYLNSHYKETTVPRKVLFHLRGHRGPVNTIQWCPVLSKSHMLLSTSMDKTFKVWNAVDSGHCLQTYSLHTEAVRAARWAPCGRRILSGGFDFALHLTDLETGTQLFSGRSDFRITTLKFHPKDHNIFLCGGFSSEMKAWDIRTGKVMRSYKATIQQTLDILFLREGSEFLSSTDASTRDSADRTIIAWDFRTSAKISNQIFHERFTCPSLALHPREPVFLAQTNGNYLALFSTVWPYRMSRRRRYEGHKVEGYSVGCECSPGGDLLVTGSADGRVLMYSFRTASRACTLQGHTQACVGTTYHPVLPSVLATCSWGGDMKIWH

SEQ ID NO: 14208 - protein, 544 aa, Homo sapiens; identical to SEQ ID NO: 14207

SEQ ID NO: 14209 - protein, 274 aa, Homo sapiens
MTARTLSLMASLVAYDDSDSEAETEHAGSFNATGQQKDTSGVARPPGQDFASGTLDVPKAGAQPTKHGSCEDPGGYRLPLAQLGRSDWGSCPSQRLQWPGKEPQVTFPIKEPSCSSLWTSHVPASHMPLAAARFKQVKLSRNFPKSSFHAQSESETVGKNGSSFQKKKCEDCVVPYTPRRLRQRQALSTETGKGKDVEPQGPPAGRAPAPLYVGPGVSEFIQPYLNSHYKETTVPRKVLFHLRGHRGPVNTIQWCPVLSKSHMLLSTSMDKTFK

SEQ ID NO: 14210 - protein, 289 aa, Homo sapiens
MTARTLSLMASLVAYDDSDSEAETEHAGSFNATGQQKDTSGVARPPGQDFASGTLDVPKAGAQPTKHGSCEDPGGYRLPLAQLGRSDWGSCPSQRLQWPGKEPQVTFPIKEPSCSSLWTSHVPASHMPLAAARFKQVKLSRNFPKSSFHAQSESETVGKNGSSFQKKKCEDCVVPYTPRRLRQRQALSTETGKGKDVEPQGPPAGRAPAPLYVGPGVSEFIQPYLNSHYKETTVPRKVLFHLRGHRGPVNTIQWCPVLSKSHMLLSTSMDKTFKEPSYLVVEVTLESLP

SEQ ID NO: 14211 - protein, 544 aa, Homo sapiens; identical to SEQ ID NO: 14207

SEQ ID NO: 14212 - protein, 121 aa, Homo sapiens
  VARIANT 1: note = misc_feature - Xaa can be any naturally occurring amino acid
XSTDASTRDSADRTIIAWDFRTSAKISNQIFHERFTCPSLALHPREPVFLAQTNGNYLALFSTVWPYRMSRRRRYEGHKVLLSLSPRRMLSPSPKPPGSPGHGPWGAWSLCLGGSCFLFPG

SEQ ID NO: 14213 - protein, 1941 aa, Homo sapiens
MAQGSGGREGALRTPAGGWHSPPSPDMQELLRSVERDLSIDPRQLAPAPGGTHVVALVPARWLASLRDRRLPLGPCPRAEGLGEAEVRTLLQRSVQRLPAGWTRVEVHGLRKRRLSYPLGGGLPFEDGSCGPETLTRFMQEVAAQNYRNLWRHAYHTYGQPYSHSPAPSAVPALDSVRQALQRVYGCSFLPVGETTQCPSYAREGPCPPRGSPACPSLLRAEALLESPEMLYVVHPYVQFSLHDVVTFSPAKLTNSQAKVLFILFRVLRAMDACHRQGLACGALSLYHIAVDEKLCSELRLDLSAYERPEEDENEEAPVARDEAGIVSQEEQGGQPGQPTGQEELRSLVLDWVHGRISNFHYLMQLNRLAGRRQGDPNYHPVLPWVVDFTTPHGRFRDLRKSKFRLNKGDKQLDFTYEMTRQAFVAGGAGGGEPPHVPHHISDVLSDITYYVYKARRTPRSVLCGHVRAQWEPHEYPASMERMQNWTPDECIPEFYTDPSIFRSIHPDMPDLDVPAWCSSSQEFVAAHRALLESREVSRDLHHWIDLTFGYKLQGKEAVKEKNVCLHLVDAHTHLASYGVVQLFDQPHPQRLAGAPALAPEPPLIPKLLVQTIQETTGREDFTENPGQLPNGVGRPVLEATPCEASWTRDRPVAGEDDLEQATEALDSISLAGKAGDQLGSSSQASPGLLSFSVASASRPGRRNKAAGADPGEGEEGRILLPEGFNPMQALEELEKTGNFLAKGLGGLLEVPEQPRVQPAVPLQCLLHRDMQALGVLLAEMVFATRVRTLQPDAPLWVRFQAVRGLCTRHPKEVPVSLQPVLDTLLQMSGPEVPMGAERGKLDQLFEYRPVSQGLPPPCPSQLLSPFSSVVPFPPYFPALHRFILLYQARRVEDEAQGRELVFALWQQLGAVLKDITPEGLEILLPFVLSLMSEEHTAVYTAWYLFEPVAKALGPKNANKYLLKPLIGAYESPCQLHGRFYLYTDCFVAQLMVRLGLQAFLTHLLPHVLQVLAGAEASQEESKDLAGAAEEEESGLPGAGPGSCAFGEEIPMDGEPPASSGLGLPDYTSGVSFHDQADLPETEDFQAGLYVTESPQPQEAEAVSLGRLSDKSSTSETSLGEERAPDEGGAPVDKSSLRSGDSSQDLKQSEGSEEEEEEEDSCVVLEEEEGEQEEVTGASELTLSDTVLSMETVVAGGSGGDGEEEEEALPEQSEGKEQKILLDTACKMVRWLSAKLGPTVASRHVARNLLRLLTSCYVGPTRQQFTVSSGESPPLSAGNIYQKRPVLGDIVSGPVLSCLLHIARLYGEPVLTYQYLPYISYLVAPGSASGPSRLNSRKEAGLLAAVTLTQKIIVYLSDTTLMDILPRISHEVLLPVLSFLTSLVTGFPSGAQARTILCVKTISLIALICLRIGQEMVQQHLSEPVATFFQVFSQLHELRQQDLKLDPAGRGEGQLPQVVFSDGQQRPVDPALLDELQKVFTLEMAYTIYVPFSCLLGDIIRKIIPNHELVGELAALYLESISPSSRNPASVEPTMPGTGPEWDPHGGGCPQDDGHSGTFGSVLVGNRIQIPNDSRPENPGPLGPISGVGGGGLGSGSDDNALKQELPRSVHGLSGNWLAYWQYEIGVSQQDAHFHFHQIRLQSFPGHSGAVKCVAPLSSEDFFLSGSKDRTVRLWPLYNYGDGTSETAPRLVYTQHRKSVFFVGQLEAPQHVVSCDGAVHVWDPFTGKTLRTVEPLDSRVPLTAVAVMPAPHTSITMASSDSTLRFVDCRKPGLQHEFRLGGGLNPGLVRALAISPSGRSVVAGFSSGFMVLLDTRTGLVLRGWPAHEGDILQIKAVEGSVLVSSSSDHSLTVWKELEQKPTHHYKSASDPIHTFDLYGSEVVTGTVSNKIGVCSLLEPPSQATTKLSSENFRGTLTSLALLPTKRHLLLGSDNGVIRLLA

SEQ ID NO: 14214 - protein, 890 aa, Homo sapiens
MDGEPPASSGLGLPDYTSGVSFHDQADLPETEDFQAGLYVTESPQPQEAEAVSLGRLSDKSSTSETSLGEERAPDEGGAPVDKSSLRSGDSSQDLKQSEGSEEEEEEEDSCVVLEEEEGEQEEVTGASELTLSDTVLSMETVVAGGSGGDGEEEEEALPEQSEGKEQKILLDTACKMVRWLSAKLGPTVASRHVARNLLRLLTSCYVGPTRQQFTVSSGESPPLSAGNIYQKRPVLGDIVSGPVLSCLLHIARLYGEPVLTYQYLPYISYLVAPGSASGPSRLNSRKEAGLLAAVTLTQKIIVYLSDTTLMDILPRISHEVLLPVLSFLTSLVTGFPSGAQARTILCVKTISLIALICLRIGQEMVQQHLSEPVATFFQVFSQLHELRQQDLKLDPAGRGEGQLPQVVFSDGQQRPVDPALLDELQKVFTLEMAYTIYVPFSCLLGDIIRKIIPNHELVGELAALYLESISPSSRNPASVEPTMPGTGPEWDPHGGGCPQDDGHSGTFGSVLVGNRIQIPNDSRPENPGPLGPISGVGGGGLGSGSDDNALKQELPRSVHGLSGNWLAYWQYEIGVSQQDAHFHFHQIRLQSFPGHSGAVKCVAPLSSEDFFLSGSKDRTVRLWPLYNYGDGTSETAPRLVYTQHRKSVFFVGQLEAPQHVVSCDGAVHVWDPFTGKTLRTVEPLDSRVPLTAVAVMPAPHTSITMASSDSTLRFVDCRKPGLQHEFRLGGGLNPGLVRALAISPSGRSVVAGFSSGFMVLLDTRTGLVLRGWPAHEGDILQIKAVEGSVLVSSSSDHSLTVWKELEQKPTHHYKSASDPIHTFDLYGSEVVTGTVSNKIGVCSLLEPPSQATTKLSSENFRGTLTSLALLPTKRHLLLGSDNGVIRLLA

SEQ ID NO: 14215 - protein, 580 aa, Homo sapiens
MDILPRISHEVLLPVLSFLTSLVTGFPSGAQARTILCVKTISLIALICLRIGQEMVQQHLSEPVATFFQVFSQLHELRQQDLKLDPAGRGEGQLPQVVFSDGQQRPVDPALLDELQKVFTLEMAYTIYVPFSCLLGDIIRKIIPNHELVGELAALYLESISPSSRNPASVEPTMPGTGPEWDPHGGGCPQDDGHSGTFGSVLVGNRIQIPNDSRPENPGPLGPISGVGGGGLGSGSDDNALKQELPRSVHGLSGNWLAYWQYEIGVSQQDAHFHFHQIRLQSFPGHSGAVKCVAPLSSEDFFLSGSKDRTVRLWPLYNYGDGTSETAPRLVYTQHRKSVFFVGQLEAPQHVVSCDGAVHVWDPFTGKTLRTVEPLDSRVPLTAVAVMPAPHTSITMASSDSTLRFVDCRKPGLQHEFRLGGGLNPGLVRALAISPSGRSVVAGFSSGFMVLLDTRTGLVLRGWPAHEGDILQIKAVEGSVLVSSSSDHSLTVWKELEQKPTHHYKSASDPIHTFDLYGSEVVTGTVSNKIGVCSLLEPPSQATTKLSSENFRGTLTSLALLPTKRHLLLGSDNGVIRLLA

SEQ ID NO: 14216 - protein, 171 aa, Homo sapiens
MHAGPCSSQPDTVVPRTQRALFPSGAQARTILCVKTISLIALICLRIGQEMVQQHLSEPVATFFQVFSQLHELRQQDLKLDPAGRGEGQLPQVVFSDGQQRPVDPALLDELQKVFTLEMAYTIYVPFSCLLGDIIRKIIPNHELVGELAALYLESISPSSRNPASVEPTMP

SEQ ID NO: 14217 - protein, 172 aa, Homo sapiens
MLVRVVLSLTPSFPEPSALYTACKMVRWLSAKLGPTVASRHVARNLLRLLTSCYVGPTRQQFTVSSGESPPLSAGNIYQKRPVLGDIVSGPVLSCLLHIARLYGEPVLTYQYLPYISYLVAPGSASGPSRLNSRKEAGLLAAVTLTQKIIVYLSDTTLMDILPRISHEVLLP

SEQ ID NO: 14218 - protein, 738 aa, Homo sapiens
MLVRVVLSLTPSFPEPSALYTACKMVRWLSAKLGPTVASRHVARNLLRLLTSCYVGPTRQQFTVSSGESPPLSAGNIYQKRPVLGDIVSGPVLSCLLHIARLYGEPVLTYQYLPYISYLVAPGSASGPSRLNSRKEAGLLAAVTLTQKIIVYLSDTTLMDILPRISHEVLLPVLSFLTSLVTGFPSGAQARTILCVKTISLIALICLRIGQEMVQQHLSEPVATFFQVFSQLHELRQQDLKLDPAGRGEGQLPQVVFSDGQQRPVDPALLDELQKVFTLEMAYTIYVPFSCLLGDIIRKIIPNHELVGELAALYLESISPSSRNPASVEPTMPGTGPEWDPHGGGCPQDDGHSGTFGSVLVGNRIQIPNDSRPENPGPLGPISGVGGGGLGSGSDDNALKQELPRSVHGLSGNWLAYWQYEIGVSQQDAHFHFHQIRLQSFPGHSGAVKCVAPLSSEDFFLSGSKDRTVRLWPLYNYGDGTSETAPRLVYTQHRKSVFFVGQLEAPQHVVSCDGAVHVWDPFTGKTLRTVEPLDSRVPLTAVAVMPAPHTSITMASSDSTLRFVDCRKPGLQHEFRLGGGLNPGLVRALAISPSGRSVVAGFSSGFMVLLDTRTGLVLRGWPAHEGDILQIKAVEGSVLVSSSSDHSLTVWKELEQKPTHHYKSASDPIHTFDLYGSEVVTGTVSNKIGVCSLLEPPSQATTKLSSENFRGTLTSLALLPTKRHLLLGSDNGVIRLLA

SEQ ID NO: 14219 - protein, 132 aa, Homo sapiens
MVQQHLSEPVATFFQVFSQLHELRQQDLKLDPAGRGEGQLPQVVFSDGQQRPVDPALLDELQKVFTLEMAYTIYVPFSCLLGDIIRKIIPNHELVGELAALYLESISPSSRNPASVEPTMPGTGPEWDPHGG

SEQ ID NO: 14220 - protein, 714 aa, Homo sapiens
MVRWLSAKLGPTVASRHVARNLLRLLTSCYVGPTRQQFTVSSGESPPLSAGNIYQKRPVLGDIVSGPVLSCLLHIARLYGEPVLTYQYLPYISYLVAPGSASGPSRLNSRKEAGLLAAVTLTQKIIVYLSDTTLMDILPRISHEVLLPVLSFLTSLVTGFPSGAQARTILCVKTISLIALICLRIGQEMVQQHLSEPVATFFQVFSQLHELRQQDLKLDPAGRGEGQLPQVVFSDGQQRPVDPALLDELQKVFTLEMAYTIYVPFSCLLGDIIRKIIPNHELVGELAALYLESISPSSRNPASVEPTMPGTGPEWDPHGGGCPQDDGHSGTFGSVLVGNRIQIPNDSRPENPGPLGPISGVGGGGLGSGSDDNALKQELPRSVHGLSGNWLAYWQYEIGVSQQDAHFHFHQIRLQSFPGHSGAVKCVAPLSSEDFFLSGSKDRTVRLWPLYNYGDGTSETAPRLVYTQHRKSVFFVGQLEAPQHVVSCDGAVHVWDPFTGKTLRTVEPLDSRVPLTAVAVMPAPHTSITMASSDSTLRFVDCRKPGLQHEFRLGGGLNPGLVRALAISPSGRSVVAGFSSGFMVLLDTRTGLVLRGWPAHEGDILQIKAVEGSVLVSSSSDHSLTVWKELEQKPTHHYKSASDPIHTFDLYGSEVVTGTVSNKIGVCSLLEPPSQATTKLSSENFRGTLTSLALLPTKRHLLLGSDNGVIRLLA

SEQ ID NO: 14221 - protein, 197 aa, Homo sapiens
  VARIANT 1: note = misc_feature - Xaa can be any naturally occurring amino acid
XFQAGLYVTESPQPQEAEAVSLGRLSDKSSTSETSLGEERAPDEGGAPVDKSSLRSGDSSQDLKQSEGSEEEEEEEDSCVVLEEEEGEQEEVTGASELTLSDTVLSMETVVAGGSGGDGEEEEEALPEQSEGKEQKILLGPTRQQFTVSSGESPPLSAGNIYQKRPVLGDIVSGPVLSCLLHIARLYGEPVLTYQYL

SEQ ID NO: 14222 - protein, 123 aa, Homo sapiens
  VARIANT 1: note = misc_feature - Xaa can be any naturally occurring amino acid
XRLLTSCYVGPTRQQFTVSSGESPPLSAGNIYQKRPVLGDIVSGPVLSCLLHIARLYGEPVLTYQYLPYISYLVPKWGPGSDHPVCENHQPHRPHLPAHWTGDGPAAPERARGHLFPGLLSAA

SEQ ID NO: 14223 - protein, 475 aa, Homo sapiens
ARSHTAPVLALAMEQRRGQLATVSQDRTVRIWDLATLQQLYDFTSSEDAPCAVTFHPTRPTFFCGFSSGAVRSFSLEAAEVLVEHTCHRGAVTGLTATPDGRLLFSSCSQGSLAQYSCADPQWHVLRVAADMVCPDAPASPSALAVSRDGRLLAFVGPSRCTVTVMGSASLDELLRVDIGTLDLASSRLDSAMAVCFGPAALGHLLVSTSSNRVVVLDAVSGRIIRELPGVHPEPCPSLTLSEDARFLLIAAGRTIKVWDYATQASPGPQVYIGHSEPVQAVAFSPDQQQVLSAGDAVFLWDVLAPTESDQSFPGAPPACKTGPGAGPLEDAASRASELPRQQVPKPCQASPPRLGVCARPPEGGDGHLPASRQRWVAASEGCRRLQREWAGQHGLEAGHRLLCLHVRPPGGGGGPALWRPAALVRPLCGDLHAGPQPQCPGPGLCLGPKQHDRPLSDPRLGRVWRPLPASHFPP

SEQ ID NO: 14224 - protein, 115 aa, Homo sapiens
EKIPLPFFAMSLSLSPGTHLLAVGFAGLHRPPGCSSRPPATRSLCGRSPASEMQQGLWWWASRLVMPGTWTQAWQRRQVVNGLMLGQARIHVNRLEQAVVNLAPCEYFHTCCPFA

SEQ ID NO: 14225 - protein, 1748 aa, Homo sapiens
MARAWQHPFLNVFRHFRVDEWKRSAKQGDVAVVTDKTLKGAVYRIRGSVSAANYIQLPKSSTQSLGLTGRYLYVLFRPLPSKHFVIHLDVSSKDNQVIRVSFSNLFKEFKSTATWLQFPLVLEARTPQRDLVGLAPSGARWTCLQLDLQDVLLVYLNRCYGHLKSIRLCASLLVRNLYTSDLCFEPAISGAQWAKLPVTPMPREMAFPVPKGESWHDRYIHVRFPSESLKVPSKPIEKSCSPPEAVLLGPGPQPLPCPVASSKPVRFSVSPVVQTPSPTASGRAALAPRPFPEVSLSQERSDASNADGPGFHSLEPWAQLEASDIHTAAAGTHVLTHESAEVPVARTGSCEGFLPDPVLRLKGVIGFGGHGTRQALWTPDGAAVVYPCHAVIVVLLVDTGEQRFFLGHTDKVSALALDGSSSLLASAQARAPSVMRLWDFQTGRCLCLFRSPMHVVCSLSFSDSGALLCGVGKDHHGRTMVVAWGTGQVGLGGEVVVLAKAHTDFDVQAFRVTFFDETRMASCGQGSVRLWRLRGGVLRSCPVDLGEHHALQFTDLAFKQARDGCPEPSAAMLFVCSRSGHILEIDCQRMVVRHARRLLPTRTPGGPHPQKQTFSSGPGIAISSLSVSPAMCAVGSEDGFLRLWPLDFSSVLLEAEHEGPVSSVCVSPDGLRVLSATSSGHLGFLDTLSRVYHMLARSHTAPVLALAMEQRRGQLATVSQDRTVRIWDLATLQQLYDFTSSEDAPCAVTFHPTRPTFFCGFSSGAVRSFSLEAAEVLVEHTCHRGAVTGLTATPDGRLLFSSCSQGSLAQYSCADPQWHVLRVAADMVCPDAPASPSALAVSRDGRLLAFVGPSRCTVTVMGSASLDELLRVDIGTLDLASSRLDSAMAVCFGPAALGHLLVSTSSNRVVVLDAVSGRIIRELPGVHPEPCPSLTLSEDARFLLIAAGRTIKVWDYATQASPGPQVYIGHSEPVQAVAFSPDQQQVLSAGDAVFLWDVLAPTESDQSFPGAPPACKTGPGAGPLEDAASRASELPRQQVPKPCQASPPRLGVCARPPEGGDGARDTRNSGAPRTTYLASCKAFTPARVSCSPHSAKGTCPPPASGGWLRLKAVVGYSGNGRANMVWRPDTGFFAYTCGRLVVVEDLHSGAQQHWSGHSAEISTLALSHSAQVLASASGRSSTTAHCQIRVWDVSGGLCQHLIFPHSTTVLALAFSPDDRLLVTLGDHDGRTLALWGTATYDLVSSTRLPEPVHGVAFNPWDAGELTCVGQGTVTFWLLQQRGADISLQVRREPVPEAVGAGELTSLCYGAPPLLYCGTSSGQVCVWDTRAGRCFLSWEADDGGIGLLLFSGSRLVSGSSTGRLRLWAVGAVSELRCKGSGASSVFMEHELVLDGAVVSASFDDSVDMGVVGTTAGTLWFVSWAEGTSTRLISGHRSKVNEVVFSPGESHCATCSEDGSVRVWALASMELVIQFQVLNQSCLCLAWSPPCCGRPEQQRLAAGYGDGSLRIFSVSRTAMELKMHPHPVALTTVAFSTDGQTVLSGDKDGLVAVSHPCTGTTFRVLSDHQGAPISTICVTCKECEDLGVEGTDLWLAASGDQRVSVWASDWLRNHCELVDWLSFPMPATTETQGHLPPSLAAFCPWDGALLMYVGPGVYKEVIIYNLCQKQVVEKIPLPFFAMSLSLSPGTHLLAVGFAECMLRLVDCAMGTAQDFAGHDNAVHLCRFTPSARLLFTAARNEILVWEVPGL

SEQ ID NO: 14226 - protein, 1750 aa, Homo sapiens
MARAWQHPFLNVFRHFRVDEWKRSAKQGDVAVVTDKTLKGAVYRIRGSVSAANYIQLPKSSTQSLGLTGRYLYVLFRPLPSKHFVIHLDVSSKDNQVIRVSFSNLFKEFKSTATWLQFPLVLEARTPQRDLVGLAPSGARWTCLQLDLQDVLLVYLNRCYGHLKSIRLCASLLVRNLYTSDLCFEPAISGAQWAKLPVTPMPREMAFPVPKGESWHDRYIHVRFPSESLKVPSKPIEKSCSPPEAVLLGPGPQPLPCPVASSKPVRFSVSPVVQTPSPTASGRAALAPRPFPEVSLSQERSDASNADGPGFHSLEPWAQLEASDIHTAAAGTHVLTHESAEVPVARTGSCEGFLPDPVLRLKGVIGFGGHGTRQALWTPDGAAVVYPCHAVIVVLLVDTGEQRFFLGHTDKVSALALDGSSSLLASAQARAPSVMRLWDFQTGRCLCLFRSPMHVVCSLSFSDSGALLCGVGKDHHGRTMVVAWGTGQVGLGGEVVVLAKAHTDFDVQAFRVTFFDETRMASCGQGSVRLWRLRGGVLRSCPVDLGEHHALQFTDLAFKQARDGCPEPSAAMLFVCSRSGHILEIDCQRMVVRHARRLLPTRTPGGPHPQKQTFSSGPGIAISSLSVSPAMCAVGSEDGFLRLWPLDFSSVLLEAEHEGPVSSVCVSPDGLRVLSATSSGHLGFLDTLSRVYHMLARSHTAPVLALAMEQRRGQLATVSQDRTVRIWDLATLQQLYDFTSSEDAPCAVTFHPTRPTFFCGFSSGAVRSFSLEAAEVLVEHTCHRGAVTGLTATPDGRLLFSSCSQGSLAQYSCADPQWHVLRVAADMVCPDAPASPSALAVSRDGRLLAFVGPSRCTVTVMGSASLDELLRVDIGTLDLASSRLDSAMAVCFGPAALGHLLVSTSSNRVVVLDAVSGRIIRELPGVHPEPCPSLTLSEDARFLLIAAGRTIKVWDYATQASPGPQVYIGHSEPVQAVAFSPDQQQVLSAGDAVFLWDVLAPTESDQSFPGAPPACKTGPGAGPLEDAASRASELPRQQVPKPCQASPPRLGVCARPPEGGDGARDTRNSGAPRTTYLASCKAFTPARVSCSPHSAKGTCPPPASGGWLRLKAVVGYSGNGRANMVWRPDTGFFAYTCGRLVVVEDLHSGAQQHWSGHSAEISTLALSHSAQVLASASGRSSTTAHCQIRVWDVSGGLCQHLIFPHSTTVLALAFSPDDRLLVTLGDHDGRTLALWGTATYDLVSSTRLPEPVHGVAFNPWDAGELTCVGQGTVTFWLLQQRGADISLQVRREPVPEAVGAGELTSLCYGAPPLLYCGTSSGQVCVWDTRAGRCFLSWEADDGGIGLLLFSGSRLVSGSSTGRLRLWAVGAVSELRCKGSGARSSSVFMEHELVLDGAVVSASFDDSVDMGVVGTTAGTLWFVSWAEGTSTRLISGHRSKVNEVVFSPGESHCATCSEDGSVRVWALASMELVIQFQVLNQSCLCLAWSPPCCGRPEQQRLAAGYGDGSLRIFSVSRTAMELKMHPHPVALTTVAFSTDGQTVLSGDKDGLVAVSHPCTGTTFRVLSDHQGAPISTICVTCKECEDLGVEGTDLWLAASGDQRVSVWASDWLRNHCELVDWLSFPMPATTETQGHLPPSLAAFCPWDGALLMYVGPGVYKEVIIYNLCQKQVVEKIPLPFFAMSLSLSPGTHLLAVGFAECMLRLVDCAMGTAQDFAGHDNAVHLCRFTPSARLLFTAARNEILVWEVPGL

SEQ ID NO: 14227 - protein, 347 aa, Homo sapiens
MLWFGQPGPGGWNRKCLRPFTLPRGQHPQPSYGFPQVNEVVFSPGESHCATCSEDGSVRVWALASMELVIQFQVLNQSCLCLAWSPPCCGRPEQQRLAAGYGDGSLRIFSVSRTAMELKMHPHPVALTTVAFSTDGQTVLSGDKDGLVAVSHPCTGTTFRVLSDHQGAPISTICVTCKECEDLGVEGTDLWLAASGDQRVSVWASDWLRNHCELVDWLSFPMPATTETQGHLPPSLAAFCPWDGALLMYVGPGVYKEVIIYNLCQKQVVEKIPLPFFAMSLSLSPGTHLLAVGFAECMLRLVDCAMGTAQDFAGHDNAVHLCRFTPSARLLFTAARNEILVWEVPGL

SEQ ID NO: 14228 - protein, 299 aa, Homo sapiens
MLWFGQPGPGGWNRKCLRPFTLPRGQHPQPSYGFPQVNEVVFSPGESHCATCSEDGSVRVWALASMELVIQFQVLNQSCLCLAWSPPCCGRPEQQRLAAGYGDGSLRIFSVSRTAMELKMHPHPVALTTVAFSTDGQTVLSGDKDGLVAVSHPCTGTTFRVLSDHQGAPISTICVTCKETQGHLPPSLAAFCPWDGALLMYVGPGVYKEVIIYNLCQKQVVEKIPLPFFAMSLSLSPGTHLLAVGFAECMLRLVDCAMGTAQDFAGHDNAVHLCRFTPSARLLFTAARNEILVWEVPGL

SEQ ID NO: 14229 - protein, 78 aa, Homo sapiens
  VARIANT 1: note = misc_feature - Xaa can be any naturally occurring amino acid
XASGDQRVSVWASDWLRNHCELVDWLSFPMPATTETQGHLPPSLAAFCPWDGALLMYVGPGVYKEVIIYNLCQKQSAC

SEQ ID NO: 14230 - protein, 133 aa, Homo sapiens
  VARIANT 1: note = misc_feature - Xaa can be any naturally occurring amino acid
XPGAGPLEDAASRASELPRQQVPKPCQASPPRLGVCARPPEGGDGARDTRNSGAPRTTYLASCKAFTPARVSCSPHSAKALGHRWPCWAPAASGSPSSQGTCPPPASGGWLRLKAVVGYSGNGRANMVWRPDT

SEQ ID NO: 14231 - protein, 220 aa, Homo sapiens
MPLTGVGPGSCRRQIIRALCLLLLLLHAGSAKNIWKRALPARLAEKSRAEEAGAPGGPRQPRADRCPPPPRTLPPGACQAARCQADSECPRHRRCCYNGCAYACLEAVPPPPVLDWLVQPKPRWLGGNGWLLDGPEEVLQAEACSTTEDGAEPLLCPSGYECHILSPGDVAEGIPNRGQCVKQRRQADGRILRHKLYKEYPEGDSKNVAEPGRGQQKHFQ

SEQ ID NO: 14232 - protein, 220 aa, Homo sapiens; identical to SEQ ID NO: 14231

SEQ ID NO: 14233 - protein, 66 aa, Homo sapiens
MPLTGVGPGSCRRQIIRALCLLLLLLHAGSAKNIWKRALPARLAEKSRVSAWDGEAGAACVGGSQP

SEQ ID NO: 14234 - protein, 79 aa, Homo sapiens
MAPQTLLPVLVLCVLLLQAQGGYRDKKRMQKTQLSPEIKVCQQQPKLYLCKHLCESHRDCQANNICCSTYCGNVCMSIL

SEQ ID NO: 14235 - protein, 73 aa, Homo sapiens
MAPQTLLLVLVLCVLLLQAQGGYRDKMRMQRIKVCEKRPSIDLCIHHCSYFQKCETNKICCSAFCGNICMSIL

SEQ ID NO: 14236 - protein, 89 aa, Homo sapiens
MVSCERRASKSVGQILLWDFGYTCRLSHRRRNSTEILSRNLPALYTGIKVCEKRPSIDLCIHHCSYFQKCETNKICCSAFCGNICMSIL

SEQ ID NO: 14237 - protein, 87 aa, Homo sapiens
MVSLMKLWIPMLMTFFCTVLLSVLGEMRKKRYDRKELLLEECWGKPNVKECTNKCSKAFRCKDKNYTCCWTYCGNICWINVETSGDY

SEQ ID NO: 14238 - protein, 87 aa, Homo sapiens; identical to SEQ ID NO: 14237

SEQ ID NO: 14239 - protein, 87 aa, Homo sapiens; identical to SEQ ID NO: 14237

SEQ ID NO: 14240 - protein, 111 aa, Homo sapiens
MGSSSFLVLMVSLVLVTLVAVEGVKEGIEKAGVCPADNVRCFKSDPPQCHTDQDCLGERKCCYLHCGFKCVIPVKELEEGGNKDEDVSRPYPEPGWEAKCPGSSSTRCPQK

SEQ ID NO: 14241 - protein, 93 aa, Homo sapiens
MKPVLPLQFLVVFCLALQLVPGSPKQRVLKYILEPPPCISAPENCTHLCTMQEDCEKGFQCCSSFCGIVCSSETFQKRNRIKHKGSEVIMPAN

SEQ ID NO: 14242 - protein, 73 aa, Homo sapiens
MLQVQVNLPVSPLPTYPYSFFYPDKEGSCPQVNINFPQLGLCRDQCQVDSQCPGQMKCCRNGCGKVSCVTPNF

SEQ ID NO: 14243 - protein, 76 aa, Homo sapiens
MPACRLGPLAAALLLSLLLFGFTLVSDKEGSCPQVNINFPQLGLCRDQCQVDSQCPGQMKCCRNGCGKVSCVTPNF

SEQ ID NO: 14244 - protein, 102 aa, Homo sapiens
MPACRLGPLAAALLLSLLLFGFTLVSGTGAEKTGVCPELQADQNCTQECVSDSECADNLKCCSAGCATFCSLPNALFHWHLKTRRLWEISGPRPRRPTWDSS

SEQ ID NO: 14245 - protein, 124 aa, Homo sapiens
MPACRLGPLAAALLLSLLLFGFTLVSGTGAEKTGVCPELQADQNCTQECVSDSECADNLKCCSAGCATFCSLPNDKEGSCPQVNINFPQLGLCRDQCQVDSQCPGQMKCCRNGCGKVSCVTPNF

SEQ ID NO: 14246 - protein, 79 aa, Homo sapiens
MPACRLGPLAAALLLSLLLFGFTLVSGTGAEKTGVCPELQADQNCTQECVSDSECADNLKCCSAGCATFCSLPNGQLAE

SEQ ID NO: 14247 - protein, 137 aa, Homo sapiens
MMLSCLFLLKALLALGSLESWITAGEHAKEGECPPHKNPCKELCQGDELCPAEQKCCTTGCGRICRDIPKGRGGDCPKVLVGLCIVGCVMDENCQAGEKCCKSGCGRFCVPPVLPPKLTMNPNWTVRSDSELEIPVP

SEQ ID NO: 14248 - protein, 231 aa, Homo sapiens
MMLSCLFLLKALLALGSLESWITAGEHAKEGECPPHKNPCKELCQGDELCPAEQKCCTTGCGRICRDIPKGRKRDCPRVIRKQSCLKRCITDETCPGVKKCCTLGCNKSCVVPISKQKLAEFGGECPADPLPCEELCDGDASCPQGHKCCSTGCGRTCLGDIEGGRGGDCPKVLVGLCIVGCVMDENCQAGEKCCKSGCGRFCVPPVLPPKLTMNPNWTVRSDSELEIPVP

SEQ ID NO: 14249 - protein, 94 aa, Homo sapiens
MMLSCLFLLKALLALGSLESWITAGEHGRGGDCPKVLVGLCIVGCVMDENCQAGEKCCKSGCGRFCVPPVLPPKLTMNPNWTVRSDSELEIPVP

SEQ ID NO: 14250 - protein, 225 aa, Homo sapiens
  VARIANT 1: note = misc_feature - Xaa can be any naturally occurring amino acid
XIKEALLALGSLESWITAGEHAKEGECPPHKNPCKELCQGDELCPAEQKCCTTGCGRICRDIPKGRKRDCPRVIRKQSCLKRCITDETCPGVKKCCTLGCNKSCVVPISKQKLAEFGGECPADPLPCEELCDGDASCPQGHKCCSTGCGRTCLGDIEGGRGGDCPKVLVGLCIVGCVMDENCQAGEKCCKSGCGRFCVPPVLPPKLTMNPNWTVRSDSELEIPVP

SEQ ID NO: 14251 - protein, 123 aa, Homo sapiens
MRTQSLLLLGALLAVGSQLPAVFGRKKGEKSGGCPPDDGPCLLSVPDQCVEDSQCPLTRKCCYRACFRQCVPRVSVKLGSCPEDQLRCLSPMNHLCHKDSDCSGKKRCCHSACGRDCRDPARG

SEQ ID NO: 14252 - protein, 224 aa, Homo sapiens
MRTQSLLLLGALLAVGSQLPAVFGRKKGEKSGGCPPDDGPCLLSVPDQCVEDSQCPLTRKCCYRACFRQCVPRVSVKLGSCPEDQLRCLSPMNHLCHKDSDCSGKKRCCHSACGRDCRDPARGTAPGCPGQANSDLGSVALHLSWGPTERVHDGRPGALPAGQHYLYQRWFQPSDNHWPADTSLQPIHPWFLLLGVKVHSLSSEEGLCITPVLCTTAIRASHPS

SEQ ID NO: 14253 - protein, 131 aa, Homo sapiens
MGLSGLLPILVPFILLGDIQEPGHAEGILGKPCPKIKVECEVEEIDQCTKPRDCPENMKCCPFSRGKKCLDFRKIYAVCHRRLAPAWPPYHTGGTIKKTKICSEFIYGGSQGNNNNFQTEAICLVTCKKYH

SEQ ID NO: 14254 - protein, 86 aa, Homo sapiens
MGLSGLLPILVPFILLGDIQEPGHAEGILGKPCPKIKVECEVEEIDQCTKPRDCPENMKCCPFSRGKKCLDFRKVSLTLYHKEELE

SEQ ID NO: 14255 - protein, 241 aa, Homo sapiens
MWTVRTEGGHFPLHSPTFSWRNVAFLLLLSLALEWTSAMLTKKIKHKPGLCPKERLTCTTELPDSCNTDFDCKEYQKCCFFACQKKCMDPFQEPCMLPVRHGNCNHEAQRWHFDFKNYRCTPFKYRGCEGNANNFLNEDACRTACMLIVKDGQCPLFPFTERKECPPSCHSDIDCPQTDKCCESRCGFVCARAWTVKKGFCPRKPLLCTKIDKPKCLQDEECPLVEKCCSHCGLKCMDPRR

SEQ ID NO: 14256 - protein, 241 aa, Homo sapiens; identical to SEQ ID NO: 14255

SEQ ID NO: 14257 - protein, 548 aa, Homo sapiens
MPALRPLLPLLLLLRLTSGAGLLPGLGSHPGVCPNQLSPNLWVDAQSTCERECSRDQDCAAAEKCCINVCGLHSCVAARFPGSPAAPTTAASCEGFVCPQQGSDCDIWDGQPVCRCRDRCEKEPSFTCASDGLTYYNRCYMDAEACLRGLHLHIVPCKHVLSWPPSSPGPPETTARPTPGAAPVPPALYSSPSPQAVQVGGTASLHCDVSGRPPPAVTWEKQSHQRENLIMRPDQMYGNVVVTSIGQLVLYNARPEDAGLYTCTARNAAGLLRADFPLSVVQREPARDAAPSIPAPAECLPDVQACTGPTSPHLVLWHYDPQRGGCMTFPARGCDGAARGFETYEACQQACARGPGDACVLPAVQGPCRGWEPRWAYSPLLQQCHPFVYGGCEGNGNNFHSRESCEDACPVPRTPPCRACRLRSKLALSLCRSDFAIVGRLTEVLEEPEAAGGIARVALEDVLKDDKMGLKFLGTKYLEVTLSGMDWACPCPNMTAGDGPLVIMGEVRDGVAVLDAGSYVRAASEKRVKKILELLEKQACELLNRFQD

SEQ ID NO: 14258 - protein, 483 aa, Homo sapiens
MDVKGKKGPVGMPKEATCDHFMCLQQGSECDIWDGQPVCKCKDRCEKEPSFTCASDGLTYYNRCYMDAEACSKGITLAVVTCRYHFTWPNTSPPPPETTMHPTTASPETPELDMAAPALLNNPVHQSVTMGETVSFLCDVVGRPRPEITWEKQLEDRENVVMRPNHVRGNVVVTNIAQLVIYNAQLQDAGIYTCTARNVAGVLRADFPLSVVRGHQAAATSESSPNGTAFPAAECLKPPDSEDCGEEQTRWHFDAQANNCLTFTFGHCHRNLNHFETYEACMLACMSGPLAACSLPALQGPCKAYAPRWAYNSQTGQCQSFVYGGCEGNGNNFESREACEESCPFPRGNQRCRACKPRQKLVTSFCRSDFVILGRVSELTEEPDSGRALVTVDEVLKDEKMGLKFLGQEPLEVTLLHVDWACPCPNVTVSEMPLIIMGEVDGGMAMLRPDSFVGASSARRVRKLREVMHKKTCDVLKEFLGLH

SEQ ID NO: 14259 - protein, 576 aa, Homo sapiens
MWAPRCRRFWSRWEQVAALLLLLLLLGVPPRSLALPPIRYSHAGICPNDMNPNLWVDAQSTCRRECETDQECETYEKCCPNVCGTKSCVAARYMDVKGKKGPVGMPKEATCDHFMCLQQGSECDIWDGQPVCKCKDRCEKEPSFTCASDGLTYYNRCYMDAEACSKGITLAVVTCRYHFTWPNTSPPPPETTMHPTTASPETPELDMAAPALLNNPVHQSVTMGETVSFLCDVVGRPRPEITWEKQLEDRENVVMRPNHVRGNVVVTNIAQLVIYNAQLQDAGIYTCTARNVAGVLRADFPLSVVRGHQAAATSESSPNGTAFPAAECLKPPDSEDCGEEQTRWHFDAQANNCLTFTFGHCHRNLNHFETYEACMLACMSGPLAACSLPALQGPCKAYAPRWAYNSQTGQCQSFVYGGCEGNGNNFESREACEESCPFPRGNQRCRACKPRQKLVTSFCRSDFVILGRVSELTEEPDSGRALVTVDEVLKDEKMGLKFLGQEPLEVTLLHVDWACPCPNVTVSEMPLIIMGEVDGGMAMLRPDSFVGASSARRVRKLREVMHKKTCDVLKEFLGLH

SEQ ID NO: 14260 - protein, 524 aa, Homo sapiens
MANSAGFLGDLTTEGINKPGFYKGPAGSQVTLSSLGNQTRVLLEEQARHLLNEQEHATMAYYLDEYRGGSVSVEALVMALFKLLNTHAKFSLLSEVRGTISPQDLERFDHLVLRREIESMKARQPPGPGAGDTYSMVSYSDTGSSTGSHGTSTTVSSARNTLDLEETGEAVQGNINALPDVSVDDVRSTSQGLSSFKPLPRPPPLAQGNDLPLGQPRKLGREDLQPPSSMPSCSGTVFSAPQNRSPPAGTAPTPGTSSAQDLPSSPIYASVSPANPSSKRPLDAHLALVNQHPIGPFPRVQSPPHLKSPSAEATVAGGCLLPPSPSGHPDQTGTNQHFVMVEVHRPDSEPDVNEVRALPQTRTASTLSQLSDSGQTLSEDSGVDAGEAEASAPGRGRQSVSTKSRSSKELPRNERPTDGANKPPGLLEPTSTLVRVKKSAATLGIAIEGGANTRQPLPRIVTIQRGGSAHNCGQLKVGHVILEVNGLTLRGKEHREAARIIAEAFKTKDRDYIDFLVTEFNVML

SEQ ID NO: 14261 - protein, 556 aa, Homo sapiens
MHGSLEALLFLPQVTLSLAHAHLICSNAQLEMCVFPHRFLGDLTTEGINKPGFYKGPAGSQVTLSSLGNQTRVLLEEQARHLLNEQEHATMAYYLDEYRGGSVSVEALVMALFKLLNTHAKFSLLSEVRGTISPQDLERFDHLVLRREIESMKARQPPGPGAGDTYSMVSYSDTGSSTGSHGTSTTVSSARNTLDLEETGEAVQGNINALPDVSVDDVRSTSQGLSSFKPLPRPPPLAQGNDLPLGQPRKLGREDLQPPSSMPSCSGTVFSAPQNRSPPAGTAPTPGTSSAQDLPSSPIYASVSPANPSSKRPLDAHLALVNQHPIGPFPRVQSPPHLKSPSAEATVAGGCLLPPSPSGHPDQTGTNQHFVMVEVHRPDSEPDVNEVRALPQTRTASTLSQLSDSGQTLSEDSGVDAGEAEASAPGRGRQSVSTKSRSSKELPRNERPTDGANKPPGLLEPTSTLVRVKKSAATLGIAIEGGANTRQPLPRIVTIQRGGSAHNCGQLKVGHVILEVNGLTLRGKEHREAARIIAEAFKTKDRDYIDFLVTEFNVML

SEQ ID NO: 14262 - protein, 345 aa, Homo sapiens
MNAPLDGLSVSSSSTGSLGSAAGAGGGGGAGLRLLSANVRQLHQALTALLSEAEREQFTHCLNAYHARRNVFDLVRTLRVLLDSPVKRRLLPMLRLVIPRSDQLLFDQYTAEGLYLPATTPYRQPAWGGPDSAGPGEVRLVSLRRAKAHEGLGFSIRGGSEHGVGIYVSLVEPGSLAEKEGLRVGDQILRVNDKSLARVTHAEAVKALKGSKKLVLSVYSAGRIPGGYVTNHIYTWVDPQGRSISPPSGLPQPHGGALRQQEGDRRSTLHLLQGGDEKKVSGVGKGGQPLRHRILPPNPEQQSCLEAARRGWFCPGSVFPQVCTEGWCFFFAFLFDLCSVCYNTG

SEQ ID NO: 14263 - protein, 907 aa, Homo sapiens
MNAPLDGLSVSSSSTGSLGSAAGAGGGGGAGLRLLSANVRQLHQALTALLSEAEREQFTHCLNAYHARRNVFDLVRTLRVLLDSPVKRRLLPMLRLVIPRSDQLLFDQYTAEGLYLPATTPYRQPAWGGPDSAGPGEVRLVSLRRAKAHEGLGFSIRGGSEHGVGIYVSLVEPGSLAEKEGLRVGDQILRVNDKSLARVTHAEAVKALKGSKKLVLSVYSAGRIPGGYVTNHIYTWVDPQGRSISPPSGLPQPHGGALRQQEGDRRSTLHLLQGGDEKKVNLVLGDGRSLGLTIRGGAEYGLGIYITGVDPGSEAEGSGLKVGDQILEVNGRSFLNILHDEAVRLLKSSRHLILTVKDVGRLPHARTTVDETKWIASSRIRETMANSAGFLGDLTTEGINKPGFYKGPAGSQVTLSSLGNQTRVLLEEQARHLLNEQEHATMAYYLDEYRGGSVSVEALVMALFKLLNTHAKFSLLSEVRGTISPQDLERFDHLVLRREIESMKARQPPGPGAGDTYSMVSYSDTGSSTGSHGTSTTVSSARNTLDLEETGEAVQGNINALPDVSVDDVRSTSQGLSSFKPLPRPPPLAQGNDLPLGQPRKLGREDLQPPSSMPSCSGTVFSAPQNRSPPAGTAPTPGTSSAQDLPSSPIYASVSPANPSSKRPLDAHLALVNQHPIGPFPRVQSPPHLKSPSAEATVAGGCLLPPSPSGHPDQTGTNQHFVMVEVHRPDSEPDVNEVRALPQTRTASTLSQLSDSGQTLSEDSGVDAGEAEASAPGRGRQSVSTKSRSSKELPRNERPTDGANKPPGLLEPTSTLVRVKKSAATLGIAIEGGANTRQPLPRIVTIQRGGSAHNCGQLKVGHVILEVNGLTLRGKEHREAARIIAEAFKTKDRDYIDFLVTEFNVML

SEQ ID NO: 14264 - protein, 128 aa, Homo sapiens
GVNCDKANCSTTCFNGGTCFYPGKCICPPGLEGEQCEISKCPQPCRNGGKCIGKSKSVCEPGCGAHGTCHEPNKCQCQEGWHGRHCNKRYEASLIHALRPAGAQLRQHTPSLKKAEERRDPPESNYIW

SEQ ID NO: 14265 - protein, 133 aa, Homo sapiens
MAPFTHDFRKAQQRMPAIPVNIHSMNFTWQAAGQAEYFYEFLSLRSLDKGIMADPTVNVPLLGTVPHKASVVQVGFPCLGKQDGVAAFEVDVIVMNSEGNTILQTPQNAIFFKTCQQAECPGGCRNGGFCNER

SEQ ID NO: 14266 - protein, 379 aa, Homo sapiens
MARRSAFPAAALWLWSILLCLLALRAEAGPPQEESLYLWIDAHQARVLIGFEEDILIVSEGKMAPFTHDFRKAQQRMPAIPVNIHSMNFTWQAAGQAEYFYEFLSLRSLDKGIMADPTVNVPLLGTVPHKASVVQVGFPCLGKQDGVAAFEVDVIVMNSEGNTILQTPQNAIFFKTCQQAECPGGCRNGGFCNERRICECPDGFHGPHCEKALCTPRCMNGGLCVTPGFCICPPGFYGVNCDKANCSTTCFNGGTCFYPGKCICPPGLEGEQCEISKCPQPCRNGGKCIGKSKCKCSKGYQGDLCSKPVCEPGCGAHGTCHEPNKCQCQEGWHGRHCNKRYEASLIHALRPAGAQLRQHTPSLKKAEERRDPPESNYIW

SEQ ID NO: 14267 - protein, 122 aa, Homo sapiens
MRWFLPWTLAAVTAAAASTVLATAGKKCLAVYQPEASMNFTLAGCISTRSYQPKYCGVCMDNRCCIPYKSKTIDVSFQCPDGLGFSRQVLWINACFCNLSCRNPNDIFADLESYPDFSEIAN

SEQ ID NO: 14268 - protein, 280 aa, Homo sapiens
MRWFLPWTLAAVTAAAASTVLATALSPAPTTMDFTPAPLEDTSSRPQFCKWPCECPPSPPRCPLGVSLITDGCECCKMCAQQLGDNCTEAAICDPHRGLYCDYSGDRPRYAIGVCAHAVGEVEAWHRNCIAYTSPWSPCSTSCGLGVSTRISNVNAQCWPEQESRLCNLRPCDVDIHTLIKAGKKCLAVYQPEASMNFTLAGCISTRSYQPKYCGVCMDNRCCIPYKSKTIDVSFQCPDGLGFSRQVLWINACFCNLSCRNPNDIFADLESYPDFSEIAN

SEQ ID NO: 14269 - protein, 367 aa, Homo sapiens
MRWFLPWTLAAVTAAAASTVLATALSPAPTTMDFTPAPLEDTSSRPQFCKWPCECPPSPPRCPLGVSLITDGCECCKMCAQQLGDNCTEAAICDPHRGLYCDYSGDRPRYAIGVCAQVVGVGCVLDGVRYNNGQSFQPNCKYNCTCIDGAVGCTPLCLRVRPPRLWCPHPRRVSIPGHCCEQWVCEDDAKRPRKTAPRDTGAFDAVGEVEAWHRNCIAYTSPWSPCSTSCGLGVSTRISNVNAQCWPEQESRLCNLRPCDVDIHTLIKAGKKCLAVYQPEASMNFTLAGCISTRSYQPKYCGVCMDNRCCIPYKSKTIDVSFQCPDGLGFSRQVLWINACFCNLSCRNPNDIFADLESYPDFSEIAN

SEQ ID NO: 14270 - protein, 155 aa, Homo sapiens
MRWFLPWTLAAVTAAAASTVLATALSPAPTTMDFTPAPLEDTSSRPQFCKWPCECPPSPPRCPLGVSLITDGCECCKMCAQQLGDNCTEAAICDPHRGLYCDYSGDRPRYAIGVCARREEVSGCVPARGIHELHTCGLHQHTLLSTQVLWSLHGQ

SEQ ID NO: 14271 - protein, 36 aa, Homo sapiens
MRWFLPWTLAAVTAAAASTVLATMLWVRWRHGTGTA

SEQ ID NO: 14272 - protein, 218 aa, Homo sapiens
MRGTPKTHLLAFSLLCLLSKVRTQLCPTPCTCPWPPPRCPLGVPLVLDGCGCCRVCARRLGEPCDQLHVCDASQGLVCQPGAGPGGRGALCLCKQDPSFLALSLPCPLVSPAQNGARPGDPARPPVGWAWPPGCPTRTASADWRPSAACACPGPAHPPGVAVHKTVPSRAGLGMGTRCPPSPAGGPVPGPWADGRWSVPRPLAAGNTLAWVHHAEHQY

SEQ ID NO: 14273 - protein, 250 aa, Homo sapiens
MRGTPKTHLLAFSLLCLLSKVRTQLCPTPCTCPWPPPRCPLGVPLVLDGCGCCRVCARRLGEPCDQLHVCDASQGLVCQPGAGPGGRGALCLLAEDDSSCEVNGRLYREGETFQPHCSIRCRCEDGGFTCVPLCSEDVRLPSWDCPHPRRVEVLGKCCPEWVCGQGGGLGTQPLPAQGPQFSGLVSSLPPGVPCPEWSTAWGPCSTTCGLGMATRVSNQNRFCRLETQRRLCLSRPCPPSRGRSPQNSAF

SEQ ID NO: 14274 - protein, 250 aa, Homo sapiens; identical to SEQ ID NO: 14273

SEQ ID NO: 14275 - protein, 321 aa, Homo sapiens [sequence omitted]

SEQ ID NO: 14276 - protein, 130 aa, Homo sapiens
MGISNRVTNENSNCEMRKEKRLCYIQPCDSNILKTIKIPKGKTCQPTFQLSKAEKFVFSGCSSTQSYKPTFCGICLDKRCCIPNKSKMITIQFDCPNEGSFKWKMLWITSCVCQRNCREPGDIFSELKIL

SEQ ID NO: 14277 - protein, 372 aa, Homo sapiens
MNKRRLLYPSGWLHGPSDMQGLLFSTLLLAGLAQFCCRVQGTGPLDTTPEGRPGEVSDAPQRKQFCHWPCKCPQQKPRCPPGVSLVRDGCGCCKICAKQPGEICNEADLCDPHKGLYCDYSVDRPRYETGVCAYLVAVGCEFNQVHYHNGQVFQPNPLFSCLCVSGAIGCTPLFIPKLAGSHCSGAKGGKKSDQSNCSLEPLLQQLSTSYKTMPAYRNLPLIWKKKCLVQATKWTPCSRTCGMGISNRVTNENSNCEMRKEKRLCYIQPCDSNILKTIKIPKGKTCQPTFQLSKAEKFVFSGCSSTQSYKPTFCGICLDKRCCIPNKSKMITIQFDCPNEGSFKWKMLWITSCVCQRNCREPGDIFSELKIL

SEQ ID NO: 14278 - protein, 237 aa, Homo sapiens
MNKRRLLYPSGWLHGPSDMQGLLFSTLLLAGLAQFCCRVQGTGPLDTTPEGRPGEVSDAPQRKQFCHWPCKCPQQKPRCPPGVSLVRDGCGCCKICAKQPGEICNEADLCDPHKGLYCDYSVDRPRYETGVCAYLVAVGCEFNQVHYHNGQVFQPNPLFSCLCVSGAIGCTPLFIPKLAGSHCSGAKGGKKSDQSNCSLEPLLQQLSTSYKTMPDVCQASNLLPALRSLNCCLPSSL

SEQ ID NO: 14279 - protein, 354 aa, Homo sapiens
MQGLLFSTLLLAGLAQFCCRVQGTGPLDTTPEGRPGEVSDAPQRKQFCHWPCKCPQQKPRCPPGVSLVRDGCGCCKICAKQPGEICNEADLCDPHKGLYCDYSVDRPRYETGVCAYLVAVGCEFNQVHYHNGQVFQPNPLFSCLCVSGAIGCTPLFIPKLAGSHCSGAKGGKKSDQSNCSLEPLLQQLSTSYKTMPAYRNLPLIWKKKCLVQATKWTPCSRTCGMGISNRVTNENSNCEMRKEKRLCYIQPCDSNILKTIKIPKGKTCQPTFQLSKAEKFVFSGCSSTQSYKPTFCGICLDKRCCIPNKSKMITIQFDCPNEGSFKWKMLWITSCVCQRNCREPGDIFSELKIL

SEQ ID NO: 14280 - protein, 354 aa, Homo sapiens; identical to SEQ ID NO: 14279

SEQ ID NO: 14281 - protein, 354 aa, Homo sapiens; identical to SEQ ID NO: 14279

SEQ ID NO: 14282 - protein, 219 aa, Homo sapiens
MQGLLFSTLLLAGLAQFCCRVQGTGPLDTTPEGRPGEVSDAPQRKQFCHWPCKCPQQKPRCPPGVSLVRDGCGCCKICAKQPGEICNEADLCDPHKGLYCDYSVDRPRYETGVCAYLVAVGCEFNQVHYHNGQVFQPNPLFSCLCVSGAIGCTPLFIPKLAGSHCSGAKGGKKSDQSNCSLEPLLQQLSTSYKTMPDVCQASNLLPALRSLNCCLPSSL

SEQ ID NO: 14283 - protein, 2382 aa, Homo sapiens
MSGGAAEKQSSTPGSLFLSPPAPAPKNGSSSDSSVGEKLGAAAADAVTGRTEEYRRRRHTMDKDSRGAAATTTTTEHRFFRRSVICDSNATALELPGLPLSLPQPSIPAAVPQSAPPEPHREETVTATATSQVAQQPPAAAAPGEQAVAGPAPSTVPSSTSKDRPVSQPSLVGSKEEPPPARSGSGGGSAKEPQEERSQQQDDIEELETKAVGMSNDGRFLKFDIEIGRGSFKTVYKGLDTETTVEVAWCELQDRKLTKSERQRFKEEAEMLKGLQHPNIVRFYDSWESTVKGKKCIVLVTELMTSGTLKTYLKRFKVMKIKVLRSWCRQILKGLQFLHTRTPPIIHRDLKCDNIFITGPTGSVKIGDLGLATLKRASFAKSVIGTPEFMAPEMYEEKYDESVDVYAFGMCMLEMATSEYPYSECQNAAQIYRRVTSGVKPASFDKVAIPEVKEIIEGCIRQNKDERYSIKDLLNHAFFQEETGVRVELAEEDDGEKIAIKLWLRIEDIKKLKGKYKDNEAIEFSFDLERDVPEDVAQEMVESGYVCEGDHKTMAKAIKDRVSLIKRKREQRQLVREEQEKKKQEESSLKQQVEQSSASQTGIKQLPSASTGIPTASTTSASVSTQVEPEEPEADQHQQLQYQQPSISVLSDGTVDSGQGSSVFTESRVSSQQTVSYGSQHEQAHSTGTVPGHIPSTVQAQSQPHGVYPPSSVAQGQSQGQPSSSSLTGVSSSQPIQHPQQQQGIQQTAPPQQTVQYSLSQTSTSSEATTAQPVSQPQAPQVLPQVSAGKQLPVSQPVPTIQGEPQIPVATQPSVVPVHSGAHFLPVGQPLPTPLLPQYPVSQIPISTPHVSTAQTGFSSLPITMAAGITQPLLTLASSATTAAIPGVSTVVPSQLPTLLQPVTQLPSQVHPQLLQPAVQSMGIPANLGQAAEVPLSSGDVLYQGFPPRLPPQYPGDSNIAPSSNVASVCIHSTVLSPPMPTEVLATPGYFPTVVQPYVESNLLVPMGGVGGQVQVSQPGGSLAQAPTTSSQQAVLESTQGVSQVAPAEPVAVAQTQATQPTTLASSVDSAHSDVASGMSDGNENVPSSSGRHEGRTTKRHYRKSVRSRSRHEKTSRPKLRILNVSNKGDRVVECQLETHNRKMVTFKFDLDGDNPEEIATIMVNNDFILAIERESFVDQVREIIEKADEMLSEDVSVEPEGDQGLESLQGKDDYGFSGSQKLEGEFKQPIPASSMPQQIGIPTSSLTQVVHSAGRRFIVSPVPESRLRESKVFPSEITDTVAASTAQSPGMNLSHSASSLSLQQAFSELRRAQMTEGPNTAPPNFSHTGPTFPVVPPFLSSIAGVPTTAAATAPVPATSSPPNDISTSVIQSEVTVPTEEGIAGVATSTGVVTSGGLPIPPVSESPVLSSVVSSITIPAVVSISTTSPSLQVPTSTSEIVVSSTALYPSVTVSATSASAGGSTATPGPKPPAVVSQQAAGSTTVGATLTSVSTTTSFPSTASQLCIQLSSSTSTPTLAETVVVSAHSLDKTSHSSTTGLAFSLSAPSSSSSPGAGVSSYISQPGGLHPLVIPSVIASTPILPQAAGPTSTPLLPQVPSIPPLVQPVANVPAVQQTLIHSQPQPALLPNQPHTHCPEVDSDTQPKAPGIDDIKTLEEKLRSLFSEHSSSGAQHASVSLETSLVIESTVTPGIPTTAVAPSKLLTSTTSTCLPPTNLPLGTVALPVTPVVTPGQVSTPVSTTTSGVKPGTAPSKPPLTKAPVLPVGTELPAGTLPSEQLPPFPGPSLTQSQQPLEDLDAQLRRTLSPEMITVTSAVGPVSMAAPTAITEAGTQPQKGVSQVKEGPVLATSSGAGVFKMGRFQVSVAADGAQKEGKNKSEDAKSVHFESSTSESSVLSSSSPESTLVKPEPNGITIPGISSDVPESAHKTTASEAKSDTGQPTKVGRFQVTTTANKVGRFSVSKTEDKITDTKKEGPVASPPFMDLEQAVLPAVIPKKEKPELSEPSHLNGPSSDPEAAFLSRDVDDGSGSPHSPHQLSSKSLPSQNLSQSLSNSFNSSYMSSDNESDIEDEDLKLELRRLRDKHLKEIQDLQSRQKHEIESLYTKLGKVPPAVIIPPAAPLSGRRRRPTKSKGSKSSRSSSLGNKSPQLSGNLSGQSAASVLHPQQTLHPPGNIPESGQNQLLQPLKPSPSSDNLYSAFTSDGAISVPSLSAPGQGTSSTNTVGATVNSQAAQAQPPAMTSSRKGTFTDDLHKLVDNWARDAMNLSGRRGSKGHMNYEGPGMARKFSAPGQLCISMTSNLGGSAPISAASATSLGHFTKSMCPPQQYGFPATPFGAQWSGTGGPAPQPLGQFQPVGTASLQNFNISNLQKSISNPPGSNLRTT

SEQ ID NO: 14284 - protein, 2634 aa, Homo sapiens
MSGGAAEKQSSTPGSLFLSPPAPAPKNGSSSDSSVGEKLGAAAADAVTGRTEEYRRRRHTMDKDSRGAAATTTTTEHRFFRRSVICDSNATALELPGLPLSLPQPSIPAAVPQSAPPEPHREETVTATATSQVAQQPPAAAAPGEQAVAGPAPSTVPSSTSKDRPVSQPSLVGSKEEPPPARSGSGGGSAKEPQEERSQQQDDIEELETKAVGMSNDGRFLKFDIEIGRGSFKTVYKGLDTETTVEVAWCELQDRKLTKSERQRFKEEAEMLKGLQHPNIVRFYDSWESTVKGKKCIVLVTELMTSGTLKTYLKRFKVMKIKVLRSWCRQILKGLQFLHTRTPPIIHRDLKCDNIFITGPTGSVKIGDLGLATLKRASFAKSVIGTPEFMAPEMYEEKYDESVDVYAFGMCMLEMATSEYPYSECQNAAQIYRRVTSGVKPASFDKVAIPEVKEIIEGCIRQNKDERYSIKDLLNHAFFQEETGVRVELAEEDDGEKIAIKLWLRIEDIKKLKGKYKDNEAIEFSFDLERDVPEDVAQEMVESGYVCEGDHKTMAKAIKDRVSLIKRKREQRQLVREEQEKKKQEESSLKQQVEQSSASQTGIKQLPSASTGIPTASTTSASVSTQVEPEEPEADQHQQLQYQQPSISVLSDGTVDSGQGSSVFTESRVSSQQTVSYGSQHEQAHSTGTVPGHIPSTVQAQSQPHGVYPPSSVPRRGRSMSVCVPIFLLLPLCPASLPVLFHPTASTVCTSFSFPPPDCPEETFAEKLSKALESVLPMHSASQRKHRRSSLPSLFVSTPQSMAHPCGGTPTYPESQIFFPTIHERPVSFSPPPTCPPKVAISQRRKSTSFLEAQTHHFQPLLRTVGQSLLPPGGSPTNWTPEAVVMLGTTASRVTGESCEIQVHPMFEPSQVYSDYRPGLVLPEEAHYFIPQEAVYVAGVHYQARVAEQYEGIPYNSSVLSSPMKQIPEQKPVQGGPTSSSVFEFPSGQAFLVGHLQNLRLDSGLGPGSPLSSISAPISTDATRLKFHPVFVPHSAPAVLTHNNESRSNCVFEFHVHTPSSSSGEGGGILPQRVYRNRQVAVDLNQEELPPQSVGLHGYLQPVTEEKHNYHAPELTVSVVEPIGQNWPIGSPEYSSDSSQITSSDPSDFQSPPPTGGAAAPFGSDVSMPFIHLPQTVLQESPLFFCFPQGTTSQQVLTASFSSGGSALHPQAQGQSQGQPSSSSLTGVSSSQPIQHPQQQQGIQQTAPPQQTVQYSLSQTSTSSEATTAQPVSQPQAPQVLPQVSAGKQSTQGVSQVAPAEPVAVAQTQATQPTTLASSVDSAHSDVASGMSDGNENVPSSSGRHEGRTTKRHYRKSVRSRSRHEKTSRPKLRILNVSNKGDRVVECQLETHNRKMVTFKFDLDGDNPEEIATIMVNNDFILAIERESFVDQVREIIEKADEMLSEDVSVEPEGDQGLESLQGKDDYGFSGSQKLEGEFKQPIPASSMPQQIGIPTSSLTQVVHSAGRRFIVSPVPESRLRESKVFPSEITDTVAASTAQSPGMNLSHSASSLSLQQAFSELRRAQMTEGPNTAPPNFSHTGPTFPVVPPFLSSIAGVPTTAAATAPVPATSSPPNDISTSVIQSEVTVPTEEGIAGVATSTGVVTSGGLPIPPVSESPVLSSVVSSITIPAVVSISTTSPSLQVPTSTSEIVVSSTALYPSVTVSATSASAGGSTATPGPKPPAVVSQQAAGSTTVGATLTSVSTTTSFPSTASQLCIQLSSSTSTPTLAETVVVSAHSLDKTSHSSTTGLAFSLSAPSSSSSPGAGVSSYISQPGGLHPLVIPSVIASTPILPQAAGPTSTPLLPQVPSIPPLVQPVANVPAVQQTLIHSQPQPALLPNQPHTHCPEVDSDTQPKAPGIDDIKTLEEKLRSLFSEHSSSGAQHASVSLETSLVIESTVTPGIPTTAVAPSKLLTSTTSTCLPPTNLPLGTVALPVTPVVTPGQVSTPVSTTTSGVKPGTAPSKPPLTKAPVLPVGTELPAGTLPSEQLPPFPGPSLTQSQQPLEDLDAQLRRTLSPEMITVTSAVGPVSMAAPTAITEAGTQPQKGVSQVKEGPVLATSSGAGVFKMGRFQVSVAADGAQKEGKNKSEDAKSVHFESSTSESSVLSSSSPESTLVKPEPNGITIPGISSDVPESAHKTTASEAKSDTGQPTKVGRFQVTTTANKVGRFSVSKTEDKITDTKKEGPVASPPFMDLEQAVLPAVIPKKEKPELSEPSHLNGPSSDPEAAFLSRDVDDGSGSPHSPHQLSSKSLPSQNLSQSLSNSFNSSYMSSDNESDIEDEDLKLELRRLRDKHLKEIQDLQSRQKHEIESLYTKLGKVPPAVIIPPAAPLSGRRRRPTKSKGSKSSRSSSLGNKSPQLSGNLSGQSAASVLHPQQTLHPPGNIPESGQNQLLQPLKPSPSSDNLYSAFTSDGAISVPSLSAPGQGTSSTNTVGATVNSQAAQAQPPAMTSSRKGTFTDDLHKLVDNWARDAMNLSGRRGSKGHMNYEGPGMARKFSAPGQLCISMTSNLGGSAPISAASATSLGHFTKSMCPPQQYGFPATPFGAQWSGTGGPAPQPLGQFQPVGTASLQNFNISNLQKSISNPPGSNLRTT

SEQ ID NO: 14285 - protein, 393 aa, Homo sapiens
MSGGAAEKQSSTPGSLFLSPPAPAPKNGSSSDSSVGEKLGAAAADAVTGRTEEYRRRRHTMDKDSRGAAATTTTTEHRFFRRSVICDSNATALELPGLPLSLPQPSIPAAVPQSAPPEPHREETVTATATSQVAQQPPAAAAPGEQAVAGPAPSTVPSSTSKDRPVSQPSLVGSKEEPPPARSGSGGGSAKEPQEERSQQQDDIEELETKAVGMSNDGRFLKFDIEIGRGSFKTVYKGLDTETTVEVAWCELQDRKLTKSERQRFKEEAEMLKGLQHPNIVRFYDSWESTVKGKKCIVLVTELMTSGTLKTYLKRFKVMKIKVLRSWCRQILKGLQFLHTRTPPIIHRDLKCDNIFITGPTGSVKIGDLGLATLKRASFAKSVIGMFQVYLGA

SEQ ID NO: 14286 - protein, 2134 aa, Homo sapiens
MSGGAAEKQSSTPGSLFLSPPAPAPKNGSSSDSSVGEKLGAAAADAVTGRTEEYRRRRHTMDKDSRGAAATTTTTEHRFFRRSVICDSNATALELPGLPLSLPQPSIPAAVPQSAPPEPHREETVTATATSQVAQQPPAAAAPGEQAVAGPAPSTVPSSTSKDRPVSQPSLVGSKEEPPPARSGSGGGSAKEPQEERSQQQDDIEELETKAVGMSNDGRFLKFDIEIGRGSFKTVYKGLDTETTVEVAWCELQDRKLTKSERQRFKEEAEMLKGLQHPNIVRFYDSWESTVKGKKCIVLVTELMTSGTLKTYLKRFKVMKIKVLRSWCRQILKGLQFLHTRTPPIIHRDLKCDNIFITGPTGSVKIGDLGLATLKRASFAKSVIGTPEFMAPEMYEEKYDESVDVYAFGMCMLEMATSEYPYSECQNAAQIYRRVTSGVKPASFDKVAIPEVKEIIEGCIRQNKDERYSIKDLLNHAFFQEETGVRVELAEEDDGEKIAIKLWLRIEDIKKLKGKYKDNEAIEFSFDLERDVPEDVAQEMVESGYVCEGDHKTMAKAIKDRVSLIKRKREQRQLVREEQEKKKQEESSLKQQVEQSSASQTGIKQLPSASTGIPTASTTSASVSTQVEPEEPEADQHQQLQYQQPSISVLSDGTVDSGQGSSVFTESRVSSQQTVSYGSQHEQAHSTGTVPGHIPSTVQAQSQPHGVYPPSSVAQGQSQGQPSSSSLTGVSSSQPIQHPQQQGIQQTAPPQQTVQYSLSQTSTSSEATTAQPVSQPQAPQVLPQVSAGKQSTQGVSQVAPAEPVAVAQTQATQPTTLASSVDSAHSDVASGMSDGNENVPSSSGRHEGRTTKRHYRKSVRSRSRHEKTSRPKLRILNVSNKGDRVVECQLETHNRKMVTFKFDLDGDNPEEIATIMVNNDFILAIERESFVDQVREIIEKADEMLSEDVSVEPEGDQGLESLQGKDDYGFSGSQKLEGEFKQPIPASSMPQQIGIPTSSLTQVVHSAGRRFIVSPVPESRLRESKVFPSEITDTVAASTAQSPGMNLSHSASSLSLQQAFSELRRAQMTEGPNTAPPNFSHTGPTFPVVPPFLSSIAGVPTTAAATAPVPATSSPPNDISTSVIQSEVTVPTEEGIAGVATSTGVVTSGGLPIPPVSESPVLSSVVSSITIPAVVSISTTSPSLQVPTSTSEIVVSSTALYPSVTVSATSASAGGSTATPGPKPPAVVSQQAAGSTTVGATLTSVSTTTSFPSTASQLCIQLSSSTSTPTLAETVVVSAHSLDKTSHSSTTGLAFSLSAPSSSSSPGAGVSSYISQPGGLHPLVIPSVIASTPILPQAAGPTSTPLLPQVPSIPPLVQPVANVPAVQQTLIHSQPQPALLPNQPHTHCPEVDSDTQPKAPGIDDIKTLEEKLRSLFSEHSSSGAQHASVSLETSLVIESTVTPGIPTTAVAPSKLLTSTTSTCLPPTNLPLGTVALPVTPVVTPGQVSTPVSTTTSGVKPGTAPSKPPLTKAPVLPVGTELPAGTLPSEQLPPFPGPSLTQSQQPLEDLDAQLRRTLSPEMITVTSAVGPVSMAAPTAITEAGTQPQKVSQVKEGPVLATSSGAGVFKMGRFQVSVAADGAQKEGKNKSEDAKSVHFESSTSESSVLSSSSPESTLVKPEPNGITIPGISSDVPESAHKTTASEAKSDTGQPTKVGRFQVTTTANKVGRFSVSKTEDKITDTKKEGPVASPPFMDLEQAVLPAVIPKKEKPELSEPSHLNGPSSDPEAAFLSRDVDDGSGSPHSPHQLSSKSLPSQNLSQSLSNSFNSSYMSSDNESDIEDEDLKLELRRLRDKHLKEIQDLQSRQKHEIESLYTKLGKVPPAVIIPPAAPLSGRRRRPTKSKGSKSSRSSSLGNKSPQLSGNLSGQSAASVLHPQQTLHPPGNIPESGQNQLLQPLKPSPSSDNLYSAFTSDGAISVPSLSAPGQGTSSTNTVGATVNSQAAQAQPPAMTSSRKGTFTDDLHKLVDNWARDAMNLSGRRGSKGHMNYEGPGMARKFSAPGQLCISMTSNLGGSAPISAASATSLGHFTKSMCPPQQYGFPATPFGAQWSGTGGPAPQPLGQFQPVGTASLQNFNISNLQKSISNPPGSNLRTT

SEQ ID NO: 14287 - protein, 2833 aa, Homo sapiens
MSGGAAEKQSSTPGSLFLSPPAPAPKNGSSSDSSVGEKLGAAAADAVTGRTEEYRRRRHTMDKDSRGAAATTTTTEHRFFRRSVICDSNATALELPGLPLSLPQPSIPAAVPQSAPPEPHREETVTATATSQVAQQPPAAAAPGEQAVAGPAPSTVPSSTSKDRPVSQPSLVGSKEEPPPARSGSGGGSAKEPQEERSQQQDDIEELETKAVGMSNDGRFLKFDIEIGRGSFKTVYKGLDTETTVEVAWCELQDRKLTKSERQRFKEEAEMLKGLQHPNIVRFYDSWESTVKGKKCIVLVTELMTSGTLKTYLKRFKVMKIKVLRSWCRQILKGLQFLHTRTPPIIHRDLKCDNIFITGPTGSVKIGDLGLATLKRASFAKSVIGTPEFMAPEMYEEKYDESVDVYAFGMCMLEMATSEYPYSECQNAAQIYRRVTSGVKPASFDKVAIPEVKEIIEGCIRQNKDERYSIKDLLNHAFFQEETGVRVELAEEDDGEKIAIKLWLRIEDIKKLKGKYKDNEAIEFSFDLERDVPEDVAQEMVESGYVCEGDHKTMAKAIKDRVSLIKRKREQRQLVREEQEKKKQEESSLKQQVEQSSASQTGIKQLPSASTGIPTASTTSASVSTQVEPEEPEADQHQQLQYQQPSISVLSDGTVDSGQGSSVFTESRVSSQQTVSYGSQHEQAHSTGTVPGHIPSTVQAQSQPHGVYPPSSVPQSMAHPCGGTPTYPESQIFFPTIHERPVSFSPPPTCPPKVAISQRRKSTSFLEAQTHHFQPLLRTVGQSLLPPGGSPTNWTPEAVVMLGTTASRVTGESCEIQVHPMFEPSQVYSDYRPGLVLPEEAHYFIPQEAVYVAGVHYQARVAEQYEGIPYNSSVLSSPMKQIPEQKPVQGGPTSSSVFEFPSGQAFLVGHLQNLRLDSGLGPGSPLSSISAPISTDATRLKFHPVFVPHSAPAVLTHNNESRSNCVFEFHVHTPSSSSGEGGGILPQRVYRNRQVAVDLNQEELPPQSVGLHGYLQPVTEEKHNYHAPELTVSVVEPIGQNWPIGSPEYSSDSSQITSSDPSDFQSPPPTGGAAAPFGSDVSMPFIHLPQTVLQESPLFFCFPQGTTSQQVLTASFSSGGSALHPQAQGQSQGQPSSSSLTGVSSSQPIQHPQQQQGIQQTAPPQQTVQYSLSQTSTSSEATTAQPVSQPQAPQVLPQVSAGKQLPVSQPVPTIQGEPQIPVATQPSVVPVHSGAHFLPVGQPLPTPLLPQYPVSQIPISTPHVSTAQTGFSSLPITMAAGITQPLLTLASSATTAAIPGVSTVVPSQLPTLLQPVTQLPSQVHPQLLQPAVQSMGIPANLGQAAEVPLSSGDVLYQGFPPRLPPQYPGDSNIAPSSNVASVCIHSTVLSPPMPTEVLATPGYFPTVVQPYVESNLLVPMGGVGGQVQVSQPGGSLAQAPTTSSQQAVLESTQGVSQVAPAEPVAVAQTQATQPTTLASSVDSAHSDVASGMSDGNENVPSSSGRHEGRTTKRHYRKSVRSRSRHEKTSRPKLRILNVSNKGDRVVECQLETHNRKMVTFKFDLDGDNPEEIATIMVNNDFILAIERESFVDQVREIIEKADEMLSEDVSVEPEGDQGLESLQGKDDYGFSGSQKLEGEFKQPIPASSMPQQIGIPTSSLTQVVHSAGRRFIVSPVPESRLRESKVFPSEITDTVAASTAQSPGMNLSHSASSLSLQQAFSELRRAQMTEGPNTAPPNFSHTGPTFPVVPPFLSSIAGVPTTAAATAPVPATSSPPNDISTSVIQSEVTVPTEEGIAGVATSTGVVTSGGLPIPPVSESPVLSSVVSSITIPAVVSISTTSPSLQVPTSTSEIVVSSTALYPSVTVSATSASAGGSTATPGPKPPAVVSQQAAGSTTVGATLTSVSTTTSFPSTASQLCIQLSSSTSTPTLAETVVVSAHSLDKTSHSSTTGLAFSLSAPSSSSSPGAGVSSYISQPGGLHPLVIPSVIASTPILPQAAGPTSTPLLPQVPSIPPLVQPVANVPAVQQTLIHSQPQPALLPNQPHTHCPEVDSDTQPKAPGIDDIKTLEEKLRSLFSEHSSSGAQHASVSLETSLVIESTVTPGIPTTAVAPSKLLTSTTSTCLPPTNLPLGTVALPVTPVVTPGQVSTPVSTTTSGVKPGTAPSKPPLTKAPVLPVGTELPAGTLPSEQLPPFPGPSLTQSQQPLEDLDAQLRRTLSPEMITVTSAVGPVSMAAPTAITEAGTQPQKGVSQVKEGPVLATSSGAGVFKMGRFQVSVAADGAQKEGKNKSEDAKSVHFESSTSESSVLSSSSPESTLVKPEPNGITIPGISSDVPESAHKTTASEAKSDTGQPTKVGRFQVTTTANKVGRFSVSKTEDKITDTKKEGPVASPPFMDLEQAVLPAVIPKKEKPELSEPSHLNGPSSDPEAAFLSRDVDDGSGSPHSPHQLSSKSLPSQNLSQSLSNSFNSSYMSSDNESDIEDEDLKLELRRLRDKHLKEIQDLQSRQKHEIESLYTKLGKVPPAVIIPPAAPLSGRRRRPTKSKGSKSSRSSSLGNKSPQLSGNLSGQSAASVLHPQQTLHPPGNIPESGQNQLLQPLKPSPSSDNLYSAFTSDGAISVPSLSAPGQGCAKFNCASEQVTFKPGGRRTRFLRKMVKKVCPCNQLCRTSSTNTVGATVNSQAAQAQPPAMTSSRKGTFTDDLHKLVDNWARDAMNLSGRRGSKGHMNYEGPGMARKFSAPGQLCISMTSNLGGSAPISAASATSLGHFTKSMCPPQQYGFPATPFGAQWSGTGGPAPQPLGQFQPVGTASLQNFNISNLQKSISNPPGSNLRTT

SEQ ID NO: 14288 - protein, 2642 aa, Homo sapiens
MSGGAAEKQSSTPGSLFLSPPAPAPKNGSSSDSSVGEKLGAAAADAVTGRTEEYRRRRHTMDKDSRGAAATTTTTEHRFFRRSVICDSNATALELPGLPLSLPQPSIPAAVPQSAPPEPHREETVTATATSQVAQQPPAAAAPGEQAVAGPAPSTVPSSTSKDRPVSQPSLVGSKEEPPPARSGSGGGSAKEPQEERSQQQDDIEELETKAVGMSNDGRFLKFDIEIGRGSFKTVYKGLDTETTVEVAWCELQDRKLTKSERQRFKEEAEMLKGLQHPNIVRFYDSWESTVKGKKCIVLVTELMTSGTLKTYLKRFKVMKIKVLRSWCRQILKGLQFLHTRTPPIIHRDLKCDNIFITGPTGSVKIGDLGLATLKRASFAKSVIGTPEFMAPEMYEEKYDESVDVYAFGMCMLEMATSEYPYSECQNAAQIYRRVTSGVKPASFDKVAIPEVKEIIEGCIRQNKDERYSIKDLLNHAFFQEETGVRVELAEEDDGEKIAIKLWLRIEDIKKLKGKYKDNEAIEFSFDLERDVPEDVAQEMVESGYVCEGDHKTMAKAIKDRVSLIKRKREQRQLVREEQEKKKQEESSLKQQVEQSSASQTGIKQLPSASTGIPTASTTSASVSTQVEPEEPEADQHQQLQYQQPSISVLSDGTVDSGQGSSVFTESRVSSQQTVSYGSQHEQAHSTGTVPGHIPSTVQAQSQPHGVYPPSSVPQSMAHPCGGTPTYPESQIFFPTIHERPVSFSPPPTCPPKVAISQRRKSTSFLEAQTHHFQPLLRTVGQSLLPPGGSPTNWTPEAVVMLGTTASRVTGESCEIQVHPMFEPSQVYSDYRPGLVLPEEAHYFIPQEAVYVAGVHYQARVAEQYEGIPYNSSVLSSPMKQIPEQKPVQGGPTSSSVFEFPSGQAFLVGHLQNLRLDSGLGPGSPLSSISAPISTDATRLKFHPVFVPHSAPAVLTHNNESRSNCVFEFHVHTPSSSSGEGGGILPQRVYRNRQVAVDLNQEELPPQSVGLHGYLQPVTEEKHNYHAPELTVSVVEPIGQNWPIGSPEYSSDSSQITSSDPSDFQSPPPTGGAAAPFGSDVSMPFIHLPQTVLQESPLFFCFPQGTTSQQVLTASFSSGGSALHPQAQGQSQGQPSSSSLTGVSSSQPIQHPQQQQGIQQTAPPQQTVQYSLSQTSTSSEATTAQPVSQPQAPQVLPQVSAGKQGFPPRLPPQYPGDSNIAPSSNVASVCIHSTVLSPPMPTEVLATPGYFPTVVQPYVESNLLVPMGGVGGQVQVSQPGGSLAQAPTTSSQQAVLESTQGVSQVAPAEPVAVAQTQATQPTTLASSVDSAHSDVASGMSDGNENVPSSSGRHEGRTTKRHYRKSVRSRSRHEKTSRPKLRILNVSNKGDRVVECQLETHNRKMVTFKFDLDGDNPEEIATIMVNNDFILAIERESFVDQVREIIEKADEMLSEDVSVEPEGDQGLESLQGKDDYGFSGSQKLEGEFKQPIPASSMPQQIGIPTSSLTQVVHSAGRRFIVSPVPESRLRESKVFPSEITDTVAASTAQSPGMNLSHSASSLSLQQAFSELRRAQMTEGPNTAPPNFSHTGPTFPVVPPFLSSIAGVPTTAAATAPVPATSSPPNDISTSVIQSEVTVPTEEGIAGVATSTGVVTSGGLPIPPVSESPVLSSVVSSITIPAVVSISTTSPSLQVPTSTSEIVVSSTALYPSVTVSATSASAGGSTATPGPKPPAVVSQQAAGSTTVGATLTSVSTTTSFPSTASQLCIQLSSSTSTPTLAETVVVSAHSLDKTSHSSTTGLAFSLSAPSSSSSPGAGVSSYISQPGGLHPLVIPSVIASTPILPQAAGPTSTPLLPQVPSIPPLVQPVANVPAVQQTLIHSQPQPALLPNQPHTHCPEVDSDTQPKAPGIDDIKTLEEKLRSLFSEHSSSGAQHASVSLETSLVIESTVTPGIPTTAVAPSKLLTSTTSTCLPPTNLPLGTVALPVTPVVTPGQVSTPVSTTTSGVKPGTAPSKPPLTKAPVLPVGTELPAGTLPSEQLPPFPGPSLTQSQQPLEDLDAQLRRTLSPEMITVTSAVGPVSMAAPTAITEAGTQPQKGVSQVKEGPVLATSSGAGVFKMGRFQVSVAADGAQKEGKNKSEDAKSVHFESSTSESSVLSSSSPESTLVKPEPNGITIPGISSDVPESAHKTTASEAKSDTGQPTKVGRFQVTTTANKVGRFSVSKTEDKITDTKKEGPVASPPFMDLEQAVLPAVIPKKEKPELSEPSHLNGPSSDPEAAFLSRDVDDGSGSPHSPHQLSSKSLPSQNLSQSLSNSFNSSYMSSDNESDIEDEDLKLELRRLRDKHLKEIQDLQSRQKHEIESLYTKLGKVPPAVIIPPAAPLSGRRRRPTKSKGSKSSRSSSLGNKSPQLSGNLSGQSAASVLHPQQTLHPPGNIPESGQNQLLQPLKPSPSSDNLYSAFTSDGAISVPSLSAPGQGTSSTNTVGATVNSQAAQAQPPAMTSSRKGTFTDDLHKLVDNWARDAMNLSGRRGSKGHMNYEGPGMARKFSAPGQLCISMTSNLGGSAPISAASATSLGHFTKSMCPPQQYGFPATPFGAQWSGTGGPAPQPLGQFQPVGTASLQNFNISNLQKSISNPPGSNLRTT

SEQ ID NO: 14289 - protein, 434 aa, Homo sapiens
MYELLVLFMLIQPQSMAHPCGGTPTYPESQIFFPTIHERPVSFSPPPTCPPKVAISQRRKSTSFLEAQTHHFQPLLRTVGQSLLPPGGSPTNWTPEAVVMLGTTASRVTGESCEIQVHPMFEPSQVYSDYRPGLVLPEEAHYFIPQEAVYVAGVHYQARVAEQYEGIPYNSSVLSSPMKQIPEQKPVQGGPTSSSVFEFPSGQAFLVGHLQNLRLDSGLGPGSPLSSISAPISTDATRLKFHPVFVPHSAPAVLTHNNESRSNCVFEFHVHTPSSSSGEGGGILPQRVYRNRQVAVDLNQEELPPQSVGLHGYLQPVTEEKHNYHAPELTVSVVEPIGQNWPIGSPEYSSDSSQITSSDPSDFQSPPPTGGAAAPFGSDVSMPFIHLPQTVLQESPLFFCFPQGTTSQQVLTASFSSGGSALHPQVIGKLPQLF

SEQ ID NO: 14290 - protein, 240 aa, Homo sapiens
PHSAPAVLTHNNESRSNCVFEFHVHTPSSSSGEGGGILPQRVYRNRQVAVDLNQEELPPQSVGLHGYLQPVTEEKHNYHAPELTVSVVEPIGQNWPIGSPEYSSDSSQITSSDPSDFQSPPPTGGAAAPFGSDVSMPFIHLPQTVLQESPLFFCFPQGTTSQQVLTASFSSGGSALHPQAQGQSQGQPSSSSLTGVSSSQPIQHPQQQQGIQQTAPPQQTVQYSLSQTSTSSEATTAQPV

SEQ ID NO: 14291 - protein, 67 aa, Homo sapiens
SDNLYSAFTSDGAISVPSLSAPGQGCAKFNCASEQVTFKPGGRRTRFLSTPCLALWKMVKKVCPCNQ

SEQ ID NO: 14292 - protein, 245 aa, Homo sapiens
SQPHGVYPPSSVQGIQQTAPPQQTVQYSLSQTSTSSEATTAQPVSQPQAPQVLPQVSAGKQLPVSQPVPTIQGEPQIPVATQPSVVPVHSGAHFLPVGQPLPTPLLPQYPVSQIPISTPHVSTAQTGFSSLPITMAAGITQPLLTLASSATTAAIPGVSTVVPSQLPTLLQPVTQLPSQVHPQLLQPAVQSMGIPANLGQAAEVPLSSGDVLYQGFPPRLPPQYPGDSNIAPSSNVASVCIHSTV

SEQ ID NO: 14293 - protein, 195 aa, Homo sapiens [sequence omitted]

SEQ ID NO: 14294 - protein, 218 aa, Homo sapiens
  VARIANT 1: note = misc_feature - Xaa can be any naturally occurring amino acid
XADGTVDSGQGSSVFTESRVSSQQTVSYGSQHEQAHSTGTVPGHIPSTVQAQSQPHGVYPPSSVQQGIQQTAPPQQTVQYSLSQTSTSSEATTAQPVSQPQAPQVLPQVSAGKQSTQGVSQVAPAEPVAVAQTQATQPTTLASSVDSAHSDVASGMSDGNENVPSSSGRHEGRTTKRHYRKSVRSRSRHEKTSRPKLRILNVSNKGDRVVECQLETHN

SEQ ID NO: 14295 - protein, 177 aa, Homo sapiens
  VARIANT 1: note = misc_feature - Xaa can be any naturally occurring amino acid
XEQAHSTGTVPGHIPSTVQAQSQPHGVYPPSSVAQGQSQGQPSSSSLTGVSSSQPIQHPQQQQGIQQTAPPQQTVQYSLSQTSTSSEATTAQPVSQPQAPQVLPQVSAGKQGFPPRLPPQYPGDSNIAPSSNVASVCIHSTVLSPPMPTEVLATPGYFPTVVQPYVESNLLVPMGGV

SEQ ID NO: 14296 - protein, 76 aa, Homo sapiens
  VARIANT 1: note = misc_feature - Xaa can be any naturally occurring amino acid
XSDNLYSAFTSDGAISVPSLSAPGQGKMVKKVCPCNQLCRTSSTNTVGATVNSQAAQAQPPAMTSSRKGTFTDDLH

SEQ ID NO: 14297 - protein, 370 aa, Homo sapiens
MGLWALLPGWVSATLLLALAALPAALAANSSGRWWGIVNVASSTNLLTDSKSLQLVLEPSLQLLSRKQRRLIRQNPGILHSVSGGLQSAVRECKWQFRNRRWNCPTAPGPHLFGKIVNRGCRETAFIFAITSAGVTHSVARSCSEGSIESCTCDYRRRGPGGPDWHWGGCSDNIDFGRLFGREFVDSGEKGRDLRFLMNLHNNEAGRTTVFSEMRQECKCHGMSGSCTVRTCWMRLPTLRAVGDVLRDRFDGASRVLYGNRGSNRASRAELLRLEPEDPAHKPPSPHDLVYFEKSPNFCTYSGRLGTAGTAGRACNSSSPALDGCELLCCGRGHRTRTQRVTERCNCTFHWCCHVSCRNCTHTRVLHECL

SEQ ID NO: 14298 - protein, 359 aa, Homo sapiens
MGLWALLPGWVSATLLLALAALPAALAANSSGRWWGIVNVASSTNLLTDSKSLQLVLEPSLQLLSRKQRRLIRQNPGILHSVSGGLQSAVRECKWQFRNRRWNCPTAPGPHLFGKIVNRGCRETAFIFAITSAGVTHSVARSCSEGSIESCTCDYRRRGPGGPDWHWGGCSDNIDFGRLFGREFVDSGEKGRDLRFLMNLHNNEAGRTTVFSEMRQECKCHGMSGSCTVRTCWMRLPTLRAVGDVLRDRFDGASRVLYGNRGSNRASRAELLRLEPDLVYFEKSPNFCTYSGRLGTAGTAGRACNSSSPALDGCELLCCGRGHRTRTQRVTERCNCTFHWCCHVSCRNCTHTRVLHECL

SEQ ID NO: 14299 - protein, 102 aa, Homo sapiens
MLEEPRPRPPPSGLAGLLFLALCSRALSNEILGLKLPGEPPLTANTVCLTLSGLSKRQLGLCLRNPDVTASALQGLHIAVHECQHQLRDQRWNCSALEGGGR

SEQ ID NO: 14300 - protein, 191 aa, Homo sapiens
MLEEPRPRPPPSGLAGLLFLALCSRALSNEILGLKLPGEPPLTANTVCLTLSGLSKRQLGLCLRNPDVTASALQGLHIAVHECQHQLRDQRWNCSALEGGGRLPHHSAILKRGFRESAFSFSMLAAGVMHAVATACSLGKLVSCGCGWKGSGEQDRLRAKLLQLQALSRGKLPGTSRHECESTTTGWGARW

SEQ ID NO: 14301 - protein, 389 aa, Homo sapiens
MLEEPRPRPPPSGLAGLLFLALCSRALSNEILGLKLPGEPPLTANTVCLTLSGLSKRQLGLCLRNPDVTASALQGLHIAVHECQHQLRDQRWNCSALEGGGRLPHHSAILKRGFRESAFSFSMLAAGVMHAVATACSLGKLVSCGCGWKGSGEQDRLRAKLLQLQALSRGKSFPHSLPSPGPGSSPSPGPQDTWEWGGCNHDMDFGEKFSRDFLDSREAPRDIQARMRIHNNRVGRQVVTENLKRKCKCHGTSGSCQFKTCWRAAPEFRAVGAALRERLGRAIFIDTHNRNSGAFQPRLRPRRLSGELVYFEKSPDFCERDPTMGSPGTRGRACNKTSRLLDGCGSLCCGRGHNVLRQTRVERCHCRFHWCCYVLCDECKVTEWVNVCK

SEQ ID NO: 14302 - protein, 173 aa, Homo sapiens
MLEEPRPRPPPSGLAGLLFLALCSRALSNEILGLKLPGEPPLTANTVCLTLSGLSKRQLGLCLRNPDVTASALQGLHIAVHECQHQLRDQRWNCSALEGGGRLPHHSAILKRGFRESAFSFSMLAAGVMHAVATACSLGKLVSCGCGWKGSGKLPGTSRHECESTTTGWGARW

SEQ ID NO: 14303 - protein, 132 aa, Homo sapiens
MLEEPRPRPPPSGLAGLLFLALCSRALSNEILGLKLPGEPPLTANTVCLTLSGLSKRQLGLCLRNPDVTASALQGLHIAVHECQHQLRDQRWNCSALEGGGRLPHHSAILKRGPGVGEGLDTQMVSEKVLFP

SEQ ID NO: 14304 - protein, 5 aa, Homo sapiens
MRARP

SEQ ID NO: 14305 - protein, 354 aa, Homo sapiens
MRARPQVCEALLFALALQTGVCYGIKWLALSKTPSALALNQTQHCKQLEGLVSAQVQLCRSNLELMHTVVHAAREVMKACRRAFADMRWNCSSIELAPNYLLDLERGTRESAFVYALSAAAISHAIARACTSGDLPGCSCGPVPGEPPGPGNRWGGCADNLSYGLLMGAKFSDAPMKVKKTGSQANKLMRLHNSEVGRQALRASLEMKCKCHGVSGSCSIRTCWKGLQELQDVAADLKTRYLSATKVVHRPMGTRKHLVPKDLDIRPVKDSELVYLQSSPDFCMKNEKVGSHGTQDRQCNKTSNGSDSCDLMCCGRGYNPYTDRVVERCHCKYHWCCYVTCRRCERTVERYVCK

SEQ ID NO: 14306 - protein, 262 aa, Homo sapiens
MRARPQVCEALLFALALQTGVCYGIKWLALSKTPSALALNQTQHCKQLEGLVSAQVQLCRSNLELMHTVVHAAREVMKACRRAFADMRWNCSSIELAPNYLLDLERGTRESAFVYALSAAAISHAIARACTSGDLQELQDVAADLKTRYLSATKVVHRPMGTRKHLVPKDLDIRPVKDSELVYLQSSPDFCMKNEKVGSHGTQDRQCNKTSNGSDSCDLMCCGRGYNPYTDRVVERCHCKYHWCCYVTCRRCERTVERYVCK

SEQ ID NO: 14307 - protein, 365 aa, Homo sapiens
MDRAALLGLARLCALWAALLVLFPYGAQGNWMWLGIASFGVPEKLGCANLPLNSRQKELCKRKPYLLPSIREGARLGIQECGSQFRHERWNCMITAAATTAPMGASPLFGYELSSGTKETAFIYAVMAAGLVHSVTRSCSAGNMTECSCDTTLQNGGSASEGWHWGGCSDDVQYGMWFSRKFLDFPIGNTTGKENKVLLAMNLHNNEAGRQAVAKLMSVDCRCHGVSGSCAVKTCWKTMSSFEKIGHLLKDKYENSIQISDKTKRKMRRREKDQRKIPIHKDDLLYVNKSPNYCVEDKKLGIPGTQGRECNRTSEGADGCNLLCCGRGYNTHVVRHVERCECKFIWCCYVRCRRCESMTDVHTCK

SEQ ID NO: 14308 - protein, 355 aa, Homo sapiens
MQLTTCLRETLFTGASQKTSLWWLGIASFGVPEKLGCANLPLNSRQKELCKRKPYLLPSIREGARLGIQECGSQFRHERWNCMITAAATTAPMGASPLFGYELSSGTKETAFIYAVMAAGLVHSVTRSCSAGNMTECSCDTTLQNGGSASEGWHWGGCSDDVQYGMWFSRKFLDFPIGNTTGKENKVLLAMNLHNNEAGRQAVAKLMSVDCRCHGVSGSCAVKTCWKTMSSFEKIGHLLKDKYENSIQISDKTKRKMRRREKDQRKIPIHKDDLLYVNKSPNYCVEDKKLGIPGTQGRECNRTSEGADGCNLLCCGRGYNTHVVRHVERCECKFIWCCYVRCRRCESMTDVHTCK

SEQ ID NO: 14309 - protein, 110 aa, Homo sapiens
MNAPLGGIWLWLPLLLTWLTPEVNSSWWYMRATGGSSRVMCDNVPGLVSSQRQLCHRHPDVMRAISQGVAEWTAECQHQFRQHRWNCNTLDRDHSLFGRVLLRRPVAKEK

SEQ ID NO: 14310 - protein, 153 aa, Homo sapiens
MNAPLGGIWLWLPLLLTWLTPEVNSSWWYMRATGGSSRVMCDNVPGLVSSQRQLCHRHPDVMRAISQGVAEWTAECQHQFRQHRWNCNTLDRDHSLFGRVLLRSCKAVLETRVQVPRGERLMYSQDMLAGHGRLQENGRLSLEEVQWGHPGGH

SEQ ID NO: 14311 - protein, 360 aa, Homo sapiens
MNAPLGGIWLWLPLLLTWLTPEVNSSWWYMRATGGSSRVMCDNVPGLVSSQRQLCHRHPDVMRAISQGVAEWTAECQHQFRQHRWNCNTLDRDHSLFGRVLLRSSRESAFVYAISSAGVVFAITRACSQGEVKSCSCDPKKMGSAKDSKGIFDWGGCSDNIDYGIKFARAFVDAKERKGKDARALMNLHNNRAGRKAVKRFLKQECKCHGVSGSCTLRTCWLAMADFRKTGDYLWRKYNGAIQVVMNQDGTGFTVANERFKKPTKNDLVYFENSPDYCIRDREAGSLGTAGRVCNLTSRGMDSCEVMCCGRGYDTSHVTRMTKCGCKFHWCCAVRCQDCLEALDVHTCKAPKNADWTTAT

SEQ ID NO: 14312 - protein, 355 aa, Homo sapiens
MEPHLLGLLLGLLLGGTRVLAGYPIWWSLALGQQYTSLGSQPLLCGSIPGLVPKQLRFCRNYIEIMPSVAEGVKLGIQECQHQFRGRRWNCTTIDDSLAIFGPVLDKATRESAFVHAIASAGVAFAVTRSCAEGTSTICGCDSHHKGPPGEGWKWGGCSEDADFGVLVSREFADARENRPDARSAMNKHNNEAGRTTILDHMHLKCKCHGLSGSCEVKTCWWAQPDFRAIGDFLKDKYDSASEMVVEKHRESRGWVETLRAKYSLFKPPTERDLVYYENSPNFCEPNPETGSFGTRDRTCNVTSHGIDGCDLLCCGRGHNTRTEKRKEKCHCIFHWCCYVSCQECIRIYDVHTCK

SEQ ID NO: 14313 - protein, 352 aa, Homo sapiens
MAPLGYFLLLCSLKQALGSYPIWWSLAVGPQYSSLGSQPILCASIPGLVPKQLRFCRNYVEIMPSVAEGIKIGIQECQHQFRGRRWNCTTVHDSLAIFGPVLDKATRESAFVHAIASAGVAFAVTRSCAEGTAAICGCSSRHQGSPGKGWKWGGCSEDIEFGGMVSREFADARENRPDARSAMNRHNNEAGRQAIASHMHLKCKCHGLSGSCEVKTCWWSQPDFRAIGDFLKDKYDSASEMVVEKHRESRGWVETLRPRYTYFKVPTERDLVYYEASPNFCEPNPETGSFGTRDRTCNVSSHGIDGCDLLCCGRGHNARAERRREKCRCVFHWCCYVSCQECTRVYDVHTCK

SEQ ID NO: 14314 - protein, 365 aa, Homo sapiens
MAGSAMSSKFFLVALAIFFSFAQVVIEANSWWSLGMNNPVQMSEVYIIGAQPLCSQLAGLSQGQKKLCHLYQDHMQYIGEGAKTGIKECQYQFRHRRWNCSTVDNTSVFGRVMQIGSRETAFTYAVSAAGVVNAMSRACREGELSTCGCSRAARPKDLPRDWLWGGCGDNIDYGYRFAKEFVDARERERIHAKGSYESARILMNLHNNEAGRRTVYNLADVACKCHGVSGSCSLKTCWLQLADFRKVGDALKEKYDSAAAMRLNSRGKLVQVNSRFNSPTTQDLVYIDPSPDYCVRNESTGSLGTQGRLCNKTSEGMDGCELMCCGRGYDQFKTVQTERCHCKFHWCCYVKCKKCTEIVDQFVCK

SEQ ID NO: 14315 - protein, 214 aa, Homo sapiens
MAGSAMSSKFFLVALAIFFSFAQVVIEANSWWSLGMNNPVQMSEVYIIGAQPLCSQLAGLSQGQKKLCHLYQDHMQYIGEGAKTGIKECQYQFRHRRWNCSTVDNTSVFGRVMQIGSRETAFTYAVSAAGVVNAMSRACREGELSTCGCSRAARPKDLPRDWLWGGCGDNIDYGYRFAKEFVDARERERIHAKGSYESARILMNLHNNEAGRRV

SEQ ID NO: 14316 - protein, 380 aa, Homo sapiens
MKKSIGILSPGVALGMAGSAMSSKFFLVALAIFFSFAQVVIEANSWWSLGMNNPVQMSEVYIIGAQPLCSQLAGLSQGQKKLCHLYQDHMQYIGEGAKTGIKECQYQFRHRRWNCSTVDNTSVFGRVMQIGSRETAFTYAVSAAGVVNAMSRACREGELSTCGCSRAARPKDLPRDWLWGGCGDNIDYGYRFAKEFVDARERERIHAKGSYESARILMNLHNNEAGRRTVYNLADVACKCHGVSGSCSLKTCWLQLADFRKVGDALKEKYDSAAAMRLNSRGKLVQVNSRFNSPTTQDLVYIDPSPDYCVRNESTGSLGTQGRLCNKTSEGMDGCELMCCGRGYDQFKTVQTERCHCKFHWCCYVKCKKCTEIVDQFVCK

SEQ ID NO: 14317 - protein, 380 aa, Homo sapiens; identical to SEQ ID NO: 14316

SEQ ID NO: 14318 - protein, 112 aa, Homo sapiens
MPSLLLLFTAALLSSWAQLLTDANSWWSLALNPVQRPEMFIIGAQPVCSQLPGLSPGQRKLCQLYQEHMAYIGEGAKTGIKECQHQFRQRRWNCSTADNASVFGRVMQIGCV

SEQ ID NO: 14319 - protein, 118 aa, Homo sapiens
MPSLLLLFTAALLSSWAQLLTDANSWWSLALNPVQRPEMFIIGAQPVCSQLPGLSPGQRKLCQLYQEHMAYIGEGAKTGIKECQHQFRQRRWNCSTADNASVFGRVMQIGSRETAFTH

SEQ ID NO: 14320 - protein, 157 aa, Homo sapiens
MPSLLLLFTAALLSSWAQLLTDANSWWSLALNPVQRPEMFIIGAQPVCSQLPGLSPGQRKLCQLYQEHMAYIGEGAKTGIKECQHQFRQRRWNCSTADNASVFGRVMQIGSRETAFTHAVSAAGVVNAISRACREGELSTCGCSRTARPKDLPRDWL

SEQ ID NO: 14321 - protein, 254 aa, Homo sapiens
MPSLLLLFTAALLSSWAQLLTDANSWWSLALNPVQRPEMFIIGAQPVCSQLPGLSPGQRKLCQLYQEHMAYIGEGAKTGIKECQHQFRQRRWNCSTADNASVFGRVMQIGSRETAFTHAVSAAGVVNAISRACREGELSTCGCSRTARPKDLPRDWLWGGCGDNVEYGYRFAKEFVDAREREKNFAKGSEEQGRVLMNLQNNEAGRRAVYKMADVACKCHGVSGSCSLKTCWLQLAEFRKVGDRLKEKYDSAAA

SEQ ID NO: 14322 - protein, 359 aa, Homo sapiens
MPSLLLLFTAALLSSWAQLLTDANSWWSLALNPVQRPEMFIIGAQPVCSQLPGLSPGQRKLCQLYQEHMAYIGEGAKTGIKECQHQFRQRRWNCSTADNASVFGRVMQIGSRETAFTHAVSAAGVVNAISRACREGELSTCGCSRTARPKDLPRDWLWGGCGDNVEYGYRFAKEFVDAREREKNFAKGSEEQGRVLMNLQNNEAGRRAVYKMADVACKCHGVSGSCSLKTCWLQLAEFRKVGDRLKEKYDSAAAMRVTRKGRLELVNSRFTQPTPEDLVYVDPSPDYCLRNESTGSLGTQGRLCNKTSEGMDGCELMCCGRGYNQFKSVQVERCHCKFHWCCFVRCKKCTEIVDQYICK

SEQ ID NO: 14323 - protein, 359 aa, Homo sapiens; identical to SEQ ID NO: 14322

SEQ ID NO: 14324 - protein, 359 aa, Homo sapiens; identical to SEQ ID NO: 14322

SEQ ID NO: 14325 - protein, 365 aa, Homo sapiens
MLPPLPSRLGLLLLLLLCPAHVGGLWWAVGSPLVMDPTSICRKARRLAGRQAELCQAEPEVVAELARGARLGVRECQFQFRFRRWNCSSHSKAFGRILQQDIRETAFVFAITAAGASHAVTQACSMGELLQCGCQAPRGRAPPRPSGLPGTPGPPGPAGSPEGSAAWEWGGCGDDVDFGDEKSRLFMDARHKRGRGDIRALVQLHNNEAGRLAVRSHTRTECKCHGLSGSCALRTCWQKLPPFREVGARLLERFHGASRVMGTNDGKALLPAVRTLKPPGRADLLYAADSPDFCAPNRRTGSPGTRGRACNSSAPDLSGCDLLCCGRGHRQESVQLEENCLCRFHWCCVVQCHRCRVRKELSLCL

SEQ ID NO: 14326 - protein, 349 aa, Homo sapiens
MNRKARRCLGHLFLSLGMVYLRIGGFSSVVALGASIICNKIPGLAPRQRAICQSRPDAIIVIGEGSQMGLDECQFQFRNGRWNCSALGERTVFGKELKVGSREAAFTYAIIAAGVAHAITAACTQGNLSDCGCDKEKQGQYHRDEGWKWGGCSADIRYGIGFAKVFVDAREIKQNARTLMNLHNNEAGRKILEENMKLECKCHGVSGSCTTKTCWTTLPQFRELGYVLKDKYNEAVHVEPVRASRNKRPTFLKIKKPLSYRKPMDTDLVYIEKSPNYCEEDPVTGSVGTQGRACNKTAPQASGCDLMCCGRGYNTHQYARVWQCNCKFHWCCYVKCNTCSERTEMYTCK

SEQ ID NO: 14327 - protein, 57 aa, Homo sapiens
MGINECQYQFRFGRWNCSALGEKTVFGQELRVGSREAAFTYAITAAGVAHAVTAACS

SEQ ID NO: 14328 - protein, 205 aa, Homo sapiens
MHRNFRKWIFYVFLCFGVLYVKLGALSSVVALGANIICNKIPGLAPRQRAICQSRPDAIIVIGEGAQMGINECQYQFRFGRWNCSALGEKTVFGQELRVGSREAAFTYAITAAGVAHAVTAACSQGNLSNCGCDREKQGYYNQAEGWKWGGCSADVRYGIDFSRRFVDAREIKKNARRLMNLHNNEAGRKGLLGQPRVTSSPLFP

SEQ ID NO: 14329 - protein, 349 aa, Homo sapiens
MHRNFRKWIFYVFLCFGVLYVKLGALSSVVALGANIICNKIPGLAPRQRAICQSRPDAIIVIGEGAQMGINECQYQFRFGRWNCSALGEKTVFGQELRVGSREAAFTYAITAAGVAHAVTAACSQGNLSNCGCDREKQGYYNQAEGWKWGGCSADVRYGIDFSRRFVDAREIKKNARRLMNLHNNEAGRKVLEDRMQLECKCHGVSGSCTTKTCWTTLPKFREVGHLLKEKYNAAVQVEVVRASRLRQPTFLRIKQLRSYQKPMETDLVYIEKSPNYCEEDAATGSVGTQGRLCNRTSPGADGCDTMCCGRGYNTHQYTKVWQCNCKFHWCCFVKCNTCSERTEVFTCK

SEQ ID NO: 14330 - protein, 353 aa, Homo sapiens
MLLLSPRSALVSVYCPQIFLLLSSGSYLALSSVVALGANIICNKIPGLAPRQRAICQSRPDAIIVIGEGAQMGINECQYQFRFGRWNCSALGEKTVFGQELRVGSREAAFTYAITAAGVAHAVTAACSQGNLSNCGCDREKQGYYNQAEGWKWGGCSADVRYGIDFSRRFVDAREIKKNARRLMNLHNNEAGRKVLEDRMQLECKCHGVSGSCTTKTCWTTLPKFREVGHLLKEKYNAAVQVEVVRASRLRQPTFLRIKQLRSYQKPMETDLVYIEKSPNYCEEDAATGSVGTQGRLCNRTSPGADGCDTMCCGRGYNTHQYTKVWQCNCKFHWCCFVKCNTCSERTEVFTCK

SEQ ID NO: 14331 - protein, 333 aa, Homo sapiens
MSAPPFYRALSSVVALGANIICNKIPGLAPRQRAICQSRPDAIIVIGEGAQMGINECQYQFRFGRWNCSALGEKTVFGQELRVGSREAAFTYAITAAGVAHAVTAACSQGNLSNCGCDREKQGYYNQAEGWKWGGCSADVRYGIDFSRRFVDAREIKKNARRLMNLHNNEAGRKVLEDRMQLECKCHGVSGSCTTKTCWTTLPKFREVGHLLKEKYNAAVQVEVVRASRLRQPTFLRIKQLRSYQKPMETDLVYIEKSPNYCEEDAATGSVGTQGRLCNRTSPGADGCDTMCCGRGYNTHQYTKVWQCNCKFHWCCFVKCNTCSERTEVFTCK

SEQ ID NO: 14332 - protein, 355 aa, Homo sapiens
MGNLFMLWAALGICCAAFSASAWSVNNFLITGPKAYLTYTTSVALGAQSGIEECKFQFAWERWNCPENALQLSTHNRLRSATRETSFIHAISSAGVMYIITKNCSMGDFENCGCDGSNNGKTGGHGWIWGGCSDNVEFGERISKLFVDSLEKGKDARALMNLHNNRAGRLAVRATMKRTCKCHGISGSCSIQTCWLQLAEFREMGDYLKAKYDQALKIEMDKRQLRAGNSAEGHWVPAEAFLPSAEAELIFLEESPDYCTCNSSLGIYGTEGRECLQNSHNTSRWERRSCGRLCTECGLQVEERKTEVISSCNCKFQWCCTVKCDQCRHVVSKYYCARSPGSAQSLGRVWFGVYI

SEQ ID NO: 14333 - protein, 351 aa, Homo sapiens
MGNLFMLWAALGICCAAFSASAWSVNNFLITGPKAYLTYTTSVALGAQSGIEECKFQFAWERWNCPENALQLSTHNRLRSATRETSFIHAISSAGVMYIITKNCSMGDFENCGCDGSNNGKTGGHGWIWGGCSDNVEFGERISKLFVDSLEKGKDARALMNLHNNRAGRLAVRATMKRTCKCHGISGSCSIQTCWLQLAEFREMGDYLKAKYDQALKIEMDKRQLRAGNSAEGHWVPAEAFLPSAEAELIFLEESPDYCTCNSSLGIYGTEGRECLQNSHNTSRWERRSCGRLCTECGLQVEERKTEVISSCNCKFQWCCTVKCDQCRHVVSKYYCARSPGSAQSLGKGSA

SEQ ID NO: 14334 - protein, 369 aa, Homo sapiens
MLCCIQCLCLVSPFPTLTPCQGGPHCLIPIHLCLTFSLFGRSVNNFLITGPKAYLTYTTSVALGAQSGIEECKFQFAWERWNCPENALQLSTHNRLRSATRETSFIHAISSAGVMYIITKNCSMGDFENCGCDGSNNGKTGGHGWIWGGCSDNVEFGERISKLFVDSLEKGKDARALMNLHNNRAGRLAVRATMKRTCKCHGISGSCSIQTCWLQLAEFREMGDYLKAKYDQALKIEMDKRQLRAGNSAEGHWVPAEAFLPSAEAELIFLEESPDYCTCNSSLGIYGTEGRECLQNSHNTSRWERRSCGRLCTECGLQVEERKTEVISSCNCKFQWCCTVKCDQCRHVVSKYYCARSPGSAQSLGKGSA

SEQ ID NO: 14335 - protein, 360 aa, Homo sapiens
MLCCIQCLCLVSPFPTLTPCQGGPHCLIPIHLCLTFSLFGRSVNNFLITGPKAYLTYTTSVALGAQSGIEECKFQFAWERWNCPENALQLSTHNRLRSATRETSFIHAISSAGVMYIITKNCSMGDFENCGCDGSNNGKTGGHGWIWGGCSDNVEFGERISKLFVDSLEKGKDARALMNLHNNRAGRLAVRATMKRTCKCHGISGSCSIQTCWLQLAEFREMGDYLKAKYDQALKIEMDKRQLRAGNSAEGHWVPAEAFLPSAEAELIFLEESPDYCTCNSSLGIYGTEGRECLQNSHNTSRWERRSCGRLCTECGLQVEERKTEVISSCNCKFQWCCTVKCDQCRHVTMSNPAVLLGIR

SEQ ID NO: 14336 - protein, 351 aa, Homo sapiens
MFLSKPSVYICLFTCVLQLSHSWSVNNFLMTGPKAYLIYSSSVAAGAQSGIEECKYQFAWDRWNCPERALQLSSHGGLRSANRETAFVHAISSAGVMYTLTRNCSLGDFDNCGCDDSRNGQLGGQGWLWGGCSDNVGFGEAISKQFVDALETGQDARAAMNLHNNEAGRKAVKGTMKRTCKCHGVSGSCTTQTCWLQLPEFREVGAHLKEKYHAALKVDLLQGAGNSAAGRGAIADTFRSISTRELVHLEDSPDYCLENKTLGLLGTEGRECLRRGRALGRWERRSCRRLCGDCGLAVEERRAETVSSCNCKFHWCCAVRCEQCRRRVTKYFCSRAERPRGGAAHKPGRKP

SEQ ID NO: 14337 - protein, 365 aa, Homo sapiens
MLDGSPLARWLAAAFGLTLLLAALRPSAAYFGLTGSEPLTILPLTLEPEAAAQAHYKACDRLKLERKQRRMCRRDPGVAETLVEAVSMSALECQFQFRFERWNCTLEGRYRASLLKRGFKETAFLYAISSAGLTHALAKACSAGRMERCTCDEAPDLENREAWQWGGCGDNLKYSSKFVKEFLGRRSSKDLRARVDFHNNLVGVKVIKAGVETTCKCHGVSGSCTVRTCWRQLAPFHEVGKHLKHKYETALKVGSTTNEAAGEAGAISPPRGRASGAGGSDPLPRTPELVHLDDSPSFCLAGRFSPGTAGRRCHREKNCESICCGRGHNTQSRVVTRPCQCQVRWCCYVECRQCTQREEVYTCKG

SEQ ID NO: 14338 - protein, 133 aa, Homo sapiens
MKGRAVSFDPLACQGLNASPGSLTSPLRRIRSLTGREVLTPFPGLGTAAAPAQGGAHLKQCDLLKLSRRQKQLCRREPGLAETLRDAAHLGLLECQFQFRHERWNCSLEGRMGLLKRGFKETAFLYAVSSAAL

SEQ ID NO: 14339 - protein, 357 aa, Homo sapiens
MRPPPALALAGLCLLALPAAAASYFGLTGREVLTPFPGLGTAAAPAQGGAHLKQCDLLKLSRRQKQLCRREPGLAETLRDAAHLGLLECQFQFRHERWNCSLEGRMGLLKRGFKETAFLYAVSSAALTHTLARACSAGRMERCTCDDSPGLESRQAWQWGVCGDNLKYSTKFLSNFLGSKRGNKDLRARADAHNTHVGIKAVKSGLRTTCKCHGVSGSCAVRTCWKQLSPFRETGQVLKLRYDSAVKVSSATNEALGRLELWAPARQGSLTKGLAPRSGDLVYMEDSPSFCRPSKYSPGTAGRVCSREASCSSLCCGRGYDTQSRLVAFSCHCQVQWCCYVECQQCVQEELVYTCKH

SEQ ID NO: 14340 - protein, 329 aa, Homo sapiens
MRPPPALALAGLCLLALPAAAASYFGLTGREVLTPFPGLGTAAAPAQGGAHLKQCDLLKLSRRQKQLCRREPGLAETLRDAAHLGLLECQFQFRHERWNCSLEGRMGLLKRGFKETAFLYAVSSAALTHTLARACSAGRMERCTCDDSPGLESRQAWQWGVCGDNLKYSTKFLSNFLGSKRGNKDLRARADAHNTHVGIKAVKSGLRTTCKCHGVSGSCAVRTCWKQLSPFRETGQVLKLRYDSAVKVSSATNEALGRLELWAPARQGSLTKGLAPRSGDLVYMEDSPSFCRPSKYSPGTAGWSAVARSQLITTSTSRIQAILPSQLPE

SEQ ID NO: 14341 - protein, 78 aa, Homo sapiens
MASFPPRVNEKEIAPAAPFDKKCGRENWTVAFAPDGSYFAWSQGHRTVKLVPWSQCLQNFLLHGTKNVTNSSSLRLPR

SEQ ID NO: 14342 - protein, 213 aa, Homo sapiens
MASFPPRVNEKEIDGSYFAWSQGHRTVKLVPWSQCLQNFLLHGTKNVTNSSSLRLPRQNSDGGQKNKPREHIIDCGDIVWSLAFGSSVPEKQSRCVNIEWHRFRFGQDQLLLATGLNNGRIKIWDVYTGKLLLNLVDHTEVVRDLTFAPDGSLILVSASRDKTLRVWDLKDDGNMMKVLRGHQNWVYSCAFSPDSSMLCSVGASKAVVAAILV

SEQ ID NO: 14343 - protein, 143 aa, Homo sapiens
MASFPPRVNEKEIGKLLLNLVDHTEVVRDLTFAPDGSLILVSASRDKTLRVWDLKDDGNMMKVLRGHQNWVYSCAFSPDSSMLCSVGASKAVFLWNMDKYTMIRKLEGHHHDVVACDFSPDGALLATASYDTRVYIWDPHNGD

SEQ ID NO: 14344 - protein, 275 aa, Homo sapiens
MASFPPRVNEKEIGKLLLNLVDHTEVVRDLTFAPDGSLILVSASRDKTLRVWDLKDDGNMMKVLRGHQNWVYSCAFSPDSSMLCSVGASKAVFLWNMDKYTMIRKLEGHHHDVVACDFSPDGALLATASYDTRVYIWDPHNGDILMEFGHLFPPPTPIFAGGANDRWVRSVSFSHDGLHVASLADDKMVRFWRIDEDYPVQVAPLSNGLCCAFSTDGSVLAAGTHDGSVYFWATPRQVPSLQHLCRMSIRRVMPTQEVQELPIPSKLLEFLSYRI

SEQ ID NO: 14345 - protein, 98 aa, Homo sapiens
MASFPPRVNEKEIGKLLLNLVDHTEVVRDLTFAPDGSLILVSASRDKTLRVWDLKDDGNMMKVLRGHQNWVYSCAFSPDSSMLCSVGASKAVVAAILV

SEQ ID NO: 14346 - protein, 54 aa, Homo sapiens
MASFPPRVNEKEIGNMMKVLRGHQNWVYSCAFSPDSSMLCSVGASKAVVAAILV

SEQ ID NO: 14347 - protein, 207 aa, Homo sapiens
MASFPPRVNEKEIVFLFFLLVRLRTIGELLAPAAPFDKKCGRENWTVAFAPDGSYFAWSQGHRTVKLVPWSQCLQNFLLHGTKNVTNSSSLRLPRQNSDGGQKNKPREHIIDCGDIVWSLAFGSSVPEKQSRCVNIEWHRFRFGQDQLLLATGLNNGRIKIWDVYTGKLLLNLVDHTEVVRDLTFAPDGSLILVSASRDKTLRVWDL

SEQ ID NO: 14348 - protein, 421 aa, Homo sapiens
MASFPPRVNEKEIVRLRTIGELLAPAAPFDKKCGRENWTVAFAPDGSYFAWSQGHRTVKLVPWSQCLQNFLLHGTKNVTNSSSLRLPRQNSDGGQKNKPREHIIDCGDIVWSLAFGSSVPEKQSRCVNIEWHRFRFGQDQLLLATGLNNGRIKIWDVYTGKLLLNLVDHTEVVRDLTFAPDGSLILVSASRDKTLRVWDLKDDGNMMKVLRGHQNWVYSCAFSPDSSMLCSVGASKAVFLWNMDKYTMIRKLEGHHHDVVACDFSPDGALLATASYDTRVYIWDPHNGDILMEFGHLFPPPTPIFAGGANDRWVRSVSFSHDGLHVASLADDKMVRFWRIDEDYPVQVAPLSNGLCCAFSTDGSVLAAGTHDGSVYFWATPRQVPSLQHLCRMSIRRVMPTQEVQELPIPSKLLEFLSYRI

SEQ ID NO: 14349 - protein, 247 aa, Homo sapiens
MASFPPRVNEKEIVRLRTIGELLAPAAPFDKKCGRENWTVAFAPDGSYFAWSQGHRTVKLVPWSQCLQNFLLHGTKNVTNSSSLRLPRQNSDGGQKNKPREHIIDCGDIVWSLAFGSSVPEKQSRCVNIEWHRFRFGQDQLLLATGLNNGRIKIWDVYTGKLLLNLVDHTEVVRDLTFAPDGSLILVSASRDKTLRVWDLKDDGNMMKVLRGHQNWVYSCAFSPDSSMLCSVGASKAVRVKVLVHSL

SEQ ID NO: 14350 - protein, 74 aa, Homo sapiens
MASFPPRVNEKEIVRLRTIGELLAPAAPFDKKCGRENWTVAFAPDGSYFAWSQGHRTVKLVPWSQCLQNLKTPP

SEQ ID NO: 14351 - protein, 459 aa, Homo sapiens
MAEQGRCCDLAALGEQGGAPPWEKSLGTYIGCFSDDGHERTLKGAVFYDLRKMTVSHCQDACAERSYVYAGLEAGAECYCGNRLPAVSVGLEECNHECKGEKGSVCGAVDRLSVYRVDELQPGSRKRRTATYRGCFRLPENITHAFPSSLIQANVTVGTCSGFCSQKEFPLAILRGWECYCAYPTPRFNLRDAMDSSVCGQDPEAQRLAEYCEVYQTPVQDTRCTDRRFLPNKSKVFVALSSFPGAGNTWARHLIEHATGFYTGSYYFDGTLYNKGFKGEKDHWRSRRTICVKTHESGRREIEMFDSAILLIRNPYRSLVAEFNRKCAGHLGYAADRNWKSKEWPDFVNSYASWWSSHVLDWLKYGKRLLVVHYEELRRSLVPTLREMVAFLNVSVSEERLLCVENNKEGSFRRRGRRSHDPEPFTPEMKDLINGYIRTVDQALRDHNWTGLPREYVPR

SEQ ID NO: 14352 - protein, 45 aa, Homo sapiens
MAKPFFRLQKFLRRTQFLLFFLTAAYLMTGSLLLLQRVRVALPQG

SEQ ID NO: 14353 - protein, 87 aa, Homo sapiens
MAKPFFRLQKFLRRTQFLLFFLTAAYLMTGSLLLLQRVRVALPQGPRAPGPLQTLPVAAVALGVGLLDSRALHDPRVSPELLLGVDM

SEQ ID NO: 14354 - protein, 181 aa, Homo sapiens
MAKPFFRLQKFLRRTQFLLFFLTAAYLMTGSLLLLQRVRVALPQGPRAPGPLQTLPVAAVALGVGLLDSRALHDPRVSPELLLGVDMLQSPLTRPRPGPRWLRSRNSELRQLRRRWFHHFMSDSQGPPALGPEAARPAIHSRGTYIGCFSDDGHERTLKGAVFYDLRKMTVSHCQDACAER

SEQ ID NO: 14355 - protein, 575 aa, Homo sapiens
MAKPFFRLQKFLRRTQFLLFFLTAAYLMTGSLLLLQRVRVALPQGPRAPGPLQTLPVAAVALGVGLLDSRALHDPRVSPELLLGVDMLQSPLTRPRPGPRWLRSRNSELRQLRRRWFHHFMSDSQGPPALGPEAARPAIHSRGTYIGCFSDDGHERTLKGAVFYDLRKMTVSHCQDACAERSYVYAGLEAGAECYCGNRLPAVSVGLEECNHECKGEKGSVCGAVDRLSVYRVDELQPGSRKRRTATYRGCFRLPENITHAFPSSLIQANVTVGTCSGFCSQKEFPLAILRGWECYCAYPTPRFNLRDAMDSSVCGQDPEAQRLAEYCEVYQTPVQDTRCTDRRFLPNKSKVFVALSSFPGAGNTWARHLIEHATGFYTGSYYFDGTLYNKGFKGEKDHWRSRRTICVKTHESGRREIEMFDSAILLIRNPYRSLVAEFNRKCAGHLGYAADRNWKSKEWPDFVNSYASWWSSHVLDWLKYGKRLLVVHYEELRRSLVPTLREMVAFLNVSVSEERLLCVENNKEGSFRRRGRRSHDPEPFTPEMKDLINGYIRTVDQALRDHNWTGLPREYVPR

SEQ ID NO: 14356 - protein, 575 aa, Homo sapiens; identical to SEQ ID NO: 14355

SEQ ID NO: 14357 - protein, 575 aa, Homo sapiens; identical to SEQ ID NO: 14355

SEQ ID NO: 14358 - protein, 575 aa, Homo sapiens; identical to SEQ ID NO: 14355

SEQ ID NO: 14359 - protein, 26 aa, Homo sapiens
MTVSHCQDACAERSYVYAGLEAGAEC

SEQ ID NO: 14360 - protein, 136 aa, Homo sapiens
  VARIANT 1: note = misc_feature - Xaa can be any naturally occurring amino acid
XGSLLLLQRVRVALPQGPRAPGPLQTLPVAAVALGVGLLDSRALHDPRVSPELLLGVDMLQSPLTRPRPGPRWLRSRNSELRQLRRRWFHHFMSDSQGPPALGPEAARPAIHSRGPMSTPAWRPGRSVTAGTGCQR

SEQ ID NO: 14361 - protein, 565 aa, Homo sapiens
MAKLWFKFQRYFRRKPVRFFTFLALYLTAGSLVFLHSGFVGQPAVSGNQANPAAAGGPAEGAELSFLGDMHLGRGFRDTGEASSIARRYGPWFKGKDGNERAKLGDYGGAWSRALKGRVVREKEEERAKYIGCYLDDTQSRALRGVSFFDYKKMTIFRCQDNCAERGYLYGGLEFGAECYCGHKIQATNVSEAECDMECKGERGSVCGGANRLSVYRLQLAQESARRYGSAVFRGCFRRPDNLSLALPVTAAMLNMSVDKCVDFCTEKEYPLAALAGTACHCGFPTTRFPLHDREDEQLCAQKCSAEEFESCGTPSYFIVYQTQVQDNRCMDRRFLPGKSKQLIALASFPGAGNTWARHLIELATGFYTGSYYFDGSLYNKGFKGERDHWRSGRTICIKTHESGQKEIEAFDAAILLIRNPYKALMAEFNRKYGGHIGFAAHAHWKGKEWPEFVRNYAPWWATHTLDWLKFGKKVLVVHFEDLKQDLFVQLGRMVSLLGVAVREDRLLCVESQKDGNFKRSGLRKLEYDPYTADMQKTISAYIKMVDAALKGRNLTGVPDDYYPR

SEQ ID NO: 14362 - protein, 565 aa, Homo sapiens; identical to SEQ ID NO: 14361

SEQ ID NO: 14363 - protein, 585 aa, Homo sapiens
MAKLWFKFQRYFRRKPVRFFTFLALYLTAGSLVFLHSGFVGQPAVSGNQANPAAAGGPAEGAELSFLGDMHLGRGFRDTGEASSIARRYGPWFKGKDGNERAKLGDYGGAWSRALKGRVVREKEEERAKYIGCYLDDTQSRALRGVSFFDYKKMTIFRCQDNCAERGYLYGGLEFGAECYCGHKIQATNVSEAECDMECKGERGSVCGGANRLSVYRLQLAQESARRYGSAVFRGCFRRPDNLSLALPVTAAMLNMSVDKCVDFCTEKEYPLAALAGTACHCGFPTTRFPLHDREDEQLCAQKCSAEEFESCGTPSYFIVYQTQVQDNRCMDRRFLPGKSKQLIALASFPGAGNTWARHLIELATGFYTGSYYFDGSLYNKGFKGERDHWRSGRTICIKTHESGQKEIEAFDAAILLIRNPYKALMAEFNRKYGGHIGFAAHAHWKGKGAVPGSLQILFRSICTASVGEWPEFVRNYAPWWATHTLDWLKFGKKVLVVHFEDLKQDLFVQLGRMVSLLGVAVREDRLLCVESQKDGNFKRSGLRKLEYDPYTADMQKTISAYIKMVDAALKGRNLTGVPDDYYPR

SEQ ID NO: 14364 - protein, 124 aa, Homo sapiens
MTIFRCQDNCAERGYLYGGLEFGAECYCGHKIQATNVSEAECDMECKGERGSVCGGANRLSVYRLQLAQESARRYGSAVFRGCFRRPDNLSLALPVTAAMLNMSVDKCVDFCTEKEYPLAALAG

SEQ ID NO: 14365 - protein, 114 aa, Homo sapiens
MRLLILALLGICSLTAYIVEGVGSEVSDKRTCVSLTTQRLPVSRIKTYTITEGSLRAVIFITKRGLKVCADPQATWVRDVVRSMDRKSNTRNNMIQTKPTGTQQSTNTAVTLTG

SEQ ID NO: 14366 - protein, 114 aa, Homo sapiens
MRLLILALLGICSLTAYIVEGVGSEVSHRRTCVSLTTQRLPVSRIKTYTITEGSLRAVIFITKRGLKVCADPQATWVRDVVRSMDRKSNTRNNMIQTKPTGTQQSTNTAVTLTG

SEQ ID NO: 14367 - protein, 674 aa, Homo sapiens
MARAHWGCCPWLVLLCACAWGHTKPVDLGGQDVRNCSTNPPYLPVTVVNTTMSLTALRQQMQTQNLSAYIIPGTDAHMNEYIGQHDERRAWITGFTGSAGTAVVTMKKAAVWTDSRYWTQAERQMDCNWELHKEVGTTPIVTWLLTEIPAGGRVGFDPFLLSIDTWESYDLALQGSNRQLVSITTNLVDLVWGSERPPVPNQPIYALQEAFTGSTWQEKVSGVRSQMQKHQKVPTAVLLSALEETAWLFNLRASDIPYNPFFYSYTLLTDSSIRLFANKSRFSSETLSYLNSSCTGPMCVQIEDYSQVRDSIQAYSLGDVRIWIGTSYTMYGIYEMIPKEKLVTDTYSPVMMTKAVKNSKEQALLKASHVRDAVAVIRYLVWLEKNVPKGTVDEFSGAEIVDKFRGEEQFSSGPSFETISASGLNAALAHYSPTKELNRKLSSDEMYLLDSGGQYWDGTTDITRTVHWGTPSAFQKEAYTRVLIGNIDLSRLIFPAATSGRMVEAFARRALWDAGLNYGHGTGHGIGNFLCVHEWPVGFQSNNIAMAKGMFTSIEPGYYKDGEFGIRLEDVALVVEAKTKYPGSYLTFEVVSFVPYDRNLIDVSLLSPEHLQYLNRYYQTIREKVGPELQRRQLLEEFEWLQQHTEPLAARAPDTASWASVLVVSTLAILGWSV

SEQ ID NO: 14368 - protein, 183 aa, Homo sapiens
MARAHWGCCPWLVLLCACAWGHTKPVDLGGQDVRNCSTNPPYLPVTVVNTTMSLTALRQQMQTQNLSAYIIPGTDAHMNEYIGQHDERRAWITGFTGSAGTAVVTMKKAAVWTDSRYWTQAERQMDCNWELHKEVGTTPIVTWLLTEIPAGGRVGFDPFLLSIGMLFLQSLNLSMLTRVTQLP

SEQ ID NO: 14369 - protein, 393 aa, Homo sapiens
MGLLRGGLPCARAMARLGAVRSHYCALLLAAALAVCAFYYLGSGRETFSSATKRLKEARAGAPAAPSPPALELARGSVAPAPGAKAKSLEGGGAGPVDYHLLMMFTKAEHNAALQAKARVALRSLLRLAKFEAHEVLNLHFVSEEASREVAKGLLRELLPPAAGFKCKVIFHDVAVLTDKLFPIVEAMQKHFSAGLGTYYSDSIFFLSVAMHQIMPKEILQIIQLDLDLKFKTNIRELFEEFDSFLPGAIIGIAREMQPVYRHTFWQFRHENPQTRVGGPPPEGLPGFNSGVMLLNLEAMRQSPLYSRLLEPAQVQQLADKYHFRGHLGDQDFFTMIGMEHPKLFHVLDCTWNRQLCTWWRDHGYSDVFEAYFRCEGHVKIYHGNCNTPIPED

SEQ ID NO: 14370 - protein, 187 aa, Homo sapiens
MNGMSVLMKETLKSSVTPSPYEETGERQPSVNWAVSPHQTQNQWARWSWTSQPLELHTFWQFRHENPQTRVGGPPPEGLPGFNSGVMLLNLEAMRQSPLYSRLLEPAQVQQLADKYHFRGHLGDQDFFTMIGMEHPKLFHVLDCTWNRQLCTWWRDHGYSDVFEAYFRCEGHVKIYHGNCNTPIPED

SEQ ID NO: 14371 - protein, 84 aa, Homo sapiens
MVRCVPSAVIVCFLRPPQPGRTVIFHDVAVLTDKLFPIVEAMQKHFSAGLGTYYSDSIFFLSVAMHQIMPKECTPLVQGRTSCT

SEQ ID NO: 14372 - protein, 247 aa, Homo sapiens
MVRCVPSAVIVCFLRPPQPGRTVIFHDVAVLTDKLFPIVEAMQKHFSAGLGTYYSDSIFFLSVAMHQIMPKEILQIIQLDLDLKFKTNIRELFEEFDSFLPGAIIGIAREMQPVYRHTFWQFRHENPQTRVGGPPPEGLPGFNSGVMLLNLEAMRQSPLYSRLLEPAQVQQLADKYHFRGHLGDQDFFTMIGMEHPKLFHVLDCTWNRQLCTWWRDHGYSDVFEAYFRCEGHVKIYHGNCNTPIPED

SEQ ID NO: 14373 - protein, 190 aa, Homo sapiens
MWPPRCKDPGRQSAEILQIIQLDLDLKFKTNIRELFEEFDSFLPGAIIGIAREMQPVYRHTFWQFRHENPQTRVGGPPPEGLPGFNSGVMLLNLEAMRQSPLYSRLLEPAQVQQLADKYHFRGHLGDQDFFTMIGMEHPKLFHVLDCTWNRQLCTWWRDHGYSDVFEAYFRCEGHVKIYHGNCNTPIPED

SEQ ID NO: 14374 - protein, 114 aa, Homo sapiens
  VARIANT 1: note = misc_feature - Xaa can be any naturally occurring amino acid
XSPPALELARGSVAPAPGAKAKSLEGGGAGPVDYHLLMMFTKAEHNAALQAKARVALRSLLRLAKFEAHEVLNLHFVSEEASREVAKGLLRELLPPAAGFKCKFLTSEDGTGHQ

SEQ ID NO: 14375 - protein, 959 aa, Homo sapiens
MVAAPCARRLARRSHSALLAALTVLLLQTLVVWNFSSLDSGAGERRGGAAVGGGEQPPPAPAPRRERRDLPAEPAAARGGGGGGGGGGGGRGPQARARGGGPGEPRGQQPASRGALPARALDPHPSPLITLETQDGYFSHRPKEKVRTDSNNENSVPKDFENVDNSNFAPRTQKQKHQPELAKKPPSRQKELLKRKLEQQEKGKGHTFPGKGPGEVLPPGDRAAANSSHGKDVSRPPHARKTGGSSPETKYDQPPKCDISGKEAISALSRAKSKHCRQEIGETYCRHKLGLLMPEKVTRFCPLEGKANKNVQWDEDSVEYMPANPVRIAFVLVVHGRASRQLQRMFKAIYHKDHFYYIHVDKRSNYLHRQVLQVSRQYSNVRVTPWRMATIWGGASLLSTYLQSMRDLLEMTDWPWDFFINLSAADYPIRTNDQLVAFLSRYRDMNFLKSHGRDNARFIRKQGLDRLFLECDAHMWRLGDRRIPEGIAVDGGSDWFLLNRRFVEYVTFSTDDLVTKMKQFYSYTLLPAESFFHTVLENSPHCDTMVDNNLRITNWNRKLGCKCQYKHIVDWCGCSPNDFKPQDFHRFQQTARPTFFARKFEAVVNQEIIGQLDYYLYGNYPAGTPGLRSYWENVYDEPDGIHSLSDVTLTLYHSFARLGLRRAETSLHTDGENSCRYYPMGHPASVHLYFLADRFQGFLIKHHATNLAVSKLETLETWVMPKKVFKIASPPSDFGRLQFSEVGTDWDAKERLFRNFGGLLGPMDEPVGMQKWGKGPNVTVTVIWVDPVNVIAATYDILIESTAEFTHYKPPLNLPLRPGVWTVKILHHWVPVAETKFLVAPLTFSNRQPIKPEEALKLHNGPLRNAYMEQSFQSLNPVLSLPINPAQVEQARRNAASTGTALEGWLDSLVGGMWTAMDICATGPTACPVMQTCSQTAWSSFSPDPKSELGAVKPDGRLR

SEQ ID NO: 14376 - protein, 117 aa, Homo sapiens
CQYKHIVDWCGCSPNDFKPQDFLRLQQVSRPTFFARKFESTVNQEVLEILDFHLYGSYPPGTPALKAYWENTYDAADGPSGLSDVMLTAYTAFARLSLHHAATAAPPMGTPLCRATW

SEQ ID NO: 14377 - protein, 46 aa, Homo sapiens
ETLEMWLMPQGSLKLLGRSDQASRLQSLEVGQVPHLLSPNPHPDLG

SEQ ID NO: 14378 - protein, 45 aa, Homo sapiens
MVASARVQKLVRRYKLAIATALAILLLQGLKGRQRKPRPLDPGEG

SEQ ID NO: 14379 - protein, 865 aa, Homo sapiens [sequence omitted]

SEQ ID NO: 14380 - protein, 639 aa, Homo sapiens
MVASARVQKLVRRYKLAIATALAILLLQGLVVWSFSGLEEDEAGEKGRQRKPRPLDPGEGSKDTDSSAGRRGSTGRRHGRWRGRAESPGVPVAKVVRAVTSRQRASRRVPPAPPPEAPGRQNLSGAAAGEALVGAAGFPPHGDTGSVEGAPQPTDNGFTPKCEIVGKDALSALARASTKQCQQEIANVVCLHQAGSLMPKAVPRHCQLTGKMSPGIQWDESQAQQPMDGPPVRIAYMLVVHGRAIRQLKRLLKAVYHEQHFFYIHVDKRSDYLHREVVELAQGYDNVRVTPWRMVTIWGGASLLRMYLRSMRDLLEVPGWAWDFFINLSATDYPTRTNEELVAFLSKNRDKNFLKSHGRDNSRFIKKQGLDRLFHECDSHMWRLGERQIPAGIVVDGGSDWFVLTRSFVEYVVYTDDPLVAQLRQFYTYTLLPAESFFHTVLENSLACETLVDNNLRVTNWNRKLGCKCQYKHIVDWCGCSPNDFKPQDFLRLQQVSRPTFFARKFESTVNQEVLEILDFHLYGSYPPGTPALKAYWENTYDAADGPSGLSDVMLTAYTAFARLSLHHAATAAPPMGTPLCRLALIGTPKSVFSGTLGGYWGRWTSLWPCSAGPGAPTSQPQWSGSTQPMWWPHLMTSQ

SEQ ID NO: 14381 - protein, 676 aa, Homo sapiens
MVASARVQKLVRRYKLAIATALAILLLQGLVVWSFSGLEEDEAGEKGRQRKPRPLDPGEGSKDTDSSAGRRGSTGRRHGRWRGRAESPGVPVAKVVRAVTSRQRASRRVPPAPPPEAPGRQNLSGAAAGEALVGAAGFPPHGDTGSVEGAPQPTDNGFTPKCEIVGKDALSALARASTKQCQQEIANVVCLHQAGSLMPKAVPRHCQLTGKMSPGIQWDESQAQQPMDGPPVRIAYMLVVHGRAIRQLKRLLKAVYHEQHFFYIHVDKRSDYLHREVVELAQGYDNVRVTPWRMVTIWGGASLLRMYLRSMRDLLEVPGWAWDFFINLSATDYPTRTNEELVAFLSKNRDKNFLKSHGRDNSRFIKKQGLDRLFHECDSHMWRLGERQIPAGIVVDGGSDWFVLTRSFVEYVVYTDDPLVAQLRQFYTYTLLPAESFFHTVLENSLACETLVDNNLRVTNWNRKLGCKCQYKHIVDWCGCSPNDFKPQDFLRLQQVSRPTFFARKFESTVNQEVLEILDFHLYGSYPPGTPALKAYWENTYDAADGPSGLSDVMLTAYTAFARLSLHHAATAAPPMGTPLCRFEPRGLPSSVHLYFYDDHFQGYLVTQAVQPSAQGPAETLEMWLMPQGSLKLLGRSDQASRLQSLENRGLSMLPRLVSNSWPQAVLPLQPPKALG

SEQ ID NO: 14382 - protein, 252 aa, Homo sapiens
MSSEVSARRDAKKLVRSPSGLRMVPEHRAFGSPFGLEEPQWVPDKECRRCMQCDAKFDFLTRKHHCRRCGKCFCDRCCSQKVPLRRMCFVDPVRQCAECALVSLKEAEFYDKQLKVLLSGATFLVTFGNSEKPETMTCRLSNNQRYLFLDGDSHYEIEIVHISTVQILTEGFPPGEKDIHAYTSLRGSQPASEGGNARATGMFLQYTVPGTEGVTQLKLTVVEDVTVGRRQAVAWLVAMHKAAKLLYESRDQ

SEQ ID NO: 14383 - protein, 234 aa, Homo sapiens
MSSEVSARRDAKKLVRSPSGLRMVPEHRAFGSPFGLEEPQWVPDKECRRCMQCDAKFDFLTRKHHCRRCGKCFCDRCCSQKVPLRRMCFVDPVRQCAECALVSLKEAEFYDKQLKVLLSGATFLVTFGNSEKPETMTCRLSNNQRYLFLDGDSHYEIEIVHISTVQILTEGFPPGGGNARATGMFLQYTVPGTEGVTQLKLTVVEDVTVGRRQAVAWLVAMHKAAKLLYESRDQ

SEQ ID NO: 14384 - protein, 93 aa, Homo sapiens
MSSEVSARRDAKKLVRSPSGLRMVPEHRAFGSPFGLEEPQWVPDKECRRCMQCDAKFDFLTRKVRRIPAAWWGAQGLATGGARVQRPAQGPRV

SEQ ID NO: 14385 - protein, 62 aa, Homo sapiens
MSSEVSARRDAKKLVRSPSGLRMVPEHRAFGSPFGLEEPQWVPDKEEPPSSSRLETQRNLKL

SEQ ID NO: 14386 - protein, 115 aa, Homo sapiens
  VARIANT 1: note = misc_feature - Xaa can be any naturally occurring amino acid
XKVLLSGATFLVTFGNSEKPETMTCRLSNNQRYLFLDGDSHYEIEIVHISTVQILTEGFPPGEKDIHAYTSLRGSQPASEGQPLPPHRGSPHAAGPFLPSPPGFCPRGGPCQGSL

SEQ ID NO: 14387 - protein, 167 aa, Homo sapiens
MLTVALLALLCASASGNAIQARSSSYSGEYGGGGGKRFSHSGNQLDGPITALRVRVNTYYIVGLQVRYGKVWSDYVGGRNGDLEEIFLHPGESVIQVSGKYKWYLKKLVFVTDKGRYLSFGKDSGTSFNAVPLHPNTVLRFISGRSGSLIDAIGLHWDVYPSSCSRC

SEQ ID NO: 14388 - protein, 208 aa, Homo sapiens
MGAQGAQESIKAMWRVPGTTRRPVTGESPGMHRPEAMLLLLTLALLGGPTWAGKMYGPGGGKYFSTTEDYDHEITGLRVSVGLLLVKSVQVKLGDSWDVKLGALGGNTQEVTLQPGEYITKVFVAFQAFLRGMVMYTSKDRYFYFGKLDGQISSAYPSQEGQVLVGIYGQYQLLGIKSIGFEWNYPLEEPTTEPPVNLTYSANSPVGR

SEQ ID NO: 14389 - protein, 178 aa, Homo sapiens
MHRPEAMLLLLTLALLGGPTWAGKMYGPGGGKYFSTTEDYDHEITGLRVSVGLLLVKSVQVKLGDSWDVKLGALGGNTQEVTLQPGEYITKVFVAFQAFLRGMVMYTSKDRYFYFGKLDGQISSAYPSQEGQVLVGIYGQYQLLGIKSIGFEWNYPLEEPTTEPPVNLTYSANSPVGR

SEQ ID NO: 14390 - protein, 95 aa, Homo sapiens
  VARIANT 1: note = misc_feature - Xaa can be any naturally occurring amino acid
XAQGAQESIKAMWRVPGTTRRPVTGESPGMHRPEAMLLLLTLALLGGPTWAGKMYGPGGGKYFSTTEDYDHEITGLRVSVGLLLVKRFLEGVIYE

SEQ ID NO: 14391 - protein, 69 aa, Homo sapiens
  VARIANT 1: note = misc_feature - Xaa can be any naturally occurring amino acid
XRRPVTGESPGMHRPEAMLLLLTLALLGGPTWAGKMYGPGGGKYFSTTEDYDHEITGLRVSVGLLLVKR

SEQ ID NO: 14392 - protein, 372 aa, Homo sapiens
MNGPCQSLRKAEGLLEGCTSAVTVFRKLPLDSKAQSQKMRYKTSLVMRKRLRLYRNTLKESSSSSGHHGPQLTAASSPSVFPGLHEEPPQASPSRPLNGLLRLGLPGDMYARPEPFPPGPAARSDALAAAAALHGYGGMNLTVNLAAPHGPGAFFRYMRQPIKQELICKWLAADGTATPSLCSKTFSTMHELVTHVTVEHVGGPEQANHICFWEECPRQGKPFKAKYKLVNHIRVHTGEKPFPCPFPGCGKVFARSENLKIHKRTHTGEKPFRCEFEGCERRFANSSDRKKHSHVHTSDKPYTCKVRGCDKCYTHPSSLRKHMKVHGRSPPPSSGYDSATPSALVSPSSDCGHKSQVASSAAVAARTADLSE

SEQ ID NO: 14393 - protein, 384 aa, Homo sapiens
MPPFCRNAKLGLLSFLICAGRSLLPLGKNAFWLERIENNNTLWEKAQSQKMRYKTSLVMRKRLRLYRNTLKESSSSSGHHGPQLTAASSPSVFPGLHEEPPQASPSRPLNGLLRLGLPGDMYARPEPFPPGPAARSDALAAAAALHGYGGMNLTVNLAAPHGPGAFFRYMRQPIKQELICKWLAADGTATPSLCSKTFSTMHELVTHVTVEHVGGPEQANHICFWEECPRQGKPFKAKYKLVNHIRVHTGEKPFPCPFPGCGKVFARSENLKIHKRTHTGEKPFRCEFEGCERRFANSSDRKKHSHVHTSDKPYTCKVRGCDKCYTHPSSLRKHMKVHGRSPPPSSGYDSATPSALVSPSSDCGHKSQVASSAAVAARTADLSE

SEQ ID NO: 14394 - protein, 128 aa, Homo sapiens
MRYKTSLVMRKRLRLYRNTLKESSEKPFRCEFEGCERRFANSSDRKKHSHVHTSDKPYTCKVRGCDKCYTHPSSLRKHMKVHGRSPPPSSGYDSATPSALVSPSSDCGHKSQVASSAAVAARTADLSE

SEQ ID NO: 14395 - protein, 68 aa, Homo sapiens
MRYKTSLVMRKRLRLYRNTLKESSSSSGHHGPQLTAASSPSVFPGLHEEPPQASPSRPLNGLLRLGLP

SEQ ID NO: 14396 - protein, 77 aa, Homo sapiens
MRYKTSLVMRKRLRLYRNTLKESSSSSGHHGPQLTAASSPSVFPGLHEEPPQASPSRPLNGLLRLGLPGDMYARPEP

SEQ ID NO: 14397 - protein, 229 aa, Homo sapiens
MRYKTSLVMRKRLRLYRNTLKESSSSSGHHGPQLTAASSPSVFPGLHEEPPQASPSRPLNGLLRLGLPGDMYARPEPFPPGPAARSDALAAAAALHGYGGMNLTVNLAAPHGPGAFFRYMRQPIKQELICKWLAADGTATPSLCSKTFSTMHELVTHVTVEHVGGPEQANHICFWEECPRQGKPFKAKYKLVNHIRVHTGEKPFPCPFPGCGKVFARSENLKIHKRTHT

SEQ ID NO: 14398 - protein, 334 aa, Homo sapiens
MRYKTSLVMRKRLRLYRNTLKESSSSSGHHGPQLTAASSPSVFPGLHEEPPQASPSRPLNGLLRLGLPGDMYARPEPFPPGPAARSDALAAAAALHGYGGMNLTVNLAAPHGPGAFFRYMRQPIKQELICKWLAADGTATPSLCSKTFSTMHELVTHVTVEHVGGPEQANHICFWEECPRQGKPFKAKYKLVNHIRVHTGEKPFPCPFPGCGKVFARSENLKIHKRTHTGEKPFRCEFEGCERRFANSSDRKKHSHVHTSDKPYTCKVRGCDKCYTHPSSLRKHMKVHGRSPPPSSGYDSATPSALVSPSSDCGHKSQVASSAAVAARTADLSE

SEQ ID NO: 14399 - protein, 334 aa, Homo sapiens; identical to SEQ ID NO: 14398

SEQ ID NO: 14400 - protein, 334 aa, Homo sapiens; identical to SEQ ID NO: 14398

SEQ ID NO: 14401 - protein, 497 aa, Homo sapiens
MAMSSLGCLCALTVLIRYCNRDFDDEKILIQHQKAKHFKCHICHKKLYTGPGLAIHCMQVHKETIDAVPNAIPGRTDIELEIYGMEGIPEKDMDERRRLLEQKTQESQKKKQQDDSDEYDDDDSAASTSFQPQPVQPQQGYIPPMAQPGLPPVPGAPGMPPGIPPLMPGVPPLMPGMPPVMPGMPPGLHHQRKYTQSFCGENIMMPMGGMMPPGPGIPPLMPGMPPGMPPPVPRPGIPPMTQAQAVSAPGILNRPPAPTATVPAPQPPVTKPLFPSAGQMGTPVTSSSTASSNSESLSASSKALFPSTAQAQAAVQGPVGTDFKPLNSTPATTTEPPKPTFPAYTQSTASTTSTTNSTAAKPAASITSKPATLTTTSATSKLIHPDEDISLEERRAQLPKYQRNLPRPGQAPIGNPPVGPIGGMMPPQPGIPQQQGMRPPMPPHGQYGGHHQGMPGYLPGAMPPYGQGPPMVPPYQGGPPRPPMGMRPPVMSQGGRY

SEQ ID NO: 14402 - protein, 494 aa, Homo sapiens
MGRKKKKQLKPWCWYCNRDFDDEKILIQHQKAKHFKCHICHKKLYTGPGLAIHCMQVHKETIDAVPNAIPGRTDIELEIYGMEGIPEKDMDERRRLLEQKTQESQKKKQQDDSDEYDDDDSAASTSFQPQPVQPQQGYIPPMAQPGLPPVPGAPGMPPGIPPLMPGVPPLMPGMPPVMPGMPPGLHHQRKYTQSFCGENIMMPMGGMMPPGPGIPPLMPGMPPGMPPPVPRPGIPPMTQAQAVSAPGILNRPPAPTATVPAPQPPVTKPLFPSAGQMGTPVTSSSTASSNSESLSASSKALFPSTAQAQAAVQGPVGTDFKPLNSTPATTTEPPKPTFPAYTQSTASTTSTTNSTAAKPAASITSKPATLTTTSATSKLIHPDEDISLEERRAQLPKYQRNLPRPGQAPIGNPPVGPIGGMMPPQPGIPQQQGMRPPMPPHGQYGGHHQGMPGYLPGAMPPYGQGPPMVPPYQGGPPRPPMGMRPPVMSQGGRY

SEQ ID NO: 14403 - protein, 463 aa, Homo sapiens
MGRKKKKQLKPWCWYCNRDFDDEKILIQHQKAKHFKCHICHKKLYTGPGLAIHCMQVHKETIDAVPNAIPGRTDIELEIYGMEGIPEKDMDERRRLLEQKTQESQKKKQQDDSDEYDDDDSAASTSFQPQPVQPQQGYIPPMAQPGLPPVPGAPGMPPGIPPLMPGVPPLMPGMPPVMPGMPPGLHHQRKYTQSFCGENIMMPMGGMMPPGPGIPPLMPGMPPGMPPPVPRPGIPPMTQAQAVSAPGILNRPPAPTATVPAPQPPVTKPLFPSAGQAQAAVQGPVGTDFKPLNSTPATTTEPPKPTFPAYTQSTASTTSTTNSTAAKPAASITSKPATLTTTSATSKLIHPDEDISLEERRAQLPKYQRNLPRPGQAPIGNPPVGPIGGMMPPQPGIPQQQGMRPPMPPHGQYGGHHQGMPGYLPGAMPPYGQGPPMVPPYQGGPPRPPMGMRPPVMSQGGRY

SEQ ID NO: 14404 - protein, 493 aa, Homo sapiens
MGRKKKKQLKPWCWYCNRDFDDEKILIQHQKAKHFKCHICHKKLYTGPGLAIHCMQVHKETIDAVPNAIPGRTDIELEIYGMEGIPEKDMDERRRLLEQKTQESQKKKQQDDSDEYDDDDSAASTSFQPQPVQPQQGYIPPMAQPGLPPVPGAPGMPPGIPPLMPGVPPLMPGMPPVMPGMPPGLHHQRKYTQSFCGENIMMPMGGMMPPGPGIPPLMPGMPPGMPPPVPRPGIPPMTQAQAVSAPGILNRPPAPTATVPAPQPPVTKPLFPSAGQMGTPVTSSSTASSNSESLSASSKALFPSTAQAQAAVQGPVGTDFKPLNSTPATTTEPPKPTFPAYTQSTASTTSTTNSTAAKPAASITSKPATLTTTSATSKLIHPDEDISLEERRAQLPKYQRNLPRPGQAPIGNPPVGPIGGMMPPQPGIPQQQGMRPPMPPHGQYGGHHQGMPGYLPGAMPPYGQGPPMVPPYQGGPPRPPMGMRPPVMSQALP

SEQ ID NO: 14405 - protein, 478 aa, Homo sapiens
MGRKKKKQLKPWCWYCNRDFDDEKILIQHQKAKHFKCHICHKKLYTGPGLAIHCMQVHKETIDAVPNAIPGRTDIELEIYGMEGIPEKDMDERRRLLEQKTQESQKKKQQDDSDEYDDDDSAASTSFQPQPVQPQQGYIPPMAQPGLPPVPGAPGMPPGIPPLMPGVPPLMPGMPPVMPGMPPGMMPMGGMMPPGPGIPPLMPGMPPGMPPPVPRPGIPPMTQAQAVSAPGILNRPPAPTATVPAPQPPVTKPLFPSAGQMGTPVTSSSTASSNSESLSASSKALFPSTAQAQAAVQGPVGTDFKPLNSTPATTTEPPKPTFPAYTQSTASTTSTTNSTAAKPAASITSKPATLTTTSATSKLIHPDEDISLEERRAQLPKYQRNLPRPGQAPIGNPPVGPIGGMMPPQPGIPQQQGMRPPMPPHGQYGGHHQGMPGYLPGAMPPYGQGPPMVPPYQGGPPRPPMGMRPPVMSQGGRY

SEQ ID NO: 14406 - protein, 46 aa, Homo sapiens
MQVHKETIDAVPNAIPGRTDIELEIYGMEGIPEKDMDERRRLLEQK

SEQ ID NO: 14407 - protein, 74 aa, Homo sapiens
MQVHKETIDAVPNAIPGRTDIELEIYGMEGIPEKDMDERRRLLEQKTQESQKKKQQDDSDEYDDDDSAASTSFQ

SEQ ID NO: 14408 - protein, 93 aa, Homo sapiens
MQVHKETIDAVPNAIPGRTDIELEIYGMEGIPEKDMDERRRLLEQKTQESQKKKQQDDSDEYDDDDSAASTSFQPQPVQPQQGYIPPMAQPGL

SEQ ID NO: 14409 - protein, 96 aa, Homo sapiens
MQVHKETIDAVPNAIPGRTDIELEIYGMEGIPEKDMDERRRLLEQKTQESQKKKQQDDSDEYDDDDSAASTSFQPQPVQPQQGYIPPMAQPGLPPV

SEQ ID NO: 14410 - protein, 198 aa, Homo sapiens
MQVHKETIDAVPNAIPGRTDIELEIYGMEGIPEKDMDERRRLLEQKTQESQKKKQQDDSDEYDDDDSAASTSFQPQPVQPQQGYIPPMAQPGLPPVPGAPGMPPGIPPLMPGVPPLMPGMPPVMPGMPPGLHHQRKYTQSFCGENIMMPMGGMMPPGPGIPPLMPGMPPGMPPPVPRPGIPPMTQAQAVSAPGILNRP

SEQ ID NO: 14411 - protein, 341 aa, Homo sapiens
  VARIANT 1: note = misc_feature - Xaa can be any naturally occurring amino acid
XGMPPGIPPLMPGVPPLMPGMPPVMPGMPPGLHHQRKYTQSFCGENIMMPMGGMMPPGPGIPPLMPGMPPGMPPPVPRPGIPPMTQAQAVSAPGILNRPPAPTATVPAPQPPVTKPLFPSAGQMGTPVTSSSTASSNSESLSASSKALFPSTAQAQAAVQGPVGTDFKPLNSTPATTTEPPKPTFPAYTQSTASTTSTTNSTAAKPAASITSKPATLTTTSATSKLIHPDEDISLEERRAQLPKYQRNLPRPGQAPIGNPPVGPIGGMMPPQPGIPQQQGMRPPMPPHGQYGGHHQGMPGYLPGAMPPYGQGPPMVPPYQGGPPRPPMGMRPPVMSQGGRY

SEQ ID NO: 14412 - protein, 80 aa, Homo sapiens
MATSFRTASCWGLLSFKDISMEFTWDEWQLLDSTQKYLYRDVILENYHNLISVDGWEEWYQNNQDELESIERSYACSVLG

SEQ ID NO: 14413 - protein, 533 aa, Homo sapiens
MATSFRTASCWGLLSFKDISMEFTWDEWQLLDSTQKYLYRDVILENYHNLISVGYHGTKPDLIFKLEQGEDPWIINAKISRQSCPDGWEEWYQNNQDELESIERSYACSVLGRLNLSKTHDSSRQRLYNTRGKSLTQNSAPSRSYLRKNPDKFHGYEEPYFLKHQRAHSIEKNCVCSECGKAFRCKSQLIVHLRIHTGERPYECSKCERAFSAKSNLNAHQRVHTGEKPYSCSECEKVFSFRSQLIVHQEIHTGGKPYGCSECGKAYSWKSQLLLHQRSHTGVKPYECSECGKAFSLKSPFVVHQRTHTGVKPHKCSECGKAFRSKSYLLVHIRMHTGEKPYQCSDCGKAFNMKTQLIVHQGVHTGNNPYQCGECGKAFGRKEQLTAHLRAHAGEKPYGCSECGKAFSSKSYLVIHRRTHTGERPYECSLCERAFCGKSQLIIHQRTHSTEKPYECNECEKAYPRKASLQIHQKTHSGEKPFKCSECGKAFTQKSSLSEHQRVHTGEKPWKCSECGKSFCWNSGLRIHRKTHK

SEQ ID NO: 14414 - protein, 153 aa, Homo sapiens
MATSFRTASCWVVLLRRSLLMSSSVKFGNLLGVPWAQGNSALPEGLLSFKDISMEFTWDEWQLLDSTQKYLYRDVILENYHNLISVGYHGTKPDLIFKLEQGEDPWIINAKISRQSCPDGWEEWYQNNQDELESIERSYACSVLGRLNLSKTH

SEQ ID NO: 14415 - protein, 513 aa, Homo sapiens
MEFTWDEWQLLDSTQKYLYRDVILENYHNLISVGYHGTKPDLIFKLEQGEDPWIINAKISRQSCPDGWEEWYQNNQDELESIERSYACSVLGRLNLSKTHDSSRQRLYNTRGKSLTQNSAPSRSYLRKNPDKFHGYEEPYFLKHQRAHSIEKNCVCSECGKAFRCKSQLIVHLRIHTGERPYECSKCERAFSAKSNLNAHQRVHTGEKPYSCSECEKVFSFRSQLIVHQEIHTGGKPYGCSECGKAYSWKSQLLLHQRSHTGVKPYECSECGKAFSLKSPFVVHQRTHTGVKPHKCSECGKAFRSKSYLLVHIRMHTGEKPYQCSDCGKAFNMKTQLIVHQGVHTGNNPYQCGECGKAFGRKEQLTAHLRAHAGEKPYGCSECGKAFSSKSYLVIHRRTHTGERPYECSLCERAFCGKSQLIIHQRTHSTEKPYECNECEKAYPRKASLQIHQKTHSGEKPFKCSECGKAFTQKSSLSEHQRVHTGEKPWKCSECGKSFCWNSGLRIHRKTHK

SEQ ID NO: 14416 - protein, 264 aa, Homo sapiens
MAALFLSAPPQAEVTFEDVAVYLSREEWGRLGPAQRGLYRDVMLETYGNLVSLALGTRTEYKELTSQETFGEEDPQGSEPVEACDHISKSEGSLEKLVEQRGPRAVTLTNGESSRESGGNLRLLSRPVPDQRPHKCDICEQSFEQRSYLNNHKRVHRSKKTNTVRNSGEIFSANLVVKEDQKIPTGKKLHYCSYCGKTFRYSANLVKHQRLHTEEKPYKCDECGKAFSQSCEFINHRRMHSGEIPYRCDECGKTFTRRPNLMKH

SEQ ID NO: 14417 - protein, 539 aa, Homo sapiens
MAALFLSAPPQAEVTFEDVAVYLSREEWGRLGPAQRGLYRDVMLETYGNLVSLGVGPAGPKPGVISQLERGDEPWVLDVQGTSGKEHLRVNSPALGTRTEYKELTSQETFGEEDPQGSEPVEACDHISKSEGSLEKLVEQRGPRAVTLTNGESSRESGGNLRLLSRPVPDQRPHKCDICEQSFEQRSYLNNHKRVHRSKKTNTVRNSGEIFSANLVVKEDQKIPTGKKLHYCSYCGKTFRYSANLVKHQRLHTEEKPYKCDECGKAFSQSCEFINHRRMHSGEIPYRCDECGKTFTRRPNLMKHQRIHTGEKPYKCGECGKHFSAYSSLIYHQRIHTGEKPYKCNDCGKAFSDGSILIRHRRTHTGEKPFECKECGKGFTQSSNLIQHQRIHTGEKPYKCNECEKAFIQKTKLVEHQRSHTGEKPYECNDCGKVFSQSTHLIQHQRIHTGEKPYKCSECGKAFHNSSRLIHHQRLHHGEKPYRCSDCKKAFSQSTYLIQHRRIHTGEKPYKCSECGKAFRHSSNMCQHQRIHLREDFSM

SEQ ID NO: 14418 - protein, 158 aa, Homo sapiens
MLLLLSDQLLLTALRKPNPQAMAALFLSAPPQAEVTFEDVAVYLSREEWGRLGPAQRGLYRDVMLETYGNLVSLALGTRTEYKELTSQETFGEEDPQGSEPVEACDHISKSEGSLEKLVEQRGPRAVTLTNGESSRESGGNLRLLSRPVPDQRPHKCD

SEQ ID NO: 14419 - protein, 560 aa, Homo sapiens
MLLLLSDQLLLTALRKPNPQAMAALFLSAPPQAEVTFEDVAVYLSREEWGRLGPAQRGLYRDVMLETYGNLVSLGVGPAGPKPGVISQLERGDEPWVLDVQGTSGKEHLRVNSPALGTRTEYKELTSQETFGEEDPQGSEPVEACDHISKSEGSLEKLVEQRGPRAVTLTNGESSRESGGNLRLLSRPVPDQRPHKCDICEQSFEQRSYLNNHKRVHRSKKTNTVRNSGEIFSANLVVKEDQKIPTGKKLHYCSYCGKTFRYSANLVKHQRLHTEEKPYKCDECGKAFSQSCEFINHRRMHSGEIPYRCDECGKTFTRRPNLMKHQRIHTGEKPYKCGECGKHFSAYSSLIYHQRIHTGEKPYKCNDCGKAFSDGSILIRHRRTHTGEKPFECKECGKGFTQSSNLIQHQRIHTGEKPYKCNECEKAFIQKTKLVEHQRSHTGEKPYECNDCGKVFSQSTHLIQHQRIHTGEKPYKCSECGKAFHNSSRLIHHQRLHHGEKPYRCSDCKKAFSQSTYLIQHRRIHTGEKPYKCSECGKAFRHSSNMCQHQRIHLREDFSM

SEQ ID NO: 14420 - protein, 464 aa, Homo sapiens
MAAAALRDPAQGYVTFEDVAVYFSQEEWRLLDDAQRLLYRNVMLENFTLLASLGCWHGAEAEEAPEQIASVGLLSSNIQQHQKQHCGEKPLKRQEGRVPVLRSCKVHLSEKSLQSREVGKALLISSGVLKHQVTHTGEKSHRSSKSREAFHAGKRHYKCSECGKAFGQKYLLVQHQRLHAGKKTYECSECGKLFRDMSNLFIHQIVHTGERPYGCSNCGKSFSRNAHLIEHQRVHTGEKPFTCSECGKAFRHNSTLVQHHKIHTGVRPYECSECGKLFSFNSSLMKHQRIHTGERPYKCSECGKFYSHKSNLIKHWRVHTGERPYKCSDCGKFFTQCSSLMQHQKVHTGEKPFKCNECGRFFRENSTLVRHQRVHTGAKPYECRECGKFFSQSSTLMQHRKVHIGEKPFKCNECGRLFRENSSLVKHQRVHTGAKPYECRECGKFFRHNSSLFKHRRIHTGEMQ

SEQ ID NO: 14421 - protein, 113 aa, Homo sapiens
MAAAALRDPAQGYVTFEDVAVYFSQEEWRLLDDAQRLLYRNVMLENFTLLASLGKVLTPHPSILSWARLFLLFLGRGLFFPKLNCGHSFLLQYPEVAIVIGLGCVYYHLLSPS

SEQ ID NO: 14422 - protein, 497 aa, Homo sapiens
MAAAALRDPAQGYVTFEDVAVYFSQEEWRLLDDAQRLLYRNVMLENFTLLASLGLASSKTHEITQLESWEEPFMPAWEVVTSAIPRGCWHGAEAEEAPEQIASVGLLSSNIQQHQKQHCGEKPLKRQEGRVPVLRSCKVHLSEKSLQSREVGKALLISSGVLKHQVTHTGEKSHRSSKSREAFHAGKRHYKCSECGKAFGQKYLLVQHQRLHAGKKTYECSECGKLFRDMSNLFIHQIVHTGERPYGCSNCGKSFSRNAHLIEHQRVHTGEKPFTCSECGKAFRHNSTLVQHHKIHTGVRPYECSECGKLFSFNSSLMKHQRIHTGERPYKCSECGKFYSHKSNLIKHWRVHTGERPYKCSDCGKFFTQCSSLMQHQKVHTGEKPFKCNECGRFFRENSTLVRHQRVHTGAKPYECRECGKFFSQSSTLMQHRKVHIGEKPFKCNECGRLFRENSSLVKHQRVHTGAKPYECRECGKFFRHNSSLFKHRRIHTGEMQ

SEQ ID NO: 14423 - protein, 121 aa, Homo sapiens
MAAAALRDPAQQGYVTFEDVAVYFSQEEWRLLDDAQRLLYRNVMLENFTLLASLGCWHGAEAEEAPEQIASVGLLSSNIQQHQKQHCGEKPLKRQEGRVPVLRSCKVHLSEKSLQSREVGK

SEQ ID NO: 14424 - protein, 442 aa, Homo sapiens
MAAAALRDPAQQGYVTFEDVAVYFSQEEWRLLDDAQRLLYRNVMLENFTLLASLGLASSKTHEITQLESWEEPFMPAWEVVTSAIPRGCWHGAEAEEAPEQIASVGLLSSNIQQHQKQHCGEKPLKRQEGRVPVLRSCKVHLSEKSLQSREVGKALLISSGVLKHQVTHTGEKSHRSSKSREAFHAGKRHYKCSECGKAFGQKYLLVQHQRLHAGKKTYECSECGKLFRDMSNLFIHQIVHTGERPYGCSNCGKSFSRNAHLIEHQRVHTGEKPFTCSECGKAFRHNSTLVQHHKIHTGVRPYECSECGKLFSFNSSLMKHQRIHTGERPYKCSECGKFYSHKSNLIKHWRVHTGERPYKCSDCGKFFTQCSSLMQHQKVHTGEKPFKCNECGRFFRENSSLVKHQRVHTGAKPYECRECGKFFRHNSSLFKHRRIHTGEMQ

SEQ ID NO: 14425 - protein, 498 aa, Homo sapiens
MAAAALRDPAQQGYVTFEDVAVYFSQEEWRLLDDAQRLLYRNVMLENFTLLASLGLASSKTHEITQLESWEEPFMPAWEVVTSAIPRGCWHGAEAEEAPEQIASVGLLSSNIQQHQKQHCGEKPLKRQEGRVPVLRSCKVHLSEKSLQSREVGKALLISSGVLKHQVTHTGEKSHRSSKSREAFHAGKRHYKCSECGKAFGQKYLLVQHQRLHAGKKTYECSECGKLFRDMSNLFIHQIVHTGERPYGCSNCGKSFSRNAHLIEHQRVHTGEKPFTCSECGKAFRHNSTLVQHHKIHTGVRPYECSECGKLFSFNSSLMKHQRIHTGERPYKCSECGKFYSHKSNLIKHWRVHTGERPYKCSDCGKFFTQCSSLMQHQKVHTGEKPFKCNECGRFFRENSTLVRHQRVHTGAKPYECRECGKFFSQSSTLMQHRKVHIGEKPFKCNECGRLFRENSSLVKHQRVHTGAKPYECRECGKFFRHNSSLFKHRRIHTGEMQ

SEQ ID NO: 14426 - protein, 97 aa, Homo sapiens
MAAAALRDPAQQGYVTFEDVAVYFSQEEWRLLDDAQRLLYRNVMLENFTLLASLGLASSKTHEITQLESWEEPFMPAWEVVTSAIPRGSWWVELREV

SEQ ID NO: 14427 - protein, 173 aa, Homo sapiens
MAAAALRDPAQVPVAADLLTDHEEGYVTFEDVAVYFSQEEWRLLDDAQRLLYRNVMLENFTLLASLGCWHGAEAEEAPEQIASVGLLSSNIQQHQKQHCGEKPLKRQEGRVPVLRSCKVHLSEKSLQSREVGKALLISSGVLKHQVTHTGEKSHRSSKSREAFHAGKRHYKCS

SEQ ID NO: 14428 - protein, 87 aa, Homo sapiens
MAAAALRDPAQVPVAADLLTDHEEGYVTFEDVAVYFSQEEWRLLDDAQRLLYRNVMLENFTLLASLGKVLTPHPSILSWARLFLLFL

SEQ ID NO: 14429 - protein, 510 aa, Homo sapiens
MAAAALRDPAQVPVAADLLTDHEEGYVTFEDVAVYFSQEEWRLLDDAQRLLYRNVMLENFTLLASLGLASSKTHEITQLESWEEPFMPAWEVVTSAIPRGCWHGAEAEEAPEQIASVGLLSSNIQQHQKQHCGEKPLKRQEGRVPVLRSCKVHLSEKSLQSREVGKALLISSGVLKHQVTHTGEKSHRSSKSREAFHAGKRHYKCSECGKAFGQKYLLVQHQRLHAGKKTYECSECGKLFRDMSNLFIHQIVHTGERPYGCSNCGKSFSRNAHLIEHQRVHTGEKPFTCSECGKAFRHNSTLVQHHKIHTGVRPYECSECGKLFSFNSSLMKHQRIHTGERPYKCSECGKFYSHKSNLIKHWRVHTGERPYKCSDCGKFFTQCSSLMQHQKVHTGEKPFKCNECGRFFRENSTLVRHQRVHTGAKPYECRECGKFFSQSSTLMQHRKVHIGEKPFKCNECGRLFRENSSLVKHQRVHTGAKPYECRECGKFFRHNSSLFKHRRIHTGEMQ

SEQ ID NO: 14430 - protein, 478 aa, Homo sapiens
MAAAALRDPAQVPVAADLLTDHEEQGYVTFEDVAVYFSQEEWRLLDDAQRLLYRNVMLENFTLLASLGCWHGAEAEEAPEQIASVGLLSSNIQQHQKQHCGEKPLKRQEGRVPVLRSCKVHLSEKSLQSREVGKALLISSGVLKHQVTHTGEKSHRSSKSREAFHAGKRHYKCSECGKAFGQKYLLVQHQRLHAGKKTYECSECGKLFRDMSNLFIHQIVHTGERPYGCSNCGKSFSRNAHLIEHQRVHTGEKPFTCSECGKAFRHNSTLVQHHKIHTGVRPYECSECGKLFSFNSSLMKHQRIHTGERPYKCSECGKFYSHKSNLIKHWRVHTGERPYKCSDCGKFFTQCSSLMQHQKVHTGEKPFKCNECGRFFRENSTLVRHQRVHTGAKPYECRECGKFFSQSSTLMQHRKVHIGEKPFKCNECGRLFRENSSLVKHQRVHTGAKPYECRECGKFFRHNSSLFKHRRIHTGEMQ

SEQ ID NO: 14431 - protein, 115 aa, Homo sapiens [sequence omitted]

SEQ ID NO: 14432 - protein, 511 aa, Homo sapiens
MAAAALRDPAQVPVAADLLTDHEEQGYVTFEDVAVYFSQEEWRLLDDAQRLLYRNVMLENFTLLASLGLASSKTHEITQLESWEEPFMPAWEVVTSAIPRGCWHGAEAEEAPEQIASVGLLSSNIQQHQKQHCGEKPLKRQEGRVPVLRSCKVHLSEKSLQSREVGKALLISSGVLKHQVTHTGEKSHRSSKSREAFHAGKRHYKCSECGKAFGQKYLLVQHQRLHAGKKTYECSECGKLFRDMSNLFIHQIVHTGERPYGCSNCGKSFSRNAHLIEHQRVHTGEKPFTCSECGKAFRHNSTLVQHHKIHTGVRPYECSECGKLFSFNSSLMKHQRIHTGERPYKCSECGKFYSHKSNLIKHWRVHTGERPYKCSDCGKFFTQCSSLMQHQKVHTGEKPFKCNECGRFFRENSTLVRHQRVHTGAKPYECRECGKFFSQSSTLMQHRKVHIGEKPFKCNECGRLFRENSSLVKHQRVHTGAKPYECRECGKFFRHNSSLFKHRRIHTGEMQ

SEQ ID NO: 14433 - protein, 110 aa, Homo sapiens
MAAAALRDPAQVPVAADLLTDHEEQGYVTFEDVAVYFSQEEWRLLDDAQRLLYRNVMLENFTLLASLGLASSKTHEITQLESWEEPFMPAWEVVTSAIPRGSWWVELREV

SEQ ID NO: 14434 - protein, 50 aa, Homo sapiens
MLENFTLLASLGCWHGAEAEEAPEQIASVGLLSSNIQQHQKQHCGEKPLK

SEQ ID NO: 14435 - protein, 77 aa, Homo sapiens
MASFGASLWPDLGACSQHLSLYHSVTVELAASTARHPASSLQEDSVAFEDVAVTFTQEEWALLDPSQKNLCRDVMQE

SEQ ID NO: 14436 - protein, 207 aa, Homo sapiens
MDSVAFEDVAVTFTQEEWALLDPSQKNLCRDVMQETFRNLASIGKKWKPQNIYVEYENLRRNLRIVGERLFESKEGHQHGEILTQVPDDMLKKTTTGVKSCESSVYGEVGSAHSSLNRHIRDDTGHKAYEYQEYGQKPYKCKYCKKPFNCLSSVQTHERAHSGRKLYVCEECGKTFISHSNLQRHRIMHRGDGPYKCKFCGKALMFL

SEQ ID NO: 14437 - protein, 77 aa, Homo sapiens
MFQDSVAFEDVAVTFTQEEWALLDPSQKNLCRDVMQETFRNLASIGKKWKPQNIYVEYENLRRNLRIVGERLFESKE

SEQ ID NO: 14438 - protein, 41 aa, Homo sapiens
MGDRNCRENHASMPGKVSGSLEVMKSMFKVLTDLVPGFSGL

SEQ ID NO: 14439 - protein, 117 aa, Homo sapiens
MLVLSILLYTCEMFQDSVAFEDVAVTFTQEEWALLDPSQKNLCRDVMQETFRNLASIGKKWKPQNIYVEYENLRRNLRIVGERLFESKEGHQHGEILTQVPDDMLKKTTTGVKSCES

SEQ ID NO: 14440 - protein, 166 aa, Homo sapiens
MLVLSILLYTCEMFQDSVAFEDVAVTFTQEEWALLDPSQKNLCRDVMQETFRNLASIGKKWKPQNIYVEYENLRRNLRIVGERLFESKEGHQHGEILTQVPDDMLKKTTTGVKSCESSVYGEVGSAHSSLNRHIRDDTGHKAYEYQEYGQKPYKCKYCKKPFNCLS

SEQ ID NO: 14441 - protein, 673 aa, Homo sapiens
MMFQDSVAFEDVAVTFTQEEWALLDPSQKNLCRDVMQETFRNLASIGKKWKPQNIYVEYENLRRNLRIVGERLFESKEGHQHGEILTQVPDDMLKKTTTGVKSCESSVYGEVGSAHSSLNRHIRDDTGHKAYEYQEYGQKPYKCKYCKKPFNCLSSVQTHERAHSGRKLYVCEECGKTFISHSNLQRHRIMHRGDGPYKCKFCGKALMFLSLYLIHKRTHTGEKPYQCKQCGKAFSHSSSLRIHERTHTGEKPYKCNECGKAFHSSTCLHAHKRTHTGEKPYECKQCGKAFSSSHSFQIHERTHTGEKPYECKECGKAFKCPSSVRRHERTHSRKKPYECKHCGKVLSYLTSFQNHLGMHTGEISHKCKICGKAFYSPSSLQTHEKTHTGEKPYKCNQCGKAFNSSSSFRYHERTHTGEKPYECKQCGKAFRSASLLQTHGRTHTGEKPYACKECGKPFSNFSFFQIHERMHREEKPYECKGYGKTFSLPSLFHRHERTHTGGKTYECKQCGRSFNCSSSFRYHGRTHTGEKPYECKQCGKAFRSASQLQIHGRTHTGEKPYECKQCGKAFGSASHLQMHGRTHTGEKPYECKQCGKSFGCASRLQMHGRTHTGEKPYKCKQCGKAFGCPSNLRRHGRTHTGEKPYKCNQCGKVFRCSSQLQVHGRAHCIDTP

SEQ ID NO: 14442 - protein, 52 aa, Homo sapiens
MQETFRNLASIGKKWKPQNIYVEYENLRRNLRIVGERLFESKEGHQHGEILT

SEQ ID NO: 14443 - protein, 119 aa, Homo sapiens
MQETFRNLASIGKKWKPQNIYVEYENLRRNLRIVGERLFESKEGHQHGEILTQVPDDMLKKTTTGVKSCESSVYGEVGSAHSSLNRHIRDDTGHKAYEYQEYGQKPYKCKYCKKPFNCL

SEQ ID NO: 14444 - protein, 638 aa, Homo sapiens
MQETFRNLASIGKKWKPQNIYVEYENLRRNLRIVGERLFESKEGHQHGEILTQVPDDMLKKTTTGVKSCESSVYGEVGSAHSSLNRHIRDDTGHKAYEYQEYGQKPYKCKYCKKPFNCLSSVQTHERAHSGRKLYVCEECGKTFISHSNLQRHRIMHRGDGPYKCKFCGKALMFLSLYLIHKRTHTGEKPYQCKQCGKAFSHSSSLRIHERTHTGEKPYKCNECGKAFHSSTCLHAHKRTHTGEKPYECKQCGKAFSSSHSFQIHERTHTGEKPYECKECGKAFKCPSSVRRHERTHSRKKPYECKHCGKVLSYLTSFQNHLGMHTGEISHKCKICGKAFYSPSSLQTHEKTHTGEKPYKCNQCGKAFNSSSSFRYHERTHTGEKPYECKQCGKAFRSASLLQTHGRTHTGEKPYACKECGKPFSNFSFFQIHERMHREEKPYECKGYGKTFSLPSLFHRHERTHTGGKTYECKQCGRSFNCSSSFRYHGRTHTGEKPYECKQCGKAFRSASQLQIHGRTHTGEKPYECKQCGKAFGSASHLQMHGRTHTGEKPYECKQCGKSFGCASRLQMHGRTHTGEKPYKCKQCGKAFGCPSNLRRHGRTHTGEKPYKCNQCGKVFRCSSQLQVHGRAHCIDTP

SEQ ID NO: 14445 - protein, 518 aa, Homo sapiens
MAVALGCAIQASLNQGSVFQEYDTDCEVFRQRFRQFQYREAAGPHEAFNKLWELCCQWLKPKMRSKEQILELLVLEQFLTILPTEIETWVREHCPENRERVVSLIEDLQRELEIPEQQVDMHDMLLEELAPVGTAHIPPTMHLESPALQVMGPAQEAPVAEAWIPQAGPPELNYGATGECQNFLDPGYPLPKLDMNFSLENREEPWVKELQDSKEMKQLLDSKIGFEIGIENEEDTSKQKKMETMYPFIVTLEGNALQGPILQKDYVQLENQWETPPEDLQTDLAKLVDQQNPTLGETPENSNLEEPLNPKPHKKKSPGEKPHRCPQCGKCFARKSQLTGHQRIHSGEEPHKCPECGKRFLRSSDLYRHQRLHTGERPYECTVCKKRFTRRSHLIGHQRTHSEEETYKCLECGKSFCHGSSLKRHLKTHTGEKPHRCHNCGKSFSRLTALTLHQRTHTEERPFKCNYCGKSFRQRPSLVIHLRIHTGEKPYKCTHCSKSFRQRAGLIMHQVTHFRGLI

SEQ ID NO: 14446 - protein, 164 aa, Homo sapiens
MAVALGCAIQASLNQGSVFQEYDTDCEVFRQRFRQFQYREAAGPHEAFNKLWELCCQWLKPKMRSKEQILELLVLEQFLTILPTEIETWVREHCPENRERVVSLIEDLQRELEIPEQQVRKECGIFVIGPKEVAEAAGTRPHICLYVIPQPQDFSRVLFLFLFC

SEQ ID NO: 14447 - protein, 233 aa, Homo sapiens
MKDRQVDAQAQEREHDDPTGQPGAPQLTQNIPRGPAGSKVFSVWPSGARSEQRSAFSKPTKRPAERPELTSVFPAGESADALGELSGLLNTTDLACWGRLSTPKLLVGDLWNLQALPQNAPLCSTFLGAPTLWLEHTQAQVPPPSSSSTTSWALLPPTLTSLGLSTQNWCAKCNLSFRLTSDLVFHMRSHHKKEHAGPDPHSQKRREEALACPVCQEHFRERHHLSRHMTSHS

SEQ ID NO: 14448 - protein, 340 aa, Homo sapiens
MPEWPPCLSVAPALVITMAAGKGAPLSPSAENRWRLSEPELGRGCKPVLLEKTNRLGPEAAVGRAGRDVGSAELALLVAPGKPRPGKPLPPKTRGEQRQSAFTELPRMKDRQVDAQAQEREHDDPTGQPGAPQLTQNIPRGPAGSKVFSVWPSGARSEQRSAFSKPTKRPAERPELTSVFPAGESADALGELSGLLNTTDLACWGRLSTPKLLVGDLWNLQALPQNAPLCSTFLGAPTLWLEHTQAQVPPPSSSSTTSWALLPPTLTSLGLSTQNWCAKCNLSFRLTSDLVFHMRSHHKKEHAGPDPHSQKRREEALACPVCQEHFRERHHLSRHMTSHS

SEQ ID NO: 14449 - protein, 252 aa, Homo sapiens
MQLPPALCARLAAGPGAAEPLPVERDPAAGAAPFRFVARPVRFPREHQFFEDGDVQRHLYLQDVIMQVADVPEKPRVPAFACQVAGCCQVFDALDDYEHHYHTLHGNVCSFCKRAFPSGHLLDAHILEWHDSLFQILSERQDMYQCLVEGCTEKFKTSRDRKDHMVRMHLYPADFRFDKPKKSRSPASAEAPGDSGERSEGEAMEICSEPVAASPAPAGERRIYRHRIPSTICFGQGAARGFKSNKKKTKQC

SEQ ID NO: 14450 - protein, 262 aa, Homo sapiens
MQLPPALCARLAAGPGAAEPLPVERDPAAGAAPFRFVARPVRFPREHQFFEDGDVQRHLYLQDVIMQVADVPEKPRVPAFACQVAGCCQVFDALDDYEHHYHTLHGNVCSFCKRAFPSGHLLDAHILEWHDSLFQILSERQDMYQCLVEGCTEKFKTSRDRKDHMVRMHLYPADFRFDKPKKSRSPASAEAPGDSGERSEGEAMEICSEPVAASPAPAGERRIYRHRSVSELFLKPVLNMCSVLRILGCTWAAALLILNSER

SEQ ID NO: 14451 - protein, 86 aa, Homo sapiens
MAVGLLKAMYQELVTFRDVAVDFSQEEWDCLDSSQRHLYSNVMLENYRILVSLGLCFSKPSVILLLEQGKAPWMVKRELTKGLCSG

SEQ ID NO: 14452 - protein, 148 aa, Homo sapiens
MAVGLLKAMYQELVTFRDVAVDFSQEEWDCLDSSQRHLYSNVMLENYRILVSLGLCFSKPSVILLLEQGKAPWMVKRELTKGLCSGWEPICETEELTPKQDFYEEHQSQKIIETLTSYNLEYSSLREEWKCEGYFERQPGNQKACFKE

SEQ ID NO: 14453 - protein, 536 aa, Homo sapiens
MAVGLLKAMYQELVTFRDVAVDFSQEEWDCLDSSQRHLYSNVMLENYRILVSLGLCFSKPSVILLLEQGKAPWMVKRELTKGLCSGWEPICETEELTPKQDFYEEHQSQKIIETLTSYNLEYSSLREEWKCEGYFERQPGNQKACFKEEIITHEEPLFDEREQEYKSWGSFHQNPLLCTQKIIPKEEKVHKHDTQKRSFKKNLMAIKPKSVCAEKKLLKCNDCEKVFSQSSSLTLHQRIHTGEKPYKCIECGKAFSQRSNLVQHQRIHTGEKPYECKECRKAFSQNAHLVQHLRVHTGEKPYECKVCRKAFSQFAYLAQHQRVHTGEKPYECIECGKAFSNRSSIAQHQRVHTGEKPYECNVCGKAFSLRAYLTVHQRIHTGERPYECKECGKAFSQNSHLAQHQRIHTGEKPYKCQECRKAFSQIAYLAQHQRVHTGEKPYECIECGKAFSNDSSLTQHQRVHTGEKPYECTVCGKAFSYCGSLAQHQRIHTGERPYECKECKKTFRQHAHLAHHQRIHIGESLSPPNPVNHQVL

SEQ ID NO: 14454 - protein, 592 aa, Homo sapiens
MCMYLFFLDFSIVGSGLRSGVWVSGSSSQAICVTPVRVESSEATAISQEKSQEEERMAVGLLKAMYQELVTFRDVAVDFSQEEWDCLDSSQRHLYSNVMLENYRILVSLGLCFSKPSVILLLEQGKAPWMVKRELTKGLCSGWEPICETEELTPKQDFYEEHQSQKIIETLTSYNLEYSSLREEWKCEGYFERQPGNQKACFKEEIITHEEPLFDEREQEYKSWGSFHQNPLLCTQKIIPKEEKVHKHDTQKRSFKKNLMAIKPKSVCAEKKLLKCNDCEKVFSQSSSLTLHQRIHTGEKPYKCIECGKAFSQRSNLVQHQRIHTGEKPYECKECRKAFSQNAHLVQHLRVHTGEKPYECKVCRKAFSQFAYLAQHQRVHTGEKPYECIECGKAFSNRSSIAQHQRVHTGEKPYECNVCGKAFSLRAYLTVHQRIHTGERPYECKECGKAFSQNSHLAQHQRIHTGEKPYKCQECRKAFSQIAYLAQHQRVHTGEKPYECIECGKAFSNDSSLTQHQRVHTGEKPYECTVCGKAFSYCGSLAQHQRIHTGERPYECKECKKTFRQHAHLAHHQRIHIGESLSPPNPVNHQVL

SEQ ID NO: 14455 - protein, 44 aa, Homo sapiens
MCMYLFFLDFSIVSVTVLLDFMTRDRERKVVWPDRLTSKQTWPY

SEQ ID NO: 14456 - protein, 44 aa, Homo sapiens
MLENYRILVSLGLCFSKPSVILLLEQGKAPWMVKRELTKGLCSG

SEQ ID NO: 14457 - protein, 306 aa, Homo sapiens
MAQISSGGGGQSRCLLFALGSEMGSEKEQSPEPHLPEEGEGGKPWRVDDSEGSWIPPGEKEHGQESLSDELQETHPKKPWQKVTVRARELGDPIAHPRHEADEKPFICAQCGKTFNNTSNLRTHQRIHTGEKPYKCSECGKSFSRSSNRIRHERIHLEEKHYKCPKCQESFRRRSDLTTHQQDHLGKRPYRCDICGKSFSQSATLAVHHRTHLEPAPYICCECGKSFSNSSSFGVHHRTHTGERPYECTECGRTFSDISNFGAHQRTHRGEKPYRCTVCGKHFSRSSNLIRHQKTHLGEQAGKDSS

SEQ ID NO: 14458 - protein, 306 aa, Homo sapiens; identical to SEQ ID NO: 14457

SEQ ID NO: 14459 - protein, 133 aa, Homo sapiens
MAQISSGGGGQSRCLLFALVLAICVHSQGSEMGSEKEQSPEPHLPEEGEGGKPWRVDDSEGSWIPPGEKEHGQESLSDELQETHPKKPWQKVTVRARELGDPIAHPRHEADEKPFICAQCGKTFNNTSNLRTH

SEQ ID NO: 14460 - protein, 284 aa, Homo sapiens
MGSEKEQSPEPHLPEEGEGGKPWRVDDSEGSWIPPGEKEHGQESLSDELQETHPKKPWQKVTVRARELGDPIAHPRHEADEKPFICAQCGKTFNNTSNLRTHQRIHTGEKPYKCSECGKSFSRSSNRIRHERIHLEEKHYKCPKCQESFRRRSDLTTHQQDHLGKRPYRCDICGKSFSQSATLAVHHRTHLEPAPYICCECGKSFSNSSSFGVHHRTHTGERPYECTECGRTFSDISNFGAHQRTHRGEKPYRCTVCGKHFSRSSNLIRHQKTHLGEQAGKDSS

SEQ ID NO: 14461 - protein, 284 aa, Homo sapiens; identical to SEQ ID NO: 14460

SEQ ID NO: 14462 - protein, 284 aa, Homo sapiens; identical to SEQ ID NO: 14460

SEQ ID NO: 14463 - protein, 315 aa, Homo sapiens
MSLCSPTHSAEMSLFLQGPEEMLPLSSEGSEMGSEKEQSPEPHLPEEGEGGKPWRVDDSEGSWIPPGEKEHGQESLSDELQETHPKKPWQKVTVRARELGDPIAHPRHEADEKPFICAQCGKTFNNTSNLRTHQRIHTGEKPYKCSECGKSFSRSSNRIRHERIHLEEKHYKCPKCQESFRRRSDLTTHQQDHLGKRPYRCDICGKSFSQSATLAVHHRTHLEPAPYICCECGKSFSNSSSFGVHHRTHTGERPYECTECGRTFSDISNFGAHQRTHRGEKPYRCTVCGKHFSRSSNLIRHQKTHLGEQAGKDSS

SEQ ID NO: 14464 - protein, 296 aa, Homo sapiens
MSLCSPTHSAEMSLFLQGPEEMLPLSSEGSEMGSEKEQSPEPHLPEEGEGGKPWRVDDSEGSWIPPGEKEHGQESLSDELQETHPKKPWQKVTVRARELGDPIAHPRHEADEKPFICAQCGKTFNNTSNLRTHQRIHTGEKPYKCSECGKSFSRSSNRIRHERIHLEEKHYKCPKCQESFRRRSDLTTHQQDHLGKRPYRCDICGKSFSQSATLAVHHRTHLEPAPYICCECGKSFSNSSSFGVHHRTHTGERPYECTECGRTFSDISNFGAHQRTHRGEKPYRCTVCGKHFSRSS

SEQ ID NO: 14465 - protein, 130 aa, Homo sapiens
MLENYRNLVFVGIAASKPDLITCLEQGKEPWNVKRHEMVTEPPVVYSYFAQDLWPKQGKKNYFQKVILRTYKKCGRENLQLRKYCKSMDECKVHKECYNGLNQCLTTTQNKIFQYDKYVKVFHKFSNSNR

SEQ ID NO: 14466 - protein, 87 aa, Homo sapiens
MPGPLGSLEMGVLTFRDVALEFSLEEWQCLDTAQQNLYRNVMLENYRNLVFVGIAASKPDLITCLEQGKEPWNVKRHEMVTEPPGLQ

SEQ ID NO: 14467 - protein, 572 aa, Homo sapiens
MPGPLGSLEMGVLTFRDVALEFSLEEWQCLDTAQQNLYRNVMLENYRNLVFVGIAASKPDLITCLEQGKEPWNVKRHEMVTEPPVVYSYFAQDLWPKQGKKNYFQKVILRTYKKCGRENLQLRKYCKSMDECKVHKECYNGLNQCLTTTQNKIFQYDKYVKVFHKFSNSNRHKIGHTGKKSFKCKECEKSFCMLSHLAQHKRIHSGEKPYKCKECGKAYNEASNLSTHKRIHTGKKPYKCEECGKAFNRLSHLTTHKIIHTGKKPYKCEECGKAFNQSANLTTHKRIHTGEKPYKCEECGRAFSQSSTLTAHKIIHAGEKPYKCEECGKAFSQSSTLTTHKIIHTGEKFYKCEECGKAFSRLSHLTTHKRIHSGEKPYKCEECGKAFKQSSTLTTHKRIHAGEKFYKCEVCSKAFSRFSHLTTHKRIHTGEKPYKCEECGKAFNLSSQLTTHKIIHTGEKPYKCEECGKAFNQSSTLSKHKVIHTGEKPYKCEECGKAFNQSSHLTTHKMIHTGEKPYKCEECGKAFNNSSILNRHKMIHTGEKLYKPESCNNACDNIAKISKYKRNCAGEK

SEQ ID NO: 14468 - protein, 131 aa, Homo sapiens
MSEETLQSKLAAAKKKLPWGAVQGSRAMSDLLLLLLDLTLLLLLMLLGFAGYSGQLAGVAVSAGSPPIPTSSMWSPMVRLGGFSPELQHLPQTLLHRCPLGQPCMGVLTFRDVALEFSLEEWQCLDTAQQN

SEQ ID NO: 14469 - protein, 75 aa, Homo sapiens
MEAFALGPARRGRRRTRAAGSLLSRAAILLFISAFLVRVPSSGEGPRRPAGSAGTTAASPTLRIAFSCVTCIRFI

SEQ ID NO: 14470 - protein, 350 aa, Homo sapiens
MEAFALGPARRGRRRTRAAGSLLSRAAILLFISAFLVRVPSSVGHLVRLPRAFRLTKDSVKIVGSTSFPVKAYVMLHQKSPHVLCVTQQLRNAELIDPSFQWYGPKGKVVSENRTAQITSTGSLVFQNFEESMSGIYTCFLEYKPTVEEIVKRLQLKYAIYAYREPHYYYQFTARYHAAPCNSIYNISFEKKLLQILSKLLLDLSCEISLLKSECHRVKMQRAGLQNELFFAFSVSSLDTEKGPKRCTDHNCEPYKRLFKAKNLIERFFNQQVEILGRRAEQLPQIYYIEGTLQMVWINRCFPGYGMNVQQHPKCPECCVICSPGSYNPRDGIHCLQCNSSLVYGAKTCL

SEQ ID NO: 14471 - protein, 351 aa, Homo sapiens
MEAFALGPARRGRRRTRAAGSLLSRAAILLFISAFLVRVPSSVGHLVRLPRAFRLTKDSVKIVGSTSFPVKAYVMLHQKSPHVLCVTQQLRNAELIDPSFQWYGPKGKVVSVENRTAQITSTGSLVFQNFEESMSGIYTCFLEYKPTVEEIVKRLQLKYAIYAYREPHYYYQFTARYHAAPCNSIYNISFEKKLLQILSKLLLDLSCEISLLKSECHRVKMQRAGLQNELFFAFSVSSLDTEKGPKRCTDHNCEPYKRLFKAKNLIERFFNQQVEILGRRAEQLPQIYYIEGTLQMVWINRCFPGYGMNVQQHPKCPECCVICSPGSYNPRDGIHCLQCNSSLVYGAKTCL

SEQ ID NO: 14472 - protein, 72 aa, Homo sapiens
MFLVGHLVRLPRAFRLTKDSVKIVGSTSFPVKAYVMLHQKSPHVLCVTQQLRNAELIDPSFQWYGPKGKVVS

SEQ ID NO: 14473 - protein, 218 aa, Homo sapiens
MMRTCVLLSAVLWCLTGAYREPDYSYQMAVRFTTRSCIGRYNDVFFRVLKKILDSLISDLSCHVIEPSYKCHSVEIPEHGLIHELFIAFQVNPFAPGWKGACNGSVDCEDTTNHNILQARDRIEDFFRSQAYIFYHNFNKTLPAMHFVDHSLQVVRLDSCRPGFGKNERLHSNCASCCVVCSPATFSPDVNVTCQTCVSVLTYGAKSCPQTSNKNQQY

SEQ ID NO: 14474 - protein, 316 aa, Homo sapiens
MMRTCVLLSAVLWCLTGDKIYVELHQNSPVLICMDFKLSKKEIVDPTYLWIGPNEKTLTGNNRINITETGQLMVKDFLEPLSGLYTCTLSYKTVKAETQEEKTVKKRYDFMVFAYREPDYSYQMAVRFTTRSCIGRYNDVFFRVLKKILDSLISDLSCHVIEPSYKCHSVEIPEHGLIHELFIAFQVNPFAPGWKGACNGSVDCEDTTNHNILQARDRIEDFFRSQAYIFYHNFNKTLPAMHFVDHSLQVVRLDSCRPGFGKNERLHSNCASCCVVCSPATFSPDVNVTCQTCVSVLTYGAKSCPQTSNKNQQYED

SEQ ID NO: 14475 - protein, 338 aa, Homo sapiens
MMRTCVLLSAVLWCLTGVQCPRFTLFNKKGFIYGKTGQPDKIYVELHQNSPVLICMDFKLSKKEIVDPTYLWIGPNEKTLTGNNRINITETGQLMVKDFLEPLSGLYTCTLSYKTVKAETQEEKTVKKRYDFMVFAYREPDYSYQMAVRFTTRSCIGRYNDVFFRVLKKILDSLISDLSCHVIEPSYKCHSVEIPEHGLIHELFIAFQVNPFAPGWKGACNGSVDCEDTTNHNILQARDRIEDFFRSQAYIFYHNFNKTLPAMHFVDHSLQVVRLDSCRPGFGKNERLHSNCASCCVVCSPATFSPDVNVTCQTCVSVLTYGAKSCPQTSNKNQQYED

SEQ ID NO: 14476 - protein, 265 aa, Homo sapiens
MMRTCVLLSAVLWCLTGVQCPRFTLFNKKGFIYGKTGQPDKIYVELHQNSPVLICMDFKLSKKEIVDPTYLWIGPNEKTLTGNNRINITETGQLMVKDFLEPLSGLYTCTLSYKTVKAETQEEKTVKKRYDFMVFVNPFAPGWKGACNGSVDCEDTTNHNILQARDRIEDFFRSQAYIFYHNFNKTLPAMHFVDHSLQVVRLDSCRPGFGKNERLHSNCASCCVVCSPATFSPDVNVTCQTCVSVLTYGAKSCPQTSNKNQQYED

SEQ ID NO: 14477 - protein, 330 aa, Homo sapiens
EQCPENGEEAVTLVEDLEREPGRPRSSVTVSVKGQEVRLEKMTPPKSSQELLSVRQESVEPQPRGVPKKERARSPDLGPQEQMNPKEKLKPFQRSGLPFPKSGVVSRLEQGEPWIPDLLGSKEKELPSGSHIGDRRVHADLLPSKKDRRSWVEQDHWSFEDEKVAGVHWGYEETRTLLAILSQTEFYEALRNCHRNSQVYGAVAERLREYGFLRTLEQCRTKFKGLQKSYRKVKSGHPPETCPFFEEMEALMSAQVIALPSNGLEAAASHSGLVGSDAETEEPGQRGWQHEEGAEEAVAQESDSDDMDLEATPQDPNSAAPVVFRSPGGA

SEQ ID NO: 14478 - protein, 462 aa, Homo sapiens
MAKSALRENGTNSETFRQRFRRFHYQEVAGPREAFSQLWELCCRWLRPEVRTKEQIVELLVLEQFLTVLPGEIQNWVQEQCPENGEEAVTLVEDLEREPGRPRSSVTVSVKGQEVRLEKMTPPKSSQELLSVRQESVEPQPRGVPKKERARSPDLGPQEQMNPKEKLKPFQRSGFEAGFENEDNSKRDISEEVQLHRTLLARSERKIPRYLHQGKGNESDCRSGRQWAKTSGEKRGKLTLPEKSLSEVLSQQRPCLGERPYKYLKYSKSFGPNSLLMHQVSHQVENPYKCADCGKSFSRSARLIRHRRIHTGEKPYKCLDCGKSFRDSSNFITHRRIHTGEKPYQCGECGKCFNQSSSLIIHQRTHTGEKPYQCEECGKSFNNSSHFSAHRRIHTGERPHVCPDCGKSFSKSSDLRAHHRTHTGEKPYGCHDCGKCFSKSSALNKHGEIHAREKLLTQSAPK

SEQ ID NO: 14479 - protein, 556 aa, Homo sapiens
MAKSALRENGTNSETFRQRFRRFHYQEVAGPREAFSQLWELCCRWLRPEVRTKEQIVELLVLEQFLTVLPGEIQNWVQEQCPENGEEAVTLVEDLEREPGRPRSSVTVSVKGQEVRLEKMTPPKSSQELLSVRQESVEPQPRGVPKKERARSPDLGPQEQMNPKEKLKPFQRSGLPFPKSGVVSRLEQGEPWIPDLLGSKEKELPSGSHIGDRRVHADLLPSKKDRRSWVEQDHWSFEDEKVAGVHWGYEETRTLLAILSQTEFYEALRNCHRNSQVYGAVAERLREYGFLRTLEQCRTKFKGLQKSYRKVKSGHPPETCPFFEEMEALMSAQVIALPSNGLEAAASHSGLVGSDAETEEPGQRGWQHEEGAEEAVAQESDSDDMDLEATPQDPNSAAPVVFRSPGGVHWGYEETKTYLAILSETQFYEALRNCHRNSQLYGAVAERLWEYGFLRTPEQCRTKFKSLQTSYRKVKNGQAPETCPFFEEMDALVLKLDLRMKIIQNGIFLRKYNCIGHYLQDLKGKFPGIFIRVKAMRVTVDQEDSGQRPQGRKEEN

SEQ ID NO: 14480 - protein, 21 aa, Homo sapiens
MMAKSALRENGTNSETFRQRF

SEQ ID NO: 14481 - protein, 852 aa, Homo sapiens
MMAKSALRENGTNSETFRQRFRRFHYQEVAGPREAFSQLWELCCRWLRPEVRTKEQIVELLVLEQFLTVLPGEIQNWVQEQCPENGEEAVTLVEDLEREPGRPRSSVTVSVKGQEVRLEKMTPPKSSQELLSVRQESVEPQPRGVPKKERARSPDLGPQEQMNPKEKLKPFQRSGLPFPKSGVVSRLEQGEPWIPDLLGSKEKELPSGSHIGDRRVHADLLPSKKDRRSWVEQDHWSFEDEKVAGVHWGYEETRTLLAILSQTEFYEALRNCHRNSQVYGAVAERLREYGFLRTLEQCRTKFKGLQKSYRKVKSGHPPETCPFFEEMEALMSAQVIALPSNGLEAAASHSGLVGSDAETEEPGQRGWQHEEGAEEAVAQESDSDDMDLEATPQDPNSAAPVVFRSPGGVHWGYEETKTYLAILSETQFYEALRNCHRNSQLYGAVAERLWEYGFLRTPEQCRTKFKSLQTSYRKVKNGQAPETCPFFEEMDALVSVRVAAPPNDGQEETASCPVQGTSEAEAQKQAEEADEATEEDSDDDEEDTEIPPGAVITRAPVLFQSPRGFEAGFENEDNSKRDISEEVQLHRTLLARSERKIPRYLHQGKGNESDCRSGRQWAKTSGEKRGKLTLPEKSLSEVLSQQRPCLGERPYKYLKYSKSFGPNSLLMHQVSHQVENPYKCADCGKSFSRSARLIRHRRIHTGEKPYKCLDCGKSFRDSSNFITHRRIHTGEKPYQCGECGKCFNQSSSLIIHQRTHTGEKPYQCEECGKSFNNSSHFSAHRRIHTGERPHVCPDCGKSFSKSSDLRAHHRTHTGEKPYGCHDCGKCFSKSSALNKHGEIHAREKLLTQSAPK

SEQ ID NO: 14482 - protein, 199 aa, Homo sapiens
MMAKSALRENGTNSETFRQRFRRFHYQEVAGPREAFSQLWELCCRWLRPEVRTKEQIVELLVLEQFLTVLPGEIQNWVQEQCPENGEEAVTLVEDLEREPGRPRSSVTVSVKGQEVRLEKMTPPKSSQELLSVRQESVEPQPRGVPKKERARSPDLGPQEQMNPKEKLKPFQRSGWSKESHGSQICWALRRKNFQVAAT

SEQ ID NO: 14483 - protein, 316 aa, Homo sapiens
MSRKWRGGSDSRGRFRKRAWKTIFGHSLCEGAGSALGEDDTPEIITRVIKCSAGVSGTPAQGCTQEREGKKPRPGTTGADEPKGEAQTFSKERLEQGEPWIPDLLGSKEKELPSGSHIGDRRVHADLLPSKKDRRSWVEQDHWSFEDEKVAGVHWGYEETRTLLAILSQTEFYEALRNCHRNSQVYGAVAERLREYGFLRTLEQCRTKFKGLQKSYRKVKSGHPPETCPFFEEMEALMSAQVIALPSNGLEAAASHSGLVGSDAETEEPGQRGWQHEEGAEEAVAQESDSDDMDLEATPQDPNSAAPVVFRSPGGA

SEQ ID NO: 14484 - protein, 594 aa, synthetic construct
  source 1..594: note = Synthetic Sequence
MGSSLDDEHILSALLQSDDELVGEDSDSEVSDHVSEDDVQSDTEEAFIDEVHEVQPTSSGSEILDEQNVIEQPGSSLASNRILTLPQRTIRGKNKHCWSTSKSTRRSRVSALNIVRSQRGPTRMCRNIYDPLLCFKLFFTDEIISEIVKWTNAEISLKRRESMTSATFRDTNEDEIYAFFGILVMTAVRKDNHMSTDDLFDRSLSMVYVSVMSRDRFDFLIRCLRMDDKSIRPTLRENDVFTPVRKIWDLFIHQCIQNYTPGAHLTIDEQLLGFRGRCPFRVYIPNKPSKYGIKILMMCDSGTKYMINGMPYLGRGTQTNGVPLGEYYVKELSKPVHGSCRNITCDNWFTSIPLAKNLLQEPYKLTIVGTVRSNKREIPEVLKNSRSRPVGTSMFCFDGPLTLVSYKPKPAKMVYLLSSCDEDASINESTGKPQMVMYYNQTKGGVDTLDQMCSVMTCSRKTNRWPMALLYGMINIACINSFIIYSHNVSSKGEKVQSRKKFMRNLYMSLTSSFMRKRLEAPTLKRYLRDNISNILPKEVPGTSDDSTEEPVMKKRTYCTYCPSKIRRKANASCKKCKKVICREHNIDMCQSCF

SEQ ID NO: 14485 - protein, 340 aa, synthetic construct
  source 1..340: note = Synthetic Sequence
MGKSKEISQDLRKKIVDLHKSGSSLGAISKRLKVPRSSVQTIVRKYKHHGTTQPSYRSGRRRVLSPRDERTLVRKVQINPRTTAKDLVKMLEETGTKVSISTVKRVLYRHNLKGRSARKKPLLQNRHKKARLRFATAHGDKDRTFWRNVLWSDETKIELFGHNDHRYVWRKKGEACKPKNTIPTVKHGGGSIMLWGCFAAGGTGALHKIDGIMRKENYVDILKQHLKTSVRKLKLGRKWVFQMDNDPKHTSKVVAKWLKDNKVKVLEWPSQSPDLNPIENLWAELKKRVRARRPTNLTQLHQLCQEEWAKIHPTYCGKLVEGYPKRLTQVKQFKGNATKY

SEQ ID NO: 14486 - protein, 340 aa, synthetic construct
  source 1..340: note = Synthetic Sequence
MGKSKEISQDLRKRIVDLHKSGSSLGAISKRLAVPRSSVQTIVRKYKHHGTTQPSYRSGRRRVLSPRDERTLVRKVQINPRTTAKDLVKMLEETGTKVSISTVKRVLYRHNLKGHSARKKPLLQNRHKKARLRFATAHGDKDRTFWRNVLWSDETKIELFGHNDHRYVWRKKGEACKPKNTIPTVKHGGGSIMLWGCFAAGGTGALHKIDGIMDAVQYVDILKQHLKTSVRKLKLGRKWVFQHDNDPKHTSKVVAKWLKDNKVKVLEWPSQSPDLNPIENLWAELKKRVRARRPTNLTQLHQLCQEEWAKIHPNYCGKLVEGYPKRLTQVKQFKGNATKY

SEQ ID NO: 14487 - protein, 594 aa, synthetic construct
  source 1..594: note = Synthetic Sequence
MGSSLDDEHILSALLQSDDELVGEDSDSEISDHVSEDDVQSDTEEAFIDEVHEVQPTSSGSEILDEQNVIEQPGSSLASNRILTLPQRTIRGKNKHCWSTSKSTRRSRVSALNIVRSQRGPTRMCRNIYDPLLCFKLFFTDEIISEIVKWTNAEISLKRRESMTGATFRDTNEDEIYAFFGILVMTAVRKDNHMSTDDLFDRSLSMVYVSVMSRDRFDFLIRCLRMDDKSIRPTLRENDVFTPVRKIWDLFIHQCIQNYTPGAHLTIDEQLLGFRGRCPFRMYIPNKPSKYGIKILMMCDSGTKYMINGMPYLGRGTQTNGVPLGEYYVKELSKPVHGSCRNITCDNWFTSIPLAKNLLQEPYKLTIVGTVRSNKREIPEVLKNSRSRPVGTSMFCFDGPLTLVSYKPKPAKMVYLLSSCDEDASINESTGKPQMVMYYNQTKGGVDTLDQMCSVMTCSRKTNRWPMALLYGMINIACINSFIIYSHNVSSKGEKVQSRKKFMRNLYMSLTSSFMRKRLEAPTLKRYLRDNISNILPNEVPGTSDDSTEEPVMKKRTYCTYCPSKIRRKANASCKKCKKVICREHNIDMCQSCF

SEQ ID NO: 14488-14499 - skipped (12 entries)

SEQ ID NO: 14500 - DNA, 30 bp, synthetic construct
  source 1..30: mol_type = other DNA; note = Synthetic Sequence
gtgcacgaatttcgtgcaccgggccactag

SEQ ID NO: 14501 - protein, 1496 aa, synthetic construct
  source 1..1496: note = Synthetic Sequence
MSKEQLLIQRSSAAERCRRYRQKMSAEQRASDLERRRRLQQNVSEEQLLEKRRSEAEKQRRHRQKMSKDQRAFEVERRRWRRQNMSREQSSTSTTNTGRNCLLSKNGVHEDAILEHSCGGMTVRCEFCLSLNFSDEKPSDGKFTRCCSKGKVCPNDIHFPDYPAYLKRLMTNEDSDSKNFMENIRSINSSFAFASMGANIASPSGYGPYCFRIHGQVYHRTGTLHPSDGVSRKFAQLYILDTAEATSKRLAMPENQGCSERLMININNLMHEINELTKSYKMLHEVEKEAQSEAAAKGIAPTEVTMAIKYDRNSDPGRYNSPRVTEVAVIFRNEDGEPPFERDLLIHCKPDPNNPNATKMKQISILFPTLDAMTYPILFPHGEKGWGTDIALRLRDNSVIDNNTRQNVRTRVTQMQYYGFHLSVRDTFNPILNAGKLTQQFIVDSYSKMEANRINFIKANQSKLRVEKYSGLMDYLKSRSENDNVPIGKMIILPSSFEGSPRNMQQRYQDAMAIVTKYGKPDLFITMTCNPKWADITNNLQRWQKVENRPDLVARVFNIKLNALLNDICKFHLFGKVIAKIHVIEFQKRGLPHAHILLILDSESKLRSEDDIDRIVKAEIPDEDQCPRLFQIVKSNMVHGPCGIQNPNSPCMENGKCSKGYPKEFQNATIGNIDGYPKYKRRSGSTMSIGNKVVDNTWIVPYNPYLCLKYNCHINVEVCASIKSVKYLFKYIYKGHDCANIQISEKNIINHDEVQDFIDSRYVSAPEAVWRLFAMRMHDQSHAITRLAIHLPNDQNLYFHTDDFAEVLDRAKRHNSTLMAWFLLNREDSDARNYYYWEIPQHYVFNNSLWTKRRKGGNKVLGRLFTVSFREPERYYLRLLLLHVKGAISFEDLRTVGGVTYDTFHEAAKHRGLLLDDTIWKDTIDDAIILNMPKQLRQLFAYICVFGCPSAADKLWDENKSHFIEDFCWKLHRREGACVNCEMHALNEIQEVFTLHGMKCSHFKLPDYPLLMNANTCDQLYEQQQAEVLINSLNDEQLAAFQTITSAIEDQTVHPKCFFLDGPGGSGKTYLYKVLTHYIRGRGGTVLPTASTGIAANLLLGGRTFHSQYKLPIPLNETSISRLDIKSEVAKTIKKAQLLIIDECTMASSHAINAIDRLLREIMNLNVAFGGKVLLLGGDFRQCLSIVPHAMRSAIVQTSLKYCNVWGCFRKLSLKTNMRSEDSAYSEWLVKLGDGKLDSSFHLGMDIIEIPHEMICNGSIIEATFGNSISIDNIKNISKRAILCPKNEHVQKLNEEILDILDGDFHTYLSDDSIDSTDDAEKENFPIEFLNSITPSGMPCHKLKLKVGAIIMLLRNLNSKWGLCNGTRFIIKRLRPNIIEAEVLTGSAEGEVVLIPRIDLSPSDTGLPFKLIRRQFPVMPAFAMTINKSQGQTLDRVGIFLPEPVFAHGQLYVAFSRVRRACDVKVKVVNTSSQGKLVKHSESVFTLNVVYREILE

SEQ ID NO: 14502 - protein, 649 aa, synthetic construct
  source 1..649: note = Synthetic Sequence
MEEVCDSSAAASSTVQNQPQDQEHPWPYLREFFSLSGVNKDSFKMKCVLCLPLNKEISAFKSSPSNLRKHIERMHPNYLKNYSKLTAQKRKIGTSTHASSSKQLKVDSVFPVKHVSPVTVNKAILRYIIQGLHPFSTVDLPSFKELISTLQPGISVITRPTLRSKIAEAALIMKQKVTAAMSEVEWIATTTDCWTARRKSFIGVTAHWINPGSLERHSAALACKRLMGSHTFEVLASAMNDIHSEYEIRDKVVCTTTDSGSNFMKAFRVFGVENNDIETEARRCESDDTDSEGCGEGSDGVEFQDASRVLDQDDGFEFQLPKHQKCACHLLNLVSSVDAQKALSNEHYKKLYRSVFGKCQALWNKSSRSALAAEAVESESRLQLLRPNQTRWNSTFMAVDRILQICKEAGEGALRNICTSLEVPMFNPAEMLFLTEWANTMRPVAKVLDILQAETNTQLGWLLPSVHQLSLKLQRLHHSLRYCDPLVDALQQGIQTRFKHMFEDPEIIAAAILLPKFRTSWTNDETIIKRGMDYIRVHLEPLDHKKELANSSSDDEDFFASLKPTTHEASKELDGYLACVSDTRESLLTFPAICSLSIKTNTPLPASAACERLFSTAGLLFSPKRARLDTNNFENQLLLKLNLRFYNFE

SEQ ID NO: 14503 - skipped

SEQ ID NO: 14504 - protein, 610 aa, Bombyx mori
MDIERQEERIRAMLEEELSDYSDESSSEDETDHCSEHEVNYDTEEERIDSVDVPSNSRQEEANAIIANESDSDPDDDLPLSLVRQRASASRQVSGPFYTSKDGTKWYKNCQRPNVRLRSENIVTEQAQVKNIARDASTEYECWNIFVTSDMLQEILTHTNSSIRHRQTKTAAENSSAETSFYMQETTLCELKALIALLYLAGLIKSNRQSLKDLWRTDGTGVDIFRTTMSLQRFQFLQNNIRFDDKSTRDERKQTDNMAAFRSIFDQFVQCCQNAYSPSEFLTIDEMLLSFRGRCLFRVYIPNKPAKYGIKILALVDAKNFDVVNLEVYAGKQPSGPYAVSNRPFEVVERLIQPVARSHRNVTFDNWFTGYELMLHLLNEYRLTSVGTVRKNKRQIPESFIRTDRQPNSSVFGFQKDITLVSYAPKKNKVVVVMSTMHHDNSIDESTGEKQKPEMITFYNSTKAGVDVVDELSANYNVSRNSKRWPMTLFYGVLNMAAINACIIYRANKNVTIKRTEFIRSLGLSMIYEHLHSRNKKKNIPTYLRQRIEKQLGEPSPRHVNVPGRYVRCQDCPYKKDRKTKHSCNACAKPICMEHAKFLCENCAELDSSL

SEQ ID NO: 14505 - protein, 610 aa, Bombyx mori
MDIERQEERIRAMLEEELSDYSDESSSEDETDHCSEHEVNYDTEEERIDSVDVPSNSRQEEANAIIANESDSDPDDDLPLSLVRQRASASRQVSGPFYTSKDGTKWYKNCQRPNVRLRSENIVTEQAQVKNIARDASTEYECWNIFVTSDMLQEILTHTNSSIRHRQTKTAAENSSAETSFYMQETTLCELKALIALLYLAGLIKSNRQSLKDLWRTDGTGVDIFRTTMSLQRFQFLQNNIRFDDKSTRDERKQTDNMAAFRSIFDQFVQCCQNAYSPSEFLTIDEMLLSFRGRCLFRVYIPNKPAKYGIKILALVDAKNFYVVNLEVYAGKQPSGPYAVSNRPFEVVERLIQPVARSHRNVTFDNWFTGYELMLHLLNEYRLTSVGTVRKNKRQIPESFIRTDRQPNSSVFGFQKDITLVSYAPKKNKVVVVMSTMHHDNSIDESTGEKQKPEMITFYNSTKAGVDVVDELCANYNVSRNSKRWPMTLFYGVLNMAAINACIIYRTNKNVTIKRTEFIRSLGLSMIYEHLHSRNKKKNIPTYLRQRIEKQLGEPSPRHVNVPGRYVRCQDCPYKKDRKTKRSCNACAKPICMEHAKFLCENCAELDSSL

SEQ ID NO: 14506 - DNA, 375 bp, Bombyx mori
  source 1..375: mol_type = genomic DNA
ttatcccggcgagcatgaggcagggtatctcataccctggtaaaattttaaagttgtgtattttataaaattttcgtctgacaacactagcgcgctcagtagctggaggcaggagcgtgcgggaggggatagtggcgtgatcgcagtgtggcacgggacaccggcgagatattcgtgtgcaaacctgtttcgggtatgttataccctgcctcattgttgacgtattttttttatgtaatttttccgattattaatttcaactgttttattggtatttttatgttatccattgttctttttttatgatttactgtatcggttgtctttcgttcctttagttgagtttttttttattattttcagtttttgatcaaa

SEQ ID NO: 14507 - DNA, 368 bp, Bombyx mori
  source 1..368: mol_type = genomic DNA
tcatatttttagtttaaaaaaataattatatgttttataatgaaaagaatctcattatctttcagtattaggttgatttatattccaaagaataatatttttgttaaattgttgatttttgtaaacctctaaatgtttgttgctaaaattactgtgtttaagaaaaagattaataaataataataatttcataattaaaaacttctttcattgaatgccattaaataaaccattattttacaaaataagatcaacataattgagtaaataataataagaacaatattatagtacaacaaaatatgggtatgtcataccctgccacattcttgatgtaactttttttcacctcatgctcgccgggttat

SEQ ID NO: 14508 - DNA, 214 bp, Bombyx mori
  source 1..214: mol_type = genomic DNA
ttatcccggcgagcatgaggcagggtatctcataccctggtaaaattttaaagttgtgtattttataaaattttcgtctgacaacactagcgcgctcagtagctggaggcaggagcgtgcgggaggggatagtggcgtgatcgcagtgtggcacgggacaccggcgagatattcgtgtgcaaacctgtttcgggtatgttataccctgcctcat

SEQ ID NO: 14509 - DNA, 195 bp, Bombyx mori
  source 1..195: mol_type = genomic DNA
taaataataataatttcataattaaaaacttctttcattgaatgccattaaataaaccattattttacaaaataagatcaacataattgagtaaataataataagaacaatattatagtacaacaaaatatgggtatgtcataccctgccacattcttgatgtaactttttttcacctcatgctcgccgggttat

SEQ ID NO: 14510 - DNA, 16 bp, synthetic construct
  source 1..16: mol_type = other DNA; note = Synthetic Sequence
cccggcgagcatgagg

SEQ ID NO: 14511 - DNA, 20 bp, synthetic construct
  source 1..20: mol_type = other DNA; note = Synthetic Sequence
ttatcccggcgagcatgagg

SEQ ID NO: 14512 - DNA, 20 bp, synthetic construct
  source 1..20: mol_type = other DNA; note = Synthetic Sequence
cctcatgctcgccgggttat

SEQ ID NO: 14513 - DNA, 20 bp, synthetic construct
  source 1..20: mol_type = other DNA; note = Synthetic Sequence
ttaacccggcgagcatgagg

SEQ ID NO: 14514 - DNA, 20 bp, synthetic construct
  source 1..20: mol_type = other DNA; note = Synthetic Sequence
cctcatgctcgccgggttaa

SEQ ID NO: 14515 - DNA, 375 bp, Bombyx mori
  source 1..375: mol_type = genomic DNA
ttaacccggcgagcatgaggcagggtatctcataccctggtaaaattttaaagttgtgtattttataaaattttcgtctgacaacactagcgcgctcagtagctggaggcaggagcgtgcgggaggggatagtggcgtgatcgcagtgtggcacgggacaccggcgagatattcgtgtgcaaacctgtttcgggtatgttataccctgcctcattgttgacgtattttttttatgtaatttttccgattattaatttcaactgttttattggtatttttatgttatccattgttctttttttatgatttactgtatcggttgtctttcgttcctttagttgagtttttttttattattttcagtttttgatcaaa

SEQ ID NO: 14516 - DNA, 797 bp, Bombyx mori
  source 1..797: mol_type = genomic DNA
tcatatttttagtttaaaaaaataattatatgttttataatgaaaagaatctcattatctttcagtattaggttgatttatattccaaagaataatatttttgttaaattgttgatttttgtaaacctctaaatgtttgttgctaaaattactgtgtttaagaaaaagattaataaataataataatttcataattaaaaacttctttcattgaatgccattaaataattcattattttacaaaataagatcaacataattgagtaaataataataagaacaatattatagtacaacaaaatatgggtatgtcataccctttttttttttttttttttttttttttcgggtagagggccgaacctcctacgaggtccccgcgcaaaaggggcgcgcggggtatgtgagactcaacgatctgcatggtgttgtgagcagaccgcgggcccaaggattttagagcccacccactaaacgactcctctgcactcttacacccgacgtccgatcccctccgaggtcagaacccggatgaggtaggggggctaccgcggtcaacactacaaccagacggcgcggctcaccccaaggacgcccagccgacggagccttcgaggcgaatcgaaggctctgaaacgtcggccgtctcggtacggcagcccgtcgggccgcccagacggtgccgctggtgtcccggaataccccgctggaccagaaccagcctgccgggtcgggacgcgatacaccgtcgaccggtcgctctaatcactccacggcagcgcgctagagtgctggta

SEQ ID NO: 14517 - protein, 589 aa, Xenopus tropicalis
MAKRFYSAEEAAAHCMASSSEEFSGSDSEYVPPASESDSSTEESWCSSSTVSALEEPMEVDEDVDDLEDQEAGDRADAAAGGEPAWGPPCNFPPEIPPFTTVPGVKVDTSNFEPINFFQLFMTEAILQDMVLYTNVYAEQYLTQNPLPRYARAHAWHPTDIAEMKRFVGLTLAMGLIKANSLESYWDTTTVLSIPVFSATMSRNRYQLLLRFLHFNNNATAVPPDQPGHDRLHKLRPLIDSLSERFAAVYTPCQNICIDESLLLFKGRLQFRQYIPSKRARYGIKFYKLCESSSGYTSYFLIYEGKDSKLDPPGCPPDLTVSGKIVWELISPLLGQGFHLYVDNFYSSIPLFTALYCLDTPACGTINRNRKGLPRALLDKKLNRGETYALRKNELLAIKFFDKKNVFMLTSIHDESVIREQRVGRPPKNKPLCSKEYSKYMGGVDRTDQLQHYYNATRKTRAWYKKVGIYLIQMALRNSYIVYKAAVPGPKLSYYKYQLQILPALLFGGVEEQTVPEMPPSDNVARLIGKHFIDTLPPTPGKQRPQKGCKVCRKRGIRRDTRYYCPKCPRNPGLCFKPCFEIYHTQLHY

SEQ ID NO: 14518 - protein, 589 aa, Xenopus tropicalis
MAKRFYSAEEAAAHCMAPSSEEFSGSDSEYVPPASESDSSTEESWCSSSTVSALEEPMEVDEDVDDLEDQEAGDRADAAAGGEPAWGPPCNFPPEIPPFTTVPGVKVDTSNFEPINFFQLFMTEAILQDMVLYTNVYAEQYLTQNPLPRYARAHAWHPTDIAEMKRFVGLTLAMGLIKANSLESYWNTTTVLSIPVFSATMSRNRYQLLLRFLHFNNNATAVPPDQPDHDRLHKLRPLIDSLSERFAAVYTPCQNICIDESLLLFKGRLRFRQYIPSKRARYGIKFYKLCESSSGYTSYFLIYEGKDSKLDPPGCPPDLTVSGKIVWELISPLLGQGFHLYVDNFYSSIPLFTALYCLDTPACGTINRTRKGLPRALLDKKLNRGETYALRKNELLAIKFFDKKNVFMLTSIHDESVIREQRVGRPPKNKPLCSKEYSKYMGGVDRTDQLQHYYNATRKTSAWYKKVGIYLIQMALRNSYIVYKAAVPGPKLSYYKYQLQILPALLFGGVEEQTVPEMLPSDNVARLIGKHFIDTLPPTPGKQRPQKGCKVCRKRGIRRDTRYYCPKCPRNPGLCFKPCFEIYHTQLHY

SEQ ID NO: 14519 - DNA, 185 bp, Xenopus tropicalis
  source 1..185: mol_type = genomic DNA
ttaacctttttactgccaatgacgcatgggatacgtcgtggcagtaaaagggcttaaatgccaacgacgcgtcccatacgttgttggcattttaagtcttctctctgcagcggcagcatgtgccgccgctgcagagagtttctagcgatgacagcccctctgggcaacgagccgggggggctgtc

SEQ ID NO: 14520 - DNA, 237 bp, Xenopus tropicalis
  source 1..237: mol_type = genomic DNA
tttgcatttttagacatttagaagcctatatcttgttacagaattggaattacacaaaaattctaccatattttgaaagcttaggttgttctgaaaaaaacaatatattgttttcctgggtaaactaaaagtcccctcgaggaaaggcccctaaagtgaaacagtgcaaaacgttcaaaaactgtctggcaatacaagttccactttgaccaaaacggctggcagtaaaagggttaa

SEQ ID NO: 14521 - DNA, 185 bp, Xenopus tropicalis
  source 1..185: mol_type = genomic DNA
ttaaccctttgcctgccaatcacgcatgggatacgtcgtggcagtaaaagggcttaaatgccaacgacgcgtcccatacgttgttggcattttaagtcttctctctgcagcggcagcatgtgccgccgctgcagagagtttctagcgatgacagcccctctgggcaacgagccgggggggctgtc

SEQ ID NO: 14522 - DNA, 238 bp, Xenopus tropicalis
  source 1..238: mol_type = genomic DNA
tttgcatttttagacatttagaagcctatatcttgttacagaattggaattacacaaaaattctaccatattttgaaagcttaggttgttctgaaaaaaacaatatattgttttcctgggtaaactaaaagtcccctcgaggaaaggcccctaaagtgaaacagtgcaaaacgttcaaaaactgtctggcaatacaagttccactttgggacaaatcggctggcagtgaaagggttaa

SEQ ID NO: 14523 - DNA, 185 bp, Xenopus tropicalis
  source 1..185: mol_type = genomic DNA
ttaacctttttactgccaatgacgcatgggatacgtcgtggcagtaaaagggcttaaatgccaacgacgcgtcccatacgttgttggcattttaattcttctctctgcagcggcagcatgtgccgccgctgcagagagtttctagcgatgacagcccctctgggcaacgagccgggggggctgtc

SEQ ID NO: 14524 - DNA, 18 bp, synthetic construct
  source 1..18: mol_type = other DNA; note = Synthetic Sequence
ttaacctttttactgcca

SEQ ID NO: 14525 - protein, 597 aa, unidentified
  source 1..597: note = Helicoverpa armigera
MASRQRLNHDEIATILENDDDYSPLDSESEKEDCVVEDDVWSDNEDAIVDFVEDTSAQEDPDNNIASRESPNLEVTSLTSHRIITLPQRSIRGKNNHVWSTTKGRTTGRTSAINIIRTNRGPTRMCRNIVDPLLCFQLFITDEIIHEIVKWTNVEIIVKRQNLKDISASYRDTNTMEIWALVGILTLTAVMKDNHLSTDELFDATFSGTRYVSVMSRERFEFLIRCIRMDDKTLRPTLRSDDAFLPVRKIWEIFINQCRQNHVPGSNLTVDEQLLGFRGRCPFRMYIPNKPDKYGIKFPMMCAAATKYMIDAIPYLGKSTKTNGLPLGEFYVKDLTKTVHGTNRNITCDNWFTSIPLAKNMLQAPYNLTIVGTIRSNKREMPEEIKNSRSRPVGSSMFCFDGPLTLVSYKPKPSKMVFLLSSCDENAVINESNGKPDMILFYNQTKGGVDSFDQMCKSMSANRKTNRWPMAVFYGMLNMAFVNSYIIYCHNKINKQEKPISRKEFMKKLSIQLTTPWMQERLQAPTLKRTLRDNITNVLKNVVPASSENISNEPEPKKRRYCGVCSYKKRRMTKAQCCKCKKAICGEHNIDVCQDCI

SEQ ID NO: 14526 - DNA, 18 bp, synthetic construct
  source 1..18: mol_type = other DNA; note = Synthetic Sequence
ttaaccctttgcctgcca

SEQ ID NO: 14527 - DNA, 18 bp, synthetic construct
  source 1..18: mol_type = other DNA; note = Synthetic Sequence
ttaaccyttttactgcca

SEQ ID NO: 14528 - DNA, 367 bp, unidentified
  source 1..367: mol_type = genomic DNA; note = Helicoverpa armigera
agactgtttttttctaagagacttctaaaatattattacgagttgatttaattttatgaaaacatttaaaactagttgattttttttataattacataattttaagaaaaagtgttagaggcttgatttttttgttgattttttctaagatttgattaaagtgccataatagtattaataaagagtattttttaacttaaaatgtattttatttattaattaaaacttcaattatgataactcatgcaaaaatatagttcattaacagaaaaaaataggaaaactttgaagttttgtttttacacgtcatttttacgtatgattgggctttatagctagttaaatatgattgggcttctagggttaa

SEQ ID NO: 14529 - DNA, 18 bp, synthetic construct
  source 1..18: mol_type = other DNA; note = Synthetic Sequence
tggcagtaaaagggttaa

SEQ ID NO: 14530 - protein, 628 aa, unidentified
  source 1..628: note = Pectinophora gossypiella
MDLRKQDEKIRQWLEQDIEEDSKGESDNSSSETEDIVEMEVHKNTSSESEVSSESDYEPVCPSKRQRTQIIESEESDNSESIRPSRRQTSRVIDSDETDEDVMSSTPQNIPRNPNVIQPSSRFLYGKNKHKWSSAAKPSSVRTSRRNIIHFIPGPKERAREVSEPIDIFSLFISEDMLQQVVTFTNAEMLIRKNKYKTETFTVSPTNLEEIRALLGLLFNAAAMKSNHLPTRMLFNTHRSGTIFKACMSAERLNFLIKCLRFDDKLTRNVRQRDDRFAPIRDLWQALISNFQKWYTPGSYITVDEQLVGFRGRCSFRMYIPNKPNKYGIKLVMAADVNSKYIVNAIPYLGKGTDPQNQPLATFFIKEITSTLHGTNRNITMDNWFTSVPLANELLMAPYNLTLVGTLRSNKREIPEKLKNSKSRAIGTSMFCYDGDKTLVSYKAKSNKVVFILSTIHDQPDINQETGKPEMIHFYNSTKGAVDTVDQMCSSISTNRKTQRWPLCVFYNMLNLSIINAYVVYVYNNVRNNKKPMSRRDFVIKLGDQLMEPWLRQRLQTVTLRRDIKVMIQDILGESSDLEAPVPSVSNVRKIYYLCPSKARRMTKHRCIKCKQAICGPHNIDICSRCIE

SEQ ID NO: 14531 - DNA, 18 bp, synthetic construct
  source 1..18: mol_type = other DNA; note = Synthetic Sequence
tggcagtgaaagggttaa

SEQ ID NO: 14532 - DNA, 406 bp, unidentified
  source 1..406: mol_type = genomic DNA; note = Pectinophora gossypiella
ttaaccctagataactaaacattcgtccgctcgacgacgcgctatgccgcgaaattgaagtttacctattattccgcgtcccccgcccccgccgctttttctagcttcctgatttgcaaaatagtgcatcgcgtgacacgctcgaggtcacacgacaattaggtcgaaagttacaggaatttcgtcgtccgctcgacgaaagtttagtaattacgtaagtttggcaaaggtaagtgaatgaagtatttttttataattattttttaattctttatagtgataacgtaaggtttatttaaatttattacttttatagttatttagccaattgttataaattccttgttattgctgaaaaatttgcctgttttagtcaaaatttattaacttttcgatcgttttttag

SEQ ID NO: 14533 - protein, 18 aa, synthetic construct
  source 1..18: note = Synthetic Sequence
TTAACCYTTTKMCTGCCA

SEQ ID NO: 14534 - protein, 599 aa, unidentified
  source 1..599: note = Ctenoplusia agnata
MASRQHLYQDEIAAILENEDDYSPHDTDSEMEDCVTQDDVRSDVEDEMVDNIGNGTSPASRHEDPETPDPSSEASNLEVTLSSHRIIILPQRSIREKNNHIWSTTKGQSSGRTAAINIVRTNRGPTRMCRNIVDPLLCFQLFIKEEIVEEIVKWTNVEMVQKRVNLKDISASYRDTNEMEIWAIISMLTLSAVMKDNHLSTDELFNVSYGTRYVSVMSRERFEFLLRLLRMGDKLLRPNLRQEDAFTPVRKIWEIFINQCRLNYVPGTNLTVDEQLLGFRGRCPFRMYIPNKPDKYGIKFPMVCDAATKYMVDAIPYLGKSTKTQGLPLGEFYVKELTQTVHGTNRNVTCDNWFTSVPLAKSLLNSPYNLTLVGTIRSNKREIPEEVKNSRSRQVGSSMFCFDGPLTLVSYKPKPSKMVFLLSSCNEDAVVNQSNGKPDMILFYNQTKGGVDSFDQMCSSMSTNRKTNRWPMAVFYGMLNMAFVNSYIIYCHNMLAKKEKPLSRKDFMKKLSTDLTTPSMQKRLEAPTLKRSLRDNITNVLKIVPQAAIDTSFDEPEPKKRRYCGFCSYKKKRMTKTQCFKCKKPVCGEHNIDVCQDCI

SEQ ID NO: 14535 - DNA, 326 bp, unidentified
  source 1..326: mol_type = genomic DNA; note = Ctenoplusia agnata
ttaaccctagaagcccaatctacgtcattctgacgtgtatgtcgccgaaaatactctgtctctttctcctgcacgatcggattgccgcgaacgctcgattcaacccagttggcgccgagatctattggaggactgcggcgttgattcggtaagtcccgccattttgtcatagtaacagtattgcacgtcagcttgacgtatatttgggctttgtgttatttttgtaaattttcaacgttagtttattattgcatctttttgttacattactggtttatttgcatgtattactcaaatattatttttattttagcgtagaaaataca

SEQ ID NO: 14536 - DNA, 370 bp, unidentified
  source 1..370: mol_type = genomic DNA; note = Ctenoplusia agnata
agactgttttttttgtatttgcattatatattatattctaaagttgatttaattctaagaaaaacattaaaataagtttctttttgtaaaatttaattaattataagaaaaagtttaagttgatctcattttttataaaaatttgcaatgtttccaaagttattattgtaaaagaataaataaaagtaaactgagttttaattgatgttttattatatcattatactatatattacttaaataaaacaataactgaatgtatttctaaaaggaatcactagaaaatatagtgatcaaaaatttacacgtcatttttgcgtatgattgggctttataggttctaaaaatatgattgggcctctagggttaa

SEQ ID NO: 14537 - protein, 597 aa, Agrotis ipsilon
MESRQRLNQDEIATILENDDDYSPLDSDSEAEDRVVEDDVWSDNEDAMIDYVEDTSRQEDPDNNIASQESANLEVTSLTSHRIISLPQRSICGKNNHVWSTTKGRTTGRTSAINIIRTNRGPTRMCRNIVDPLLCFQLFITDEIIHEIVKWTNVEMIVKRQNLIDISASYRDTNTMEMWALVGILTLTAVMKDNHLSTDELFDATFSGTRYVSVMSRERFEFLIRCMRMDDKTLRPTLRSDDAFIPVRKLWEIFINQCRLNYVPGGNLTVDEQLLGFRGRCPFRMYIPNKPDKYGIRFPMMCDAATKYMIDAIPYLGKSTKTNGLPLGEFYVKELTKTVHGTNRNVTCDNWFTSIPLAKNMLQAPYNLTIVGTIRSNKREIPEEIKNSRSRPVGSSMFCFDGPLTLVSYKPKPSRMVFLLSSCDENAVINESNGKPDMILFYNQTKGGVDSFDQMCKSMSANRKTNRWPMAVFYGMLNMAFVNSYIIYCHNKINKQKKPINRKEFMKNLSTDLTTPWMQERLKAPTLKRTLRDNITNVLKNVVPPSPANNSEEPGPKKRSYCGFCSYKKRRMTKTQFYKCKKAICGEHNIDVCQDCV

SEQ ID NO: 14538 - DNA, 323 bp, Agrotis ipsilon
  source 1..323: mol_type = genomic DNA
ttaaccctagaagcccaatctacgtaaatttgacgtataccgcggcgaaatatatctgtctctttcacgtttaccgtcggattcccgctaacttcggaaccaactcagtagccattgagaactcccaggacacagttgcgtcatctcggtaagtgccgccattttgttgtaatagacaggttgcacgtcattttgacgtataattgggctttgtgtaacttttgaaattatttataatttttattgatgtgatttatttgagttaatcgtattgtttcgttacatttttcatatgatattaatattttcagattgaatataaa

SEQ ID NO: 14539 - DNA, 367 bp, Agrotis ipsilon
  source 1..367: mol_type = genomic DNA
agactgttttttttaaaaggcttataaagtattactattgcgtgatttaattttataaaaatatttaaaaccagttgatttttttaataattacctaattttaagaaaaaatgttagaagcttgatatttttgttgatttttttctaagatttgattaaaaggccataattgtattaataaagagtatttttaacttcaaatttattttatttattaattaaaacttcaattatgataatacatgcaaaaatatagttcatcaacagaaaaatataggaaaactctaatagttttatttttacacgtcatttttacgtatgattgggctttatagctagtcaaatatgattgggcttctagggttaa

SEQ ID NO: 14540 - protein, 520 aa, Megachile rotundata
MNGKDSLGEFYLDDLSDCLDCRSASSTDDESDSSNIAIRKRCPIPLIYSDSEDEDMNNNVEDNNHFVKESNRYHYQIVEKYKITSKTKKWKDVTVTEMKKFLGLIILMGQVKKDVLYDYWSTDPSIETPFFSKVMSRNRFLQIMQSWHFYNNNDISPNSHRLVKIQPVIDYFKEKFNNVYKSDQQLSLDECLIPWRGRLSIKTYNPAKITKYGILVRVLSEARTGYVSNFCVYAADGKKIEETVLSVIGPYKNMWHHVYQDNYYNSVNIAKIFLKNKLRVCGTIRKNRSLPQILQTVKLSRGQHQFLRNGHTLLEVWNNGKRNVNMISTIHSAQMAESRNRSRTSDCPIQKPISIIDYNKYMKGVDRADQYLSYYSIFRKTKKWTKRVVMFFINCALFNSFKVYTTLNGQKITYKNFLHKAALSLIEDCGTEEQGTDLPNSEPTTTRTTSRVDHPGRLENFGKHKLVNIVTSGQCKKPLRQCRVCASKKKLSRTGFACKYCNVPLHKGDCFERYHSLKKY

SEQ ID NO: 14541 - DNA, 246 bp, Megachile rotundata
  source 1..246: mol_type = genomic DNA
ttaaataatgcccactctagatgaacttaacactttaccgaccggccgtcgattattcgacgtttgctccccagcgcttaccgaccggccatcgattattcgacgtttgcttcccagcgcttaccgaccggtcatcgacttttgatctttccgttagatttggttaggtcagattgacaagtagcaagcatttcgcattctttattcaaataatcggtgcttttttctaagctttagcccttagaa

SEQ ID NO: 14542 - DNA, 244 bp, Megachile rotundata
  source 1..244: mol_type = genomic DNA
acaacttcttttttcaacaaatattgttatatggattatttatttatttatttatttatggtatattttatgtttatttatttatggttattatggtatattttatgtaaataataaactgaaaacgattgtaatagatgaaataaatattgttttaacactaatataattaaagtaaaagattttaataaatttcgttaccctacaataacacgaagcgtacaattttaccagagtttattaa

SEQ ID NO: 14543 - protein, 570 aa, Bombus impatiens
MNEKNGIGEFYLDDLSDCPDSYSRSNSGDESDGSDTIIRKRGSVLPPRYSDSEDDEINNVEDNANNVENNDDIWSTNDEAIILEPFEGSPGLKIMPSSAESVTDNVNLFFGDDFFEHLVRESNRYHYQVMEKYKIPSKAKKWTDITVPEMKKFLGLIVLMGQIKKDVLYDYWSTDPSIETPFFSQVMSRNRFVQIMQSWHFCNNDNIPHDSHRLAKIQPVIDYFRRKFNDVYKPCQQLSLDESIIPWRGRLSIKTYNPAKITKYGILVRVLSEAVTGYVCNFDVYAADGKKLEDTAVIEPYKNIWHQIYQDNYYNSVKMARILLKNKVRVCGTIRKNRGLPRSLKTIQLSRGQYEFRRNHQILLEVWNNGRRNVNMISTIHSAQLMESRSKSKRSDVPIQKPNSIIDYNKYMKGVDRADQYLAYYSIFRKTKKWTKRVVMFFINCALFNSFRVYTILNGKNITYKNFLHKVAVSWIEDGETNCTEQDDNLPNSEPTRRAPRLDHPGRLSNYGKHKLINIVTSGRSLKPQRQCRVCAVQKKRSRTCFVCKFCNVPLHKGDCFERYHTLKKY

SEQ ID NO: 14544 - DNA, 278 bp, Bombus impatiens
  source 1..278: mol_type = genomic DNA
ttaattttttaacattttaccgaccgatagccgattaatcgggtttttgccgctgacgcttaccgaccgataacctattaatcggctttttgtcgtcgaagcttaccaacctatagcctacctatagttaatcggttgccatggcgataaacaatctttctcattatatgagcagtaatttgttatttagtactaaggtaccttgctcagttgcgtcagttgcgttgctttgtaagctcccacagttttataccaattcgaaaaacttaccgttcgcg

SEQ ID NO: 14545 - DNA, 384 bp, Bombus impatiens
  source 1..384: mol_type = genomic DNA
actatttcacatttgaactaaaaaccgttgtaatagataaaataaatataatttagtattaatattatggaaacaaaagattttattcaatttaattatcctatagtaacaaaaagcggccaattttatctgagcatacgaaaagcacagatactcccgcccgacagtctaaaccgaaacagagccggcgccagggagaatctgcgcctgagcagccggtcggacgtgcgtttgctgttgaaccgctagtggtcagtaaaccagaaccagtcagtaagccagtaactgatcagttaactagattgtatagttcaaattgaacttaatctagtttttaagcgtttgaatgttgtctaacttcgttatatattatattctttttaa

SEQ ID NO: 14546 - protein, 345 aa, unidentified
  source 1..345: note = Mamestra brassicae
MFSFVPNKEQTRTVLIFCFHLKTTAAESHRPLVEAFGEQVPTVKTCERWFQRFKSGDFDVDDKEHGKPPKRYEDAELQALLDEDDAQTQKQLAEQLEVSQQAVSNRLREGGKIQKVGRWVPHELNERQRERRKNTCEILLSRYKRKSFLHRIVTGEEKWIFFVNPKRKKSYVDPGQPATSTARPNRFGKKTRLCVWWDQSGVIYYELLKPGETVNTARYQQQLINLNRALQRKRPEYQKRQHRVIFLHDNAPSHTARAVRDTLETLNWEVLPHAAYSPDLAPSDYHLFASMGHALAEQRFDSYESVEEWLDEWFAAKDDEFYWRGIHKLPERWDNCVASDGKYFE

SEQ ID NO: 14547 - DNA, 174 bp, unidentified
  source 1..174: mol_type = genomic DNA; note = Mamestra brassicae
ttattgggttgcccaaaaagtaattgcggatttttcatatacctgtcttttaaacgtacatagggatcgaactcagtaaaactttgaccttgtgaaataacaaacttgactgtccaaccaccatagtttggcgcgaattgagcgtcataattgttttgactttttgcagtcaac

SEQ ID NO: 14548 - DNA, 79 bp, unidentified
  source 1..79: mol_type = genomic DNA; note = Mamestra brassicae
atgattttttctttttaaaccaattttaattagttaattgatataaaaatccgcaattactttttgggcaacccaataa

SEQ ID NO: 14549 - protein, 347 aa, Mayetiola destructor
MENFENWRKRRHLREVLLGHFFAKKTAAESHRLLVEVYGEHALAKTQCFEWFQRFKSGDFDTEDKERPGQPKKFEDEELEALLDEDCCQTQEELAKSLGVTQQAISKRLKAAGYIQKQGNWVPHELKPRDVERRFCMSEMLLQRHKKKSFLSRIITGDEKWIHYDNSKRKKSYVKRGGRAKSTPKSNLHGAKVMLCIWWDQRGVLYYELLEPGQTITGDLYRTQLIRLKQALAEKRPEYAKRHGAVIFHHDNARPHVALPVKNYLENSGWEVLPHPPYSPDLAPSDYHLFRSMQNDLAGKRFTSEQGIRKWLDSFLAAKPAKFFEKGIHELSERWEKVIASDGQYFE

SEQ ID NO: 14550 - DNA, 267 bp, Mayetiola destructor
  source 1..267: mol_type = genomic DNA
taagacttccaaaatttccacccgaactttaccttccccgcgcattatgtctctcttttcaccctctgatccctggtattgttgtcgagcacgatttatattgggtgtacaacttaaaaaccggaattggacgctagatgtccacactaacgaatagtgtaaaagcacaaatttcatatatacgtcattttgaaggtacatttgacagctatcaaaatcagtcaataaaactattctatctgtgtgcatcatatttttttattaact

SEQ ID NO: 14551 - DNA, 188 bp, Mayetiola destructor
  source 1..188: mol_type = genomic DNA
tgcattcattcattttgttatcgaaataaagcattaattttcactaaaaaattccggtttttaagttgtacacccaatatcatccttagtgacaattttcaaatggctttcccattgagctgaaaccgtggctctagtaagaaaaacgcccaacccgtcatcatatgccttttttttctcaacatccg

SEQ ID NO: 14552 - protein, 342 aa, Apis mellifera
MENQKEHYRHILLFYFRKGKNASQAHKKLCAVYGDEALKERQCQNWFDKFRSGDFSLKDEKRSGRPVEVDDDLIKAIIDSDRHSTTREIAEKLHVSHTCIENHLKQLGYVQKLDTWVPHELKEKHLTQRINSCDLLKKRNENDPFLKRLITGDEKWVVYNNIKRKRSWSRPREPAQTTSKAGIHRKKVLLSVWWDYKGIVYFELLPPNRTINSVVYIEQLTKLNNAVEEKRPELTNRKGVVFHHDNARPHTSLVTRQKLLELGWDVLPHPPYSPDLAPSDYFLFRSLQNSLNGKNFNNDDDIKSYLIQFFANKNQKFYERGIMMLPERWQKVIDQNGQHITE

SEQ ID NO: 14553 - DNA, 184 bp, Apis mellifera
  source 1..184: mol_type = genomic DNA
ttgggttggcaactaagtaattgcggatttcactcatagatggcttcagttgaatttttaggtttgctggcgtagtccaaatgtaaaacacattttgttatttgatagttggcaattcagctgtcaatcagtaaaaaaagttttttgatcggttgcgtagttttcgtttggcgttcgttgaaaa

SEQ ID NO: 14554 - DNA, 74 bp, Apis mellifera
  source 1..74: mol_type = genomic DNA
agttatttagttccatgaaaaaattgtctttgattttctaaaaaaaatccgcaattacttagttgccaatccaa

SEQ ID NO: 14555 - protein, 345 aa, Messor bouvieri
MSSFVPENVHLRHALLFLFHQKKRAAESHRLLVETYGEHAPTIRTCETWFRQFKCGDFNVQDKERPGRPKTFEDAELQELLDEDSTQTQKQLAEKLNVSRVAICERLQAMGKIQKMGRWVPHELNDRQMENRKIVSEMLLQRYERKSFLHRIVTGDEKWIYFENPKRKKSWLSPGEAGPSTARPNRFGRKTMLCVWWDQIGVVYYELLKPGETVNTDRYRQQMINLNCALIEKRPQYAQRHDKVILQHDNAPSHTAKPVKEMLKSLGWEVLSHPPYSPDLAPSDYHLFASMGHALAEQHFADFEEVKKWLDEWFSSKEKLFFWNGIHKLSERWTKCIESNGQYFE

SEQ ID NO: 14556 - DNA, 242 bp, Messor bouvieri
  source 1..242: mol_type = genomic DNA
agtcagaaatgacacctcgatcgacgactaatcgacgtctaatcgacgtcgattttatgtcaacatgttaccaggtgtgtcggtaattcctttccggtttttccggcagatgtcactagccataagtatgaaatgttatgatttgatacatatgtcattttattctactgacattaaccttaaaactacacaagttacgttccgccaaaataacagcgttatagatttataattttttgaaa

SEQ ID NO: 14557 - DNA, 146 bp, Messor bouvieri
  source 1..146: mol_type = genomic DNA
ataaatttgaactatccattctaagtaacgtgttttctttaacgaaaaaaccggaaaagaattaccgacactcctggtatgtcaacatgttattttcgacattgaatcgcgtcgattcgaagtcgatcgaggtgtcatttctgact

SEQ ID NO: 14558 - protein, 594 aa, Trichoplusia ni; identical to SEQ ID NO: 14484

SEQ ID NO: 14559 - DNA, 313 bp, Trichoplusia ni
  source 1..313: mol_type = genomic DNA
ttaaccctagaaagatagtctgcgtaaaattgacgcatgcattcttgaaatattgctctctctttctaaatagcgcgaatccgtcgctgtgcatttaggacatctcagtcgccgcttggagctcccgtgaggcgtgcttgtcaatgcggtaagtgtcactgattttgaactataacgaccgcgtgagtcaaaatgacgcatgattatcttttacgtgacttttaagatttaactcatacgataattatattgttatttcatgttctacttacgtgataacttattatatatatattttcttgttatagatatc

SEQ ID NO: 14560 - DNA, 235 bp, Trichoplusia ni
  source 1..235: mol_type = genomic DNA
tttgttactttatagaagaaattttgagtttttgtttttttttaataaataaataaacataaataaattgtttgttgaatttattattagtatgtaagtgtaaatataataaaacttaatatctattcaaattaataaataaacctcgatatacagaccgataaaacacatgcgtcaattttacgcatgattatctttaacgtacgtcacaatatgattatctttctagggttaa

SEQ ID NO: 14561 - DNA, 309 bp, Trichoplusia ni
  source 1..309: mol_type = genomic DNA
ccctagaaagatagtctgcgtaaaattgacgcatgcattcttgaaatattgctctctctttctaaatagcgcgaatccgtcgctgtgcatttaggacatctcagtcgccgcttggagctcccgtgaggcgtgcttgtcaatgcggtaagtgtcactgattttgaactataacgaccgcgtgagtcaaaatgacgcatgattatcttttacgtgacttttaagatttaactcatacgataattatattgttatttcatgttctacttacgtgataacttattatatatatattttcttgttatagatatc

SEQ ID NO: 14562 - DNA, 231 bp, Trichoplusia ni
  source 1..231: mol_type = genomic DNA
tttgttactttatagaagaaattttgagtttttgtttttttttaataaataaataaacataaataaattgtttgttgaatttattattagtatgtaagtgtaaatataataaaacttaatatctattcaaattaataaataaacctcgatatacagaccgataaaacacatgcgtcaattttacgcatgattatctttaacgtacgtcacaatatgattatctttctaggg

SEQ ID NO: 14563 - DNA, 14 bp, synthetic construct
  source 1..14: mol_type = other DNA; note = Synthetic Sequence
ccytttkmctgcca

SEQ ID NO: 14564 - DNA, 16 bp, synthetic construct
  source 1..16: mol_type = other DNA; note = Synthetic Sequence
ccctagaagcccaatc

SEQ ID NO: 14565 - DNA, 17 bp, Aphis gossypii
  source 1..17: mol_type = genomic DNA
ccttccagcgggcgcgc

SEQ ID NO: 14566 - DNA, 13 bp, unidentified
  source 1..13: mol_type = genomic DNA; note = Chilo suppressalis
cccagattagcct

SEQ ID NO: 14567 - DNA, 16 bp, Heliothis virescens
  source 1..16: mol_type = genomic DNA
cccttaattactcgcg

SEQ ID NO: 14568 - DNA, 16 bp, unidentified
  source 1..16: mol_type = genomic DNA; note = Pectinophora gossypiella
ccctagataactaaac

SEQ ID NO: 14569 - DNA, 13 bp, Anopheles stephensi
  source 1..13: mol_type = genomic DNA
ccctagaaagata

SEQ ID NO: 14570 - DNA, 347 bp, unidentified
  source 1..347: mol_type = genomic DNA; note = Helicoverpa armigera
ttaaccctagaagcccaatctacgtaaatttgacgtataccgcggcgaaatatctctgtctctttcatgtttaccgtcggatcgccgctaacttctgaaccaactcagtagccattgggacctcgcaggacacagttgcgtcatctcggtaagtgccgccattttgttgtactctctattacaacacacgtcacgtcacgtcgttgcacgtcattttgacgtataattgggctttgtgtaacttttgaatttgtttcaaattttttatgtttgtgatttatttgagttaatcgtattgtttcgttacatttttcatataataataatattttcaggttgagtacaaa

SEQ ID NO: 14571 - DNA, 179 bp, unidentified
  source 1..179: mol_type = genomic DNA; note = Pectinophora gossypiella
tttcactaagtaattttgttcctatttagtagataagtaacacataattattgtgatattcaaaacttaagaggtttaataaataataataaaaaaaaaatggtttttatttcgtagtctgctcgacgaatgtttagttattacgtaaccgtgaatatagtttagtagtctagggttaa

SEQ ID NO: 14572 - protein, 589 aa, Xenopus tropicalis
MAKRFYSAEEAAAHCSASSSEEFSGSDSEYVPPASESDSSTEESWCSSSTVSALEEPMEVDEDVDDLEDQEAGDRADAAAGGEPAWGPPCNFPPEIPPFTTVPGVKVDTSNFEPINFFQLFMTEAILQDMVLYTNVYAEQYLTQNPLTRGARAHAWHPTDIAEMKRFVGLTLAMGLIKANSIESYWDTTTVLSIPVFGATMSRNRYQLLLRFLHFNNNATAVPPDQPGHDRLHKLRPLIDSLSERFANVYTPCQNICIDESLMLFKGRLQFRQYIPSKRARYGIKFYKLCESSTGYTSYFLIYEGKDSKLDPPGCPPDLTVSGKIVWELISPLLGQGFHLYVDNFYSSIPLFTALYCLNTPACGTINRNRKGLPRALLDKKLNRGETYALRKNELLAIKFFDKKNVFMLTSIHDESVIREQRVGRPPKNKPLCSKEYSKYMGGVDRTDQLQHYYNATRKTRHWYKKVGIYLIQMALRNSYIVYKAAVPGPKLSYYKYQLQILPALLFGGVEEQTVPEMPDSDNVARLIGKHFIDTLPPTPGKQRPQKGCKVCRKRGIRRDTRYYCPKCPRNPGLCRKPCFEIYHTQLHY

SEQ ID NO: 14573 - DNA, 78 bp, Xenopus tropicalis
  source 1..78: mol_type = genomic DNA
ccctttgcctgccaatcacgcatgggatacgtcgtggcagtaaaagggcttaaatgccaacgacgcgtcccatacgtt

SEQ ID NO: 14574 - DNA, 120 bp, Xenopus tropicalis
  source 1..120: mol_type = genomic DNA
cctgggtaaactaaaagtcccctcgaggaaaggcccctaaagtgaaacagtgcaaaacgttcaaaaactgtctggcaatacaagttccactttgggacaaatcggctggcagtgaaaggg

SEQ ID NO: 14575 - DNA, 14 bp, synthetic construct
  source 1..14: mol_type = other DNA; note = Synthetic Sequence
ccytttbmctgcca

SEQ ID NO: 14576 - protein, 610 aa, Bombyx mori
MDIERQEERIRAMLEEELSDYSDESSSEDETDHCSEHEVNYDTEEERIDSVDVPSNSRQEEANAIIANESDSDPDDDLPLSLVRQRASASRQMSGPHYTSKDGTKWYKNCQRPNVRLRSENIVTEQAQVKNIARDASTEYECWNIFVTSDMLQEILTHTNSSIRWRQTKTAAENSSASTSFYMQETTLCELKALIGLLYIAGLIKSNRQSLKDLWRTDGTGVDIFRTTMSLQRFQFLQNNIRFDDKSTRDERKQTDNMAAFRSIFDQFVQSCQNAYSPSEFLTIDEMLLSFRGRCLFRVYIPNKPAKYGIKILALVDAKNFYVKNLEVYAGKQPSGPYAVSNRPFEVVERLIQPVARSHRNVTFDNWFTGYELMLHLLNEYRLTSVGTVRKNKRQIPESFIRTDRQPNSSVFGFQKDITLVSYAPKKNKVVVVMSTMHHDNSIDESTGEKQKPEMITFYNSTKAGVDVVDELCANYNVSRNSKRWPMTLFYGVLNMAAINACIIYRTNKNVTIKRTEFIRSLGLSMIYEHLHSRNKKKNIPTYLRQRIEKQLGEPSPRHVNVPGRYVRCQDCPYKKDRKTKRSCNACAKPICMEHAKFLCENCAELDSHL

SEQ ID NO: 14577 - DNA, 221 bp, Bombyx mori
  source 1..221: mol_type = genomic DNA
cccggcgagcatgaggcagggtatctcataccctggtaaaattttaaagttgtgtattttataaaattttcgtctgacaacactagcgcgctcagtagctggaggcaggagcgtgcgggaggggatagtggcgtgatcgcagtgtggcacgggacaccggcgagatattcgtgtgcaaacctgtttcgggtatgttataccctgcctcattgttgacgtat

SEQ ID NO: 14578 - DNA, 208 bp, Bombyx mori
  source 1..208: mol_type = genomic DNA
tttaagaaaaagattaataaataataataatttcataattaaaaacttctttcattgaatgccattaaataaaccattattttacaaaataagatcaacataattgagtaaataataataagaacaatattatagtacaacaaaatatgggtatgtcataccctgccacattcttgatgtaactttttttcacctcatgctcgccggg

SEQ ID NO: 14579 - DNA, 181 bp, Bombyx mori
  source 1..181: mol_type = genomic DNA
ccctttgcctgccaatcacgcatgggatacgtcgtggcagtaaaagggcttaaatgccaacgacgcgtcccatacgttgttggcattttaagtcttctctctgcagcggcagcatgtgccgccgctgcagagagtttctagcgatgacagcccctctgggcaacgagccgggggggctgtc

SEQ ID NO: 14580 - DNA, 181 bp, Bombyx mori
  source 1..181: mol_type = genomic DNA
cctttttactgccaatgacgcatgggatacgtcgtggcagtaaaagggcttaaatgccaacgacgcgtcccatacgttgttggcattttaattcttctctctgcagcggcagcatgtgccgccgctgcagagagtttctagcgatgacagcccctctgggcaacgagccgggggggctgtc

SEQ ID NO: 14581 - DNA, 181 bp, Bombyx mori
  source 1..181: mol_type = genomic DNA
cctttttactgccaatgacgcatgggatacgtcgtggcagtaaaagggcttaaatgccaacgacgcgtcccatacgttgttggcattttaagtcttctctctgcagcggcagcatgtgccgccgctgcagagagtttctagcgatgacagcccctctgggcaacgagccgggggggctgtc

SEQ ID NO: 14582 - DNA, 134 bp, Bombyx mori
  source 1..134: mol_type = genomic DNA
cctttttactgccaatgacgcatgggatacgtcgtggcagtaaaagggcttaaatgccaacgacgcgtcccatacgttgttggcattttaagtcttctctctgcagcggcagcatgtgccgccgctgcagagag

SEQ ID NO: 14583 - DNA, 96 bp, Bombyx mori
  source 1..96: mol_type = genomic DNA
cctttttactgccaatgacgcatgggatacgtcgtggcagtaaaagggcttaaatgccaacgacgcgtcccatacgttgttggcattttaagtctt

SEQ ID NO: 14584 - DNA, 96 bp, Bombyx mori
  source 1..96: mol_type = genomic DNA
ccctttgcctgccaatcacgcatgggatacgtcgtggcagtaaaagggcttaaatgccaacgacgcgtcccatacgttgttggcattttaagtctt

SEQ ID NO: 14585 - DNA, 185 bp, Bombyx mori
  source 1..185: mol_type = genomic DNA
ttatcctttttactgccaatgacgcatgggatacgtcgtggcagtaaaagggcttaaatgccaacgacgcgtcccatacgttgttggcattttaagtcttctctctgcagcggcagcatgtgccgccgctgcagagagtttctagcgatgacagcccctctgggcaacgagccgggggggctgtc

SEQ ID NO: 14586 - DNA, 234 bp, Bombyx mori
  source 1..234: mol_type = genomic DNA
tttgcatttttagacatttagaagcctatatcttgttacagaattggaattacacaaaaattctaccatattttgaaagcttaggttgttctgaaaaaaacaatatattgttttcctgggtaaactaaaagtcccctcgaggaaaggcccctaaagtgaaacagtgcaaaacgttcaaaaactgtctggcaatacaagttccactttgggacaaatcggctggcagtgaaaggg

SEQ ID NO: 14587 - DNA, 233 bp, Bombyx mori
  source 1..233: mol_type = genomic DNA
tttgcatttttagacatttagaagcctatatcttgttacagaattggaattacacaaaaattctaccatattttgaaagcttaggttgttctgaaaaaaacaatatattgttttcctgggtaaactaaaagtcccctcgaggaaaggcccctaaagtgaaacagtgcaaaacgttcaaaaactgtctggcaatacaagttccactttgaccaaaacggctggcagtaaaaggg

SEQ ID NO: 14588 - DNA, 148 bp, Bombyx mori
  source 1..148: mol_type = genomic DNA
ttgttctgaaaaaaacaatatattgttttcctgggtaaactaaaagtcccctcgaggaaaggcccctaaagtgaaacagtgcaaaacgttcaaaaactgtctggcaatacaagttccactttgaccaaaacggctggcagtaaaaggg

SEQ ID NO: 14589 - DNA, 237 bp, Bombyx mori
  source 1..237: mol_type = genomic DNA
tttgcatttttagacatttagaagcctatatcttgttacagaattggaattacacaaaaattctaccatattttgaaagcttaggttgttctgaaaaaaacaatatattgttttcctgggtaaactaaaagtcccctcgaggaaaggcccctaaagtgaaacagtgcaaaacgttcaaaaactgtctggcaatacaagttccactttgaccaaaacggctggcagtaaaagggttat

SEQ ID NO: 14590 - DNA, 149 bp, Bombyx mori
  source 1..149: mol_type = genomic DNA
ttgttctgaaaaaaacaatatattgttttcctgggtaaactaaaagtcccctcgaggaaaggcccctaaagtgaaacagtgcaaaacgttcaaaaactgtctggcaatacaagttccactttgggacaaatcggctggcagtgaaaggg

SEQ ID NO: 14591 - DNA, 64 bp, synthetic construct
  source 1..64: mol_type = other DNA; note = Synthetic Sequence
atcacgcatgggatacgtcgtggcagtaaaagggcttaaatgccaacgacgcgtcccatacgtt

SEQ ID NO: 14592 - DNA, 82 bp, synthetic construct
  source 1..82: mol_type = other DNA; note = Synthetic Sequence
atgacgcatgggatacgtcgtggcagtaaaagggcttaaatgccaacgacgcgtcccatacgttgttggcattttaagtctt

SEQ ID NO: 14593 - DNA, 106 bp, synthetic construct
  source 1..106: mol_type = other DNA; note = Synthetic Sequence
cctgggtaaactaaaagtcccctcgaggaaaggcccctaaagtgaaacagtgcaaaacgttcaaaaactgtctggcaatacaagttccactttgggacaaatcggc

SEQ ID NO: 14594 - DNA, 134 bp, synthetic construct
  source 1..134: mol_type = other DNA; note = Synthetic Sequence
ttgttctgaaaaaaacaatatattgttttcctgggtaaactaaaagtcccctcgaggaaaggcccctaaagtgaaacagtgcaaaacgttcaaaaactgtctggcaatacaagttccactttgaccaaaacggc

SEQ ID NO: 14595 - DNA, 371 bp, Bombyx mori
  source 1..371: mol_type = genomic DNA
cccggcgagcatgaggcagggtatctcataccctggtaaaattttaaagttgtgtattttataaaattttcgtctgacaacactagcgcgctcagtagctggaggcaggagcgtgcgggaggggatagtggcgtgatcgcagtgtggcacgggacaccggcgagatattcgtgtgcaaacctgtttcgggtatgttataccctgcctcattgttgacgtattttttttatgtaatttttccgattattaatttcaactgttttattggtatttttatgttatccattgttctttttttatgatttactgtatcggttgtctttcgttcctttagttgagtttttttttattattttcagtttttgatcaaa

SEQ ID NO: 14596 - DNA, 364 bp, Bombyx mori
  source 1..364: mol_type = genomic DNA
tcatatttttagtttaaaaaaataattatatgttttataatgaaaagaatctcattatctttcagtattaggttgatttatattccaaagaataatatttttgttaaattgttgatttttgtaaacctctaaatgtttgttgctaaaattactgtgtttaagaaaaagattaataaataataataatttcataattaaaaacttctttcattgaatgccattaaataaaccattattttacaaaataagatcaacataattgagtaaataataataagaacaatattatagtacaacaaaatatgggtatgtcataccctgccacattcttgatgtaactttttttcacctcatgctcgccggg

SEQ ID NO: 14597 - DNA, 301 bp, Bombyx mori
  source 1..301: mol_type = genomic DNA
cccggcgagcatgaggcagggtatctcataccctggtaaaattttaaagttgtgtattttataaaattttcgtctgacaacactagcgcgctcagtagctggaggcaggagcgtgcgggaggggatagtggcgtgatcgcagtgtggcacgggacaccggcgagatattcgtgtgcaaacctgtttcgggtatgttataccctgcctcattgttgacgtattttttttatgtaatttttccgattattaatttcaactgttttattggtatttttatgttatccattgttctttttttatg

SEQ ID NO: 14598 - DNA, 285 bp, Bombyx mori
  source 1..285: mol_type = genomic DNA
cagggtatctcataccctggtaaaattttaaagttgtgtattttataaaattttcgtctgacaacactagcgcgctcagtagctggaggcaggagcgtgcgggaggggatagtggcgtgatcgcagtgtggcacgggacaccggcgagatattcgtgtgcaaacctgtttcgggtatgttataccctgcctcattgttgacgtattttttttatgtaatttttccgattattaatttcaactgttttattggtatttttatgttatccattgttctttttttatg

SEQ ID NO: 14599 - DNA, 205 bp, Bombyx mori
  source 1..205: mol_type = genomic DNA
cagggtatctcataccctggtaaaattttaaagttgtgtattttataaaattttcgtctgacaacactagcgcgctcagtagctggaggcaggagcgtgcgggaggggatagtggcgtgatcgcagtgtggcacgggacaccggcgagatattcgtgtgcaaacctgtttcgggtatgttataccctgcctcattgttgacgtat

SEQ ID NO: 14600 - DNA, 364 bp, Bombyx mori; identical to SEQ ID NO: 14596
  source 1..364: mol_type = genomic DNA

SEQ ID NO: 14601 - DNA, 192 bp, Bombyx mori
  source 1..192: mol_type = genomic DNA
tttaagaaaaagattaataaataataataatttcataattaaaaacttctttcattgaatgccattaaataaaccattattttacaaaataagatcaacataattgagtaaataataataagaacaatattatagtacaacaaaatatgggtatgtcataccctgccacattcttgatgtaactttttttca

SEQ ID NO: 14602 - DNA, 371 bp, Bombyx mori; identical to SEQ ID NO: 14595
  source 1..371: mol_type = genomic DNA

SEQ ID NO: 14603 - DNA, 16 bp, synthetic construct
  source 1..16: mol_type = other DNA; note = Synthetic Sequence
cctcatgctcgccggg

SEQ ID NO: 14604 - protein, 589 aa, Bombyx mori
MAKRFYSAEEAAAHCMASSSEEFSGSDSEYVPPASESDSSTEESWCSSSTVSALEEPMEVDEDVDDLEDQEAGDRADAAAGGEPAWGPPCNFPPEIPPFTTVPGVKVDTSNFEPINFFQLFMTEAILQDMVLYTNVYAEQYLTQVPLPRYARAHAWHPTDIAEMKRFVGLTLAMGLIKANSLESYWDTTTVLNIPVFSATMSRNRYQLLLRFLEFNNEATAVPPDQPGHDRLHKLRPLIDSLSERFAAVYTPCQNICIDESLLLFKGRLQFRQYIPSKRARYGIKFYKLCESSSGYTSYFLIYEGKDSKLDPPGCPPDLTVSGKIVWELISPLLGQGFHLYVDNFYSSIPLFTALYCLDTPACGTINRNRKGLPRALLDKKLNRGETYALRKNELLAIKFFDKKNVFMLTSIHDESVIREQRVGRPPKNKPLCSKEYSKYMGGVDRTDQLQHYYNATRKTRAWYKKVGIYLIQMALRNSYIVYKAAVPGPKLSYYKYQLQILPALLFGGVEEQTVPEMPPSDNVARLIGKHFIDTLPPTPGKQRPQKGCKVCRKRGIRRDTRYYCPKCPRNPGLCFKPCFEIYHTQLHY

SEQ ID NO: 14605 - protein, 592 aa, Bombyx mori
MAKRFYSAEEAAAHCMASSSEEFSGSDSEYVPPASESDSSTEESWCSSSTVSALEEPMEVDEDVDDLEDQEAGDRVDAAAGGEPAWGPPCNFPPEIPPFTTVPGVKVDTSNFEPINFFQLFMTEAILQDMVLYTNVYAEQYLTQNPLPRYARAHAWHPTDIAEMKRFVGLTLAMGLIKANSLESYWDTTTVLSIPVFSATMSRNRYQLLLKFLHFNNEATAVPPDQPGHDRLHKLRPLIDSLSERFAAVYTPCQNICIDESLLLFKGRLQFRQYIPSKRARYGIKFYKLCESSSGYTSYFLIYEGKDSKLDPPGCPPDLTVSGKIVWELISPLLGQGFHLYVDNFYSSIPLFTALYCLDTPACGTINRNRKGLPRALLDKKLNRGETYALRKNELLAIKFFDKKNVFMLTSIHDESVIREQRVGRPPKNKPLCSKEYSKYMGGVDRTDQLQHYYNATRKTRAWYKKVGIYLIQMALRNSYIVYKAAVPGPKLSYYKYQLQILPALLFGGVEEQTVPEMPPSDNVARLIGKHFIDTLPPTPGKQRPQKGCKVCRKRGIRRDTRYYCPKCPRNPGLCFKPCFEIYHTQLHYGRR

SEQ ID NO: 14606 - protein, 610 aa, Bombyx mori
MDIERQEERIRAMLEEELSDYSDESSSEDETDHCSEHEVNYDTEEERIDSVDVPSNSRQEEANAIIANESDSDPDDDLPLSLVRQRASASRQVSGPFYTSKDGTKWYKNCQRPNVRLRSENIVTEQAQVKNIARDASTEYECWNIFVTSDMLQEILTHTNSSIRHRQTKTAAENSSAETSFYMQETTLCELKALIALLYLAGLIKSNRQSLKDLWRKDGTGVDIFRTTMSLQRFQFLLNNIRFDDISTRDERKQTDNMAAFRSIFDQFVQCCQNAYSPSEFLTIDEMLLSFRGRCLFRVYIPNKPAKYGIKILALVDAKNFYVVNLEVYAGKQPSGPYAVSNRPFEVVERLIQPVARSHRNVTFDNWFTGYELMLHLLNEYRLTSVGTVRKNKRQIPESFIRTDRQPNSSVFGFQKDITLVSYAPKKNKVVVVMSTMHHDNSIDESTGEKQKPEMITFYNSTKAGVDVVDELCANYNVSRNSKKWPMTLFYGVLNMAAINACIIYRTNKNVTIKRTEFIRSLGLSMMYEHLHSRNKKKNIPTYLRQRIEKQLGEPVPRHVNVPGRYVRCQDCPYKKDRKTKRSCNACAKPICMEHAKFLCENCAELDSSL

SEQ ID NO: 14607 - protein, 610 aa, Bombyx mori
MDIERQEERIRAMLEEELSDYSDESSSEDETDHCSEHEVNYDTEEERIDSVDVPSNSRQEEANAIIANESDSDPDDDLPLSLVRQRASASRQVSGPFYTSKDGTKWYKNCQRPNVRLRSENIVTEQAQVKNIARDASTEYECWNIFVTSDMLQEILTHTNSSIRHRQTKTAAENSSAETSFYMQETTLCELKALIGLLYLAGLIKSNRQSLKDLWRTDGTGVDIFRTTMSLQRFYFLQNNIRFDDKSTLDERKQTDNMAAFRSIFDQFVQSCQNAYSPSEFLTIDEMLLSFRGRCLFRVYIPNKPAKYGIKILALVDAKNFYVVNLEVYAGKQPSGPYAVSNRPFEVVERLIQPVARSHRNVTFDNWFTGYELMLHLLNEYRLTSVGTVRKNKRQIPESFIRTDRQPNSSVFGFQKDITLVSYAPKKNKVVVVMSTMHHDNSIDESTGEKQKPEMITFYNSTKAGVDVVDELCANYNVSRNSKRWPMTLFYGVLNMAAINACIIYRTNKNVTIKRTEFIRSLGLSMIYEHLHSRNKKKNIPTYLRQRIEKQLGEPSPRHVNYPGRYVRCQDCPYKKDRKTKRSCNACAKPICMEHAKFLCVNCAELDSSL

SEQ ID NO: 14608 - protein, 610 aa, Bombyx mori
MDIERQEERIRAMLEEELSDYSDESSSEDETDHCSEHEVNYDTEEERIDSVDVPSNSRQEEANAIIANESDSDPDDDLPLSLVRQRASASRQVSGPFYTSKDGTKWYKNCQRPNVRLRSENIVTEQAQVKNIARDASTEYECWNIFVTSDMLQEILTHTNSSIRHRQTKTAAENSSAETSFYMQETTLCELKALIALLYLAGLIKSNRQSLKDLWRKDGTGVDIFRTTMSLQRFQFLLNNIRFDDKSTRDERKQTDNMAAFRSIFDQFVQCCQNAYSPSEFLTIDEMLLSFRGRCLFRVYIPNKPAKYGIKILALVDAKNDYVVNLEVYAGKQPSGPYAVSNRPFEVVERLIQPVARSHRNVTFDNWFTGYECMLHLLNEYRLTSVGTVRKNKRQIPESFIRTDRQPNSSVFGFQKDITLVSYAPKKNKVVVVMSTMHHDNSIDESTGEKQKPEMITFYNSTKAGVDVVDELCANYNVSRNSKKWPMTLFYGVLNMAAINACIIYRTNKNVTIKRTEFIRSLGLSMIKEHLHSRNKKKNIPTYLRQRIEKQLGEPSPRHVNVPGRYVRCQDCPYKKDRKTKRSCNACAKPICMEHAKFLCENCAELDSSL

SEQ ID NO: 14609 - DNA, 249 bp, Trichoplusia ni
  source 1..249: mol_type = genomic DNA
tctaaatagcgcgaatccgtcgctgtgcatttaggacatctcagtcgccgcttggagctcccgtgaggcgtgcttgtcaatgcggtaagtgtcactgattttgaactataacgaccgcgtgagtcaaaatgacgcatgattatcttttacgtgacttttaagatttaactcatacgataattatattgttatttcatgttctacttacgtgataacttattatatatatattttcttgttatagatatc

SEQ ID NO: 14610 - DNA, 231 bp, Trichoplusia ni; identical to SEQ ID NO: 14562
  source 1..231: mol_type = genomic DNA

SEQ ID NO: 14611 - protein, 592 aa, Bombyx mori
MAKRFYSAEEAAAHCMASSSEEFSGSDSEYVPPASESDSSTEESWCSSSTVSALEEPMEVDEDVDDLEDQEAGDRADAAAGGEPAWGPPCNFPPEIPPFTTVPGVKVDTSNFEPINFFQLFMTEAILQDMVLYTNVYAEQYLTQNVLPRYARAHAWHPTDIAEMKRFVGLTLAMGLIKANSLESYWDTTTVLSIPVFSATMSRNRYQLLLRFLHFNNDATAVPPDQPGHDRLHKLRPLIDSLTERFAAVYTPCQNICIDESLLLFKGRLQFRQYIPSKRARYGIKFYKLCESSSGYTSYFLIYEGKDSKLDPPGCPPDLTVSGKIVWELISPLLGQGFHLYVDNFYSSIPLFTALYCLDTPACGTINRNRKGLPRALLDKKLNRGETYALRKNELLAIKFFDKKNVFMLTSIHDESVIREQRVGRPPKNKPLCSKEYSKYMGGVDRTDQLQHYYNATRKTRAWYKKVGIYLIQMALRNSYIVYKAAVPGPKLSYYKYQLQILPALLFGGVEEQTVPEMPPSDNVARLIGKHFIDTLPPTPGKQRPQKGCKVCRKRGIRRDTRYYCPKCPRNPGLCFKPCFEIYHTQLHYGRR

SEQ ID NO: 14612 - protein, 592 aa, Bombyx mori
MAKRFYSAEEAAAHCMASSSEEFSGSDSEYVPPASESDSSTEESWCSSSTVSALEEPMEVDEDVDDLEDQEAGDRADAAPGGEPAWGPPCNFPPEIPPFTTVPGVKVDTSNFEPINFFQLFMTEAILQDMVLYTNVYAEQYLTQVPLPRYARAHAWHPTDIAEMKRFVGLTLAMGLIKANSLESYWDTTTVLSIPVFSATMSRNRYQLLLRFLHFNNEATAVPPDQPGHDRLHKLRPLIDSLSERFAAVYTPCQNICIDESLLLFKGRLQFRQYIPSKRARYGIKFYKLCESSSGYTSYFLIYEGKDSKLDPPGCPPDLTVSGKIVWELISPLLGQGFHLYVDNFYSSIPLFTALYCLDTPACGTINRNRKGLPRALLDKKLNRGETYALRKNELLAIKFFDKKNVFMLTSIHDESVIREQRVGRPPKNKPLCSKEYSKYMGGVDRTDQLQHYYNATRKTRAWYKKVGIYLIQMALRNSYIVYKAAVPGPKLSYYKYQLQILPALLFGGVEEQTVPEMPPSDNVARLIGKHFIDTLPPTPGKQRPQKGCKVCRKRGIRRDTRYYCPKCPRNPGLCFKPCFEIYHTQLHYGRR

SEQ ID NO: 14613 - protein, 592 aa, Bombyx mori
MAKRFYSAEEAAAHCMASSSEEFSGSDSEYVPPASESDSSTEESWCSSSTVSALEEPMEVDEDVDDLEDQEAGDRADAAAGGEPAWGPPCNFPPEIPPFTTVPGVKVDTSNFEPINFFQLFMTEAILQDMVLYTNVYAEQYLTQVPLPRYARAHAWHPTDIAEMKRFVGLTLAMGLIKANSLESYWDTTTVLNIPVFSATMSRNRYQLLLRFLEFNNNATAVPPDQPGHDRLHKLRPLIDSLSERFAAVYTPCQNICIDESLLLFKGRLQFRQYIPSKRARYGIKFYKLCESSSGYTSYFLIYEGKDSKLDPPGCPPDLTVSGKIVWELISPLLGQGFHLYVDNFYSSIPLFTALYCLDTPACGTINRNRKGLPRALLDKKLNRGETYALRKNELLAIKFFDKKNVFMLTSIHDESVIREQRVGRPPKNKPLCSKEYSKYMGGVDRTDQLQHYYNATRKTRAWYKKVGIYLIQMALRNSYIVYKAAVPGPKLSYYKYQLQILPALLFGGVEEQTVPEMPPSDNVARLIGKHFIDTLPPTPGKQRPQKGCKVCRKRGIRRDTRYYCPKCPRNPGLCFKPCFEIYHTQLHYGRR

SEQ ID NO: 14614 - DNA, 14 bp, synthetic construct
  source 1..14: mol_type = other DNA; note = Synthetic Sequence
atgaggcagggtat

SEQ ID NO: 14615 - DNA, 14 bp, synthetic construct
  source 1..14: mol_type = other DNA; note = Synthetic Sequence
ataccctgcctcat

SEQ ID NO: 14616 - DNA, 10 bp, synthetic construct
  source 1..10: mol_type = other DNA; note = Synthetic Sequence
ggcagggtat

SEQ ID NO: 14617 - DNA, 10 bp, synthetic construct
  source 1..10: mol_type = other DNA; note = Synthetic Sequence
ataccctgcc

SEQ ID NO: 14618 - DNA, 10 bp, synthetic construct
  source 1..10: mol_type = other DNA; note = Synthetic Sequence
taaaatttta

SEQ ID NO: 14619 - DNA, 12 bp, synthetic construct
  source 1..12: mol_type = other DNA; note = Synthetic Sequence
attttataaaat

SEQ ID NO: 14620 - DNA, 10 bp, synthetic construct
  source 1..10: mol_type = other DNA; note = Synthetic Sequence
tcataccctg

SEQ ID NO: 14621 - DNA, 13 bp, synthetic construct
  source 1..13: mol_type = other DNA; note = Synthetic Sequence
taaataataataa

SEQ ID NO: 14622 - DNA, 14 bp, synthetic construct
  source 1..14: mol_type = other DNA; note = Synthetic Sequence
ccctttgcctgcca

SEQ ID NO: 14623 - DNA, 14 bp, synthetic construct
  source 1..14: mol_type = other DNA; note = Synthetic Sequence
tggcagtgaaaggg

SEQ ID NO: 14624 - protein, 589 aa, synthetic construct
  source 1..589: note = Synthetic Sequence
MAKRFYSAEEAAAHCMASSSEEFSGSDSEYVPPASESDSSTEESWCSSSTVSALEEPMEVDEDVDDLEDQEAGDRADAAAGGEPAWGPPCNFPPEIPPFTTVPGVKVDTSNFEPINFFQLFMTEAILQDMVLYTNVYAEQYLTQNPLTRYARAHAWHPTDIAEMKRFVGLTLAMGLIKANSLESYWDTTTVLSIPVFSATMSRNRYQLLLRFLHFNNNATAVPPDQPGHDRLHKLRPLIDSLSERFAAVYTPCQNICIDESLLLFKGRLQFRQYIPSKRARYGIKFYKLCESSSGYTSYFLIYEGKDSKLDPPGCPPDLTVSGKIVWELISPLLGQGFHLYVDNFYSSIPLFTALYCLNTPACGTINRNRKGLPRALLDKKLNRGETYALRKNELLAIKFFDKKNVFMLTSIHDESVIREQRVGRPPKNKPLCSKEYSKYMGGVDRTDQLQHYYNATRKTRHWYKKVGIYLIQMALRNSYIVYKAAVPGPKLSYYKYQLQILPALLFGGVEEQTVPEMPPSDNVARLIGKHFIDTLPPTPGKQRPQKGCKVCRKRGIRRDTRYYCPKCPRNPGLCRKPCFEIYHTQLHY

SEQ ID NO: 14625 - protein, 589 aa, synthetic construct
  source 1..589: note = Synthetic Sequence
MAKRFYSAEEAAAHCMASSSEEFSGSDSEYVPPASESDSSTEESWCSSSTVSALEEPMEVDEDVDDLEDQEAGDRADAAAGGEPAWGPPCNFPPEIPPFTTVPGVKVDTSNFEPINFFQLFMTEAILQDMVLYTNVYAEQYLTQNPLPRYARAHAWHPTDIAEMKRFVGLTLAMGLIKANSLESYWDTTTVLKIPVFSATMSRNRYQLLLRFLHFNNNATAVPPDQPGHDRLHKLRPLIDSLSERFAAVYTPCQNICIDESLLLFKGRLQFRQYIPSKRARYGIKFYKLCESSSGYTSYFLIYEGKDSKLDPPGCPPDLTVSGKIVWELISPLLGQGFHLYVDNFYSSIPLFTALYCLNTPACGTINRNRKGLPRALLDKKLNRGETYALRKNELLAIKFFDKKNVFMLTSIHDESVIREQRVGRPPKNKPLCSKEYSKYMGGVDRTDQLQHYYNATRKTRHWYKKVGIYLIQMALRNSYIVYKAAVPGPKLSYYKYQLQILPALLFGGVEEQTVPEMPPSDNVARLIGKHFIDTLPPTPGKQRPQKGCKVCRKRGIRRDTRYYCPKCPRNPGLCFKPCFEIYHTQLHY

SEQ ID NO: 14626 - DNA, 1794 bp, synthetic construct
  source 1..1794: mol_type = other DNA; note = Synthetic Sequence
atggcacccaaaaagaaacgtaaagtgatggccaaaagattttacagcgccgaagaagcagcagcacattgcatggcatcgtcatccgaagaattctcggggagcgattccgaatatgtcccaccggcctcggaaagcgattcgagcactgaggagtcgtggtgttcctcctcaactgtctcggctcttgaggagccgatggaagtggatgaggatgtggacgacttggaggaccaggaagccggagacagggccgacgctgccgcgggaggggagccggcgtggggacctccatgcaattttcctcccgaaatcccaccgttcactactgtgccgggagtgaaggtcgacacgtccaacttcgaaccgatcaatttctttcaactcttcatgactgaagcgatcctgcaagatatggtgctctacactaatgtgtacgccgagcagtacctgactcaaaacccgctgcctcgctacgcgagagcgcatgcgtggcacccgaccgatatcgcggagatgaagcggttcgtgggactgaccctcgcaatgggcctgatcaaggccaacagcctcgagtcatactgggataccacgactgtgcttagcattccggtgttctccgctaccatgtcccgtaaccgctaccaactcctgctgcggttcctccacttcaacaacaatgcgaccgctgtgccacctgaccagccaggacacgacagactccacaagctgcggccattgatcgactcgctgagcgagcgattcgccgcggtgtacaccccttgccaaaacatttgcatcgacgagtcgcttctgctgtttaaaggccggcttcagttccgccagtacatcccatcgaagcgcgctcgctatggtatcaaattctacaaactctgcgagtcgtccagcggctacacgtcatacttcttgatctacgaggggaaggactctaagctggacccaccggggtgtccaccggatcttactgtctccggaaaaatcgtgtgggaactcatctcacctctcctcggacaaggctttcatctctacgtcgacaatttctactcatcgatccctctgttcaccgccctctactgcctggatactccagcctgtgggaccattaacagaaaccggaagggtctgccgagagcactgctggataagaagttgaacaggggagagacttacgcgctgagaaagaacgaactcctcgccatcaaattcttcgacaagaaaaatgtgtttatgctcacctccatccacgacgaatccgtcatccgggagcagcgcgtgggcaggccgccgaaaaacaagccgctgtgctctaaggaatactccaagtacatggggggtgtcgaccggaccgatcagctgcagcattactacaacgccactagaaagacccgggcctggtacaagaaagtcggcatctacctgatccaaatggcactgaggaattcgtatattgtctacaaggctgccgttccgggcccgaaactgtcatactacaagtaccagcttcaaatcctgccggcgctgctgttcggtggagtggaagaacagactgtgcccgagatgccgccatccgacaacgtggcccggttgatcggaaagcacttcattgataccctgcctccgacgcctggaaagcagcggccacagaagggatgcaaagtttgccgcaagcgcggaatacggcgcgatacccgctactattgcccgaagtgcccccgcaatcccggactgtgtttcaagccctgttttgaaatctaccacacccagttgcattac

SEQ ID NO: 14627 - protein, 589 aa, synthetic construct
  source 1..589: note = Synthetic Sequence
MAKRFYSAEEAAAHCMASSSEQTSGSDSEYVPPASESDSSTEESWCSSSTVSALEEPMEVDEDVDDLEDQEAGDRADAAAGGEPAWGPPCNFPPEIPPFTTVPGVKVDTSNFEPINFFQLFMTEAILQDMVLYTNVYAEQYLTQNPLTRYARAHAWHPTDIAEMKRFVGLTLAMGLIKANSIESYWDTTTVLSIPVFGATMSRNRYQLLLRFLHFNNNATAVPPDQPGHDRLHKLRPLIDSLSERFANVYTPCQNICIDESLLLFKGRLQFRQYIPSKRARYGIKFYKLCESSSGYTSYFLIYEGKDSKLDPPGCPPDLTVSGKIVWELISPLLGQGFHLYVDNFYSSIPLFTALYCLNTPACGTINRNRKGLPRALLDKKLNRGETYALRKNELLAIKFFDKKNVFMLTSIHDESVIREQRVGRKPKNKPLCSKEYSKYMGGVDRTDQLQHYYNATRKTRHWYKKVGIYLIQMALRNSYIVYKAAVPGPKLSYYKYQLQILPALLFGGVEEQTVPEMPPSDNVARLIGKHFIDTLPPTPGKQRPQKGCKVCRKRGIRRDTRYYCPKCPRNPGLCRKPCFEIYHTQLHY

SEQ ID NO: 14628 - protein, 589 aa, synthetic construct
  source 1..589: note = Synthetic Sequence
MAKRFYSAEEAAAHCSASSSEEFSGSDSEYVPPASESDSSTEESWCSSSTVSALEEPMEVDEDVDDLEDQEAGDRADAAAGGEPAWGPPCNFPPEIPPFTTVPGVKVDTSNFEPINFFQLFMTEAILQDMVLYTNVYAEQYLTQNPLTRGARAHAWHPTDIAEMKRFVGLTLAMGLIKANSLESYWDTTTVLSIPVFGATMSRNRYQLLLRFLHFNNNATAVPPDQPGHDRLHKLRPLIDSLSERFANVYTPCQNICIDESLMLFKGRLQFRQYIPSKRARYGIKFYKLCESSTGYTSYFLIYEGKDSKLDPPGCPPDLTVSGKIVWELISPLLGQGFHLYVDNFYSSIPLFTALYCLNTPACGTINRNRKGLPRALLDKKLNRGETYALRKNELLAIKFFDKKNVFMLTSIHDESVIREQRVGRPPKNKPLCSKEYSKYMGGVDRTDQLQHYYNATRKTRHWYKKVGIYLIQMALRNSYIVYKAAVPGPKLSYYKYQLQILPALLFGGVEEQTVPEMPPSDNVARLIGKHFIDTLPPTPGKQRPQKGCKVCRKRGIRRDTRYYCPKCPRNPGLCRKPCFEIYHTQLHY

SEQ ID NO: 14629 - DNA, 1857 bp, Bombyx mori
  source 1..1857: mol_type = genomic DNA
atggcacccaaaaagaaacgtaaagtgatggacattgaaagacaggaagaaagaatcagggcgatgctcgaagaagaactgagcgactactccgacgaatcgtcatcagaggatgaaaccgaccactgtagcgagcatgaggttaactacgacaccgaggaggagagaatcgactctgtggatgtgccctccaactcacgccaagaagaggccaatgcaattatcgcaaacgaatcggacagcgatccagacgatgatctgccactgtccctcgtgcgccagcgggccagcgcttcgagacaagtgtcaggtccattctacacttcgaaggacggcactaagtggtacaagaattgccagcgacctaacgtcagactccgctccgagaatatcgtgaccgaacaggctcaggtcaagaatatcgcccgcgacgcctcgactgagtacgagtgttggaatatcttcgtgacttcggacatgctgcaagaaattctgacgcacaccaacagctcgattaggcatcgccagaccaagactgcagcggagaactcatcggccgaaacctccttctatatgcaagagactactctgtgcgaactgaaggcgctgattgcactgctgtacttggccggcctcatcaaatcaaataggcagagcctcaaagatctctggagaacggatggaactggagtggatatctttcggacgactatgagcttgcagcggttccagtttctgcaaaacaatatcagattcgacgacaagtccacccgggacgaaaggaaacagactgacaacatggctgcgttccggtcaatattcgatcagtttgtgcagtgctgccaaaacgcttatagcccatcggaattcctgaccatcgacgaaatgcttctctccttccgggggcgctgcctgttccgagtgtacatcccgaacaagccggctaaatacggaatcaaaatcctggccctggtggacgccaagaatttctacgtcgtgaatctcgaagtgtacgcaggaaagcaaccgtcgggaccgtacgctgtttcgaaccgcccgtttgaagtcgtcgagcggcttattcagccggtggccagatcccaccgcaatgttaccttcgacaattggttcaccggctacgagctgatgcttcaccttctgaacgagtaccggctcactagcgtggggactgtcaggaagaacaagcggcagatcccagaatccttcatccgcaccgaccgccagcctaactcgtccgtgttcggatttcaaaaggatatcacgcttgtctcgtacgcccccaagaaaaacaaggtcgtggtcgtgatgagcaccatgcatcacgacaacagcatcgacgagtcaaccggagaaaagcaaaagcccgagatgatcaccttctacaattcaactaaggccggcgtcgacgtcgtggatgaactgtgcgcgaactataacgtgtcccggaactctaagcggtggcctatgactctcttctacggagtgctgaatatggccgcaatcaacgcgtgcatcatctaccgcaccaacaagaacgtgaccatcaagcgcaccgagttcatcagatcgctgggtttgagcatgatctacgagcacctccattcacggaacaagaagaagaatatccctacttacctgaggcagcgtatcgagaagcagttgggagaaccaagcccgcgccacgtgaacgtgccggggcgctacgtgcggtgccaagattgcccgtacaaaaaggaccgcaaaaccaaaagatcgtgtaacgcgtgcgccaaacctatctgcatggagcatgccaaatttctgtgtgaaaattgtgctgaactcgattcctccctg

SEQ ID NO: 14630 - protein, 608 aa, Bombyx mori
MDIERQEERIRAMLEEELSDYSDESSSEDETDHCSEHEVNYDTEEERIDSVDVPSNSRQEEANAIIANESDSDPDDDLPLSLVRQRASASRQVSGPFYTSKDGTKWYKNCQRPNVRLRSENIVTEQAQVKNIARDASTEYECWNIFVTSDMLQEILTHTNSSIRWRQTKTAAENSSAETSFYMQETTLCELKALIGLLYIAGLIKSNRQSLKDLWRTDGTGVDIFRTTMSLQRFQFLLNNIRFDDKSTRDERKQTDNMAAFRSIFDQFVQSCQNAYSPSEFLTIDEMLLSFRGRCLFRVYIPNKPAKYGIKILALVDAKNFYVHNLEVYAGKQPSGPYAVSNRPFEVVERLIQPVARSHRNVTFDNWFTGYEVMLHLLNEYRLTSVGTVRKNKRQIPESFIRTDRQPNSSVFGFQKDITLVSYAPKKNKVVVVMSTMHHDNSIDESTGEKQKPEMITFYNSTKAGVDVVDELCANYNVSRNSKRWPMTLFYGVLNMAAINACIIYRTNKNVTIKRTEFIRSLGLSMIYEHLHSRNKKKNIPTYLRQRIEKQLGEPSPRHVNVPGRYVRCQDCPYKKDRKTKRSCNACAKPICMEHAKFLCENCAHLDS

SEQ ID NO: 14631 - protein, 610 aa, Bombyx mori
MDIERQEERIRAMLEEELSDYSDESSSEDETDHCSEHEVNYDTEEERIDSVDVPSNSRQEEANAIIANESDSDPDDDLPLSLVRQRASASRQVSGPFYTSKDGTKWYKNCQRPNVRLRSENIVTEQAQVKNIARDASTEYECWNIFVTSDMLQEILTHTNSSIRWRQTKTAAENSSASTSFYMQETTLCELKALIGLLYIAGLIKSNRQSLKDLWRTDGTGVDIFRTTMSLQRFQFLLNNIRFDDKSTRDERKQTDNMAAFRSIFDQFVQSCQNAYSPSEFLTIDEMLLSFRGRCLFRVYIPNKPAKYGIKILALVDAKNFYVKNLEVYAGKQPSGPYAVSNRPFEVVERLIQPVARSHRNVTFDNWFTGYELMLHLLNEYRLTSVGTVRKNKRQIPESFIRTDRQPNSSVFGFQKDITLVSYAPKKNKVVVVMSTMHHDNSIDESTGEKQKPEMITFYNSTKAGVDVVDELCANYNVSRNSKRWPMTLFYGVLNMAAINACIIYRTNKNVTIKRTEFIRSLGLSMIYEHLHSRNKKKNIPTYLRQRIAMQLGEPSPRHVNVPGRYVRCQDCPYKKDRKTKRSCNACAKPICMEHAKFLCENCAELDSSL

SEQ ID NO: 14632 - protein, 610 aa, Bombyx mori
MDIERQEERIRAMLEEELSDYSDESSSEDETDHCSEHEVNYDTEEERIDSVDVPSNSRQEEANAIIANESDSDPDDDLPLSLVRQRASASRQVSGPFYTSKDGTKWYKNCQRPNVRLRSENIVTEQAQVKNIARDASTEYECWNIFVTSDMLQEILTHTNSSIRWRQTKTAAENSSAETSFYMQETTLCELKALIGLLYIAGLIKSNRQSLKDLWRTDGTGVDIFRTTMSLQRFQFLLNNIRFDDKSTRDERKQTDNMAAFRSIFDQFVQSCQNAYSPSEFLTIDEMLLSFRGRCLFRVYIPNKPAKYGIKILALVDAKNFYVKNLEVYAGKQPSGPYAVSNRPFEVVERLIQPVARSHRNVTFDNWFTGYELMLHLLNEYRLTSVGTVRKNKTQIPENFIRTDRQPNSSVFGFQKDITLVSYAPKKNKVVVVMSTMHHDNSIDESTGEKQKPEMITFYNSTKAGVDVVDELQANYNVSRNSKRWPMTLFYGVLNMAAINACIIYRTNKNVTIKRTEFIRSLGLSMIYEHLHSRNKKKNIPTYLRQRIEKQLGEPSPRHVNVPGRYVRCQDCPYKKDRKTKRSCNACAKPICMEHAKFLCENCAELDSSL

SEQ ID NO: 14633 - protein, 610 aa, Bombyx mori
MDIERQEERIRAMLEEELSDYSDESSSEDETDHCSEHEVNYDTEEERIDSVDVPSNSRQEEANAIIANESDSDPDDDLPLSLVRQRASASRQVSGPFYTSKDGTKWYKNCQRPNVRLRSENIVTEQAQVKNIARDASTEYECWNIFVTSDMLQEILTHTNSSIRWRQTKTAAENSSAETSFYMQETTLCELKALIGLLYIAGLIKSNRQSLKDLWRTDGTGVDIFRTTMSLQRFQFLQNNIRFDDKSTRDERKQTDNMAAFRSIFDQFVQSCQNAYSPSEFLTIDEMLLSFRGRCLFRVYIPNKPAKYGIKILALVDAKNFYVKNLEVYAGKQPSGPYAVSNRPFEVVERLIQPVARSHRNVTFDNWFTGYELMLHLLNEYRLTSVGTVRKNKRQIPESFIRTDRQPNSSVFGFQKDITLVSYAPKKNKVVVVMSTMHHDNSIDESTGEKQKPEMITFYNSTKAGVDVVDELCANYNVSRNSKRWPMTLFYGVLNMAAINACIIYRTNKNVTIKRTEFIRSLGLSMIYEHLHSRNKKKNIPTYLRQRIEKQLGEPSPRHVNVPGRYVRCQDCPYKKDRKTKRSCNACAKPICMEHAKFLCENCAELDSSL

SEQ ID NO: 14634 - protein, 610 aa, Bombyx mori
MDIERQEERIRAMLEEELSDYSDESSSEDETDHCSEHEVNYDTEEERIDSVDVPSNSRQEEANAIIANESDSDPDDDLPLSLVRQRASASRQVSGPFYTSKDGTKWYKNCQRPNVRLRSENIVTEQAQVKNIARDASTEYECWNIFVTSDMLQEILTHTNSSIRHRQTKTAAENSSAETSFYMQETTLCELKALIALLYLAGLIKSNRQSLKDLWRTDGTGVDIFRTTMSLQRFQFLQNNIRFDDKSTRDERKQTDNMAAFRSIFDQFVQCCQNAYSPSEFLTIDEMLLSFRGRCLFRVYIPNKPAKYGIKILALVDAKNDYVVNLEVYAGKQPSGPYAVSNRPFEVVERLIQPVARSHRNVTFDNWFTGYELMLHLLNEYRLTSVGTVRKNKRQIPESFIRTDRQPNSSVFGFQKDITLVSYAPKKNKVVVVMSTMHHDNSIDESTGEKQKPEMITFYNSTKAGVDVVDELCANYNVSRNSKRWPMTLFYGVLNMAAINACIIYRTNKNVTIKRTEFIRSLGLSMIYEHLHSRNKKKNIPTYLRQRIEKQLGEPSSRHVNVKGRYVRCQDCPYKKDRKTKRSCNACAKPICMEHAKFLCENCAELDSSL

SEQ ID NO: 14635-14642 - skipped (8 entries)

SEQ ID NO: 14643 - protein, 288 aa, Homo sapiens
MQIPQAPWPVVWAVLQLGWRPGWFLDSPDRPWNPPTFSPALLVVTEGDNATFTCSFSNTSESFVLNWYRMSPSNQTDKLAAFPEDRSQPGQDCRFRVTQLPNGRDFHMSVVRARRNDSGTYLCGAISLAPKAQIKESLRAELRVTERRAEVPTAHPSPSPRPAGQFQTLVVGVVGGLLGSLVLLVWVLAVICSRAARGTIGARRTGQPLKEDPSAVPVFSVDYGELDFQWREKTPEPPVPCVPEQTEYATIVFPSGMGTSSPARRGSADGPRSAQPLRPEDGHCSWPL

SEQ ID NO: 14644 - protein, 520 aa, Homo sapiens
MGKPSSMDTKFKDDLFRKYVQFHESKVDTTTSRQRPGSDECLRVAASTLLSLHKVDPFYRFRLIQFYEVVESSLRSLSSSSLRALHGAFSMLETVGINLFLYPWKKEFRSIKTYTGPFVYYVKSTLLEEDIRAILSCMGYTPELGTAYKLRELVETLQVKMVSFELFLAKVECEQMLEIHSQVKDKGYSELDIVSERKSSAEDVRGCSDALRRRAEGREHLTASMSRVALQKSASERAAKDYYKPRVTKPSRSVDAYDSYWESRKPPLKASLSLRKEPVATDVGDDLKDEIIRPSPSLLTMASSPHGSPDVLPPASPSNGPALLRGTYFSTQDDVDLYTDSEPRATYRRQDALRPDVWLLRNDAHSLYHKRSPPAKESALSKCQSCGLSCSSSLCQRCDSLLTCPPASKPSAFPSKASTHDSLAHGASLREKYPGQTQGLDRLPHLHSKSKPSTTPTSRCGFCNRPGATNTCTQCSKVSCDACLSAYHYDPCYKKSELHKFMPNNQLNYKSTQLSHLVYR

SEQ ID NO: 14645 - protein, 503 aa, Homo sapiens; identical to SEQ ID NO: 13190

SEQ ID NO: 14646 - protein, 567 aa, Homo sapiens
MGRGLLRGLWPLHIVLWTRIASTIPPHVQKSVNNDMIVTDNNGAVKFPQLCKFCDVRFSTCDNQKSCMSNCSITSICEKPQEVCVAVWRKNDENITLETVCHDPKLPYHDFILEDAASPKCIMKEKKKPGETFFMCSCSSDECNDNIIFSEEYNTSNPDLLLVIFQVTGISLLPPLGVAISVIIIFYCYRVNRQQKLSSTWETGKTRKLMEFSEHCAIILEDDRSDISSTCANNINHNTELLPIELDTLVGKGRFAEVYKAKLKQNTSEQFETVAVKIFPYEEYASWKTEKDIFSDINLKHENILQFLTAEERKTELGKQYWLITAFHAKGNLQEYLTRHVISWEDLRKLGSSLARGIAHLHSDHTPCGRPKMPIVHRDLKSSNILVKNDLTCCLCDFGLSLRLDPTLSVDDLANSGQVGTARYMAPEVLESRMNLENVESFKQTDVYSMALVLWEMTSRCNAVGEVKDYEPPFGSKVREHPCVESMKDNVLRDRGRPEIPSFWLNHQGIQMVCETLTECWDHDPEARLTAQCVAERFSELEHLDRLSGRSCSEEKIPEDGSLNTTK

SEQ ID NO: 14647 - protein, 301 aa, Homo sapiens
MFSHLPFDCVLLLLLLLLTRSSEVEYRAEVGQNAYLPCFYTPAAPGNLVPVCWGKGACPVFECGNVVLRTDERDVNYWTSRYWLNGDFRKGDVSLTIENVTLADSGIYCCRIQIPGIMNDEKFNLKLVIKPAKVTPAPTRQRDFTAAFPRMLTTRGHGPAETQTLGSLPDINLTQISTLANELRDSRLANDLRDSGATIRIGIYIGAGICAGLALALIFGALIFKWYSHSKEKIQNLSLISLANLPPSGLANAVAEGIRSEENIYTIEENVYEVEEPNEYYCYVSSRQQPSQPLGCRFAMP

SEQ ID NO: 14648 - protein, 525 aa, Homo sapiens; identical to SEQ ID NO: 7636

SEQ ID NO: 14649 - protein, 223 aa, Homo sapiens; identical to SEQ ID NO: 3670

SEQ ID NO: 14650 - protein, 289 aa, Homo sapiens
MKTLPAMLGTGKLFWVFFLIPYLDIWNIHGKESCDVQLYIKRQSEHSILAGDPFELECPVKYCANRPHVTWCKLNGTTCVKLEDRQTSWKEEKNISFFILHFEPVLPNDNGSYRCSANFQSNLIESHSTTLYVTDVKSASERPSKDEMASRPWLLYRLLPLGGLPLLITTCFCLFCCLRRHQGKQNELSDTAGREINLVDAHLKSEQTEASTRQNSQVLLSETGIYDNDPDLCFRMQEGSEVYSNPCLEENKPGIVYASLNHSVIGPNSRLARNVKEAPTEYASICVRS

SEQ ID NO: 14651 - protein, 296 aa, Homo sapiens
MTLNNVTMRQGTVGMQPQQQRWSIPADGRHLMVQKEPHQYSHRNRHSATPEDHCRRSWSSDSTDSVISSESGNTYYRVVLIGEQGVGKSTLANIFAGVHDSMDSDCEVLGEDTYERTLMVDGESATIILLDMWENKGENEWLHDHCMQVGDAYLIVYSITDRASFEKASELRIQLRRARQTEDIPIILVGNKSDLVRCREVSVSEGRACAVVFDCKFIETSAAVQHNVKELFEGIVRQVRLRRDSKEKNERRLAYQKRKESMPRKARRFWGKIVAKNNKNMAFKLKSKSCHDLSVL

SEQ ID NO: 14652 - protein, 450 aa, Homo sapiens
MGSLQPDAGNASWNGTEAPGGGARATPYSLQVTLTLVCLAGLLMLLTVFGNVLVIIAVFTSRALKAPQNLFLVSLASADILVATLVIPFSLANEVMGYWYFGKAWCEIYLALDVLFCTSSIVHLCAISLDRYWSITQAIEYNLKRTPRRIKAIIITVWVISAVISFPPLISIEKKGGGGGPQPAEPRCEINDQKWYVISSCIGSFFAPCLIMILVYVRIYQIAKRRTRVPPSRRGPDAVAAPPGGTERRPNGLGPERSAGPGGAEAEPLPTQLNGAPGEPAPAGPRDTDALDLEESSSSDHAERPPGPRRPERGPRGKGKARASQVKPGDSLPRRGPGATGIGTPAAGPGEERVGAAKASRWRGRQNREKRFTFVLAVVIGVFVVCWFPFFFTYTLTAVGCSVPRTLFKFFFWFGYCNSSLNPVIYTIFNHDFRRAFKKILCRGDRKRIV

SEQ ID NO: 14653 - protein, 311 aa, Homo sapiens
MGVPTALEAGSWRWGSLLFALFLAASLGPVAAFKVATPYSLYVCPEGQNVTLTCRLLGPVDKGHDVTFYKTWYRSSRGEVQTCSERRPIRNLTFQDLHLHHGGHQAANTSHDLAQRHGLESASDHHGNFSITMRNLTLLDSGLYCCLVVEIRHHHSEHRVHGAMELQVQTGKDAPSNCVVYPSSSQDSENITAAALATGACIVGILCLPLILLLVYKQRQAASNRRAQELVRMDSNIQGIENPGFEASPPAQGIPEAKVRHPLSYVAQRQPSESGRHLLSEPSTPLSPPGPGDVFFPSLDPVPDSPNFEVI

SEQ ID NO: 14654 - protein, 244 aa, Homo sapiens
MRWCLLLIWAQGLRQAPLASGMMTGTIETTGNISAEKGGSIILQCHLSSTTAQVTQVNWEQQDQLLAICNADLGWHISPSFKDRVAPGPGLGLTLQSLTVNDTGEYFCIYHTYPDGTYTGRIFLEVLESSVAEHGARFQIPLLGAMAATLVVICTAVIVVVALTRKKKALRIHSVEGDLRRKSAGQEEWSPSAPSPPGSCVQAEAAPAGLCGEQRGEDCAELHDYFNVLSYRSLGNCSFFTETG

SEQ ID NO: 14655 - protein, 290 aa, Homo sapiens
MRIFAVFIFMTYWHLLNAFTVTVPKDLYVVEYGSNMTIECKFPVEKQLDLAALIVYWEMEDKNIIQFVHGEEDLKVQHSSYRQRARLLKDQLSLGNAALQITDVKLQDAGVYRCMISYGGADYKRITVKVNAPYNKINQRILVVDPVTSEHELTCQAEGYPKAEVIWTSSDHQVLSGKTTTTNSKREEKLFNVTSTLRINTTTNEIFYCTFRRLDPEENHTAELVIPELPLAHPPNERTHLVILGAILLCLGVALTFIFRLRKGRMMDVKKCGIQDTNSKKQSDTHLEET

SEQ ID NO: 14656 - protein, 273 aa, Homo sapiens
MIFLLLMLSLELQLHQIAALFTVTVPKELYIIEHGSNVTLECNFDTGSHVNLGAITASLQKVENDTSPHRERATLLEEQLPLGKASFHIPQVQVRDEGQYQCIIIYGVAWDYKYLTLKVKASYRKINTHILKVPETDEVELTCQATGYPLAEVSWPNVSVPANTSHSRTPEGLYQVTSVLRLKPPPGRNFSCVFWNTHVRELTLASIDLQSQMEPRTHPTWLLHIFIPFCIIAFIFIATVIALRKQLCQKLYSSKDTTKRPVTTTKREVNSAI

SEQ ID NO: 14657 - protein, 288 aa, Homo sapiens; identical to SEQ ID NO: 2418

SEQ ID NO: 14658 - protein, 329 aa, Homo sapiens; identical to SEQ ID NO: 2421

SEQ ID NO: 14659 - protein, 181 aa, Homo sapiens; identical to SEQ ID NO: 2219

SEQ ID NO: 14660 - protein, 287 aa, Homo sapiens
MSPHPTALLGLVLCLAQTIHTQEEDLPRPSISAEPGTVIPLGSHVTFVCRGPVGVQTFRLERESRSTYNDTEDVSQASPSESEARFRIDSVSEGNAGPYRCIYYKPPKWSEQSDYLELLVKETSGGPDSPDTEPGSSAGPTQRPSDNSHNEHAPASQGLKAEHLYILIGVSVVFLFCLLLLVLFCLHRQNQIKQGPPRSKDEEQKPQQRPDLAVDVLERTADKATVNGLPEKDRETDTSALAAGSSQEVTYAQLDHWALTQRTARAVSPQSTKPMAESITYAAVARH

SEQ ID NO: 14661 - protein, 378 aa, Homo sapiens
MSKEPLILWLMIEFWWLYLTPVTSETVVTEVLGHRVTLPCLYSSWSHNSNSMCWGKDQCPYSGCKEALIRTDGMRVTSRKSAKYRLQGTIPRGDVSLTILNPSESDSGVYCCRIEVPGWFNDVKINVRLNLQRASTTTHRTATTTTRRTTTTSPTTTRQMTTTPAALPTTVVTTPDLTTGTPLQMTTIAVFTTANTCLSLTPSTLPEEATGLLTPEPSKEGPILTAESETVLPSDSWSSVESTSADTVLLTSKESKVWDLPSTSHVSMWKTSDSVSSPQPGASDTAVPEQNKTTKTGQMDGIPMSMKNEMPISQLLMIIAPSLGFVLFALFVAFLLRGKLMETYCSQKHTRLDYIGDSKNVLNDVQHGREDEDGLFTL

SEQ ID NO: 14662 - protein, 370 aa, Homo sapiens
MLGQVVTLILLLLLKVYQGKGCQGSADHVVSISGVPLQLQPNSIQTKVDSIAWKKLLPSQNGFHHILKWENGSLPSNTSNDRFSFIVKNLSLLIKAAQQQDSGLYCLEVTSISGKVQTATFQVFVFESLLPDKVEKPRLQGQGKILDRGRCQVALSCLVSRDGNVSYAWYRGSKLIQTAGNLTYLDEEVDINGTHTYTCNVSNPVSWESHTLNLTQDCQNAHQEFRFWPFLVIIVILSALFLGTLACFCVWRRKRKEKQSETSPKEFLTIYEDVKDLKTRRNHEQEQTFPGGGSTIYSMIQSQSSAPTSQEPAYTLYSLIQPSRKSGSRKRNHSPSFNSTIYEVIGKSQPKAQNPARLSRKELENFDVYS

SEQ ID NO: 14663 - protein, 341 aa, Homo sapiens; identical to SEQ ID NO: 8855

SEQ ID NO: 14664 - protein, 1068 aa, Homo sapiens
MPPRPSSGELWGIHLMPPRILVECLLPNGMIVTLECLREATLITIKHELFKEARKYPLHQLLQDESSYIFVSVTQEAEREEFFDETRRLCDLRLFQPFLKVIEPVGNREEKILNREIGFAIGMPVCEFDMVKDPEVQDFRRNILNVCKEAVDLRDLNSPHSRAMYVYPPNVESSPELPKHIYNKLDKGQIIVVIWVIVSPNNDKQKYTLKINHDCVPEQVIAEAIRKKTRSMLLSSEQLKLCVLEYQGKYILKVCGCDEYFLEKYPLSQYKYIRSCIMLGRMPNLMLMAKESLYSQLPMDCFTMPSYSRRISTATPYMNGETSTKSLWVINSALRIKILCATYVNVNIRDIDKIYVRTGIYHGGEPLCDNVNTQRVPCSNPRWNEWLNYDIYIPDLPRAARLCLSICSVKGRKGAKEEHCPLAWGNINLFDYTDTLVSGKMALNLWPVPHGLEDLLNPIGVTGSNPNKETPCLELEFDWFSSVVKFPDMSVIEEHANWSVSREAGFSYSHAGLSNRLARDNELRENDKEQLKAISTRDPLSEITEQEKDFLWSHRHYCVTIPEILPKLLLSVKWNSRDEVAQMYCLVKDWPPIKPEQAMELLDCNYPDPMVRGFAVRCLEKYLTDDKLSQYLIQLVQVLKYEQYLDNLLVRFLLKKALTNQRIGHFFFWHLKSEMHNKTVSQRFGLLLESYCRACGMYLKHLNRQVEAMEKLINLTDILKQEKKDETQKVQMKFLVEQMRRPDFMDALQGFLSPLNPAHQLGNLRLEECRIMSSAKRPLWLNWENPDIMSELLFQNNEIIFKNGDDLRQDMLTLQIIRIMENIWQNQGLDLRMLPYGCLSIGDCVGLIEVVRNSHTIMQIQCKGGLKGALQFNSHTLHQWLKDKNKGEIYDAAIDLFTRSCAGYCVATFILGIGDRHNSNIMVKDDGQLFHIDFGHFLDHKKKKFGYKRERVPFVLTQDFLIVISKGAQECTKTREFERFQEMCYKAYLAIRQHANLFINLFSMMLGSGMPELQSFDDIAYIRKTLALDKTEQEALEYFMKQMNDAHHGGWTTKMDWIFHTIKQHALN

SEQ ID NO: 14665 - protein, 1102 aa, Homo sapiens
MELENYKQPVVLREDNCRRRRRMKPRSAAASLSSMELIPIEFVLPTSQRKCKSPETALLHVAGHGNVEQMKAQVWLRALETSVAADFYHRLGPHHFLLLYQKKGQWYEIYDKYQVVQTLDCLRYWKATHRSPGQIHLVQRHPPSEESQAFQRQLTALIGYDVTDVSNVHDDELEFTRRGLVTPRMAEVASRDPKLYAMHPWVTSKPLPEYLWKKIANNCIFIVIHRSTTSQTIKVSPDDTPGAILQSFFTKMAKKKSLMDIPESQSEQDFVLRVCGRDEYLVGETPIKNFQWVRHCLKNGEEIHVVLDTPPDPALDEVRKEEWPLVDDCTGVTGYHEQLTIHGKDHESVFTVSLWDCDRKFRVKIRGIDIPVLPRNTDLTVFVEANIQHGQQVLCQRRTSPKPFTEEVLWNVWLEFSIKIKDLPKGALLNLQIYCGKAPALSSKASAESPSSESKGKVQLLYYVNLLLIDHRFLLRRGEYVLHMWQISGKGEDQGSFNADKLTSATNPDKENSMSISILLDNYCHPIALPKHQPTPDPEGDRVRAEMPNQLRKQLEAIIATDPLNPLTAEDKELLWHFRYESLKHPKAYPKLFSSVKWGQQEIVAKTYQLLARREVWDQSALDVGLTMQLLDCNFSDENVRAIAVQKLESLEDDDVLHYLLQLVQAVKFEPYHDSALARFLLKRGLRNKRIGHFLFWFLRSEIAQSRHYQQRFAVILEAYLRGCGTAMLHDFTQQVQVIEMLQKVTLDIKSLSAEKYDVSSQVISQLKQKLENLQNSQLPESFRVPYDPGLKAGALAIEKCKVMASKKKPLWLEFKCADPTALSNETIGIIFKHGDDLRQDMLILQILRIMESIWETESLDLCLLPYGCISTGDKIGMIEIVKDATTIAKIQQSTVGNTGAFKDEVLNHWLKEKSPTEEKFQAAVERFVYSCAGYCVATFVLGIGDRHNDNIMITETGNLFHIDFGHILGNYKSFLGINKERVPFVLTPDFLFVMGTSGKKTSPHFQKFQDICVKAYLALRHHTNLLIILFSMMLMTGMPQLTSKEDIEYIRDALTVGKNEEDAKKYFLDQIEVCRDKGWTVQFNWFLHLVLGIKQGEKHSA

SEQ ID NO: 14666 - protein, 597 aa, Homo sapiens
MTSRRWFHPNITGVEAENLLLTRGVDGSFLARPSKSNPGDFTLSVRRNGAVTHIKIQNTGDYYDLYGGEKFATLAELVQYYMEHHGQLKEKNGDVIELKYPLNCADPTSERWFHGHLSGKEAEKLLTEKGKHGSFLVRESQSHPGDFVLSVRTGDDKGESNDGKSKVTHVMIRCQELKYDVGGGERFDSLTDLVEHYKKNPMVETLGTVLQLKQPLNTTRINAAEIESRVRELSKLAETTDKVKQGFWEEFETLQQQECKLLYSRKEGQRQENKNKNRYKNILPFDHTRVVLHDGDPNEPVSDYINANIIMPEFETKCNNSKPKKSYIATQGCLQNTVNDFWRMVFQENSRVIVMTTKEVERGKSKCVKYWPDEYALKEYGVMRVRNVKESAAHDYTLRELKLSKVGQALLQGNTERTVWQYHFRTWPDHGVPSDPGGVLDFLEEVHHKQESIMDAGPVVVHCSAGIGRTGTFIVIDILIDIIREKGVDCDIDVPKTIQMVRSQRSGMVQTEAQYRFIYMAVQHYIETLQRRIEEEQKSKRKGHEYTNIKYSLADQTSGDQSPLPPCTPTPPCAEMREDSARVYENVGLMQQQKSFR

SEQ ID NO: 14667 - protein, 524 aa, Homo sapiens
MLTCNKAGSRMVVDAANSNGPFQPVVLLHIRDVPPADQEKLFIQKLRQCCVLFDFVSDPLSDLKWKEVKRAALSEMVEYITHNRNVITEPIYPEVVHMFAVNMFRTLPPSSNPTGAEFDPEEDEPTLEAAWPHLQLVYEFFLRFLESPDFQPNIAKKYIDQKFVLQLLELFDSEDPRERDFLKTTLHRIYGKFLGLRAYIRKQINNIFYRFIYETEHHNGIAELLEILGSIINGFALPLKEEHKIFLLKVLLPLHKVKSLSVYHPQLAYCVVQFLEKDSTLTEPVVMALLKYWPKTHSPKEVMFLNELEEILDVIEPSEFVKIMEPLFRQLAKCVSSPHFQVAERALYYWNNEYIMSLISDNAAKILPIMFPSLYRNSKTHWNKTIHGLIYNALKLFMEMNQKLFDDCTQQFKAEKLKEKLKMKEREEAWVKIENLAKANPQYTVYSQASTMSIPVAMETDGPLFEDVQMLRKTVKDEAHQAQKDPKKDRPLARRKSELPQDPHTKKALEAHCRADELASQDGR

SEQ ID NO: 14668 - protein, 497 aa, Homo sapiens
METKLPPASTPTSPSSPGLSPVPPPDKVDGFSRRSLRRARPRRSHSSSQFRYQSNQQELTPLPLLKDVPASELHELLSRKLAQCGVMFDFLDCVADLKGKEVKRAALNELVECVGSTRGVLIEPVYPDIIRMISVNIFRTLPPSENPEFDPEEDEPNLEPSWPHLQLVYEFFLRFLESPDFQPSVAKRYVDQKFVLMLLELFDSEDPREREYLKTILHRVYGKFLGLRAYIRKQCNHIFLRFIYEFEHFNGVAELLEILGSIINGFALPLKTEHKQFLVRVLIPLHSVKSLSVFHAQLAYCVVQFLEKDATLTEHVIRGLLKYWPKTCTQKEVMFLGEMEEILDVIEPSQFVKIQEPLFKQVARCVSSPHFQVAERALYFWNNEYILSLIEDNCHTVLPAVFGTLYQVSKEHWNQTIVSLIYNVLKTFMEMNGKLFDELTASYKLEKQQEQQKAQERQELWQGLEELRLRRLQGTQGAKEAPLQRLTPQVAASGGQS

SEQ ID NO: 14669 - protein, 602 aa, Homo sapiens
MPYKLKKEKEPPKVAKCTAKPSSSGKDGGGENTEEAQPQPQPQPQPQAQSQPPSSNKRPSNSTPPPTQLSKIKYSGGPQIVKKERRQSSSRFNLSKNRELQKLPALKDSPTQEREELFIQKLRQCCVLFDFVSDPLSDLKFKEVKRAGLNEMVEYITHSRDVVTEAIYPEAVTMFSVNLFRTLPPSSNPTGAEFDPEEDEPTLEAAWPHLQLVYEFFLRFLESPDFQPNIAKKYIDQKFVLALLDLFDSEDPRERDFLKTILHRIYGKFLGLRAYIRRQINHIFYRFIYETEHHNGIAELLEILGSIINGFALPLKEEHKMFLIRVLLPLHKVKSLSVYHPQLAYCVVQFLEKESSLTEPVIVGLLKFWPKTHSPKEVMFLNELEEILDVIEPSEFSKVMEPLFRQLAKCVSSPHFQVAERALYYWNNEYIMSLISDNAARVLPIMFPALYRNSKSHWNKTIHGLIYNALKLFMEMNQKLFDDCTQQYKAEKQKGRFRMKEREEMWQKIEELARLNPQYPMFRAPPPLPPVYSMETETPTAEDIQLLKRTVETEAVQMLKDIKKEKVLLRRKSELPQDVYTIKALEAHKRAEEFLTASQEAL

SEQ ID NO: 14670 - protein, 467 aa, Homo sapiens
MSSAPTTPPSVDKVDGFSRKSVRKARQKRSQSSSQFRSQGKPIELTPLPLLKDVPSSEQPELFLKKLQQCCVIFDFMDTLSDLKMKEYKRSTLNELVDYITISRGCLTEQTYPEVVRMVSCNIFRTLPPSDSNEFDPEEDEPTLEASWPHLQLVYEFFIRFLESQEFQPSIAKKYIDQKFVLQLLELFDSEDPRERDYLKTVLHRIYGKFLGLRAFIRKQINNIFLRFVYETEHFNGVAELLEILGSIINGFALPLKAEHKQFLVKVLIPLHTVRSLSLFHAQLAYCIVQFLEKDPSLTEPVIRGLMKFWPKTCSQKEVMFLGELEEILDVIEPSQFVKIQEPLFKQIAKCVSSPHFQVAERALYYWNNEYIMSLIEENSNVILPIMFSSLYRISKEHWNPAIVALVYNVLKAFMEMNSTMFDELTATYKSDRQREKKKEKEREELWKKLEDLELKRGLRRDGIIPT

SEQ ID NO: 14671 - protein, 486 aa, Homo sapiens
MSSSSPPAGAASAAISASEKVDGFTRKSVRKAQRQKRSQGSSQFRSQGSQAELHPLPQLKDATSNEQQELFCQKLQQCCILFDFMDSVSDLKSKEIKRATLNELVEYVSTNRGVIVESAYSDIVKMISANIFRTLPPSDNPDFDPEEDEPTLEASWPHIQLVYEFFLRFLESPDFQPSIAKRYIDQKFVQQLLELFDSEDPRERDFLKTVLHRIYGKFLGLRAFIRKQINNIFLRFIYETEHFNGVAELLEILGSIINGFALPLKAEHKQFLMKVLIPMHTAKGLALFHAQLAYCVVQFLEKDTTLTEPVIRGLLKFWPKTCSQKEVMFLGEIEEILDVIEPTQFKKIEEPLFKQISKCVSSSHFQVAERALYFWNNEYILSLIEENIDKILPIMFASLYKISKEHWNPTIVALVYNVLKTLMEMNGKLFDDLTSSYKAERQREKKKELEREELWKKLEELKLKKALEKQNSAYNMHSILSNTSAE

SEQ ID NO: 14672 - protein, 140 aa, Homo sapiens
IQNPDPAVYQLRDSKSSDKSVCLFTDFDSQTNVSQSKDSDVYITDKTVLDMRSMDFKSNSAVAWSNKSDFACANAFNNSIIPEDTFFPSPESSCDVKLVEKSFETDTNLNFQNLSVIGFRILLLKVAGFNLLMTLRLWSS

SEQ ID NO: 14673 - protein, 176 aa, Homo sapiens
DLNKVFPPEVAVFEPSEAEISHTQKATLVCLATGFFPDHVELSWWVNGKEVHSGVSTDPQPLKEQPALNDSRYCLSSRLRVSATFWQNPRNHFRCQVQFYGLSENDEWTQDRAKPVTQIVSAEAWGRADCGFTSVSYQQGVLSATILYEILLGKATLYAVLVSALVLMAMVKRKDF

SEQ ID NO: 14674 - protein, 164 aa, Homo sapiens
MKWKALFTAAILQAQLPITEAQSFGLLDPKLCYLLDGILFIYGVILTALFLRVKFSRSADAPAYQQGQNQLYNELNLGRREEYDVLDKRRGRDPEMGGKPQRRKNPQEGLYNELQKDKMAEAYSEIGMKGERRRGKGHDGLYQGLSTATKDTYDALHMQALPPR

SEQ ID NO: 14675 - protein, 207 aa, Homo sapiens
MQSGTHWRVLGLCLLSVGVWGQDGNEEMGGITQTPYKVSISGTTVILTCPQYPGSEILWQHNDKNIGGDEDDKNIGSDEDHLSLKEFSELEQSGYYVCYPRGSKPEDANFYLYLRARVCENCMEMDVMSVATIVIVDICITGGLLLLVYYWSKNRKAKAKPVTRGAGAGGRQRGQNKERPPPVPNPDYEPIRKGQRDLYSGLNQRRI

SEQ ID NO: 14676 - protein, 182 aa, Homo sapiens
MEQGKGLAVLILAIILLQGTLAQSIKGNHLVKVYDYQEDGSVLLTCDAEAKNITWFKDGKMIGFLTEDKKKWNLGSNAKDPRGMYQCKGSQNKSKPLQVYYRMCQNCIELNAATISGFLFAEIVSIFVLAVGVYFIAGQDGVRQSRASDKQTLLPNDQLYQPLKDREDDQYSHLQGNQLRRN

SEQ ID NO: 14677 - protein, 171 aa, Homo sapiens; identical to SEQ ID NO: 2331

SEQ ID NO: 14678 - protein, 220 aa, Homo sapiens
MLRLLLALNLFPSIQVTGNKILVKQSPMLVAYDNAVNLSCKYSYNLFSREFRASLHKGLDSAVEVCVVYGNYSQQLQVYSKTGFNCDGKLGNESVTFYLQNLYVNQTDIYFCKIEVMYPPPYLDNEKSNGTIIHVKGKHLCPSPLFPGPSKPFWVLVVVGGVLACYSLLVTVAFIIFWVRSKRSRLLHSDYMNMTPRRPGPTRKHYQPYAPPRDFAAYRS

SEQ ID NO: 14679 - protein, 355 aa, Homo sapiens
MAFSGSQAPYLSPAVPFSGTIQGGLQDGLQITVNGTVLSSSGTRFAVNFQTGFSGNDIAFHFNPRFEDGGYVVCNTRQNGSWGPEERKTHMPFQKGMPFDLCFLVQSSDFKVMVNGILFVQYFHRVPFHRVDTISVNGSVQLSYISFQNPRTVPVQPAFSTVPFSQPVCFPPRPRGRRQKPPGVWPANPAPITQTVIHTVQSAPGQMFSTPAIPPMMYPHPAYPMPFITTILGGLYPSKSILLSGTVLPSAQRFHINLCSGNHIAFHLNPRFDENAVVRNTQIDNSWGSEERSLPRKMPFVRGQSFSVWILCEAHCLKVAVDGQHLFEYYHRLRNLPTINRLEVGGDIQLTHVQT

SEQ ID NO: 14680 - protein, 215 aa, Homo sapiens
MGKGDPKKPRGKMSSYAFFVQTCREEHKKKHPDASVNFSEFSKKCSERWKTMSAKEKGKFEDMAKADKARYEREMKTYIPPKGETKKKFKDPNAPKRPPSAFFLFCSEYRPKIKGEHPGLSIGDVAKKLGEMWNNTAADDKQPYEKKAAKLKEKYEKDIAAYRAKGKPDAAKKGVVKAEKSKKKKEEEEDEEDEEDEEEEEDEEDEDEEEDDDDE

SEQ ID NO: 14681 - protein, 322 aa, Homo sapiens
MSAKSRTIGIIGAPFSKGQPRGGVEEGPTVLRKAGLLEKLKEQECDVKDYGDLPFADIPNDSPFQIVKNPRSVGKASEQLAGKVAEVKKNGRISLVLGGDHSLAIGSISGHARVHPDLGVIWVDAHTDINTPLTTTSGNLHGQPVSFLLKELKGKIPDVPGFSWVTPCISAKDIVYIGLRDVDPGEHYILKTLGIKYFSMTEVDRLGIGKVMEETLSYLLGRKKRPIHLSFDVDGLDPSFTPATGTPVVGGLTYREGLYITEEIYKTGLLSGLDIMEVNPSLGKTPEEVTRTVNTAVAITLACFGLAREGNHKPIDYLNPPK

SEQ ID NO: 14682 - protein, 599 aa, Homo sapiens; identical to SEQ ID NO: 11063

SEQ ID NO: 14683 - protein, 604 aa, Homo sapiens; identical to SEQ ID NO: 11066

SEQ ID NO: 14684 - protein, 1255 aa, Homo sapiens
MTPGTQSPFFLLLLLTVLTVVTGSGHASSTPGGEKETSATQRSSVPSSTEKNAVSMTSSVLSSHSPGSGSSTTQGQDVTLAPATEPASGSAATWGQDVTSVPVTRPALGSTTPPAHDVTSAPDNKPAPGSTAPPAHGVTSAPDTRPAPGSTAPPAHGVTSAPDTRPAPGSTAPPAHGVTSAPDTRPAPGSTAPPAHGVTSAPDTRPAPGSTAPPAHGVTSAPDTRPAPGSTAPPAHGVTSAPDTRPAPGSTAPPAHGVTSAPDTRPAPGSTAPPAHGVTSAPDTRPAPGSTAPPAHGVTSAPDTRPAPGSTAPPAHGVTSAPDTRPAPGSTAPPAHGVTSAPDTRPAPGSTAPPAHGVTSAPDTRPAPGSTAPPAHGVTSAPDTRPAPGSTAPPAHGVTSAPDTRPAPGSTAPPAHGVTSAPDTRPAPGSTAPPAHGVTSAPDTRPAPGSTAPPAHGVTSAPDTRPAPGSTAPPAHGVTSAPDTRPAPGSTAPPAHGVTSAPDTRPAPGSTAPPAHGVTSAPDTRPAPGSTAPPAHGVTSAPDTRPAPGSTAPPAHGVTSAPDTRPAPGSTAPPAHGVTSAPDTRPAPGSTAPPAHGVTSAPDTRPAPGSTAPPAHGVTSAPDTRPAPGSTAPPAHGVTSAPDTRPAPGSTAPPAHGVTSAPDTRPAPGSTAPPAHGVTSAPDTRPAPGSTAPPAHGVTSAPDTRPAPGSTAPPAHGVTSAPDTRPAPGSTAPPAHGVTSAPDTRPAPGSTAPPAHGVTSAPDTRPAPGSTAPPAHGVTSAPDTRPAPGSTAPPAHGVTSAPDTRPAPGSTAPPAHGVTSAPDTRPAPGSTAPPAHGVTSAPDTRPAPGSTAPPAHGVTSAPDTRPAPGSTAPPAHGVTSAPDTRPAPGSTAPPAHGVTSAPDTRPAPGSTAPPAHGVTSAPDTRPAPGSTAPPAHGVTSAPDNRPALGSTAPPVHNVTSASGSASGSASTLVHNGTSARATTTPASKSTPFSIPSHHSDTPTTLASHSTKTDASSTHHSSVPPLTSSNHSTSPQLSTGVSFFFLSFHISNLQFNSSLEDPSTDYYQELQRDISEMFLQIYKQGGFLGLSNIKFRPGSVVVQLTLAFREGTINVHDVETQFNQYKTEAASRYNLTISDVSVSDVPFPFSAQSGAGVPGWGIALLVLVCVLVALAIVYLIALAVCQCRRKNYGQLDIFPARDTYHPMSEYPTYHTHGRYVPPSSTDRSPYEKVSAGNGGSSLSYTNPAVAATSANL

SEQ ID NO: 14685 - protein, 5179 aa, Homo sapiens
MGLPLARLAAVCLALSLAGGSELQTEGRTRYHGRNVCSTWGNFHYKTFDGDVFRFPGLCDYNFASDCRGSYKEFAVHLKRGPGQAEAPAGVESILLTIKDDTIYLTRHLAVLNGAVVSTPHYSPGLLIEKSDAYTKVYSRAGLTLMWNREDALMLELDTKFRNHTCGLCGDYNGLQSYSEFLSDGVLFSPLEFGNMQKINQPDVVCEDPEEEVAPASCSEHRAECERLLTAEAFADCQDLVPLEPYLRACQQDRCRCPGGDTCVCSTVAEFSRQCSHAGGRPGNWRTATLCPKTCPGNLVYLESGSPCMDTCSHLEVSSLCEEHRMDGCFCPEGTVYDDIGDSGCVPVSQCHCRLHGHLYTPGQEITNDCEQCVCNAGRWVCKDLPCPGTCALEGGSHITTFDGKTYTFHGDCYYVLAKGDHNDSYALLGELAPCGSTDKQTCLKTVVLLADKKKNAVVFKSDGSVLLNQLQVNLPHVTASFSVFRPSSYHIMVSMAIGVRLQVQLAPVMQLFVTLDQASQGQVQGLCGNFNGLEGDDFKTASGLVEATGAGFANTWKAQSTCHDKLDWLDDPCSLNIESANYAEHWCSLLKKTETPFGRCHSAVDPAEYYKRCKYDTCNCQNNEDCLCAALSSYARACTAKGVMLWGWREHVCNKDVGSCPNSQVFLYNLTTCQQTCRSLSEADSHCLEGFAPVDGCGCPDHTFLDEKGRCVPLAKCSCYHRGLYLEAGDVVVRQEERCVCRDGRLHCRQIRLIGQSCTAPKIHMDCSNLTALATSKPRALSCQTLAAGYYHTECVSGCVCPDGLMDDGRGGCVVEKECPCVHNNDLYSSGAKIKVDCNTCTCKRGRWVCTQAVCHGTCSIYGSGHYITFDGKYYDFDGHCSYVAVQDYCGQNSSLGSFSIITENVPCGTTGVTCSKAIKIFMGRTELKLEDKHRVVIQRDEGHHVAYTTREVGQYLVVESSTGIIVIWDKRTTVFIKLAPSYKGTVCGLCGNFDHRSNNDFTTRDHMVVSSELDFGNSWKEAPTCPDVSTNPEPCSLNPHRRSWAEKQCSILKSSVFSICHSKVDPKPFYEACVHDSCSCDTGGDCECFCSAVASYAQECTKEGACVFWRTPDLCPIFCDYYNPPHECEWHYEPCGNRSFETCRTINGIHSNISVSYLEGCYPRCPKDRPIYEEDLKKCVTADKCGCYVEDTHYPPGASVPTEETCKSCVCTNSSQVVCRPEEGKILNQTQDGAFCYWEICGPNGTVEKHFNICSITTRPSTLTTFTTITLPTTPTSFTTTTTTTTPTSSTVLSTTPKLCCLWSDWINEDHPSSGSDDGDREPFDGVCGAPEDIECRSVKDPHLSLEQHGQKVQCDVSVGFICKNEDQFGNGPFGLCYDYKIRVNCCWPMDKCITTPSPPTTTPSPPPTTTTTLPPTTTPSPPTTTTTTPPPTTTPSPPITTTTTPLPTTTPSPPISTTTTPPPTTTPSPPTTTPSPPTTTPSPPTTTTTTPPPTTTPSPPMTTPITPPASTTTLPPTTTPSPPTTTTTTPPPTTTPSPPTTTPITPPTSTTTLPPTTTPSPPPTTTTTPPPTTTPSPPTTTTPSPPTITTTTPPPTTTPSPPTTTTTTPPPTTTPSPPTTTPITPPTSTTTLPPTTTPSPPPTTTTTPPPTTTPSPPTTTTPSPPITTTTTPPPTTTPSSPITTTPSPPTTTMTTPSPTTTPSSPITTTTTPSSTTTPSPPPTTMTTPSPTTTPSPPTTTMTTLPPTTTSSPLTTTPLPPSITPPTFSPFSTTTPTTPCVPLCNWTGWLDSGKPNFHKPGGDTELIGDVCGPGWAANISCRATMYPDVPIGQLGQTVVCDVSVGLICKNEDQKPGGVIPMAFCLNYEINVQCCECVTQPTTMTTTTTENPTPPTTTPITTTTTVTPTPTPTGTQTPTTTPITTTTTVTPTPTPTGTQTPTTTPITTTTTVTPTPTPTGTQTPTTTPITTTTTVTPTPTPTGTQTPTTTPITTTTTVTPTPTPTGTQTPTTTPITTTTTVTPTPTPTGTQTPTTTPITTTTTVTPTPTPTGTQTPTTTPITTTTTVTPTPTPTGTQTPTTTPITTTTTVTPTPTPTGTQTPTTTPITTTTTVTPTPTPTGTQTPTTTPITTTTTVTPTPTPTGTQTPTTTPITTTTTVTPTPTPTGTQTPTTTPITTTTTVTPTPTPTGTQTPTTTPITTTTTVTPTPTPTGTQTPTTTPITTTTTVTPTPTPTGTQTPTTTPITTTTTVTPTPTPTGTQTPTTTPITTTTTVTPTPTPTGTQTPTTTPITTTTTVTPTPTPTGTQTPTTTPITTTTTVTPTPTPTGTQTPTTTPITTTTTVTPTPTPTGTQTPTTTPITTTTTVTPTPTPTGTQTPTTTPITTTTTVTPTPTPTGTQTPTTTPITTTTTVTPTPTPTGTQTPTTTPITTTTTVTPTPTPTGTQTPTTTPITTTTTVTPTPTPTGTQTPTTTPITTTTTVTPTPTPTGTQTPTTTPITTTTTVTPTPTPTGTQTPTTTPITTTTTVTPTPTPTGTQTPTTTPITTTTTVTPTPTPTGTQTPTTTPITTTTTVTPTPTPTGTQTPTTTPITTTTTVTPTPTPTGTQTPTTTPITTTTTVTPTPTPTGTQTPTTTPITTTTTVTPTPTPTGTQTPTTTPITTTTTVTPTPTPTGTQTPTTTPITTTTTVTPTPTPTGTQTPTTTPITTTTTVTPTPTPTGTQTPTTTPITTTTTVTPTPTPTGTQTPTTTPITTTTTVTPTPTPTGTQTPTTTPITTTTTVTPTPTPTGTQTPTTTPITTTTTVTPTPTPTGTQTPTTTPITTTTTVTPTPTPTGTQTPTTTPITTTTTVTPTPTPTGTQTPTTTPITTTTTVTPTPTPTGTQTPTTTPITTTTTVTPTPTPTGTQTPTTTPITTTTTVTPTPTPTGTQTPTTTPITTTTTVTPTPTPTGTQTPTTTPITTTTTVTPTPTPTGTQTPTTTPITTTTTVTPTPTPTGTQTPTTTPITTTTTVTPTPTPTGTQTPTTTPITTTTTVTPTPTPTGTQTPTTTPITTTTTVTPTPTPTGTQTPTTTPITTTTTVTPTPTPTGTQTPTTTPITTTTTVTPTPTPTGTQTPTTTPITTTTTVTPTPTPTGTQTPTTTPITTTTTVTPTPTPTGTQTPTTTPITTTTTVTPTPTPTGTQTPTTTPITTTTTVTPTPTPTGTQTPTTTPITTTTTVTPTPTPTGTQTPTTTPITTTTTVTPTPTPTGTQTPTTTPITTTTTVTPTPTPTGTQTPTTTPITTTTTVTPTPTPTGTQTPTTTPITTTTTVTPTPTPTGTQTPTTTPITTTTTVTPTPTPTGTQTPTTTPITTTTTVTPTPTPTGTQTPTTTPITTTTTVTPTPTPTGTQTPTTTPITTTTTVTPTPTPTGTQTPTTTPITTTTTVTPTPTPTGTQTPTTTPITTTTTVTPTPTPTGTQTPTTTPITTTTTVTPTPTPTGTQTPTTTPITTTTTVTPTPTPTGTQTPTTTPITTTTTVTPTPTPTGTQTPTTTPITTTTTVTPTPTPTGTQTPTTTPITTTTTVTPTPTPTGTQTPTTTPITTTTTVTPTPTPTGTQTPTTTPITTTTTVTPTPTPTGTQTPTTTPITTTTTVTPTPTPTGTQTPTTTPITTTTTVTPTPTPTGTQTPTTTPITTTTTVTPTPTPTGTQTPTTTPITTTTTVTPTPTPTGTQTPTTTPITTTTTVTPTPTPTGTQTPTTTPITTTTTVTPTPTPTGTQTPTTTPITTTTTVTPTPTPTGTQTPTTTPITTTTTVTPTPTPTGTQTPTTTPITTTTTVTPTPTPTGTQTPTTTPITTTTTVTPTPTPTGTQTPTTTPITTTTTVTPTPTPTGTQTPTTTPITTTTTVTPTPTPTGTQTPTTTPITTTTTVTPTPTPTGTQTPTTTPITTTTTVTPTPTPTGTQTPTTTPITTTTTVTPTPTPTGTQTPTTTPITTTTTVTPTPTPTGTQTPTTTPITTTTTVTPTPTPTGTQTPTTTPITTTTTVTPTPTPTGTQTPTTTPITTTTTVTPTPTPTGTQTPTTTPITTTTTVTPTPTPTGTQTPTTTPITTTTTVTPTPTPTGTQTPTTTPITTTTTVTPTPTPTGTQTPTTTPITTTTTVTPTPTPTGTQTPTTTPITTTTTVTPTPTPTGTQTPTTTPITTTTTVTPTPTPTGTQTGPPTHTSTAPIAELTTSNPPPESSTPQTSRSTSSPLTESTTLLSTLPPAIEMTSTAPPSTPTAPTTTSGGHTLSPPPSTTTSPPGTPTRGTTTGSSSAPTPSTVQTTTTSAWTPTPTPLSTPSIIRTTGLRPYPSSVLICCVLNDTYYAPGEEVYNGTYGDTCYFVNCSLSCTLEFYNWSCPSTPSPTPTPSKSTPTPSKPSSTPSKPTPGTKPPECPDFDPPRQENETWWLCDCFMATCKYNNTVEIVKVECEPPPMPTCSNGLQPVRVEDPDGCCWHWECDCYCTGWGDPHYVTFDGLYYSYQGNCTYVLVEEISPSVDNFGVYIDNYHCDPNDKVSCPRTLIVRHETQEVLIKTVHMMPMQVQVQVNRQAVALPYKKYGLEVYQSGINYVVDIPELGVLVSYNGLSFSVRLPYHRFGNNTKGQCGTCTNTTSDDCILPSGEIVSNCEAAADQWLVNDPSKPHCPHSSSTTKRPAVTVPGGGKTTPHKDCTPSPLCQLIKDSLFAQCHALVPPQHYYDACVFDSCFMPGSSLECASLQAYAALCAQQNICLDWRNHTHGACLVECPSHREYQACGPAEEPTCKSSSSQQNNTVLVEGCFCPEGTMNYAPGFDVCVKTCGCVGPDNVPREFGEHFEFDCKNCVCLEGGSGIICQPKRCSQKPVTHCVEDGTYLATEVNPADTCCNITVCKCNTSLCKEKPSVCPLGFEVKSKMVPGRCCPFYWCESKGVCVHGNAEYQPGSPVYSSKCQDCVCTDKVDNNTLLNVIACTHVPCNTSCSPGFELMEAPGECCKKCEQTHCIIKRPDNQHVILKPGDFKSDPKNNCTFFSCVKIHNQLISSVSNITCPNFDASICIPGSITFMPNGCCKTCTPRNETRVPCSTVPVTTEVSYAGCTKTVLMNHCSGSCGTFVMYSAKAQALDHSCSCCKEEKTSQREVVLSCPNGGSLTHTYTHIESCQCQDTVCGLPTGTSRRARRSPRHLGSG

SEQ ID NO: 14686 - protein, 3323 aa, Homo sapiens; identical to SEQ ID NO: 9105

SEQ ID NO: 14687 - protein, 1237 aa, Homo sapiens
MQLLGLLSILWMLKSSPGATGTLSTATSTSHVTFPRAEATRTALSNSPHSRYLAEWPQGVPQLASPAPGHRENAPMTLTTSPHDTLISETLLSSLVSSNTSTTPTSKFAFKVETTPPTVLVYSATTECVYPTSFIITISHSTSICVTTTQVTFTSSYTPTPVTQKPVTTVTRTYPMTTTEKGTSAMISSPSTTTARETPIVTVTPSSSVSATDTTFHTTISSTTRTTERTPLPTGSIHTTMSPTPVFTTLKTAVTSTSPITSTITSTNTVTSMTTTTSRPTATNTLSSLTSSILSSTPAPNTEVITSHTTTTTPPSTLVTTLPTAIARSTPTSETTPSFMSSIITTETTSHSTPSFSSSTIHSTVSSSTTAITSPFTTAETGVTSTPSSPSSLSTDIPTTSLRTLTPLSLSTSTSLTTTTDLPSIPTDISSLPTPIHIISSSPSIQSTETSSLVGTTSPTMSTVRATLRSTENTPISSFSTSIVVTPETPTTQAPPVLMSATGTQTSPVPTTVTFGSMDSSTSTLHTLTPSTALSKIMSTSQFPIPSTHSSTLQTTPSIPSLQTSLTSTSEFTTESFTRGSTSTNAILTSFSTIIWSSTPTIIMSSSPSSASITPVFATTIHSVPSSPYIFSTENVGSASITAFPSLSSSSTTSTSPTSSSLTTALTEITPFSYISLPSTTPCPGTITITIVPASPTDPCVEMDPSTEATSPPTTPLTVFPFTTEMVTCPSSISMQTTLATHMDTSSMTPESESSIIPNASSSTGTGTVPTNTVFTSTRLPTSETWLSNNSVIPTPLPGVSTIPLTMKPSSSLPTILRTSSKSTHPSPPTARTSQTSVATTQTPTTLTTCRTTPITSWMTTQSTLTTTAGTCDNGGTWEQGQCACLPGFSGDRCQLQTRCQNGGQWDGLKCQCPSTFYGSSCEFAVEQVDLDVVETEVGMEVSVDQQFSPDLNDNTSQAYRDFNKTFWNQMQKIFADMQGFTFKGVEILSLRNGSIVVDYLVLLEMPFSPQLESEYEQVKTTLKEGLQNASQDANSCQDSQALCFKPDSIKVNNNSKTELTPEAICRRAAPTGYEEFYFPLVEATRLRCVTKCTSGLDNAIDCHQGQCVLETSGPACRCYSTDTHWFSGPRCEVTVHWRALVGGLTAGAALLVLLLLALGVRAVRSEWWGRQRRGRSWDQDRKWFETWDEEVVGTFSNWGFEDDGTDKDTNFHVALENVDTTMKVHIKRPEMTSSSV

SEQ ID NO: 14688 - protein, 2169 aa, Homo sapiens
MKGARWRRVPWVSLSCLCLCLLPHVVPGTTEDTLITGSKTAAPVTSTGSTTATLEGQSTAASSRTSNQDISASSQNHQTKSTETTSKAQTDTLTQMMTSTLFSSPSVHNVMETVTQETAPPDEMTTSFPSSVTNTLMMTSKTITMTTSTDSTLGNTEETSTAGTESSTPVTSAVSITAGQEGQSRTTSWRTSIQDTSASSQNHWTRSTQTTRESQTSTLTHRTTSTPSFSPSVHNVTGTVSQKTSPSGETATSSLCSVTNTSMMTSEKITVTTSTGSTLGNPGETSSVPVTGSLMPVTSAALVTVDPEGQSPATFSRTSTQDTTAFSKNHQTQSVETTRVSQINTLNTLTPVTTSTVLSSPSGFNPSGTVSQETFPSGETTISSPSSVSNTFLVTSKVFRMPISRDSTLGNTEETSLSVSGTISAITSKVSTIWWSDTLSTALSPSSLPPKISTAFHTQQSEGAETTGRPHERSSFSPGVSQEIFTLHETTTWPSSFSSKGHTTWSQTELPSTSTGAATRLVTGNPSTRAAGTIPRVPSKVSAIGEPGEPTTYSSHSTTLPKTTGAGAQTQWTQETGTTGEALLSSPSYSVIQMIKTATSPSSSPMLDRHTSQQITTAPSTNHSTIHSTSTSPQESPAVSQRGHTRAPQTTQESQTTRSVSPMTDTKTVTTPGSSFTASGHSPSEIVPQDAPTISAATTFAPAPTGNGHTTQAPTTALQAAPSSHDATLGPSGGTSLSKTGALTLANSVVSTPGGPEGQWTSASASTSPDTAAAMTHTHQAESTEASGQTQTSEPASSGSRTTSAGTATPSSSGASGTTPSGSEGISTSGETTRFSSNPSRDSHTTQSTTELLSASASHGAIPVSTGMASSIVPGTFHPTLSEASTAGRPTGQSSPTSPSASPQETAAISRMAQTQRTGTSRGSDTISLASQATDTFSTVPPTPPSITSSGLTSPQTQTHTLSPSGSGKTFTTALISNATPLPVTSTSSASTGHATPLAVSSATSASTVSSDSPLKMETSGMTTPSLKTDGGRRTATSPPPTTSQTIISTIPSTAMHTRSTAAPIPILPERGVSLFPYGAGAGDLEFVRRTVDFTSPLFKPATGFPLGSSLRDSLYFTDNGQIIFPESDYQIFSYPNPLPTGFTGRDPVALVAPFWDDADFSTGRGTTFYQEYETFYGEHSLLVQQAESWIRKMTNNGGYKARWALKVTWVNAHAYPAQWTLGSNTYQAILSTDGSRSYALFLYQSGGMQWDVAQRSGNPVLMGFSSGDGYFENSPLMSQPVWERYRPDRFLNSNSGLQGLQFYRLHREERPNYRLECLQWLKSQPRWPSWGWNQVSCPCSWQQGRRDLRFQPVSIGRWGLGSRQLCSFTSWRGGVCCSYGPWGEFREGWHVQRPWQLAQELEPQSWCCRWNDKPYLCALYQQRRPHVGCATYRPPQPAWMFGDPHITTLDGVSYTFNGLGDFLLVGAQDGNSSFLLQGRTAQTGSAQATNFIAFAAQYRSSSLGPVTVQWLLEPHDAIRVLLDNQTVTFQPDHEDGGGQETFNATGVLLSRNGSEVSASFDGWATVSVIALSNILHASASLPPEYQNRTEGLLGVWNNNPEDDFRMPNGSTIPPGSPEEMLFHFGMTWQINGTGLLGKRNDQLPSNFTPVFYSQLQKNSSWAEHLISNCDGDSSCIYDTLALRNASIGLHTREVSKNYEQANATLNQYPPSINGGRVIEAYKGQTTLIQYTSNAEDANFTLRDSCTDLELFENGTLLWTPKSLEPFTLEILARSAKIGLASALQPRTVVCHCNAESQCLYNQTSRVGNSSLEVAGCKCDGGTFGRYCEGSEDACEEPCFPSVHCVPGKGCEACPPNLTGDGRHCAALGSSFLCQNQSCPVNYCYNQGHCYISQTLGCQPMCTCPPAFTDSRCFLAGNNFSPTVNLELPLRVIQLLLSEEENASMAEVNASVAYRLGTLDMRAFLRNSQVERIDSAAPASGSPIQHWMVISEFQYRPRGPVIDFLNNQLLAAVVEAFLYHVPRRSEEPRNDVVFQPISGEDVRDVTALNVSTLKAYFRCDGYKGYDLVYSPQSGFTCVSPCSRGYCDHGGQCQHLPSGPRCSCVSFSIYTAWGEHCEHLSMKLDAFFGIFFGALGGLLLLGVGTFVVLRFWGCSGARFSYFLNSAEALP

SEQ ID NO: 14689 - protein, 5654 aa, Homo sapiens; identical to SEQ ID NO: 9108

SEQ ID NO: 14690 - protein, 5762 aa, Homo sapiens; identical to SEQ ID NO: 9109

SEQ ID NO: 14691 - protein, 2439 aa, Homo sapiens; identical to SEQ ID NO: 9112

SEQ ID NO: 14692 - protein, 377 aa, Homo sapiens; identical to SEQ ID NO: 9116

SEQ ID NO: 14693 - protein, 5478 aa, Homo sapiens
MLVIWILTLALRLCASVTTVTPEGSAVHKAISQQGTLWTGEVLEKQTVEQGKSTLRRQKNHFHRSAGELRCRNALKDEGASAGWSVMFAGESVVVLVHLWMTGARVKNLGLVEFASPGDDGDGRAEGFSLGLPLSEQARAAGAREKERQETVINHSTFSGFSQITGSTVNTSIGGNTTSASTPSSSDPFTTFSDYGVSVTFITGSTATKHFLDSSTNSGHSEESTVSHSGPGATGTTLFPSHSATSVFVGEPKTSPITSASMETTALPGSTTTAGLSEKSTTFYSSPRSPDRTLSPARTTSSGVSEKSTTSHSRPGPTHTIAFPDSTTMPGVSQESTASHSIPGSTDTTLSPGTTTPSSLGPESTTFHSSPGYTKTTRLPDNTTTSGLLEASTPVHSSTGSPHTTLSPSSSTTHEGEPTTFQSWPSSKDTSPAPSGTTSAFVKLSTTYHSSPSSTPTTHFSASSTTLGHSEESTPVHSSPVATATTPPPARSATSGHVEESTAYHRSPGSTQTMHFPESSTTSGHSEESATFHGSTTHTKSSTPSTTAALAHTSYHSSLGSTETTHFRDSSTISGRSEESKASHSSPDAMATTVLPAGSTPSVLVGDSTPSPISSGSMETTALPGSTTKPGLSEKSTTFYSSPRSPDTTHLPASMTSSGVSEESTTSHSRPGSTHTTAFPGSTTMPGLSQESTASHSSPGPTDTTLSPGSTTASSLGPEYTTFHSRPGSTETTLLPDNTTASGLLEASMPVHSSTRSPHTTLSPAGSTTRQGESTTFHSWPSSKDTRPAPPTTTSAFVEPSTTSHGSPSSIPTTHISARSTTSGLVEESTTYHSSPGSTQTMHFPESDTTSGRGEESTTSHSSTTHTISSAPSTTSALVEEPTSYHSSPGSTATTHFPDSSTTSGRSEESTASHSSQDATGTIVLPARSTTSVLLGESTTSPISSGSMETTALPGSTTTPGLSERSTTFHSSPRSPATTLSPASTTSSGVSEESTTSRSRPGSTHTTAFPDSTTTPGLSRHSTTSHSSPGSTDTTLLPASTTTSGPSQESTTSHSSSGSTDTALSPGSTTALSFGQESTTFHSNPGSTHTTLFPDSTTSSGIVEASTRVHSSTGSPRTTLSPASSTSPGLQGESTAFQTHPASTHTTPSPPSTATAPVEESTTYHRSPGSTPTTHFPASSTTSGHSEKSTIFHSSPDASGTTPSSAHSTTSGRGESTTSRISPGSTEITTLPGSTTTPGLSEASTTFYSSPRSPTTTLSPASMTSLGVGEESTTSRSQPGSTHSTVSPASTTTPGLSEESTTVYSSSRGSTETTVFPHSTTTSVHGEEPTTFHSRPASTHTTLFTEDSTTSGLTEESTAFPGSPASTQTGLPATLTTADLGEESTTFPSSSGSTGTKLSPARSTTSGLVGESTPSRLSPSSTETTTLPGSPTTPSLSEKSTTFYTSPRSPDATLSPATTTSSGVSEESSTSHSQPGSTHTTAFPDSTTTSDLSQEPTTSHSSQGSTEATLSPGSTTASSLGQQSTTFHSSPGDTETTLLPDDTITSGLVEASTPTHSSTGSLHTTLTPASSTSAGLQEESTTFQSWPSSSDTTPSPPGTTAAPVEVSTTYHSRPSSTPTTHFSASSTTLGRSEESTTVHSSPGATGTALFPTRSATSVLVGEPTTSPISSGSTETTALPGSTTTAGLSEKSTTFYSSPRSPDTTLSPASTTSSGVSEESTTSHSRPGSTHTTAFPGSTTMPGVSQESTASHSSPGSTDTTLSPGSTTASSLGPESTTFHSSPGSTETTLLPDNTTASGLLEASTPVHSSTGSPHTTLSPAGSTTRQGESTTFQSWPSSKDTMPAPPTTTSAFVELSTTSHGSPSSTPTTHFSASSTTLGRSEESTTVHSSPVATATTPSPARSTTSGLVEESTAYHSSPGSTQTMHFPESSTASGRSEESRTSHSSTTHTISSPPSTTSALVEEPTSYHSSPGSTATTHFPDSSTTSGRSEESTASHSSQDATGTIVLPARSTTSVLLGESTTSPISSGSMETTALPGSTTTPGLSEKSTTFHSSPRSPATTLSPASTTSSGVSEESTTSHSRPGSTHTTAFPDSTTTPGLSRHSTTSHSSPGSTDTTLLPASTTTSGPSQESTTSHSSPGSTDTALSPGSTTALSFGQESTTFHSSPGSTHTTLFPDSTTSSGIVEASTRVHSSTGSPRTTLSPASSTSPGLQGESTAFQTHPASTHTTPSPPSTATAPVEESTTYHRSPGSTPTTHFPASSTTSGHSEKSTIFHSSPDASGTTPSSAHSTTSGRGESTTSRISPGSTEITTLPGSTTTPGLSEASTTFYSSPRSPTTTLSPASMTSLGVGEESTTSRSQPGSTHSTVSPASTTTPGLSEESTTVYSSSPGSTETTVFPRTPTTSVRGEEPTTFHSRPASTHTTLFTEDSTTSGLTEESTAFPGSPASTQTGLPATLTTADLGEESTTFPSSSGSTGTTLSPARSTTSGLVGESTPSRLSPSSTETTTLPGSPTTPSLSEKSTTFYTSPRSPDATLSPATTTSSGVSEESSTSHSQPGSTHTTAFPDSTTTPGLSRHSTTSHSSPGSTDTTLLPASTTTSGPSQESTTSHSSPGSTDTALSPGSTTALSFGQESTTFHSSPGSTHTTLFPDSTTSSGIVEASTRVHSSTGSPRTTLSPASSTSPGLQGESTTFQTHPASTHTTPSPPSTATAPVEESTTYHRSPGSTPTTHFPASSTTSGHSEKSTIFHSSPDASGTTPSSAHSTTSGRGESTTSRISPGSTEITTLPGSTTTPGLSEASTTFYSSPRSPTTTLSPASMTSLGVGEESTTSRSQPGSTHSTVSPASTTTPGLSEESTTVYSSSPGSTETTVFPRSTTTSVRGEEPTTFHSRPASTHTTLFTEDSTTSGLTEESTAFPGSPASTQTGLPATLTTADLGEESTTFPSSSGSTGTTLSPARSTTSGLVGESTPSRLSPSSTETTTLPGSPTTPSLSEKSTTFYTSPRSPDATLSPATTTSSGVSEESSTSHSQPGSTHTTAFPDSTTTSGLSQEPTASHSSQGSTEATLSPGSTTASSLGQQSTTFHSSPGDTETTLLPDDTITSGLVEASTPTHSSTGSLHTTLTPASSTSAGLQEESTTFQSWPSSSDTTPSPPGTTAAPVEVSTTYHSRPSSTPTTHFSASSTTLGRSEESTTVHSSPGATGTALFPTRSATSVLVGEPTTSPISSGSTETTALPGSTTTAGLSEKSTTFYSSPRSPDTTLSPASTTSSGVSEESTTSHSRPGSTHTTAFPGSTTMPGVSQESTASHSSPGSTDTTLSPGSTTASSLGPESTTFHSGPGSTETTLLPDNTTASGLLEASTPVHSSTGSPHTTLSPAGSTTRQGESTTFQSWPNSKDTTPAPPTTTSAFVELSTTSHGSPSSTPTTHFSASSTTLGRSEESTTVHSSPVATATTPSPARSTTSGLVEESTTYHSSPGSTQTMHFPESDTTSGRGEESTTSHSSTTHTISSAPSTTSALVEEPTSYHSSPGSTATTHFPDSSTTSGRSEESTASHSSQDATGTIVLPARSTTSVLLGESTTSPISSGSMETTALPGSTTTPGLSEKSTTFHSSPRSPATTLSPASTTSSGVSEESTTSHSRPGSTHTTAFPDSTTTPGLSRHSTTSHSSPGSTDTTLLPASTTTSGSSQESTTSHSSSGSTDTALSPGSTTALSFGQESTTFHSSPGSTHTTLFPDSTTSSGIVEASTRVHSSTGSPRTTLSPASSTSPGLQGESTAFQTHPASTHTTPSPPSTATAPVEESTTYHRSPGSTPTTHFPASSTTSGHSEKSTIFHSSPDASGTTPSSAHSTTSGRGESTTSRISPGSTEITTLPGSTTTPGLSEASTTFYSSPRSPTTTLSPASMTSLGVGEESTTSRSQPGSTHSTVSPASTTTPGLSEESTTVYSSSPGSTETTVFPRSTTTSVRREEPTTFHSRPASTHTTLFTEDSTTSGLTEESTAFPGSPASTQTGLPATLTTADLGEESTTFPSSSGSTGTKLSPARSTTSGLVGESTPSRLSPSSTETTTLPGSPTTPSLSEKSTTFYTSPRSPDATLSPATTTSSGVSEESSTSHSQPGSTHTTAFPDSTTTSGLSQEPTTSHSSQGSTEATLSPGSTTASSLGQQSTTFHSSPGDTETTLLPDDTITSGLVEASTPTHSSTGSLHTTLTPASSTSTGLQEESTTFQSWPSSSDTTPSPPSTTAVPVEVSTTYHSRPSSTPTTHFSASSTTLGRSEESTTVHSSPGATGTALFPTRSATSVLVGEPTTSPISSGSTETTALPGSTTTAGLSEKSTTFYSSPRSPDTTLSPASTTSSGVSEESTTSHSRPGSMHTTAFPSSTTMPGVSQESTASHSSPGSTDTTLSPGSTTASSLGPESTTFHSSPGSTETTLLPDNTTASGLLEASTPVHSSTGSPHTTLSPAGSTTRQGESTTFQSWPNSKDTTPAPPTTTSAFVELSTTSHGSPSSTPTTHFSASSTTLGRSEESTTVHSSPVATATTPSPARSTTSGLVEESTTYHSSPGSTQTMHFPESNTTSGRGEESTTSHSSTTHTISSAPSTTSALVEEPTSYHSSPGSTATTHFPDSSTTSGRSEESTASHSSQDATGTIVLPARSTTSVLLGESTTSPISSGSMETTALPGSTTTPGLSEKSTTFHSSPSSTPTTHFSASSTTLGRSEESTTVHSSPVATATTPSPARSTTSGLVEESTAYHSSPGSTQTMHFPESSTASGRSEESRTSHSSTTHTISSPPSTTSALVEEPTSYHSSPGSIATTHFPESSTTSGRSEESTASHSSPDTNGITPLPAHFTTSGRIAESTTFYISPGSMETTLASTATTPGLSAKSTILYSSSRSPDQTLSPASMTSSSISGEPTSLYSQAESTHTTAFPASTTTSGLSQESTTFHSKPGSTETTLSPGSITTSSFAQEFTTPHSQPGSALSTVSPASTTVPGLSEESTTFYSSPGSTETTAFSHSNTMSIHSQQSTPFPDSPGFTHTVLPATLTTTDIGQESTAFHSSSDATGTTPLPARSTASDLVGEPTTFYISPSPTYTTLFPASSSTSGLTEESTTFHTSPSFTSTIVSTESLETLAPGLCQEGQIWNGKQCVCPQGYVGYQCLSPLESFPVETPEKLNATLGMTVKVTYRNFTEKMNDASSQEYQNFSTLFKNRMDVVLKGDNLPQYRGVNIRRLLNGSIVVKNDVILEADYTLEYEELFENLAEIVKAKIMNETRTTLLDPDSCRKAILCYSEEDTFVDSSVTPGFDFQEQCTQKAAEGYTQFYYVDVLDGKLACVNKCTKGTKSQMNCNLGTCQLQRSGPRCLCPNTNTHWYWGETCEFNIAKSLVYGIVGAVMAVLLLALIILIILFSLSQRKRHREQYDVPQEWRKEGTPGIFQKTAIWEDQNLRESRFGLENAYNNFRPTLETVDSGTELHIQRPEMVASTV

SEQ ID NO: 14694 - protein, 512 aa, Homo sapiens; identical to SEQ ID NO: 9098

SEQ ID NO: 14695 - protein, 334 aa, Homo sapiens
MLALAKILLISTLFYSLLSGSHGKENQDINTTQNIAEVFKTMENKPISLESEANLNSDKENITTSNLKASHSPPLNLPNNSHGITDFSSNSSAEHSLGSLKPTSTISTSPPLIHSFVSKVPWNAPIADEDLLPISAHPNATPALSSENFTWSLVNDTVKTPDNSSITVSILSSEPTSPSVTPLIVEPSGWLTTNSDSFTGFTPYQEKTTLQPTLKFTNNSKLFPNTSDPQKENRNTGIVFGAILGAILGVSLLTLVGYLLCGKRKTDSFSHRRLYDDRNEPVLRLDNAPEPYDVSFGNSSYYNPTLNDSAMPESEENARDGIPMDDIPPLRTSV

SEQ ID NO: 14696 - protein, 14507 aa, Homo sapiens
MLKPSGLPGSSSPTRSLMTGSRSTKATPEMDSGLTGATLSPKTSTGAIVVTEHTLPFTSPDKTLASPTSSVVGRTTQSLGVMSSALPESTSRGMTHSEQRTSPSLSPQVNGTPSRNYPATSMVSGLSSPRTRTSSTEGNFTKEASTYTLTVETTSGPVTEKYTVPTETSTTEGDSTETPWDTRYIPVKITSPMKTFADSTASKENAPVSMTPAETTVTDSHTPGRTNPSFGTLYSSFLDLSPKGTPNSRGETSLELILSTTGYPFSSPEPGSAGHSRISTSAPLSSSASVLDNKISETSIFSGQSLTSPLSPGVPEARASTMPNSAIPFSMTLSNAETSAERVRSTISSLGTPSISTKQTAETILTFHAFAETMDIPSTHIAKTLASEWLGSPGTLGGTSTSALTTTSPSTTLVSEETNTHHSTSGKETEGTLNTSMTPLETSAPGEESEMTATLVPTLGFTTLDSKIRSPSQVSSSHPTRELRTTGSTSGRQSSSTAAHGSSDILRATTSSTSKASSWTSESTAQQFSEPQHTQWVETSPSMKTERPPASTSVAAPITTSVPSVVSGFTTLKTSSTKGIWLEETSADTLIGESTAGPTTHQFAVPTGISMTGGSSTRGSQGTTHLLTRATASSETSADLTLATNGVPVSVSPAVSKTAAGSSPPGGTKPSYTMVSSVIPETSSLQSSAFREGTSLGLTPLNTRHPFSSPEPDSAGHTKISTSIPLLSSASVLEDKVSATSTFSHHKATSSITTGTPEISTKTKPSSAVLSSMTLSNAATSPERVRNATSPLTHPSPSGEETAGSVLTLSTSAETTDSPNIHPTGTLTSESSESPSTLSLPSVSGVKTTFSSSTPSTHLFTSGEETEETSNPSVSQPETSVSRVRTTLASTSVPTPVFPTMDTWPTRSAQFSSSHLVSELRATSSTSVTNSTGSALPKISHLTGTATMSQTNRDTFNDSAAPQSTTWPETSPRFKTGLPSATTTVSTSATSLSATVMVSKFTSPATSSMEATSIREPSTTILTTETTNGPGSMAVASTNIPIGKGYITEGRLDTSHLPIGTTASSETSMDFTMAKESVSMSVSPSQSMDAAGSSTPGRTSQFVDTFSDDVYHLTSREITIPRDGTSSALTPQMTATHPPSPDPGSARSTWLGILSSSPSSPTPKVTMSSTFSTQRVTTSMIMDTVETSRWNMPNLPSTTSLTPSNIPTSGAIGKSTLVPLDTPSPATSLEASEGGLPTLSTYPESTNTPSIHLGAHASSESPSTIKLTMASVVKPGSYTPLTFPSIETHIHVSTARMAYSSGSSPEMTAPGETNTGSTWDPTTYITTTDPKDTSSAQVSTPHSVRTLRTTENHPKTESATPAAYSGSPKISSSPNLTSPATKAWTITDTTEHSTQLHYTKLAEKSSGFETQSAPGPVSVVIPTSPTIGSSTLELTSDVPGEPLVLAPSEQTTITLPMATWLSTSLTEEMASTDLDISSPSSPMSTFAIFPPMSTPSHELSKSEADTSAIRNTDSTTLDQHLGIRSLGRTGDLTTVPITPLTTTWTSVIEHSTQAQDTLSATMSPTHVTQSLKDQTSIPASASPSHLTEVYPELGTQGRSSSEATTFWKPSTDTLSREIETGPTNIQSTPPMDNTTTGSSSSGVTLGIAHLPIGTSSPAETSTNMALERRSSTATVSMAGTMGLLVTSAPGRSISQSLGRVSSVLSESTTEGVTDSSKGSSPRLNTQGNTALSSSLEPSYAEGSQMSTSIPLTSSPTTPDVEFIGGSTFWTKEVTTVMTSDISKSSARTESSSATLMSTALGSTENTGKEKLRTASMDLPSPTPSMEVTPWISLTLSNAPNTTDSLDLSHGVHTSSAGTLATDRSLNTGVTRASRLENGSDTSSKSLSMGNSTHTSMTYTEKSEVSSSIHPRPETSAPGAETTLTSTPGNRAISLTLPFSSIPVEEVISTGITSGPDINSAPMTHSPITPPTIVWTSTGTIEQSTQPLHAVSSEKVSVQTQSTPYVNSVAVSASPTHENSVSSGSSTSSPYSSASLESLDSTISRRNAITSWLWDLTTSLPTTTWPSTSLSEALSSGHSGVSNPSSTTTEFPLFSAASTSAAKQRNPETETHGPQNTAASTLNTDASSVTGLSETPVGASISSEVPLPMAITSRSDVSGLTSESTANPSLGTASSAGTKLTRTISLPTSESLVSFRMNKDPWTVSIPLGSHPTTNTETSIPVNSAGPPGLSTVASDVIDTPSDGAESIPTVSFSPSPDTEVTTISHFPEKTTHSFRTISSLTHELTSRVTPIPGDWMSSAMSTKPTGASPSITLGERRTITSAAPTTSPIVLTASFTETSTVSLDNETTVKTSDILDARKTNELPSDSSSSSDLINTSIASSTMDVTKTASISPTSISGMTASSSPSLFSSDRPQVPTSTTETNTATSPSVSSNTYSLDGGSNVGGTPSTLPPFTITHPVETSSALLAWSRPVRTFSTMVSTDTASGENPTSSNSVVTSVPAPGTWTSVGSTTDLPAMGFLKTSPAGEAHSLLASTIEPATAFTPHLSAAVVTGSSATSEASLLTTSESKAIHSSPQTPTTPTSGANWETSATPESLLVVTETSDTTLTSKILVTDTILFSTVSTPPSKFPSTGTLSGASFPTLLPDTPAIPLTATEPTSSLATSFDSTPLVTIASDSLGTVPETTLTMSETSNGDALVLKTVSNPDRSIPGITIQGVTESPLHPSSTSPSKIVAPRNTTYEGSITVALSTLPAGTTGSLVFSQSSENSETTALVDSSAGLERASVMPLTTGSQGMASSGGIRSGSTHSTGTKTFSSLPLTMNPGEVTAMSEITTNRLTATQSTAPKGIPVKPTSAESGLLTPVSASSSPSKAFASLTTAPPTWGIPQSTLTFEFSEVPSLDTKSASLPTPGQSLNTIPDSDASTASSSLSKSPEKNPRARMMTSTKAISASSFQSTGFTETPEGSASPSMAGHEPRVPTSGTGDPRYASESMSYPDPSKASSAMTSTSLASKLTTLFSTGQAARSGSSSSPISLSTEKETSFLSPTASTSRKTSLFLGPSMARQPNILVHLQTSALTLSPTSTLNMSQEEPPELTSSQTIAEEEGTTAETQTLTFTPSETPTSLLPVSSPTEPTARRKSSPETWASSISVPAKTSLVETTDGTLVTTIKMSSQAAQGNSTWPAPAEETGSSPAGTSPGSPEMSTTLKIMSSKEPSISPEIRSTVRNSPWKTPETTVPMETTVEPVTLQSTALGSGSTSISHLPTGTTSPTKSPTENMLATERVSLSPSPPEAWTNLYSGTPGGTRQSLATMSSVSLESPTARSITGTGQQSSPELVSKTTGMEFSMWHGSTGGTTGDTHVSLSTSSNILEDPVTSPNSVSSLTDKSKHKTETWVSTTAIPSTVLNNKIMAAEQQTSRSVDEAYSSTSSWSDQTSGSDITLGASPDVTNTLYITSTAQTTSLVSLPSGDQGITSLTNPSGGKTSSASSVTSPSIGLETLRANVSAVKSDIAPTAGHLSQTSSPAEVSILDVTTAPTPGISTTITTMGTNSISTTTPNPEVGMSTMDSTPATERRTTSTEHPSTWSSTAASDSWTVTDMTSNLKVARSPGTISTMHTTSFLASSTELDSMSTPHGRITVIGTSLVTPSSDASAVKTETSTSERTLSPSDTTASTPISTFSRVQRMSISVPDILSTSWTPSSTEAEDVPVSMVSTDHASTKTDPNTPLSTFLFDSLSTLDWDTGRSLSSATATTSAPQGATTPQELTLETMISPATSQLPFSIGHITSAVTPAAMARSSGVTFSRPDPTSKKAEQTSTQLPTTTSAHPGQVPRSAATTLDVIPHTAKTPDATFQRQGQTALTTEARATSDSWNEKEKSTPSAPWITEMMNSVSEDTIKEVTSSSSVLRTLNTLDINLESGTTSSPSWKSSPYERIAPSESTTDKEAIHPSTNTVETTGWVTSSEHASHSTIPAHSASSKLTSPVVTTSTREQAIVSMSTTTWPESTRARTEPNSFLTIELRDVSPYMDTSSTTQTSIISSPGSTAITKGPRTEITSSKRISSSFLAQSMRSSDSPSEAITRLSNFPAMTESGGMILAMQTSPPGATSLSAPTLDTSATASWTGTPLATTQRFTYSEKTTLFSKGPEDTSQPSPPSVEETSSSSSLVPIHATTSPSNILLTSQGHSPSSTPPVTSVFLSETSGLGKTTDMSRISLEPGTSLPPNLSSTAGEALSTYEASRDTKAIHHSADTAVTNMEATSSEYSPIPGHTKPSKATSPLVTSHIMGDITSSTSVFGSSETTEIETVSSVNQGLQERSTSQVASSATETSTVITHVSSGDATTHVTKTQATFSSGTSISSPHQFITSTNTFTDVSTNPSTSLIMTESSGVTITTQTGPTGAATQGPYLLDTSTMPYLTETPLAVTPDFMQSEKTTLISKGPKDVSWTSPPSVAETSYPSSLTPFLVTTIPPATSTLQGQHTSSPVSATSVLTSGLVKTTDMLNTSMEPVTNSPQNLNNPSNEILATLAATTDIETIHPSINKAVTNMGTASSAHVLHSTLPVSSEPSTATSPMVPASSMGDALASISIPGSETTDIEGEPTSSLTAGRKENSTLQEMNSTTESNIILSNVSVGAITEATKMEVPSFDATFIPTPAQSTKFPDIFSVASSRLSNSPPMTISTHMTTTQTGSSGATSKIPLALDTSTLETSAGTPSVVTEGFAHSKITTAMNNDVKDVSQTNPPFQDEASSPSSQAPVLVTTLPSSVAFTPQWHSTSSPVSMSSVLTSSLVKTAGKVDTSLETVTSSPQSMSNTLDDISVTSAATTDIETTHPSINTVVTNVGTTGSAFESHSTVSAYPEPSKVTSPNVTTSTMEDTTISRSIPKSSKTTRTETETTSSLTPKLRETSISQEITSSTETSTVPYKELTGATTEVSRTDVTSSSSTSFPGPDQSTVSLDISTETNTRLSTSPIMTESAEITITTQTGPHGATSQDTFTMDPSNTTPQAGIHSAMTHGFSQLDVTTLMSRIPQDVSWTSPPSVDKTSSPSSFLSSPAMTTPSLISSTLPEDKLSSPMTSLLTSGLVKITDILRTRLEPVTSSLPNFSSTSDKILATSKDSKDTKEIFPSINTEETNVKANNSGHESHSPALADSETPKATTQMVITTTVGDPAPSTSMPVHGSSETTNIKREPTYFLTPRLRETSTSQESSFPTDTSFLLSKVPTGTITEVSSTGVNSSSKISTPDHDKSTVPPDTFTGEIPRVFTSSIKTKSAEMTITTQASPPESASHSTLPLDTSTTLSQGGTHSTVTQGFPYSEVTTLMGMGPGNVSWMTTPPVEETSSVSSLMSSPAMTSPSPVSSTSPQSIPSSPLPVTALPTSVLVTTTDVLGTTSPESVTSSPPNLSSITHERPATYKDTAHTEAAMHHSTNTAVTNVGTSGSGHKSQSSVLADSETSKATPLMSTTSTLGDTSVSTSTPNISQTNQIQTEPTASLSPRLRESSTSEKTSSTTETNTAFSYVPTGAITQASRTEISSSRTSISDLDRPTIAPDISTGMITRLFTSPIMTKSAEMTVTTQTTTPGATSQGILPWDTSTTLFQGGTHSTVSQGFPHSEITTLRSRTPGDVSWMTTPPVEETSSGFSLMSPSMTSPSPVSSTSPESIPSSPLPVTALLTSVLVTTTNVLGTTSPEPVTSSPPNLSSPTQERLTTYKDTAHTEAMHASMHTNTAVANVGTSISGHESQSSVPADSHTSKATSPMGITFAMGDTSVSTSTPAFFETRIQTESTSSLIPGLRDTRTSEEINTVTETSTVLSEVPTTTTTEVSRTEVITSSRTTISGPDHSKMSPYISTETITRLSTFPFVTGSTEMAITNQTGPIGTISQATLTLDTSSTASWEGTHSPVTQRFPHSEETTTMSRSTKGVSWQSPPSVEETSSPSSPVPLPAITSHSSLYSAVSGSSPTSALPVTSLLTSGRRKTIDMLDTHSELVTSSLPSASSFSGEILTSEASTNTETIHFSENTAETNMGTTNSMHKLHSSVSIHSQPSGHTPPKVTGSMMEDAIVSTSTPGSPETKNVDRDSTSPLTPELKEDSTALVMNSTTESNTVFSSVSLDAATEVSRAEVTYYDPTFMPASAQSTKSPDISPEASSSHSNSPPLTISTHKTIATQTGPSGVTSLGQLTLDTSTIATSAGTPSARTQDFVDSETTSVMNNDLNDVLKTSPFSAEEANSLSSQAPLLVTTSPSPVTSTLQEHSTSSLVSVTSVPTPTLAKITDMDTNLEPVTRSPQNLRNTLATSEATTDTHTMHPSINTAVANVGTTSSPNEFYFTVSPDSDPYKATSAVVITSTSGDSIVSTSMPRSSAMKKIESETTFSLIFRLRETSTSQKIGSSSDTSTVFDKAFTAATTEVSRTELTSSSRTSIQGTEKPTMSPDTSTRSVTMLSTFAGLTKSEERTIATQTGPHRATSQGTLTWDTSITTSQAGTHSAMTHGFSQLDLSTLTSRVPEYISGTSPPSVEKTSSSSSLLSLPAITSPSPVPTTLPESRPSSPVHLTSLPTSGLVKTTDMLASVASLPPNLGSTSHKIPTTSEDIKDTEKMYPSTNIAVTNVGTTTSEKESYSSVPAYSEPPKVTSPMVTSFNIRDTIVSTSMPGSSEITRIEMESTFSLAHGLKGTSTSQDPIVSTEKSAVLHKLTTGATETSRTEVASSRRTSIPGPDHSTESPDISTEVIPSLPISLGITESSNMTIITRTGPPLGSTSQGTFTLDTPTTSSRAGTHSMATQEFPHSEMTTVMNKDPEILSWTIPPSIEKTSFSSSLMPSPAMTSPPVSSTLPKTIHTTPSPMTSLLTPSLVMTTDTLGTSPEPTTSSPPNLSSTSHEILTTDEDTTAIEAMHPSTSTAATNVETTSSGHGSQSSVLADSEKTKATAPMDTTSTMGHTTVSTSMSVSSETTKIKRESTYSLTPGLRETSISQNASFSTDTSIVLSEVPTGTTAEVSRTEVTSSGRTSIPGPSQSTVLPEISTRTMTRLFASPTMTESAEMTIPTQTGPSGSTSQDTLTLDTSTTKSQAKTHSTLTQRFPHSEMTTLMSRGPGDMSWQSSPSLENPSSLPSLLSLPATTSPPPISSTLPVTISSSPLPVTSLLTSSPVTTTDMLHTSPELVTSSPPKLSHTSDERLTTGKDTTNTEAVHPSTNTAASNVEIPSSGHESPSSALADSETSKATSPMFITSTQEDTTVAISTPHFLETSRIQKESISSLSPKLRETGSSVETSSAIETSAVLSEVSIGATTEISRTEVTSSSRTSISGSAESTMLPEISTTRKIIKFPTSPILAESSEMTIKTQTSPPGSTSESTFTLDTSTTPSLVITHSTMTQRLPHSEITTLVSRGAGDVPRPSSLPVEETSPPSSQLSLSAMISPSPVSSTLPASSHSSSASVTSLLTPGQVKTTEVLDASAEPETSSPPSLSSTSVEILATSEVTTDTEKIHPFSNTAVTKVGTSSSGHESPSSVLPDSETTKATSAMGTISIMGDTSVSTLTPALSNTRKIQSEPASSLTTRLRETSTSEETSLATEANTVLSKVSTGATTEVSRTEAISFSRTSMSGPEQSTMSQDISIGTIPRISASSVLTESAKMTITTQTGPSESTLESTLNLNTATTPSWVETHSIVIQGFPHPEMTTSMGRGPGGVSWPSPPFVKETSPPSSPLSLPAVTSPHPVSTTFLAHIPPSPLPVTSLLTSGPATTTDILGTSTEPGTSSSSSLSTTSHERLTTYKDTAHTEAVHPSTNTGGTNVATTSSGYKSQSSVLADSSPMCTTSTMGDTSVLTSTPAFLETRRIQTELASSLTPGLRESSGSEGTSSGTKMSTVLSKVPTGATTEISKEDVTSIPGPAQSTISPDISTRTVSWFSTSPVMTESAEITMNTHTSPLGATTQGTSTLDTSSTTSLTMTHSTISQGFSHSQMSTLMRRGPEDVSWMSPPLLEKTRPSFSLMSSPATTSPSPVSSTLPESISSSPLPVTSLLTSGLAKTTDMLHKSSEPVTNSPANLSSTSVEILATSEVTTDTEKTHPSSNRTVTDVGTSSSGHESTSFVLADSQTSKVTSPMVITSTMEDTSVSTSTPGFFETSRIQTEPTSSLTLGLRKTSSSEGTSLATEMSTVLSGVPTGATAEVSRTEVTSSSRTSISGFAQLTVSPETSTETITRLPTSSIMTESAEMMIKTQTDPPGSTPESTHTVDISTTPNWVETHSTVTQRFSHSEMTTLVSRSPGDMLWPSQSSVEETSSASSLLSLPATTSPSPVSSTLVEDFPSASLPVTSLLNPGLVITTDRMGISREPGTSSTSNLSSTSHERLTTLEDTVDTEDMQPSTHTAVTNVRTSISGHESQSSVLSDSETPKATSPMGTTYTMGETSVSISTSDFFETSRIQIEPTSSLTSGLRETSSSERISSATEGSTVLSEVPSGATTEVSRTEVISSRGTSMSGPDQFTISPDISTEAITRLSTSPIMTESAESAITIETGSPGATSEGTLTLDTSTTTFWSGTHSTASPGFSHSEMTTLMSRTPGDVPWPSLPSVEEASSVSSSLSSPAMTSTSFFSTLPESISSSPHPVTALLTLGPVKTTDMLRTSSEPETSSPPNLSSTSAEILATSEVTKDREKIHPSSNTPVVNVGTVIYKHLSPSSVLADLVTTKPTSPMATTSTLGNTSVSTSTPAFPETMMTQPTSSLTSGLREISTSQETSSATERSASLSGMPTGATTKVSRTEALSLGRTSTPGPAQSTISPEISTETITRISTPLTTTGSAEMTITPKTGHSGASSQGTFTLDTSSRASWPGTHSAATHRSPHSGMTTPMSRGPEDVSWPSRPSVEKTSPPSSLVSLSAVTSPSPLYSTPSESSHSSPLRVTSLFTPVMMKTTDMLDTSLEPVTTSPPSMNITSDESLATSKATMETEAIQLSENTAVTQMGTISARQEFYSSYPGLPEPSKVTSPVVTSSTIKDIVSTTIPASSEITRIEMESTSTLTPTPRETSTSQEIHSATKPSTVPYKALTSATIEDSMTQVMSSSRGPSPDQSTMSQDISTEVITRLSTSPIKTESTEMTITTQTGSPGATSRGTLTLDTSTTFMSGTHSTASQGFSHSQMTALMSRTPGDVPWLSHPSVEEASSASFSLSSPVMTSSSPVSSTLPDSIHSSSLPVTSLLTSGLVKTTELLGTSSEPETSSPPNLSSTSAEILAITEVTTDTEKLEMTNVVTSGYTHESPSSVLADSVTTKATSSMGITYPTGDTNVLTSTPAFSDTSRIQTKSKLSLTPGLMETSISEETSSATEKSTVLSSVPTGATTEVSRTEAISSSRTSIPGPAQSTMSSDTSMETITRISTPLTRKESTDMAITPKTGPSGATSQGTFTLDSSSTASWPGTHSATTQRFPQSVVTTPMSRGPEDVSWPSPLSVEKNSPPSSLVSSSSVTSPSPLYSTPSGSSHSSPVPVTSLFTSIMMKATDMLDASLEPETTSAPNMNITSDESLAASKATTETEAIHVFENTAASHVETTSATEELYSSSPGFSEPTKVISPVVTSSSIRDNMVSTTMPGSSGITRIEIESMSSLTPGLRETRTSQDITSSTETSTVLYKMPSGATPEVSRTEVMPSSRTSIPGPAQSTMSLDISDEVVTRLSTSPIMTESAEITITTQTGYSLATSQVTLPLGTSMTFLSGTHSTMSQGLSHSEMTNLMSRGPESLSWTSPRFVETTRSSSSLTSLPLTTSLSPVSSTLLDSSPSSPLPVTSLILPGLVKTTEVLDTSSEPKTSSSPNLSSTSVEIPATSEIMTDTEKIHPSSNTAVAKVRTSSSVHESHSSVLADSETTITIPSMGITSAVDDTTVFTSNPAFSETRRIPTEPTFSLTPGFRETSTSEETTSITETSAVLYGVPTSATTEVSMTEIMSSNRIHIPDSDQSTMSPDIITEVITRLSSSSMMSESTQMTITTQKSSPGATAQSTLTLATTTAPLARTHSTVPPRFLHSEMTTLMSRSPENPSWKSSLFVEKTSSSSSLLSLPVTTSPSVSSTLPQSIPSSSFSVTSLLTPGMVKTTDTSTEPGTSLSPNLSGTSVEILAASEVTTDTEKIHPSSSMAVTNVGTTSSGHELYSSVSIHSEPSKATYPVGTPSSMAETSISTSMPANFETTGFEAEPFSHLTSGFRKTNMSLDTSSVTPTNTPSSPGSTHLLQSSKTDFTSSAKTSSPDWPPASQYTEIPVDIITPFNASPSITESTGITSFPESRFTMSVTESTHHLSTDLLPSAETISTGTVMPSLSEAMTSFATTGVPRAISGSGSPFSRTESGPGDATLSTIAESLPSSTPVPFSSSTFTTTDSSTIPALHEITSSSATPYRVDTSLGTESSTTEGRLVMVSTLDTSSQPGRTSSSPILDTRMTESVELGTVTSAYQVPSLSTRLTRTDGIMEHITKIPNEAAHRGTIRPVKGPQTSTSPASPKGLHTGGTKRMETTTTALKTTTTALKTTSRATLTTSVYTPTLGTLTPLNASMQMASTIPTEMMITTPYVFPDVPETTSSLATSLGAETSTALPRTTPSVFNRESETTASLVSRSGAERSPVIQTLDVSSSEPDTTASWVIHPAETIPTVSKTTPNFFHSELDTVSSTATSHGADVSSAIPTNISPSELDALTPLVTISGTDTSTTFPTLTKSPHETETRTTWLTHPAETSSTIPRTIPNFSHHESDATPSIATSPGAETSSAIPIMTVSPGAEDLVTSQVTSSGTDRNMTIPTLTLSPGEPKTIASLVTHPEAQTSSAIPTSTISPAVSRLVTSMVTSLAAKTSTTNRALTNSPGEPATTVSLVTHPAQTSPTVPWTTSIFFHSKSDTTPSMTTSHGAESSSAVPTPTVSTEVPGVVTPLVTSSRAVISTTIPILTLSPGEPETTPSMATSHGEEASSAIPTPTVSPGVPGVVTSLVTSSRAVTSTTIPILTFSLGEPETTPSMATSHGTEAGSAVPTVLPEVPGMVTSLVASSRAVTSTTLPTLTLSPGEPETTPSMATSHGAEASSTVPTVSPEVPGVVTSLVTSSSGVNSTSIPTLILSPGELETTPSMATSHGAEASSAVPTPTVSPGVSGVVTPLVTSSRAVTSTTIPILTLSSSEPETTPSMATSHGVEASSAVLTVSPEVPGMVTSLVTSSRAVTSTTIPTLTISSDEPETTTSLVTHSEAKMISAIPTLAVSPTVQGLVTSLVTSSGSETSAFSNLTVASSQPETIDSWVAHPGTEASSVVPTLTVSTGEPFTNISLVTHPAESSSTLPRTTSRFSHSELDTMPSTVTSPEAESSSAISTTISPGIPGVLTSLVTSSGRDISATFPTVPESPHESEATASWVTHPAVTSTTVPRTTPNYSHSEPDTTPSIATSPGAEATSDFPTITVSPDVPDMVTSQVTSSGTDTSITIPTLTLSSGEPETTTSFITYSETHTSSAIPTLPVSPGASKMLTSLVISSGTDSTTTFPTLTETPYEPETTAIQLIHPAETNTMVPRTTPKFSHSKSDTTLPVAITSPGPEASSAVSTTTISPDMSDLVTSLVPSSGTDTSTTFPTLSETPYEPETTATWLTHPAETSTTVSGTIPNFSHRGSDTAPSMVTSPGVDTRSGVPTTTIPPSIPGVVTSQVTSSATDTSTAIPTLTPSPGEPETTASSATHPGTQTGFTVPIRTVPSSEPDTMASWVTHPPQTSTPVSRTTSSFSHSSPDATPVMATSPRTEASSAVLTTISPGAPEMVTSQITSSGAATSTTVPTLTHSPGMPETTALLSTHPRTETSKTFPASTVFPQVSETTASLTIRPGAETSTALPTQTTSSLFTLLVTGTSRVDLSPTASPGVSAKTAPLSTHPGTETSTMIPTSTLSLGLLETTGLLATSSSAETSTSTLTLTVSPAVSGLSSASITTDKPQTVTSWNTETSPSVTSVGPPEFSRTVTGTTMTLIPSEMPTPPKTSHGEGVSPTTILRTTMVEATNLATTGSSPTVAKTTTTFNTLAGSLFTPLTTPGMSTLASESVTSRTSYNHRSWISTTSSYNRRYWTPATSTPVTSTFSPGISTSSIPSSTAATVPFMVPFTLNFTITNLQYEEDMRHPGSRKFNATERELQGLLKPLFRNSSLEYLYSGCRLASLRPEKDSSATAVDAICTHRPDPEDLGLDRERLYWELSNLTNGIQELGPYTLDRNSLYVNGFTHRSSMPTTSTPGTSTVDVGTSGTPSSSPSPTTAGPLLMPFTLNFTITNLQYEEDMRRTGSRKFNTMESVLQGLLKPLFKNTSVGPLYSGCRLTLLRPEKDGAATGVDAICTHRLDPKSPGLNREQLYWELSKLTNDIEELGPYTLDRNSLYVNGFTHQSSVSTTSTPGTSTVDLRTSGTPSSLSSPTIMAAGPLLVPFTLNFTITNLQYGEDMGHPGSRKFNTTERVLQGLLGPIFKNTSVGPLYSGCRLTSLRSEKDGAATGVDAICIHHLDPKSPGLNRERLYWELSQLTNGIKELGPYTLDRNSLYVNGFTHRTSVPTSSTPGTSTVDLGTSGTPFSLPSPATAGPLLVLFTLNFTITNLKYEEDMHRPGSRKFNTTERVLQTLLGPMFKNTSVGLLYSGCRLTLLRSEKDGAATGVDAICTHRLDPKSPGVDREQLYWELSQLTNGIKELGPYTLDRNSLYVNGFTHWIPVPTSSTPGTSTVDLGSGTPSSLPSPTTAGPLLVPFTLNFTITNLKYEEDMHCPGSRKFNTTERVLQSLLGPMFKNTSVGPLYSGCRLTLLRSEKDGAATGVDAICTHRLDPKSPGVDREQLYWELSQLTNGIKELGPYTLDRNSLYVNGFTHQTSAPNTSTPGTSTVDLGTSGTPSSLPSPTSAGPLLVPFTLNFTITNLQYEEDMHHPGSRKFNTTERVLQGLLGPMFKNTSVGLLYSGCRLTLLRPEKNGAATGMDAICSHRLDPKSPGLNREQLYWELSQLTHGIKELGPYTLDRNSLYVNGFTHRSSVAPTSTPGTSTVDLGTSGTPSSLPSPTTAVPLLVPFTLNFTITNLQYGEDMRHPGSRKFNTTERVLQGLLGPLFKNSSVGPLYSGCRLISLRSEKDGAATGVDAICTHHLNPQSPGLDREQLYWQLSQMTNGIKELGPYTLDRNSLYVNGFTHRSSGLTTSTPWTSTVDLGTSGTPSPVPSPTTTGPLLVPFTLNFTITNLQYEENMGHPGSRKFNITESVLQGLLKPLFKSTSVGPLYSGCRLTLLRPEKDGVATRVDAICTHRPDPKIPGLDRQQLYWELSQLTHSITELGPYTLDRDSLYVNGFTQRSSVPTTSTPGTFTVQPETSETPSSLPGPTATGPVLLPFTLNFTITNLQYEEDMRRPGSRKFNTTERVLQGLLMPLFKNTSVSSLYSGCRLTLLRPEKDGAATRVDAVCTHRPDPKSPGLDRERLYWKLSQLTHGITELGPYTLDRHSLYVNGFTHQSSMTTTRTPDTSTMHLATSRTPASLSGPMTASPLLVLFTINFTITNLRYEENMHHPGSRKFNTTERVLQGLLRPVFKNTSVGPLYSGCRLTLLRPKKDGAATKVDAICTYRPDPKSPGLDREQLYWELSQLTHSITELGPYTLDRDSLYVNGFTQRSSVPTTSIPGTPTVDLGTSGTPVSKPGPSAASPLLVLFTLNFTITNLRYEENMQHPGSRKFNTTERVLQGLLRSLFKSTSVGPLYSGCRLTLLRPEKDGTATGVDAICTHHPDPKSPRLDREQLYWELSQLTHNITELGPYALDNDSLFVNGFTHRSSVSTTSTPGTPTVYLGASKTPASIFGPSAASHLLILFTLNFTITNLRYEENMWPGSRKFNTTERVLQGLLRPLFKNTSVGPLYSGCRLTLLRPEKDGEATGVDAICTHRPDPTGPGLDREQLYLELSQLTHSITELGPYTLDRDSLYVNGFTHRSSVPTTSTGVVSEEPFTLNFTINNLRYMADMGQPGSLKFNITDNVMQHLLSPLFQRSSLGARYTGCRVIALRSVKNGAETRVDLLCTYLQPLSGPGLPIKQVFHELSQQTHGITRLGPYSLDKDSLYLNGYNEPGPDEPPTTPKPATTFLPPLSEATTAMGYHLKTLTLNFTISNLQYSPDMGKGSATFNSTEGVLQHLLRPLFQKSSMGPFYLGCQLISLRPEKDGAATGVDTTCTYHPDPVGPGLDIQQLYWELSQLTHGVTQLGFYVLDRDSLFINGYAPQNLSIRGEYQINFHIVNWNLSNPDPTSSEYITLLRDIQDKVTTLYKGSQLHDTFRFCLVTNLTMDSVLVTVKALFSSNLDPSLVEQVFLDKTLNASFHWLGSTYQLVDIHVTEMESSVYQPTSSSSTQHFYLNFTITNLPYSQDKAQPGTTNYQRNKRNIEDALNQLFRNSSIKSYFSDCQVSTFRSVPNRHHTGVDSLCNFSPLARRVDRVAIYEEFLRMTRNGTQLQNFTLDRSSVLVDGYSPNRNEPLTGNSDLPFWAVILIGLAGLLGVITCLICGVLVTTRRRKKEGEYNVQQQCPGYYQSHLDLEDLQ

SEQ ID NO: 14697 - protein, 4493 aa, Homo sapiens
MPRPGTMALCLLTLVLSLLPPQAAAEQDLSVNRAVWDGGGCISQGDVLNRQCQQLSQHVRTGSAANTATGTTSTNVVEPRMYLSCSTNPEMTSIESSVTSDTPGVSSTRMTPTESRTTSESTSDSTTLFPSSTEDTSSPTTPEGTDVPMSTPSEESISSTMAFVSTAPLPSFEAYTSLTYKVDMSTPLTTSTQASSSPTTPESTTIPKSTNSEGSTPLTSMPASTMKVASSEAITLLTTPVEISTPVTISAQASSSPTTAEGPSLSNSAPSGGSTPLTRMPLSVMLVVSSEASTLSTTPAATNIPVITSTEASSSPTTAEGTSIPTSTYTEGSTPLTSTPASTMPVATSEMSTLSITPVDTSTLVTTSTEPSSLPTTAEATSMLTSTLSEGSTPLTNMPVSTILVASSEASTTSTIPVDSKTFVTTASEASSSPTTAEDTSIATSTPSEGSTPLTSMPVSTTPVASSEASNLSTTPVDSKTQVTTSTEASSSPPTAEVNSMPTSTPSEGSTPLTSMSVSTMPVASSEASTLSTTPVDTSTPVTTSSEASSSSTTPEGTSIPTSTPSEGSTPLTNMPVSTRLVVSSEASTTSTTPADSNTFVTTSSEASSSSTTAEGTSMPTSTYSERGTTITSMSVSTTLVASSEASTLSTTPVDSNTPVTTSTEATSSSTTAEGTSMPTSTYTEGSTPLTSMPVNTTLVASSEASTLSTTPVDTSTPVTTSTEASSSPTTADGASMPTSTPSEGSTPLTSMPVSKTLLTSSEASTLSTTPLDTSTHITTSTEASCSPTTTEGTSMPISTPSEGSPLLTSIPVSITPVTSPEASTLSTTPVDSNSPVTTSTEVSSSPTPAEGTSMPTSTYSEGRTPLTSMPVSTTLVATSAISTLSTTPVDTSTPVTNSTEARSSPTTSEGTSMPTSTPGEGSTPLTSMPDSTTPVVSSEARTLSATPVDTSTPVTTSTEATSSPTTAEGTSIPTSTPSEGTTPLTSTPVSHTLVANSEASTLSTTPVDSNTPLTTSTEASSPPPTAEGTSMPTSTPSEGSTPLTRMPVSTTMVASSETSTLSTTPADTSTPVTTYSQASSSSTTADGTSMPTSTYSEGSTPLTSVPVSTRLVVSSEASTLSTTPVDTSIPVTTSTEASSSPTTAEGTSIPTSPPSEGTTPLASMPVSTTLVVSSEANTLSTTPVDSKTQVATSTEASSPPPTAEVTSMPTSTPGERSTPLTSMPVRHTPVASSEASTLSTSPVDTSTPVTTSAETSSSPTTAEGTSLPTSTTSEGSTLLTSIPVSTTLVTSPEASTLLTTPVDTKGPVVTSNEVSSSPTPAEGTSMPTSTYSEGRTPLTSIPVNTTLVASSAISILSTTPVDNSTPVTTSTEACSSPTTSEGTSMPNSNPSEGTTPLTSIPVSTTPVVSSEASTLSATPVDTSTPGTTSAEATSSPTTAEGISIPTSTPSEGKTPLKSIPVSNTPVANSEASTLSTTPVDSNSPVVTSTAVSSSPTPAEGTSIAISTPSEGSTALTSIPVSTTTVASSEINSLSTTPAVTSTPVTTYSQASSSPTTADGTSMQTSTYSEGSTPLTSLPVSTMLVVSSEANTLSTTPIDSKTQVTASTEASSSTTAEGSSMTISTPSEGSPLLTSIPVSTTPVASPEASTLSTTPVDSNSPVITSTEVSSSPTPAEGTSMPTSTYTEGRTPLTSITVRTTPVASSAISTLSTTPVDNSTPVTTSTEARSSPTTSEGTSMPNSTPSEGTTPLTSIPVSTTPVLSSEASTLSATPIDTSTPVTTSTEATSSPTTAEGTSIPTSTLSEGMTPLTSTPVSHTLVANSEASTLSTTPVDSNSPVVTSTAVSSSPTPAEGTSIATSTPSEGSTALTSIPVSTTTVASSETNTLSTTPAVTSTPVTTYAQVSSSPTTADGSSMPTSTPREGRPPLTSIPVSTTTVASSEINTLSTTLADTRTPVTTYSQASSSPTTADGTSMPTPAYSEGSTPLTSMPLSTTLVVSSEASTLSTTPVDTSTPATTSTEGSSSPTTAGGTSIQTSTPSERTTPLAGMPVSTTLVVSSEGNTLSTTPVDSKTQVTNSTEASSSATAEGSSMTISAPSEGSPLLTSIPLSTTPVASPEASTLSTTPVDSNSPVITSTEVSSSPIPTEGTSMQTSTYSDRRTPLTSMPVSTTVVASSAISTLSTTPVDTSTPVTNSTEARSSPTTSEGTSMPTSTPSEGSTPFTSMPVSTMPVVTSEASTLSATPVDTSTPVTTSTEATSSPTTAEGTSIPTSTLSEGTTPLTSIPVSHTLVANSEVSTLSTTPVDSNTPFTTSTEASSPPPTAEGTSMPTSTSSEGNTPLTRMPVSTTMVASFETSTLSTTPADTSTPVTTYSQAGSSPTTADDTSMPTSTYSEGSTPLTSVPVSTMPVVSSEASTHSTTPVDTSTPVTTSTEASSSPTTAEGTSIPTSPPSEGTTPLASMPVSTTPVVSSEAGTLSTTPVDTSTPMTTSTEASSSPTTAEDIVVPISTASEGSTLLTSIPVSTTPVASPEASTLSTTPVDSNSPVVTSTEISSSATSAEGTSMPTSTYSEGSTPLRSMPVSTKPLASSEASTLSTTPVDTSIPVTTSTETSSSPTTAKDTSMPISTPSEVSTSLTSILVSTMPVASSEASTLSTTPVDTRTLVTTSTGTSSSPTTAEGSSMPTSTPGERSTPLTNILVSTTLLANSEASTLSTTPVDTSTPVTTSAEASSSPTTAEGTSMRISTPSDGSTPLTSILVSTLPVASSEASTVSTTAVDTSIPVTTSTEASSSPTTAEVTSMPTSTPSETSTPLTSMPVNHTPVASSEAGTLSTTPVDTSTPVTTSTKASSSPTTAEGIVVPISTASEGSTLLTSIPVSTTPVASSEASTLSTTPVDTSIPVTTSTEGSSSPTTAEGTSMPISTPSEVSTPLTSILVSTVPVAGSEASTLSTTPVDTRTPVTTSAEASSSPTTAEGTSMPISTPGERRTPLTSMSVSTMPVASSEASTLSRTPADTSTPVTTSTEASSSPTTAEGTGIPISTPSEGSTPLTSIPVSTTPVAIPEASTLSTTPVDSNSPVVTSTEVSSSPTPAEGTSMPISTYSEGSTPLTGVPVSTTPVTSSAISTLSTTPVDTSTPVTTSTEAHSSPTTSEGTSMPTSTPSEGSTPLTYMPVSTMLVVSSEDSTLSATPVDTSTPVTTSTEATSSTTAEGTSIPTSTPSEGMTPLTSVPVSNTPVASSEASILSTTPVDSNTPLTTSTEASSSPPTAEGTSMPTSTPSEGSTPLTSMPVSTTTVASSETSTLSTTPADTSTPVTTYSQASSSPPIADGTSMPTSTYSEGSTPLTNMSFSTTPVVSSEASTLSTTPVDTSTPVTTSTEASLSPTTAEGTSIPTSSPSEGTTPLASMPVSTTPVVSSEVNTLSTTPVDSNTLVTTSTEASSSPTIAEGTSLPTSTTSEGSTPLSIMPLSTTPVASSEASTLSTTPVDTSTPVTTSSPTNSSPTTAEVTSMPTSTAGEGSTPLTNMPVSTTPVASSEASTLSTTPVDSNTFVTSSSQASSSPATLQVTTMRMSTPSEGSSSLTTMLLSSTYVTSSEASTPSTPSVDRSTPVTTSTQSNSTPTPPEVITLPMSTPSEVSTPLTIMPVSTTSVTISEAGTASTLPVDTSTPVITSTQVSSSPVTPEGTTMPIWTPSEGSTPLTTMPVSTTRVTSSEGSTLSTPSVVTSTPVTTSTEAISSSATLDSTTMSVSMPMEISTLGTTILVSTTPVTRFPESSTPSIPSVYTSMSMTTASEGSSSPTTLEGTTTMPMSTTSERSTLLTTVLISPISVMSPSEASTLSTPPGDTSTPLLTSTKAGSFSIPAEVTTIRISITSERSTPLTTLLVSTTLPTSFPGASIASTPPLDTSTTFTPSTDTASTPTIPVATTISVSVITEGSTPGTTIFIPSTPVTSSTADVFPATTGAVSTPVITSTELNTPSTSSSSTTTSFSTTKEFTTPAMTTAAPLTYVTMSTAPSTPRTTSRGCTTSASTLSATSTPHTSTSVTTRPVTPSSESSRPSTITSHTIPPTFPPAHSSTPPTTSASSTTVNPEAVTTMTTRTKPSTRTTSFPTVTTTAVPTNTTIKSNPTSTPTVPRTTTCFGDGCQNTASRCKNGGTWDGLKCQCPNLYYGELCEEVVSSIDIGPPETISAQMELTVTVTSVKFTEELKNHSSQEFQEFKQTFTEQMNIVYSGIPEYVGVNITKLRLGSVVVEHDVLLRTKYTPEYKTVLDNATEVVKEKITKVTTQQIMINDICSDMMCFNTTGTQVQNITVTQYDPEEDCRKMAKEYGDYFVVEYRDQKPYCISPCEPGFSVSKNCNLGKCQMSLSGPQCLCVTTETHWYSGETCNQGTQKSLVYGLVGAGVVLMLIILVALLMLVFRSKREVKRQKYRLSQLYKWQEEDSGPAPGTFQNIGFDICQDDDSIHLESIYSNFQPSLRHIDPETKIRIQRPQVMTTSF

SEQ ID NO: 14698 - protein, 8384 aa, Homo sapiens
MKLILWYLVVALWCFFKDVEALLYRQKSDGKIAASRSGGFSYGSSSSGDLDRKKPLFSLEFGSPGETEDKSRQRQDAGSPKSEDTPAGGFFNSSSSSGDSDRTKPFFSLGLGAPGKAEDKSGDSQDAGGSKSEDTPPGGFFYGSSSSGDSDKKKPLFSFEFGATGEDEDKSRERWDAGNSRSEDSPADSTNTRYGAGFSSSGASLDVGFGWGISDEKGLEVSKADGRETRGSGSAGGETIVFGPDAGSSVGTGSSGLKLGAGKGDAAFGFEVSDSNSFGDTGISSKTVEGNQTSSSGGSVSIDLGDTSFRSENQFVGGGSLNSISNLWDSGQEGFGINEIGGNGMSGSVSAEAGFKGFGSDSSSSGDSSARNGFENSSGISEDSGVILGSSDQHEVELSRTGGNRKRSSDPDEAGNLSPGSDVSDSGGNTWSSDSGSGGGGVTSSSEYSTSGPLNTPEKGSHIPEATPKYSETNAIIGEISTWSKGAYKSFNGRIFFFESSCPYTFCRHCIESGGDFNIEIKRNNDSEIEKITVLIDNNDVSIFGDTILVNGESVQIPYNNKLIHIKKYGEHNVLNSRRGILTLMWDKNNKLSLTLHKQYPTCGLCGNFNSTPGQDINEHIANSKIPGDCPNAVGKSYEVCEDGIQHCNKIIGTYFEKCGKVAALSNDYKMICIDEYCQTRDKTSTCDTYSELSRLCASDGPGTFESWRSDSDVVCGTQRCPEQHIYKECGPSNPATCSNVAPFQDSECVSGCTCPEGYLLDDIGEKGKCVLKAECPCESSGTVYQPGEVREGPCGSQCTCQDAKWSCTEALCPGRCKVEGSSLTTFDGVKYNFPGNCHFLAVHNEDWSISVELRPCPSGQTGTCLNSVTLLLNSSVPVDKYVFNSDGTVTNDKIRNQGYYYSDKIQIFNASSSYLQVETYFHVKLQIQIVPVMQLYVSMPPNQFTDTVGLCGSYNNKAEDDFMSSQNILEKTSQAFANSWEMMSCPKGNPSSCISIEKEKFAERHCGILLDSSGPLASCHPIVNPKPYHEECKKYTCTCENSQDCLCTILGNYVKACAEKETYIVGWRTGLCEHSCPSGLVFKYNVKACNSSCRSLSERDRSCDVEDVPVDGCTCPDAMYQNNEGNCVLKSQCDCYINDEVMQPGKLIHIDDNKCVCRDGILLCQIPIDLTLQNCSGGAEYVDCSDPKAQRRTNRTCSTRNIPVFDENLPCKRGCFCPEGMVRNSKGICVFPNDCPCSFGGREYDEGSVTSVGCNECTCIKGSWSCTQNECQTICHIYGEGHVRTFDGKSYSFDGLCQYSFLEDYCGHENGTFRILTESVPCCEDGLTCSRKIIVAFQDQNIVLQDGKVTAVKSTESKKCELNANAYSIHTVGLYLILKFQNGIIVIWDKNTRLSVILDPNWNGKVCGLCGNNNGDLKDDFTTRYSSVASGALEFGNSWKTSQECSDTVAQTFPCDSNPYCKAWAVRKCEILRDSTFRDCHNKVDPSAYHDACIEEACACDMEGKYLGFCTAVAMYAEACSAVGVCVSWRKPNLCPVYCDYYNAPGECRWHYEPCGTVTAKTCKDQLVGQKFSSLLEGCYAKCPDSAPYLDENTMKCVSLSECSCFYNDVIPAGGVIEDNCGRTCYCIAGQLECSETAPTNSTFAVSTTTATTILSTGAAITLVTGGPSTAASIPAITTSSSETTGTTLGPLTEPFTTGITETSVPIISTSGNAGMTGVVSPTVTGASGMAGTTGGVDAATTGAASENTSERAGTPRVSGETPAVGGGSTPGEAGPGATVSGSTGVSAGSITASPGASATSSESSKSGTTGPSVGGKTGATSSEATSSEGMSGVTGQSLGSTAGSDSEITAKTSFTGSSPPGKLTRPSPGSPGHFSGGTTEWGNVATTGAAGENTSGALGSTEGSVEATTSAGSGNTAGTSGTGDTGPGNTAVSGTPVVSPGATPGAPGSSTPGEADIGNTSFGKSGTPTVSAASTTSSPVSKHTDAASATAVTISGSKPGTPGTPGGATSGGKITSGWSSSGTSTGASNTPGATGSSTGQTDTSGPSAKVTGNYGQSSEIPGTIKSSSDVSGTMGQSDTTSGPSVAVTRTSEQSSGVTVASEPSVGVSGTTGPLAEISGTTRPLVSGLRTTGSSAEGSGTTGPSSRESVTTRPLAEGSGTSGQSVTGSRATGLSATELGTTVSFTGGLGTSRSSARETRTTGPSADGSGTTGPSVVRSGTTRLSVGVTRATESSPGVTGTTTPSAEESRTTGPSVLVTGTTGQSGQGSGTTGKSFIESGPSVVGSGTTGPTSAGLGTTAPSTRRSSTTKPSVGRTGTTGQSGAESGTTEPSARVAGVTGTSAEVSGRIEPSATESSTSRPLGETTGTTIPSMEGSEATGPSVIGSETTRLSVIGSGTTGTSSGGSGATRSSGGGMGTTGQSTARSETTGPLFGLTGTFGQSATVTGTSSNSAGVTTPEKSPGVAMTTGLLVEGSATTQPRILESETTESSAGVIVTSGQSARVTGATGPSAGETGTTEPSTEGSVAAVLFVIGSETTRPLDIGSGTTGTLSGGSSTTRSSDGTTGTTRKSTARSETTGLSGLTGTSGQLAGVTGTSSKSAGVTVTSEKSAGVAVITGSFVERPVTTGPPLLESETTRPSGGVTVTSGQSARVTETVGASAGVTGTTGPSTEGSGATGPSVVGSGTTRPLAGESGTTESSAGVTGTRPSSSRESATTGPSDEGSGTTGLSAGVTVTSGQSVRKTGTTGAPAGVTETTRPSVVKSGTTGPSVIGTRTTGTSSGGSGATRSSGGETETTGQSAVKSGTTESFTRLTRTSGQSAGMTGTSAQSAGVALTSPFVEGLVTTGSSTVGLETTRPSAVGSGKTGPPVVKAQTTGPSAGVTVTSGQSARMTGASGPSVGVTGTTGPASKGLGTIRPSVVGLETTELSAEGSGTTGPPIVGETTVPSAGVTVTSGYSDRVTGATEPLAGVTGTIKPSVAGSVTTGPSVTGVETTAKTTSGGLSTTISSVGGTGTTGQSPERSGTTGPFTGLTGTSAQSAGVTMTSIQSAGVLVTTGLNVDGLGTTGKALIGSGTTGLSAEATGTIGPSTEGLEKTGPSITGSGTTRPLVTESWTAGTSSGGHSTTSPSVRGTETTGQSAAESVTTGPVTGYTETSGPSAGVTVTPRQSPTVTQTTGSSAAVSGTTVQSLTVSGTTRPSSGQTEITGSSVKESGTTESSAVRSGTTGPTAGVTGTNGPSSAGVTGITGSSPGVTGTTGSSPGVTGTTGSSARSGTSIPSVGKTGTTRTSVEESRTTRPSAGITGTNGLSAEVTGTTGPLAGVTGTTGPSAGVTRTTGLSAGETGTTGLSPGVTRTTRSSAGLTGKTGLSAGVTGKTGLSAEVTGTTRLSAGVTGTTGPSPGVTGTTGTPAGVTGTTELSAGVTGKTGLSSEVTETTGLSYGVKRTIGLSAGSTGTSGQSAGVAGTTTLSAEVTGTTRPSAGVTGTTGLSAEVTEITGISAVVTGTTGPSAGVTETTGSSAGVAGTTRLSAGVTGITGLSAGVTGTTGLSTEVTGTTGPSAGATGTTGLSVGVTGITGLSDVVTETTGSSARSGTGIPSVGETRTTSTSVEESRTTRPSAGIMGTNGLPAEVTGTTEPLAGGTGTTGILAGVTGTTGLSAGETGKIGSSAGVTGKTGSSARVTGKTGPSAEVTGKTGLSAGVTGTTGLSPGVTGTSGLSAEVTGTTGPSAEATGLPGVSAGVTGTTGSLAGGTGTIGLSAGVTGTTGSSAGVTGTTGLSAGVTGIAGLSAGVTGITGPSAGVTGTTTVSAGVTGTTGLSAEATEITGLSAGVTGTTGLSAGVTETIRLSAGVTGTIRSSAGVTGITGLSAGVTGTTGPSAGVTGSTGLLAGVTETTGQSAKVTGTTGQSVGVTGTTRSSGGVTGITGLSAGVTGTNGLSAVTGMTGLSAEVTGTTGLSVGVTGIAGLSAGVTGITGPSAGITGTTTISAGVTGTSGLSAEATGITGLSAGVTGKTGLSAGVTETIGLSAEATGTIGSSPGVTGTTGSSTGVTGITGLSAGVTGTTGLSTEVTGTTGPSAGVTRTTGLSAGVTGITGLSAIVTETTGSSARSGTSIPSVGETGTTRTSVEESRTTRPSAGITGTNGLSAEVTGTIGPLAGGTGTTGLSAGVTGTVGSSAVVTGTTGLSAGVTGTTGPSAEETGATGPSAEVTETTGPSAGVTGTGRLSAEVTGTTGPSAEVTGLPGESAEVTGTIGSPAGVTGTTQLSAVVTGITGLSAEVTGTTGLSAGVTGITGLSAEVTRTTGLSAGVTGTIGLSAGVTGTTRPSAGVTGTTGQSAEVTGTTEPSAGLTETTGSSTGVTGATGPLAGVTGTTGISTEVTGTTGPSARVTGTTVLSAGVTGITGLSAIVTETTGSSARSGTSTPSVGETGTTRTSVEESRATRPSAGITGTNGQSAEVTWITGPLAGVTGTTGISAGVTGTTGLSAGVTGTIGSSAVVTGINGLSAGVTGTTGPSAEETGATGPSAEVTGTTGPSAEETGATGPSAEVTGTTGPSGGVTGTNGLSAEVTGTTGPSAEVTGLPGVSAGVTGTIGSPAAVTGTIRPSAVVTGITGLSAEVTGTTGLSAWVTGIAGLSAGVTETIGSSAGVTGTNGLSAEATGTTGPSAGVTGTTGLSAGVTGTAGLSARVTESTGLSAGVTGTTGLSAGVTGTTGPSAGITGTNGLSAEVTGTTGPLAGVTGTIGLSAGVTGIAGLSAGVTESTGLSAGVTGTIRSSAVVTGINGLSAGVTGTTGPSAEETGATGPSAEVTGTTGPSGGVTGTSGISAEVTGTTGPSAEVTGLPGVSAGVTGTIGSPAAVTGTTRPSAVVTGISGLSAEVTGTTGLSAGVTETIGSSAGVTGTNGLSAEATETTGPSAGVTGTTGLSAGVTGTTGPSAGIAGTNGLSAGVTGTTGLSARVTESTGLSAGVTGTIGSSAVVTETTRLSSGVTGTIGPSAEETGATGLSAEVTGTTGSLAEVTGTTGLSAGVTGTIGSSAVVTGTTGLSAGITGTNGLSAEVTGTAGPLAGVTGTTGLSAGVTGTTGLSAGVTETTGQSAGVTESTGLSPGVTGTIGSSAVVTGIKGLSAGVTGTTGPSAEETGATGPSAEVTGTTGPSGGVTGTSVLSVEVTGTTGPSAEVTGLPGVSAGLTGTIGSPAAVRGTTWPSAVVTGISGLSGEVTGTTGLSAGVTGIGGLSAGVTGTIGSSAGVTGTNALSAEATGTTGPSAGVTGTTGLSAGVTGTTGLSAGVTGTIRSSAVVTETTGLSAGVTGTTGPSAGIAGTNGLSAEVTGTTGLSAGMTGTTGLSARVTESTGLSAGVTGTIGSSAVVTETTRLSAGVTGTIGPSAEETGATGLSAEVTRTTGSLAGVTGTTGPSAVVTGKTELSAEVTGTTELSAEVTEKTGPSAEVTGKTGLSAGVMETTGPSAEVTGTTGSSAGVTGTTGPSAGVTGTTGPSAEATGLPGVSAGVTGTIGSPAGVTGTARLSAVVTGISGLSAEVTGTTGLSTGVTGIAGHSAAVTGITRPSAGVTGTTTVSAGVTGTIGLSAEATGITLPSAGVTETTGLSAGVTETIGLSAGVTGTIGSSAGVTEITGLSAGVTGTTGPSAGVTGSTVLSAGVTATTGQSVGVTGTTGPSAGVTGTTGLSAGVTGIAGLSAGVTGITGPSAGVTGTTTVSAGVTGTTGLSAEATEITGLSAGVTGTTGLSAGVTGIAGLSAGVTETIGSSAGVTGTNGLSAEATGKTGPSAGVTGTTGLSAGVTGTTGLSAGVTETIGLSAGVTGTIGSSAGVKGTTGQSAEVTGATGQSVGVTGTTRSSGGVTGITGLSAGLRGTTVSSAKAGTSIPLTGKTGTTRTSVEESTTTGPSAGITGTNGLSAEMTGTNELSAGVTGTIGSSAGVTGTTGLSVEATVTTGLSAGVTGTTVPLAGVTWTPGPSAGVTGIAALSAGVTGKSGLSAGVTGKTGLSAGVTGTTGPSAEATGKTGLSAGVTGITGPFAEVTGTTGLSAGVIGTTGSSAEVTGITGLSAGVTGKTRSSAGVTGTTGLSAKSGTSIPSAGKTGTTKTSVEESRTTRPSAGITATTGVPAATSPGAEGESIASTSVATGAIPRSTIAPGSTTTGTTGVTTGTTLAPRSFNIGTSGGISGKTLKPGSYVSEATTATGTPGAGPSGGTTISSPEVSTISEVSNTGITGVGSETSIETGISNTATTGVAPGTTLAPGSSSTEATTSIGGSASTRGGIATEATGSTRGVRTTGSEAPEGTSGEFSGTTISSGGFHTEATTLTGGRGSIGTESRAESTTSLPQSAKTRGGILTEATSSTGRIRATGSEAPGGTSRKFSGTTISSGGSHTEATTLAGGRDSTESEFRTATIGVVPATTVAPGSSKTEATTFLGVSGTTSVGRATGATTSIAGSDTSQAEHPGGTSGEFPGTTITSGDSHTEATALTGSRGSIGTESTVETTTYIGESGTTRGGLATATTGAFSGKTLEPGNDNTEATGSTGGIRATRTEAPGGTSGEFPGTTFTSGGSHTEATTFTGGKGSTGTESRAATTRAAPGTTLVPGSSNTGATASPGGSATTRGRITTATTGAFSGKTLESENDNTEATSSTRGVRTTRSEAPGGTSGEFPGTRITSGGSYTATTRAAPGTTLAPGSSNTGATASLGGSAMTRGRITTATTGAFSGKTLEPGNNNTEATSSTRGVRTTRSEAPGEATTLTGDRSSTGSESRTATTGVAPGTTVAPGSSKTEATTFLGVSGTTNIGRATGATTSIVGSDTSQAERPGGTTVVSPGASSTSQSSRPGTSVTPDSSASESETVTTKEFSGTTAISRTSHTGTPAASGGQATGSLTATTGVAPGTTVAPGSSNTEATTSVGERETTKAEIITGDTGELSGTTIISENSTTAGITAATGKQAGTSEVAPSTTVAPGSFSTAATTSPGASGTTGVTTTTKTTTSLGGSGTTGAEIKSATTGAPGSRTGTAGVPSATTVSPGSSNSEATTSVGESGKTGAETITEATTSTEGTGTSGTGFKTGTSEVAPATTVAPGSFSTAATTSPGASGMTGVTTTTKTTTSLGGSGTTGAKIKLVGTTTTAPESRTAGVPSGTRVTPGSSNSEATTSVEESRITRAEVITEATTFSGGSGATRAGLPRGTTGEFSGTNFISGSSNTEATTSTEGTGTSGTGFKIAGITSAPGKQAGTSGVSLATTVAPGSFSTATTSSGASGITRAGPTSETTTSLGGSGTTGAEIKSAAVPSGTTVAPGSSNSEATTSVGENGKTRGEIITDTTEGTSGKVLEPGSAHTEATTFPGGSGTTRAGPPGGTTGELSRMTIIPGSSNTEATTSTKGTGTSGTGFKTGTSWVAPGTTVSPGSFSTATISPGASRTTGAAPAAETTTSLEGGGTTGAEIKSGATSGVPGSKTGTAGVPSATTIAPGSSNSEATTSLGESGKTRVETITGTTEGKTLAAGSAHTEATTFSGGSGSTRAGPLGGASGTSGGYVPGRETEPTTSIEETGTSRTIFKTVGITSAPGRQAGTSVVAPSTTVAPGSFSTAATTSPGASGMTGVRTTSKTTTSLGGTGTTRTEIKSGATTGAPGIKTDIMGESSRTTILSGSSNTEATNSIEETGTSGTGFKTAGITAAPGKQAGTSGVAPGTTVAPGSFSTAATTSPGASGVTGTGPTAETTTFLGGSSTTGAEIKSGATTGAPGSKTGTAKVLSGTTVASGSSNSEATTFSGITEAVTVPSKNGSMTTALGSQLSSSQTVIPGSSGTISHTTVAPGSSVTGTTTGASDDQVTGSKTGTTGVALSTTVAPGSSSTEATTSTGVHRTTVVGQKTGATTRGSAKQGTRSTIEATTSFRGTGTTGSGMNTGTTGVVSGNTISPSSFNTEATSGTSERPNPGSEIGTTGIVSGTTVAPGSSNTEATTSLGNGGTTEAGSKIVTTGITTGTTIVPGSFNTKATTSTDVGVATGVGMATGITNIISGRSQPTGSKTGYTVTGSGTTALPGGFRTGNTPGSTGVTSSQEGTTVVSSGITGIPETSISGPSKEASDKTTAPGPPTTVTASTGVKETSETGVQTGSTLVTAGVPTRPQVSQPETTVVATREVETENKTECLASLPPAPVCHGPLGEEKSPGDIWTANCHRGTCTDAKTIDCKPEECPSPPTCKTGEKLVKFQSNDTCCEIGYCEPRTCLFNNTDYEIGASFDDPSNPCVSYSCKDTGFAAVVQDCPKQTWCAEANRIYDSKKCCYTCKNNCRSSLVNVTVIYSGCKKRVQMAKCTGECEKTAKYNYDILLLEHSCLCCREENYELRDIVLDCPDGSTIPYQYKHITTCSCLDICQLYTTFMYS

SEQ ID NO: 14699 - protein, 709 aa, Homo sapiens; identical to SEQ ID NO: 9100

SEQ ID NO: 14700 - protein, 566 aa, Homo sapiens
MKMQKGNVLLMFGLLLHLEAATNSNETSTSANTGSSVISSGASTATNSGSSVTSSGVSTATISGSSVTSNGVSIVTNSEFHTTSSGISTATNSEFSTVSSGISIATNSESSTTSSGASTATNSESSTPSSGASTATNSDSSTTSSGASTATNSDSSTTSSEASTATNSESSTTSSGASTATNSESSTVSSRASTATNSESSTTSSGASTATNSESRTTSNGAGTATNSESSTTSSGASTATNSESSTPSSGAGTATNSESSTTSSGAGTATNSESSTVSSGISTVTNSESSTPSSGANTATNSESSTTSSGANTATNSDSSTTSSGASTATNSESSTTSSGASTATNSESSTTSSGASTATNSGSSTTSSGTSTATNSESSTVSSGASTATTSESSTTSSGASTATNSESSTVSSGASTATNSESSTTSSGANTATNSGSSVTSAGSGTAALTGMHTTSHSASTAVSEAKPGGSLVPWEIFLITLVSVVAAVGLFAGLFFCVRNSLSLRNTFNTAVYHPHGLNHGLGPGPGGNHGAPHRPRWSPNWFWRRPVSSIAMEMSGRNSGP

SEQ ID NO: 14701 - protein, 1773 aa, Homo sapiens
MRRGNISPAFWFLWLLLFGLLGPSSENTTAFTKGSDTTTASITGSETTMASTMASTSALTTGSKITTDSTTGSETTSASTMASTAAFTTGSETNTASTTDSGTTIASTRTFTTGSDTTTGSTAGSETIVASTTVSGTTTTFTIASTTVPETTMASSTTSTAGSEKTMASSIISETTMASTTGSETATVSTTGSETTTTSTASSEATKVSTTGSETTTASTAGSETTTTSTSMAGSEATTTSTADSKVITASSMSSETTVAPAAGSNTTTASTTGSETTTILIKASETTTASTAGSETTTPSPTGSQTTIVSISGSEITTTSTAGSENTTVSSAGSGTTTASMAGSETTVSTAGSETTTVSITGTETTMVSAMGSETTTNSTTSSETTVTSTAGSETTTVSTVGSETTTAYTADSETTAASTTGSEMTTVFTAGSETITPSTAGSETTTVSTAGSETTTVSTTGSETTTASTAHSETTAASTMGSETTKVSTAGSETTVSTAGSETTAASTEDSETNTAFTEDSKTTTASTTGFETTAASTTGSEPTMASTMGSETTMASTIGPETTKVSTASSEVTTVFAAGSETIRASTVGSETTTVSTTGSETTTASIMGSETSTDSTTGSETTTASTEGSETTTASTEGSEATTVSTTGSETTTVSITDSETTTTCTEGSEMTAVSTTVFETTTASTEGSEITIASTSDSETTTASTEGSETTTVTTAGSETKTAYTTGSETTTASNTGLETTTVFTIGSDTTTASTEGSETTAVSATGSEMTTVSTEGSENTTVSTTGSETTTVSTTGLETTTTSTEGSEMTTVSTTGAETTTDSTEGSGTTAASTAGSETTTVSTADSENTTASTADSETTSASTTGSETTTASTTSSETTTASTEGSETTTVSTTDSETTMVSTTGSERTITSTEGSETTTVSATGSETTVSTEGSGTTTVSITGSETTKVSTTGSETTTTSTEGSEITTASITGSETTTASTEGSETTTASTEGSETTSASTTGSETTTASTTSSETTMASIMGSETTMASTIGSETTKVSTASSKMTTVFTENSETTIASTTASETTTVSTAGSETIPASTAGSETTTTTSTEGSETTTASTEGSETTTASTESSETTTATTIGSETTTASTEGSETTTTSTEGSETTTASTEGSEITTVSTTGSETTTASTEGSETTTASTEGSELTTVSTTGSETITVSAEGSETTTVTTMGSETTTASTAGSETTTVSTAGSETTTASIEGSETTTVSSTGSETTTVSTTGTETTITSTEGSETTTVTTAGSETTAVYTTGSETTTTSTEGSETTTVSTTGSETTTASTADLETTTVSTSGSGTTTASTAGSETTTVYITGSKTTTASTEGSEATTVSTTSSETTTASTTGSEMTTVFTTVSETTTVSTIGSEATTSSAAGSEATTTSTEGSETTTASTAGSETTTASTAGSETTTASTSGSETNTACTTGSETSTPSSAGSETNTAFIIGSESTIASTASLEPTATSLTGSETTTVSITASGATAASTTVSSTTFVLTKATDVSIQPITNTPMSGTRTTGTRLTASSSVTMAPGMDFTASAASHTVPGIVLNTSGLGTSTMGASSTTSAHGVRTTTGSTREPTSSTFQETGPVSMGTNTVSMSHTPTNVIKPSGYLQPWAIILISLAAVVAAVGLSVGLSFCLRNLFFPLRYCGIYYPHGHSHSLGLDLNLGLGSGTFHSLGNALVHGGELEMGHGGTHGFGYGVGHGLSHIHGDGYGVNHGGHYGHGGGH

SEQ ID NO: 14702 - protein, 403 aa, Homo sapiens [sequence omitted]

SEQ ID NO: 14703 - protein, 420 aa, Homo sapiens
MLHFHYYDTSNKIMEPHRPNVKTAVPLSLESYHISEEYGFLLPDSLKELPDHYRPWMEIANKLPQLIDAHQLQAHVDKMPLLSCQFLKGHREQRLAHLVLSFLTMGYVWQEGEAQPAEVLPRNLALPFVEVSRNLGLPPILVHSDLVLTNWTKKDPDGFLEIGNLETIISFPGGESLHGFILVTALVEKEAVPGIKALVQATNAILQPNQEALLQALQRLRLSIQDITKTLGQMHDYVDPDIFYAGIRIFLSGWKDNPAMPAGLMYEGVSQEPLKYSGGSAAQSTVLHAFDEFLGIRHSKESGDFLYRMRDYMPPSHKAFIEDIHSAPSLRDYILSSGQDHLLTAYNQCVQALAELRSYHITMVTKYLITAAAKAKHGKPNHLPGPPQALKDRGTGGTAVMSFLKSVRDKTLESILHPRG

SEQ ID NO: 14704 - protein, 302 aa, Homo sapiens
MRLGSPGLLFLLFSSLRADTQEKEVRAMVGSDVELSCACPEGSRFDLNDVYVYWQTSESKTVVTYHIPQNSSLENVDSRYRNRALMSPAGMLRGDFSLRLFNVTPQDEQKFHCLVLSQSLGFQEVLSVEVTLHVAANFSVPVVSAPHSPSQDELTFTCTSINGYPRPNVYWINKTDNSLLDQALQNDTVFLNMRGLYDVVSVLRIARTPSVNIGCCIENVLLQQNLTVGSQTGNDIGERDKITENPVSTGEKNAATWSILAVLCLLVVVAVAIGWVCRDRCLQHSYAGAWAVSPETELTGHV

SEQ ID NO: 14705 - protein, 2347 aa, Homo sapiens
MKNIYCLIPKLVNFATLGCLWISVVQCTVLNSCLKSCVTNLGQQLDLGTPHNLSEPCIQGCHFWNSVDQKNCALKCRESCEVGCSSAEGAYEEEVLENADLPTAPFASSIGSHNMTLRWKSANFSGVKYIIQWKYAQLLGSWTYTKTVSRPSYVVKPLHPFTEYIFRVVWIFTAQLQLYSPPSPSYRTHPHGVPETAPLIRNIESSSPDTVEVSWDPPQFPGGPILGYNLRLISKNQKLDAGTQRTSFQFYSTLPNTIYRFSIAAVNEVGEGPEAESSITTSSSAVQQEEQWLFLSRKTSLRKRSLKHLVDEAHCLRLDAIYHNITGISVDVHQQIVYFSEGTLIWAKKAANMSDVSDLRIFYRGSGLISSISIDWLYQRMYFIMDELVCVCDLENCSNIEEITPPSISAPQKIVADSYNGYVFYLLRDGIYRADLPVPSGRCAEAVRIVESCTLKDFAIKPQAKRIIYFNDTAQVFMSTFLDGSASHLILPRIPFADVKSFACENNDFLVTDGKVIFQQDALSFNEFIVGCDLSHIEEFGFGNLVIFGSSSQLHPLPGRPQELSVLFGSHQALVQWKPPALAIGANVILISDIIELFELGPSAWQNWTYEVKVSTQDPPEVTHIFLNISGTMLNVPELQSAMKYKVSVRASSPKRPGPWSEPSVGTTLVPASEPPFIMAVKEDGLWSKPLNSFGPGEFLSSDIGNVSDMDWYNNSLYYSDTKGDVFVWLLNGTDISENYHLPSIAGAGALAFEWLGHFLYWAGKTYVIQRQSVLTGHTDIVTHVKLLVNDMVVDSVGGYLYWTTLYSVESTRLNGESSLVLQTQPWFSGKKVIALTLDLSDGLLYWLVQDSQCIHLYTAVLRGQSTGDTTITEFAAWSTSEISQNALMYYSGRLFWINGFRIITTQEIGQKTSVSVLEPARFNQFTIIQTSLKPLPGNFSFTPKVIPDSVQESSFRIEGNASSFQILWNGPPAVDWGVVFYSVEFSAHSKFLASEQHSLPVFTVEGLEPYALFNLSVTPYTYWGKGPKTSLSLRAPETVPSAPENPRIFILPSGKCCNKNEVVVEFRWNKPKHENGVLTKFEIFYNISNQSITNKTCEDWIAVNVTPSVMSFQLEGMSPRCFIAFQVRAFTSKGPGPYADVVKSTTSEINPFPHLITLLGNKIVFLDMDQNQVVWTFSAERVISAVCYTADNEMGYYAEGDSLFLLHLHNRSSSELFQDSLVFDITVITIDWISRHLYFALKESQNGMQVFDVDLEHKVKYPREVKIHNRNSTIISFSVYPLLSRLYWTEVSNFGYQMFYYSIISHTLHRILQPTATNQQNKRNQCSCNVTEFELSGAMAIDTSNLEKPLIYFAKAQEIWAMDLEGCQCWRVITVPAMLAGKTLVSLTVDGDLIYWIITAKDSTQIYQAKKGNGAIVSQVKALRSRHILAYSSVMQPFPDKAFLSLASDTVEPTILNATNTSLTIRLPLAKTNLTWYGITSPTPTYLVYYAEVNDRKNSSDLKYRILEFQDSIALIEDLQPFSTYMIQIAVKNYYSDPLEHLPPGKEIWGKTKNGVPEAVQLINTTVRSDTSLIISWRESHKPNGPKESVRYQLAISHLALIPETPLRQSEFPNGRLTLLVTRLSGGNIYVLKVLACHSEEMWCTESHPVTVEMFNTPEKPYSLVPENTSLQFNWKAPLNVNLIRFWVELQKWKYNEFYHVKTSCSQGPAYVCNITNLQPYTSYNVRVVVVYKTGENSTSLPESFKTKAGVPNKPGIPKLLEGSKNSIQWEKAEDNGCRITYYILEIRKSTSNNLQNQNLRWKMTFNGSCSSVCTWKSKNLKGIFQFRVVAANNLGFGEYSGISENIILVGDDFWIPETSFILTIIVGIFLVVTIPLTFVWHRRLKNQKSAKEGVTVLINEDKELAELRGLAAGVGLANACYAIHTLPTQEEIENLPAFPREKLTLRLLLGSGAFGEVYEGTAVDILGVGSGEIKVAVKTLKKGSTDQEKIEFLKEAHLMSKFNHPNILKQLGVCLLNEPQYIILELMEGGDLLTYLRKARMATFYGPLLTLVDLVDLCVDISKGCVYLERMHFIHRDLAARNCLVSVKDYTSPRIVKIGDFGLARDIYKNDYYRKRGEGLLPVRWMAPESLMDGIFTTQSDVWSFGILIWEILTLGHQPYPAHSNLDVLNYVQTGGRLEPPRNCPDDLWNLMTQCWAQEPDQRPTFHRIQDQLQLFRNFFLNSIYKSRDEANNSGVINESFEGEDGDVICLNSDDIMPVALMETKNREGLNYMVLATECGQGEEKSEGPLGSQESESCGLRKEEKEPHADKDFCQEKQVAYCPSGKPEGLNYACLTHSGYGDGSD

SEQ ID NO: 14706 - protein, 255 aa, Homo sapiens
MGNSCYNIVATLLLVLNFERTRSLQDPCSNCPAGTFCDNNRNQICSPCPPNSFSSAGGQRTCDICRQCKGVFRTRKECSSTSNAECDCTPGFHCLGAGCSMCEQDCKQGQELTKKGCKDCCFGTFNDQKRGICRPWTNCSLDGKSVLVNGTKERDVVCGPSPADLSPGASSVTPPAPAREPGHSPQIISFFLALTSTALLFLLFFLTLRFSVVKRGRKKLLYIFKQPFMRPVQTTQEEDGCSCRFPEEEEGGCEL

SEQ ID NO: 14707 - protein, 254 aa, Homo sapiens
MEYASDASLDPEAPWPPAPRARACRVLPWALVAGLLLLLLLAAACAVFLACPWAVSGARASPGSAASPRLREGPELSPDDPAGLLDLRQGMFAQLVAQNVLLIDGPLSWYSDPGLAGVSLTGGLSYKEDTKELVVAKAGVYYVFFQLELRRVVAGEGSGSVSLALHLQPLRSAAGAAALALTVDLPPASSEARNSAFGFQGRLLHLSAGQRLGVHLHTEARARHAWQLTQGATVLGLFRVTPEIPAGLPSPRSE

SEQ ID NO: 14708 - protein, 241 aa, Homo sapiens; identical to SEQ ID NO: 13588

SEQ ID NO: 14709 - protein, 199 aa, Homo sapiens
MTLHPSPITCEFLFSTALISPKMCLSHLENMPLSHSRTQGAQRSSWKLWLFCSIVMLLFLCSFSWLIFIFLQLETAKEPCMAKFGPLPSKWQMASSEPPCVNKVSDWKLEILQNGLYLIYGQVAPNANYNDVAPFEVRLYKNKDMIQTLTNKSKIQNVGGTYELHVGDTIDLIFNSEHQVLKNNTYWGIILLANPQFIS

SEQ ID NO: 14710 - protein, 1068 aa, Homo sapiens; identical to SEQ ID NO: 14664

SEQ ID NO: 14711 - protein, 1102 aa, Homo sapiens; identical to SEQ ID NO: 14665

SEQ ID NO: 14712 - protein, 597 aa, Homo sapiens; identical to SEQ ID NO: 14666

SEQ ID NO: 14713 - protein, 524 aa, Homo sapiens; identical to SEQ ID NO: 14667

SEQ ID NO: 14714 - protein, 497 aa, Homo sapiens; identical to SEQ ID NO: 14668

SEQ ID NO: 14715 - protein, 602 aa, Homo sapiens; identical to SEQ ID NO: 14669

SEQ ID NO: 14716 - protein, 467 aa, Homo sapiens; identical to SEQ ID NO: 14670

SEQ ID NO: 14717 - protein, 486 aa, Homo sapiens; identical to SEQ ID NO: 14671

SEQ ID NO: 14718 - protein, 480 aa, Homo sapiens [sequence omitted]

SEQ ID NO: 14719 - protein, 619 aa, Homo sapiens
MPDPAAHLPFFYGSISRAEAEEHLKLAGMADGLFLLRQCLRSLGGYVLSLVHDVRFHHFPIERQLNGTYAIAGGKAHCGPAELCEFYSRDPDGLPCNLRKPCNRPSGLEPQPGVFDCLRDAMVRDYVRQTWKLEGEALEQAIISQAPQVEKLIATTAHERMPWYHSSLTREEAERKLYSGAQTDGKFLLRPRKEQGTYALSLIYGKTVYHYLISQDKAGKYCIPEGTKFDTLWQLVEYLKLKADGLIYCLKEACPNSSASNASGAAAPTLPAHPSTLTHPQRRIDTLNSDGYTPEPARITSPDKPRPMPMDTSVYESPYSDPEELKDKKLFLKRDNLLIADIELGCGNFGSVRQGVYRMRKKQIDVAIKVLKQGTEKADTEEMMREAQIMHQLDNPYIVRLIGVCQAEALMLVMEMAGGGPLHKFLVGKREEIPVSNVAELLHQVSMGMKYLEEKNFVHRDLAARNVLLVNRHYAKISDFGLSKALGADDSYYTARSAGKWPLKWYAPECINFRKFSSRSDVWSYGVTMWEALSYGQKPYKKMKGPEVMAFIEQGKRMECPPECPPELYALMSDCWIYKWEDRPDFLTVEQRMRACYYSLASKVEGPPGSTQKAEAACA

SEQ ID NO: 14720 - protein, 1132 aa, Homo sapiens
MEPNDSTSTAVEEPDSLEVLVKTLDSQTRTFIVGAQMNVKEFKEHIAASVSIPSEKQRLIYQGRVLQDDKKLQEYNVGGKVIHLVERAPPQTHLPSGASSGTGSASATHGGGSPPGTRGPGASVHDRNANSYVMVGTFNLPSDGSAVDVHINMEQAPIQSEPRVRLVMAQHMIRDIQTLLSRMETLPYLQCRGGPQPQHSQPPPQPPAVTPEPVALSSQTSEPVESEAPPREPMEAEEVEERAPAQNPELTPGPAPAGPTPAPETNAPNHPSPAEYVEVLQELQRLESRLQPFLQRYYEVLGAAATTDYNNNHEGREEDQRLINLVGESLRLLGNTFVALSDLRCNLACTPPRHLHVVRPMSHYTTPMVLQQAAIPIQINVGTTVTMTGNGTRPPPTPNAEAPPPGPGQASSVAPSSTNVESSAEGAPPPGPAPPPATSHPRVIRISHQSVEPVVMMHMNIQDSGTQPGGVPSAPTGPLGPPGHGQTLGQQVPGFPTAPTRVVIARPTPPQARPSHPGGPPVSGTLQGAGLGTNASLAQMVSGLVGQLLMQPVLVAQGTPGMAPPPAPATASASAGTTNTATTAGPAPGGPAQPPPTPQPSMADLQFSQLLGNLLGPAGPGAGGSGVASPTITVAMPGVPAFLQGMTDFLQATQTAPPPPPPPPPPPPAPEQQTMPPPGSPSGGAGSPGGLGLESLSPEFFTSVVQGVLSSLLGSLGARAGSSESIAAFIQRLSGSSNIFEPGADGALGFFGALLSLLCQNFSMVDVVMLLHGHFQPLQRLQPQLRSFFHQHYLGGQEPTPSNIRMATHTLITGLEEYVRESFSLVQVQPGVDIIRTNLEFLQEQFNSIAAHVLHCTDSGFGARLLELCNQGLFECLALNLHCLGGQQMELAAVINGRIRRMSRGVNPSLVSWLTTMMGLRLQVVLEHMPVGPDAILRYVRRVGDPPQPLPEEPMEVQGAERASPEPQRENASPAPGTTAEEAMSRGPPPAPEGGSRDEQDGASAETEPWAAAVPPEWVPIIQQDIQSQRKVKPQPPLSDAYLSGMPAKRRKTMQGEGPQLLLSEAVSRAAKAAGARPLTSPESLSRDLEAPEVQESYRQQLRSDIQKRLQEDPNYSPQRFPNAQRAFADDP

SEQ ID NO: 14721 - protein, 233 aa, Homo sapiens
MSQSNRELVVDFLSYKLSQKGYSWSQFSDVEENRTEAPEGTESEMETPSAINGNPSWHLADSPAVNGATGHSSSLDAREVIPMAAVKQALREAGDEFELRYRRAFSDLTSQLHITPGTAYQSFEQVVNELFRDGVNWGRIVAFFSFGGALCVESVDKEMQVLVSRIAAWMATYLNDHLEPWIQENGGWDTFVELYGNNAAAESRKGQERFNRWFLTGMTVAGVVLLGSLFSRK

SEQ ID NO: 14722 - protein, 175 aa, Homo sapiens
MTDCEFGYIYRLAQDYLQCVLQIPQPGSGPSKTSRVLQNVAFSVQKEVEKNLKSCLDNVNVVSVDTARTLFNQVMEKEFEDGIINWGRIVTIFAFEGILIKKLLRQQIAPDVDTYKEISYFVAEFIMNNTGEWIRQNGGWENGFVKKFEPKSGWMTFLEVTGKICEMLSLLKQYC

SEQ ID NO: 14723 - protein, 1102 aa, Homo sapiens
MFQLPVNNLGSLRKARKTVKKILSDIGLEYCKEHIEDFKQFEPNDFYLKNTTWEDVGLWDPSLTKNQDYRTKPFCCSACPFSSKFFSAYKSHFRNVHSEDFENRILLNCPYCTFNADKKTLETHIKIFHAPNASAPSSSLSTFKDKNKNDGLKPKQADSVEQAVYYCKKCTYRDPLYEIVRKHIYREHFQHVAAPYIAKAGEKSLNGAVPLGSNAREESSIHCKRCLFMPKSYEALVQHVIEDHERIGYQVTAMIGHTNVVVPRSKPLMLIAPKPQDKKSMGLPPRIGSLASGNVRSLPSQQMVNRLSIPKPNLNSTGVNMMSSVHLQQNNYGVKSVGQGYSVGQSMRLGLGGNAPVSIPQQSQSVKQLLPSGNGRSYGLGSEQRSQAPARYSLQSANASSLSSGQLKSPSLSQSQASRVLGQSSSKPAAAATGPPPGNTSSTQKWKICTICNELFPENVYSVHFEKEHKAEKVPAVANYIMKIHNFTSKCLYCNRYLPTDTLLNHMLIHGLSCPYCRSTFNDVEKMAAHMRMVHIDEEMGPKTDSTLSFDLTLQQGSHTNIHLLVTTYNLRDAPAESVAYHAQNNPPVPPKPQPKVQEKADIPVKSSPQAAVPYKKDVGKTLCPLCFSILKGPISDALAHHLRERHQVIQTVHPVEKKLTYKCIHCLGVYTSNMTASTITLHLVHCRGVGKTQNGQDKTNAPSRLNQSPSLAPVKRTYEQMEFPLLKKRKLDDDSDSPSFFEEKPEEPVVLALDPKGHEDDSYEARKSFLTKYFNKQPYPTRREIEKLAASLWLWKSDIASHFSNKRKKCVRDCEKYKPGVLLGFNMKELNKVKHEMDFDAEWLFENHDEKDSRVNASKTADKKLNLGKEDDSSSDSFENLEEESNESGSPFDPVFEVEPKISNDNPEEHVLKVIPEDASESEEKLDQKEDGSKYETIHLTEEPTKLMHNASDSEVDQDDVVEWKDGASPSESGPGSQQVSDFEDNTCEMKPGTWSDESSQSEDARSSKPAAKKKATMQGDREQLKWKNSSYGKVEGFWSKDQSQWKNASENDERLSNPQIEWQNSTIDSEDGEQFDNMTDGVAEPMHGSLAGVKLSSQQA

SEQ ID NO: 14724 - protein, 1131 aa, Homo sapiens
MFQIPVENLDNIRKVRKKVKGILVDIGLDSCKELLKDLKGFDPGEKYFHNTSWGDVSLWEPSGKKVRYRTKPYCCGLCKYSTKVLTSFKNHLHRYHEDEIDQELVIPCPNCVFASQPKVVGRHFRMFHAPVRKVQNYTVNILGETKSSRSDVISFTCLKCNFSNTLYYSMKKHVLVAHFHYLINSYFGLRTEEMGEQPKTNDTVSIEKIPPPDKYYCKKCNANASSQDALMYHILTSDIHRDLENKLRSVISEHIKRTGLLKQTHIAPKPAAHLAAPANGSAPSAPAQPPCFHLALPQNSPSPAAGQPVTVAQGAPGSLTHSPPAAGQSHMTLVSSPLPVGQNSLTLQPPAPQPVFLSHGVPLHQSVNPPVLPLSQPVGPVNKSVGTSVLPINQTVRPGVLPLTQPVGPINRPVGPGVLPVSPSVTPGVLQAVSPGVLSVSRAVPSGVLPAGQMTPAGQMTPAGVIPGQTATSGVLPTGQMVQSGVLPVGQTAPSRVLPPGQTAPLRVISAGQVVPSGLLSPNQTVSSSAVVPVNQGVNSGVLQLSQPVVSGVLPVGQPVRPGVLQLNQTVGTNILPVNQPVRPGASQNTTFLTSGSILRQLIPTGKQVNGIPTYTLAPVSVTLPVPPGGLATVAPPQMPIQLLPSGAAAPMAGSMPGMPSPPVLVNAAQSVFVQASSSAADTNQVLKQAKQWKTCPVCNELFPSNVYQVHMEVAHKHSESKSGEKLEPEKLAACAPFLKWMREKTVRCLSCKCLVSEEELIHHLLMHGLGCLFCPCTFHDIKGLSEHSRNRHLGKKKLPMDYSNRGFQLDVDANGNLLFPHLDFITILPKEKLGEREVYLAILAGIHSKSLVPVYVKVRPQAEGTPGSTGKRVSTCPFCFGPFVTTEAYELHLKERHHIMPTVHTVLKSPAFKCIHCCGVYTGNMTLAAIAVHLVRCRSAPKDSSSDLQAQPGFIHNSELLLVSGEVMHDSSFSVKRKLPDGHLGAEDQRHGEEQPPILNADAAPGPEKVTSVVPFKRQRNESRTEGPIVKDEALQILALDPKKYEGRSYEEKKQFLKDYFHKKPYPSKKEIELLSSLFWVWKIDVASFFGKRRYICMKAIKNHKPSVLLGFDMSELKNVKHRLNFEYEP

SEQ ID NO: 14725 - protein, 1158 aa, Homo sapiens; identical to SEQ ID NO: 574

SEQ ID NO: 14726 - protein, 517 aa, Homo sapiens
MAAAITDMADLEELSRLSPLPPGSPGSAARGRAEPPEEEEEEEEEEEEAEAEAVAALLLNGGSGGGGGGGGGGVGGGEAETMSEPSPESASQAGEDEDEEEDDEEEEDESSSSGGGEEESSAESLVGSSGGSSSDETRSLSPGAASSSSGDGDGKEGLEEPKGPRGSQGGGGGGSSSSSVVSSGGDEGYGTGGGGSSATSGGRRGSLEMSSDGEPLSRMDSEDSISSTIMDVDSTISSGRSTPAMMNGQGSTTSSSKNIAYNCCWDQCQACFNSSPDLADHIRSIHVDGQRGGVFVCLWKGCKVYNTPSTSQSWLQRHMLTHSGDKPFKCVVGGCNASFASQGGLARHVPTHFSQQNSSKVSSQPKAKEESPSKAGMNKRRKLKNKRRRSLPRPHDFFDAQTLDAIRHRAICFNLSAHIESLGKGHSVVFHSTVIAKRKEDSGKIKLLLHWMPEDILPDVWVNESERHQLKTKVVHLSKLPKDTALLLDPNIYRTMPQKRLKRTLIRKVFNLYLSKQ

SEQ ID NO: 14727 - protein, 1210 aa, Homo sapiens
MAAQSSLYNDDRNLLRIREKERRNQEAHQEKEAFPEKIPLFGEPYKTAKGDELSSRIQNMLGNYEEVKEFLSTKSHTHRLDASENRLGKPKYPLIPDKGSSIPSSSFHTSVHHQSIHTPASGPLSVGNISHNPKMAQPRTEPMPSLHAKSCGPPDSQHLTQDRLGQEGFGSSHHKKGDRRADGDHCASVTDSAPERELSPLISLPSPVPPLSPIHSNQQTLPRTQGSSKVHGSSNNSKGYCPAKSPKDLAVKVHDKETPQDSLVAPAQPPSQTFPPPSLPSKSVAMQQKPTAYVRPMDGQDQAPSESPELKPLPEDYRQQTFEKTDLKVPAKAKLTKLKMPSQSVEQTYSNEVHCVEEILKEMTHSWPPPLTAIHTPSTAEPSKFPFPTKDSQHVSSVTQNQKQYDTSSKTHSNSQQGTSSMLEDDLQLSDSEDSDSEQTPEKPPSSSAPPSAPQSLPEPVASAHSSSAESESTSDSDSSSDSESESSSSDSEENEPLETPAPEPEPPTTNKWQLDNWLTKVSQPAAPPEGPRSTEPPRRHPESKGSSDSATSQEHSESKDPPPKSSSKAPRAPPEAPHPGKRSCQKSPAQQEPPQRQTVGTKQPKKPVKASARAGSRTSLQGEREPGLLPYGSRDQTSKDKPKVKTKGRPRAAASNEPKPAVPPSSEKKKHKSSLPAPSKALSGPEPAKDNVEDRTPEHFALVPLTESQGPPHSGSGSRTSGCRQAVVVQEDSRKDRLPLPLRDTKLLSPLRDTPPPQSLMVKITLDLLSRIPQPPGKGSRQRKAEDKQPPAGKKHSSEKRSSDSSSKLAKKRKGEAERDCDNKKIRLEKEIKSQSSSSSSSHKESSKTKPSRPSSQSSKKEMLPPPPVSSSSQKPAKPALKRSRREADTCGQDPPKSASSTKSNHKDSSIPKQRRVEGKGSRSSSEHKGSSGDTANPFPVPSLPNGNSKPGKPQVKFDKQQADLHMREAKKMKQKAELMTDRVGKAFKYLEAVLSFIECGIATESESQSSKSAYSVYSETVDLIKFIMSLKSFSDATAPTQEKIFAVLCMRCQSILNMAMFRCKKDIAIKYSRTLNKHFESSSKVAQAPSPCIASTGTPSPLSPMPSPASSVGSQSSAGSVGSSGVAATISTPVTIQNMTSSYVTITSHVLTAFDLWEQAEALTRKNKEFFARLSTNVCTLALNSSLVDLVHYTRQGFQQLQELTKTP

SEQ ID NO: 14728 - protein, 1311 aa, Homo sapiens
MDLFDFFRDWDLEQQCHYEQDRSALKKREWERRNQEVQQEDDLFSSGFDLFGEPYKVAEYTNKGDALANRVQNTLGNYDEMKNLLTNHSNQNHLVGIPKNSVPQNPNNKNEPSFFPEQKNRIIPPHQDNTHPSAPMPPPSVVILNSTLIHSNRKSKPEWSRDSHNPSTVLASQASGQPNKMQTLTQDQSQAKLEDFFVYPAEQPQIGEVEESNPSAKEDSNPNSSGEDAFKEIFQSNSPEESEFAVQAPGSPLVASSLLAPSSGLSVQNFPPGLYCKTSMGQQKPTAYVRPMDGQDQAPDISPTLKPSIEFENSFGNLSFGTLLDGKPSAASSKTKLPKFTILQTSEVSLPSDPSCVEEILREMTHSWPTPLTSMHTAGHSEQSTFSIPGQESQHLTPGFTLQKWNDPTTRASTKSVSFKSMLEDDLKLSSDEDDLEPVKTLTTQCTATELYQAVEKAKPRNNPVNPPLATPQPPPAVQASGGSGSSSESESSSESDSDTESSTTDSESNEAPRVATPEPEPPSTNKWQLDKWLNKVTSQNKSFICGQNETPMETISLPPPIIQPMEVQMKVKTNASQVPAEPKERPLLSLIREKARPRPTQKIPETKALKHKLSTTSETVSQRTIGKKQPKKVEKNTSTDEFTWPKPNITSSTPKEKESVELHDPPRGRNKATAHKPAPRKEPRPNIPLAPEKKKYRGPGKIVPKSREFIETDSSTSDSNTDQEETLQIKVLPPCIISGGNTAKSKEICGASLTLSTLMSSSGSNNNLSISNEEPTFSPIPVMQTEILSPLRDHENLKNLWVKIDLDLLSRVPGHSSLHAAPAKPDHKETATKPKRQTAVTAVEKPAPKGKRKHKPIEVAEKIPEKKQRLEEATTICLLPPCISPAPPHKPPNTRENNSSRRANRRKEEKLFPPPLSPLPEDPPRRRNVSGNNGPFGQDKNIAMTGQITSTKPKRTEGKFCATFKGISVNEGDTPKKASSATITVTNTAIATATVTATAIVTTTVTATATATATTTTTTTTISTITSTITTGLMDSSHLEMTSWAALPLLSSSSTNVRRPKLTFDDSVHNADYYMQEAKKLKHKADALFEKFGKAVNYADAALSFTECGNAMERDPLEAKSPYTMYSETVELLRYAMRLKNFASPLASDGDKKLAVLCYRCLSLLYLRMFKLKKDHAMKYSRSLMEYFKQNASKVAQIPSPWVSNGKNTPSPVSLNNVSPINAMGNCNNGPVTIPQRIHHMAASHVNITSNVLRGYEHWDMADKLTRENKEFFGDLDTLMGPLTQHSSMTNLVRYVRQGLCWLRIDAHLL

SEQ ID NO: 14729 - protein, 1226 aa, Homo sapiens
MDSFDLALLQEWDLESLCVYEPDRNALRRKERERRNQETQQDDGTFNSSYSLFSEPYKTNKGDELSNRIQNTLGNYDEMKDFLTDRSNQSHLVGVPKPGVPQTPVNKIDEHFVADSRAQNQPSSICSTTTSTPAAVPVQQSKRGTMGWQKAGHPPSDGQQRATQQGSLRTLLGDGVGRQQPRAKQVCNVEVGLQTQERPPAMAAKHSSSGHCVQNFPPSLASKPSLVQQKPTAYVRPMDGQDQAPDESPKLKSSSETSVHCTSYRGVPASKPEPARAKAKLSKFSIPKQGEESRSGETNSCVEEIIREMTWLPPLSAIQAPGKVEPTKFPFPNKDSQLVSSGHNNPKKGDAEPESPDSGTSNTSMLEDDLKLSSDEEENEQQAAQRTALRALSDSAVVQQPNCRTSVPSSKGSSSSSSSGSSSSSSDSESSSGSDSETESSSSESEGSKPPHFSSPEAEPASSNKWQLDKWLNKVNPHKPPILIQNESHGSESNQYYNPVKEDVQDCGKVPDVCQPSLREKEIKSTCKEEQRPRTANKAPGSKGVKQKSPPAAVAVAVSAAAPPPAVPCAPAENAPAPARRSAGKKPTRRTERTSAGDGANCHRPEEPAAADALGTSVVVPPEPTKTRPCGNNRASHRKELRSSVTCEKRRTRGLSRIVPKSKEFIETESSSSSSSSDSDLESEQEEYPLSKAQTVAASASSGNDQRLKEAAANGGSGPRAPVGSINARTTSDIAKELEEQFYTLVPFGRNELLSPLKDSDEIRSLWVKIDLTLLSRIPEHLPQEPGVLSAPATKDSESAPPSHTSDTPAEKALPKSKRKRKCDNEDDYREIKKSQGEKDSSSRLATSTSNTLSANHCNMNINSVAIPINKNEKMLRSPISPLSDASKHKYTSEDLTSSSRPNGNSLFTSASSSKKPKADSQLQPHGGDLTKAAHNNSENIPLHKSRPQTKPWSPGSNGHRDCKRQKLVFDDMPRSADYFMQEAKRMKHKADAMVEKFGKALNYAEAALSFIECGNAMEQGPMESKSPYTMYSETVELIRYAMRLKTHSGPNATPEDKQLAALCYRCLALLYWRMFRLKRDHAVKYSKALIDYFKNSSKAAQAPSPWGASGKSTGTPSPMSPNPSPASSVGSQGSLSNASALSPSTIVSIPQRIHQMAANHVSITNSILHSYDYWEMADNLAKENREFFNDLDLLMGPVTLHSSMEHLVQYSQQGLHWLRNSAHLS

SEQ ID NO: 14730 - protein, 1163 aa, Homo sapiens
MNREDRNVLRMKERERRNQEIQQGEDAFPPSSPLFAEPYKVTSKEDKLSSRIQSMLGNYDEMKDFIGDRSIPKLVAIPKPTVPPSADEKSNPNFFEQRHGGSHQSSKWTPVGPAPSTSQSQKRSSGLQSGHSSQRTSAGSSSGTNSSGQRHDRESYNNSGSSSRKKGQHGSEHSKSRSSSPGKPQAVSSLNSSHSRSHGNDHHSKEHQRSKSPRDPDANWDSPSRVPFSSGQHSTQSFPPSLMSKSNSMLQKPTAYVRPMDGQESMEPKLSSEHYSSQSHGNSMTELKPSSKAHLTKLKIPSQPLDASASGDVSCVDEILKEMTHSWPPPLTAIHTPCKTEPSKFPFPTKESQQSNFGTGEQKRYNPSKTSNGHQSKSMLKDDLKLSSSEDSDGEQDCDKTMPRSTPGSNSEPSHHNSEGADNSRDDSSSHSGSESSSGSDSESESSSSDSEANEPSQSASPEPEPPPTNKWQLDNWLNKVNPHKVSPASSVDSNIPSSQGYKKEGREQGTGNSYTDTSGPKETSSATPGRDSKTIQKGSESGRGRQKSPAQSDSTTQRRTVGKKQPKKAEKAAAEEPRGGLKIESETPVDLASSMPSSRHKAATKGSRKPNIKKESKSSPRPTAEKKKYKSTSKSSQKSREIIETDTSSSDSDESESLPPSSQTPKYPESNRTPVKPSSVEEEDSFFRQRMFSPMEEKELLSPLSEPDDRYPLIVKIDLNLLTRIPGKPYKETEPPKGEKKNVPEKHTREAQKQASEKVSNKGKRKHKNEDDNRASESKKPKTEDKNSAGHKPSSNRESSKQSAAKEKDLLPSPAGPVPSKDPKTEHGSRKRTISQSSSLKSSSNSNKETSGSSKNSSSTSKQKKTEGKTSSSSKEVKEKAPSSSSNCPPSAPTLDSSKPRRTKLVFDDRNYSADHYLQEAKKLKHNADALSDRFEKAVYYLDAVVSFIECGNALEKNAQESKSPFPMYSETVDLIKYTMKLKNYLAPDATAADKRLTVLCLRCESLLYLRLFKLKKENALKYSKTLTEHLKNSYNNSQAPSPGLGSKAVGMPSPVSPKLSPGNSGNYSSGASSASASGSSVTIPQKIHQMAASYVQVTSNFLYATEIWDQAEQLSKEQKEFFAELDKVMGPLIFNASIMTDLVRYTRQGLHWLRQDAKLIS

SEQ ID NO: 14731 - protein, 2266 aa, Homo sapiens
MRDLRAQVTSGLLPFPEVTLQALGEDEITLESVLRGKFAAGKNGLACLACGPQLEVVNSITGERLSAYRFSGVNEQPPVVLAVKEFSWQKRTGLLIGLEETEGSVLCLYDLGISKVVKAVVLPGRVTAIEPIINHGGASASTQHLHPSLRWLFGVAAVVTDVGQILLVDLCLDDLSCNQNEVEASDLEVLTGIPAEVPHIRESVMRQGRHLCFQLVSPTGTAVSTLSYISRTNQLAVGFSDGYLALWNMKSMKREYYIQLESGQVPVYAVTFQEPENDPRNCCYLWAVQSTQDSEGDVLSLHLLQLAFGNRKCLASGQILYEGLEYCEERYTLDLTGGMFPLRGQTSNTKLLGCQSIEKFRSHGDREEGVNEALSPDTSVSVFTWQVNIYGQGKPSVYLGLFDINRWYHAQMPDSLRSGEYLHNCSYFALWSLESVVSRTSPHGILDILVHERSLNRGVPPSYPPPEQFFNPSTYNFDATCLLNSGVVHLTCTGFQKETLTFLKKSGPSLNELIPDGYNRCLVAGLLSPRFVDVQPSSLSQEEQLEAILSAAIQTSSLGLLTGYIRRWITEEQPNSATNLRFVLEWTWNKVVLTKEEFDRLCVPLFDGSCHFMDPQTIQSIQQCYLLLSNLNIVLSCFASEAREITERGLIDLSNKFVVSHLICQYAQVVLWFSHSGLLPEGIDDSVQLSRLCYNYPVIQNYYTSRRQKFERLSRGKWNPDCLMIDGLVSQLGERIEKLWKRDEGGTGKYPPASLHAVLDMYLLDGVTEAAKHSITIYLLLDIMYSFPNKTDTPIESFPTVFAISWGQVKLIQGFWLIDHNDYESGLDLLFHPATAKPLSWQHSKIIQAFMSQGEHRQALRYIQTMKPTVSSGNDVILHLTVLLFNRCMVEAWNFLRQHCNRLNIEELLKHMYEVCQEMGLMEDLLKLPFTDTEQECLVKFLQSSASVQNHEFLLVHHLQRANYVPALKLNQTLKINVMNDRDPRLRERSLARNSILDQYGKILPRVHRKLAIERAKPYHLSTSSVFRLVSRPKPLSAVPKQVVTGTVLTRSVFINNVLSKIGEVWASKEPINSTTPFNSSKIEEPSPIVYSLPAPELPEAFFGTPISKASQKISRLLDLVVQPVPRPSQCSEFIQQSSMKSPLYLVSRSLPSSSQLKGSPQAISRASELHLLETPLVVKKAKSLAMSVTTSGFSEFTPQSILRSTLRSTPLASPSPSPGRSPQRLKETRISFVEEDVHPKWIPGAADDSKLEVFTTPKKCAVPVETEWLKSKDRTTSFFLNSPEKEHQEMDEGSQSLEKLDVSKGNSSVSITSDETTLEYQDAPSPEDLEETVFTASKPKSSSTALTTNVTEQTEKDGDKDVFASEVTPSDLQKQMGNLEDAETKDLLVAAEAFSELNHLSPVQGTEASLCAPSVYEGKIFTQKSKVPVLDEGLTSVETYTPAIRANDNKSMADVLGDGGNSSLTISEGPIVSERRLNQEVALNLKEDHEVEVGVLKESVDLPEEKLPISDSPPDTQEIHVIEQEKLEAQDSGEEARNLSFNELYPSGTLKLQYNFDTIDQQFCDLADNKDTAECDIAEVDGELFVAQSNFTLILEGEEGEVEPGDFASSDVLPKAANTATEEKLVCSGENDNHGQIANLPSAVTSDQKSQKVDTLPYVPEPIKVAIAENLLDVIKDTRSKEITSDTMEQSIHETIPLVSQNIMCPTKLVKSAFKTAQETSTMTMNVSQVDDVVSSKTRTRGQRIQNVNVKSAQQEASADVATPKMPGQSVRKKTRKAKEISEASENIYSDVRGLSQNQQIPQNSVTPRRGRRKKEVNQDILENTSSVEQELQITTGRESKRLKSSQLLEPAVEETTKKEVKVSSVTKRTPRRIKRSVENQESVEIINDLKVSTVTSPSRMIRKLRSTNLDASENTGNKQDDKSSDKQLRIKHVRRVRGREVSPSDVREDSNLESSQLTVQAEFDMSAIPRKRGRPRKINPSEDVGSKAVKEERSPKKKEAPSIRRRSTRNTPAKSENVDVGKPALGKSILVPNEELSMVMSSKKKLTKKTESQSQKRSLHSVSEERTDEMTHKETNEQEERLLATASFTKSSRSSRTRSSKAILLPDLSEPNNEPLFSPASEVPRKAKAKKIEVPAQLKELVSDLSSQFVISPPALRSRQKNTSNKNKLEDELKDDAQSVETLGKPKAKRIRTSKTKQASKNTEKESAWSPPPIEIRLISPLASPADGVKSKPRKTTEVTGTGLGRNRKKLSSYPKQILRRKML

SEQ ID NO: 14732 - protein, 848 aa, Homo sapiens
MNSSSANITYASRKRRKPVQKTVKPIPAEGIKSNPSKRHRDRLNTELDRLASLLPFPQDVINKLDKLSVLRLSVSYLRAKSFFDVALKSSPTERNGGQDNCRAANFREGLNLQEGEFLLQALNGFVLVVTTDALVFYASSTIQDYLGFQQSDVIHQSVYELIHTEDRAEFQRQLHWALNPSQCTESGQGIEEATGLPQTVVCYNPDQIPPENSPLMERCFICRLRCLLDNSSGFLAMNFQGKLKYLHGQKKKGKDGSILPPQLALFAIATPLQPPSILEIRTKNFIFRTKHKLDFTPIGCDAKGRIVLGYTEAELCTRGSGYQFIHAADMLYCAESHIRMIKTGESGMIVFRLLTKNNRWTWVQSNARLLYKNGRPDYIIVTQRPLTDEEGTEHLRKRNTKLPFMFTTGEAVLYEATNPFPAIMDPLPLRTKNGTSGKDSATTSTLSKDSLNPSSLLAAMMQQDESIYLYPASSTSSTAPFENNFFNESMNECRNWQDNTAPMGNDTILKHEQIDQPQDVNSFAGGHPGLFQDSKNSDLYSIMKNLGIDFEDIRHMQNEKFFRNDFSGEVDFRDIDLTDEILTYVQDSLSKSPFIPSDYQQQQSLALNSSCMVQEHLHLEQQQQHHQKQVVVEPQQQLCQKMKHMQVNGMFENWNSNQFVPFNCPQQDPQQYNVFTDLHGISQEFPYKSEMDSMPYTQNFISCNQPVLPQHSKCTELDYPMGSFEPSPYPTTSSLEDFVTCLQLPENQKHGLNPQSAIITPQTCYAGAVSMYQCQPEPQHTHVGQMQYNPVLPGQQAFLNKFQNGVLNETYPAELNNINNTQTTTHLQPLHHPSEARPFPDLTSSGFL

SEQ ID NO: 14733 - protein, 701 aa, Homo sapiens
MPRTMIPPGECTYAGRKRRRPLQKQRPAVGAEKSNPSKRHRDRLNAELDHLASLLPFPPDIISKLDKLSVLRLSVSYLRVKSFFQVVQEQSSRQPAAGAPSPGDSCPLAGSAVLEGRLLLESLNGFALVVSAEGTIFYASATIVDYLGFHQTDVMHQNIYDYIHVDDRQDFCRQLHWAMDPPQVVFGQPPPLETGDDAILGRLLRAQEWGTGTPTEYSAFLTRCFICRVRCLLDSTSGFLTMQFQGKLKFLFGQKKKAPSGAMLPPRLSLFCIAAPVLLPSAAEMKMRSALLRAKPRADTAATADAKVKATTSLCESELHGKPNYSAGRSSRESGVLVLREQTDAGRWAQVPARAPCLCLRGGPDLVLDPKGGSGDREEEQHRMLSRASGVTGRRETPGPTKPLPWTAGKHSEDGARPRLQPSKNDPPSLRPMPRGSCLPCPCVQGTFRNSPISHPPSPSPSAYSSRTSRPMRDVGEDQVHPPLCHFPQRSLQHQLPQPGAQRFATRGYPMEDMKLQGVPMPPGDLCGPTLLLDVSIKMEKDSGCEGAADGCVPSQVWLGASDRSHPATFPTRMHLKTEPDSRQQVYISHLGHGVRGAQPHGRATAGRSRELTPFHPAHCACLEPTDGLPQSEPPHQLCARGRGEQSCTCRAAEAAPVVKREPLDSPQWATHSQGMVPGMLPKSALATLVPPQASGCTFLP

SEQ ID NO: 14734 - protein, 545 aa, Homo sapiens
MATDAALRRLLRLHRTEIAVAVDSAFPLLHALADHDVVPEDKFQETLHLKEKEGCPQAFHALLSWLLTQDSTAILDFWRVLFKDYNLERYGRLQPILDSFPKDVDLSQPRKGRKPPAVPKALVPPPRLPTKRKASEEARAAAPAALTPRGTASPGSQLKAKPPKKPESSAEQQRLPLGNGIQTMSASVQRAVAMSSGDVPGARGAVEGILIQQVFESGGSKKCIQVGGEFYTPSKFEDSGSGKNKARSSSGPKPLVRAKGAQGAAPGGGEARLGQQGSVPAPLALPSDPQLHQKNEDECAVCRDGGELICCDGCPRAFHLACLSPPLREIPSGTWRCSSCLQATVQEVQPRAEEPRPQEPPVETPLPPGLRSAGEEVRGPPGEPLAGMDTTLVYKHLPAPPSAAPLPGLDSSALHPLLCVGPEGQQNLAPGARCGVCGDGTDVLRCTHCAAAFHWRCHFPAGTSRPGTGLRCRSCSGDVTPAPVEGVLAPSPARLAPGPAKDDTASHEPALHRDDLESLLSEHTFDGILQWAIQSMARPAAPFPS

SEQ ID NO: 14735 - protein, 1439 aa, Homo sapiens
MASSETEIRWAEPGLGKGPQRRRWAWAEDKRDVDRSSSQSWEEERLFPNATSPELLEDFRLAQQHLPPLEWDPHPQPDGHQDSESGETSGEEAEAEDVDSPASSHEPLAWLPQQGRQLDMTEEEPDGTLGSLEVEEAGESSSRLGYEAGLSLEGHGNTSPMALGHGQARGWVASGEQASGDKLSEHSEVNPSVELSPARSWSSGTVSLDHPSDSLDSTWEGETDGPQPTALAETLPEGPSHHLLSPDGRTGGSVARATPMEFQDSSAPPAQSPQHATDRWRRETTRFFCPQPKEHIWKQTKTSPKPLPSRFIGSISPLNPQPRPTRQGRPLPRQGATLAGRSSSNAPKYGRGQLNYPLPDFSKVGPRVRFPKDESYRPPKSRSHNRKPQAPARPLIFKSPAEIVQEVLLSSGEAALAKDTPPAHPITRVPQEFQTPEQATELVHQLQEDYHRLLTKYAEAENTIDQLRLGAKVNLFSDPPQPNHSIHTGMVPQGTKVLSFTIPQPRSAEWWPGPAEDPQASAASGWPSARGDLSPSSLTSMPTLGWLPENRDISEDQSSAEQTQALASQASQFLAKVESFERLIQAGRLMPQDQVKGFQRLKAAHAALEEEYLKACREQHPAQPLAGSKGTPGRFDPRRELEAEIYRLGSCLEELKEHIDQTQQEPEPPGSDSALDSTPALPCLHQPTHLPAPSGQAPMPAIKTSCPEPATTTAAASTGPCPLHVNVEVSSGNSEVEDRPQDPLARLRHKELQMEQVYHGLMERYLSVKSLPEAMRMEEEEEGEEEEEEEGGGDSLEVDGVAATPGKAEATRVLPRQCPVQAEKSHGAPLEEATEKMVSMKPPGFQASLARDGHMSGLGKAEAAPPGPGVPPHPPGTKSAASHQSSMTSLEGSGISERLPQKPLHRGGGPHLEETWMASPETDSGFVGSETSRVSPLTQTPEHRLSHISTAGTLAQPFAASVPRDGASYPKARGSLIPRRATEPSTPRSQAQRYLSSPSGPLRQRAPNFSLERTLAAEMAVPGSEFEGHKRISEQPLPNKTISPPPAPAPAAAPLPCGPTETIPSFLLTRAGRDQAICELQEEVSRLRLRLEDSLHQPLQGSPTRPASAFDRPARTRGRPADSPATWGSHYGSKSTERLPGEPRGEEQIVPPGRQRARSSSVPREVLRLSLSSESELPSLPLFSEKSKTTKDSPQAARDGKRGVGSAGWPDRVTFRGQYTGHEYHVLSPKAVPKGNGTVSCPHCRPIRTQDAGGAVTGDPLGPPPADTLQCPLCGQVGSPPEADGPGSATSGAEKATTRRKASSTPSPKQRSKQAGSSPRPPPGLWYLATAPPAPAPPAFAYISSVPIMPYPPAAVYYAPAGPTSAQPAAKWPPTASPPPARRHRHSIQLDLGDLEELNKALSRAVQAAESVRSTTRQMRSSLSADLRQAHSLRGSCLF

SEQ ID NO: 14736 - protein, 326 aa, Homo sapiens
MEFLSEKFALKSPPSKNSDFYMGAGGPLEHVMETLDNESFYSKASAGKCVQAFGPLPRAEHHVRLERTSPCQDSSVNYGITKVEGQPLHTELNRAMDNCNSLRMSPVKGMQEKGELDELGDKCDSNVSSSKKRRHRTTFTSLQLEELEKVFQKTHYPDVYVREQLALRTELTEARVQVWFQNRRAKWRKRERYGQIQQAKSHFAATYDISVLPRTDSYPQIQNNLWAGNASGGSVVTSCMLPRDTSSCMTPYSHSPRTDSSYTGFSNHQNQFSHVPLNNFFTDSLLTGATNGHAFETKPEFERRSSSIAVLRMKAKEHTANISWAM

SEQ ID NO: 14737 - protein, 343 aa, Homo sapiens
MDPEHCAPFRVGPAPGPYVASGDEPPGPQGTPAAAPHLHPAPPRGPRLTRFPACGPLEPYLPEPAKPPAKYLQDLGPGPALNGGHFYEGPAEAEEKTSKAASFPQLPLDCRGGPRDGPSNLQGSPGPCLASLHLPLSPGLPDSMELAKNKSKKRRNRTTFSTFQLEELEKVFQKTHYPDVYAREQLALRTDLTEARVQVWFQNRRAKWRKRERYGKIQEGRNPFTAAYDISVLPRTDSHPQLQNSLWASPGSGSPGGPCLVSPEGIPSPCMSPYSHPHGSVAGFMGVPAPSAAHPGIYSIHGFPPTLGGHSFEPSSDGDYKSPSLVSLRVKPKEPPGLLNWTT

SEQ ID NO: 14738 - protein, 411 aa, Homo sapiens
MNAETCVSYCESPAAAMDAYYSPVSQSREGSSPFRAFPGGDKFGTTFLSAAAKAQGFGDAKSRARYGAGQQDLATPLESGAGARGSFNKFQPQPSTPQPQPPPQPQPQQQQPQPQPPAQPHLYLQRGACKTPPDGSLKLQEGSSGHSAALQVPCYAKESSLGEPELPPDSDTVGMDSSYLSVKEAGVKGPQDRASSDLPSPLEKADSESNKGKKRRNRTTFTSYQLEELEKVFQKTHYPDVYAREQLAMRTDLTEARVQVWFQNRRAKWRKRERFGQMQQVRTHFSTAYELPLLTRAENYAQIQNPSWLGNNGAASPVPACVVPCDPVPACMSPHAHPPGSGASSVTDFLSVSGAGSHVGQTHMGSLFGAASLSPGLNGYELNGEPDRKTSSIAALRMKAKEHSAAISWAT

SEQ ID NO: 14739 - protein, 726 aa, Homo sapiens
MSPAPDAAPAPASISLFDLSADAPVFQGLSLVSHAPGEALARAPRTSCSGSGERESPERKLLQGPMDISEKLFCSTCDQTFQNHQEQREHYKLDWHRFNLKQRLKDKPLLSALDFEKQSSTGDLSSISGSEDSDSASEEDLQTLDRERATFEKLSRPPGFYPHRVLFQNAQGQFLYAYRCVLGPHQDPPEEAELLLQNLQSRGPRDCVVLMAAAGHFAGAIFQGREVVTHKTFHRYTVRAKRGTAQGLRDARGGPSHSAGANLRRYNEATLYKDVRDLLAGPSWAKALEEAGTILLRAPRSGRSLFFGGKGAPLQRGDPRLWDIPLATRRPTFQELQRVLHKLTTLHVYEEDPREAVRLHSPQTHWKTVREERKKPTEEEIRKICRDEKEALGQNEESPKQGSGSEGEDGFQVELELVELTVGTLDLCESEVLPKRRRRKRNKKEKSRDQEAGAHRTLLQQTQEEEPSTQSSQAVAAPLGPLLDEAKAPGQPELWNALLAACRAGDVGVLKLQLAPSPADPRVLSLLSAPLGSGGFTLLHAAAAAGRGSVVRLLLEAGADPTVQDSRARPPYTVAADKSTRNEFRRFMEKNPDAYDYNKAQVPGPLTPEMEARQATRKREQKAARRQREEQQQRQQEQEEREREEQRRFAALSDREKRALAAERRLAAQLGAPTSPIPDSAIVNTRRCWSCGASLQGLTPFHYLDFSFCSTRCLQDHRRQAGRPSS

SEQ ID NO: 14740 - protein, 807 aa, Homo sapiens
MFSAGAESLLHQAREIQDEELKKFCSRICKLLQAEDLGPDTLDSLQRLFLIISATKYSRRLEKTCVDLLQATLGLPACPEQLQVLCAAILREMSPSDSLSLAWDHTQNSRQLSLVASVLLAQGDRNEEVRAVGQGVLRALESRQPEGPSLRHLLPVMAKVVVLSPGTLQEDQATLLSKRLVDWLRYASLQQGLPHSGGFFSTPRARQPGPVTEVDGAVATDFFTVLSSGHRFTDDQWLNVQAFSMLRAWLLHSGPEGPGTLDTDDRSEQEGSTLSVISATSSAGRLLPPRERLREVAFEYCQRLIEQSNRRALRKGDSDLQKACLVEAVLVLDVLCRQDPSFLYRSLSCLKALHGRVRGDPASVRVLLPLAHFFLSHGEAAAVDSEAVYQHLFTRIPVEQFHSPMLAFEFIQFCRDNLHLFSGHLSTLRLSFPNLFKFLAWNSPPLTSEFVALLPALVDAGTALEMLHALLDLPCLTAVLDLQLRSAPAASERPLWDTSLRAPSCLEAFRDPQFQGLFQYLLRPKASGATERLAPLHQLLQPMAGCARVAQCAQAVPTLLQAFFSAVTQVADGSLINQLALLLLGRSDSLYPAPGYAAGVHSVLSSQFLALCTLKPSLVVELARDLLEFLGSVNGLCSRASLVTSVVWAIGEYLSVTYDRRCTVEQINKFFEALEALLFEVTQCRPSAALPRCPPQVVTVLMTTLTKLASRSQDLIPRASLLLSKMRTLAHSPATSSTHSEEGAEAIRTRATELLTLLKMPSVAQFVLTPSTEVCSPRYHRDANTALPLALRTVSRLVEREAGLMPG

SEQ ID NO: 14741 - protein, 920 aa, Homo sapiens
MEVQLGLGRVYPRPPSKTYRGAFQNLFQSVREVIQNPGPRHPEAASAAPPGASLLLLQQQQQQQQQQQQQQQQQQQQQQQETSPRQQQQQQGEDGSPQAHRRGPTGYLVLDEEQQPSQPQSALECHPERGCVPEPGAAVAASKGLPQQLPAPPDEDDSAAPSTLSLLGPTFPGLSSCSADLKDILSEASTMQLLQQQQQEAVSEGSSSGRAREASGAPTSSKDNYLGGTSTISDNAKELCKAVSVSMGLGVEALEHLSPGEQLRGDCMYAPLLGVPPAVRPTPCAPLAECKGSLLDDSAGKSTEDTAEYSPFKGGYTKGLEGESLGCSGSAAAGSSGTLELPSTLSLYKSGALDEAAAYQSRDYYNFPLALAGPPPPPPPPHPHARIKLENPLDYGSAWAAAAAQCRYGDLASLHGAGAAGPGSGSPSAAASSSWHTLFTAEEGQLYGPCGGGGGGGGGGGGGGGGGGGGGGGEAGAVAPYGYTRPPQGLAGQESDFTAPDVWYPGGMVSRVPYPSPTCVKSEMGPWMDSYSGPYGDMRLETARDHVLPIDYYFPPQKTCLICGDEASGCHYGALTCGSCKVFFKRAAEGKQKYLCASRNDCTIDKFRRKNCPSCRLRKCYEAGMTLGARKLKKLGNLKLQEEGEASSTTSPTEETTQKLTVSHIEGYECQPIFLNVLEAIEPGVVCAGHDNNQPDSFAALLSSLNELGERQLVHVVKWAKALPGFRNLHVDDQMAVIQYSWMGLMVFAMGWRSFTNVNSRMLYFAPDLVFNEYRMHKSRMYSQCVRMRHLSQEFGWLQITPQEFLCMKALLLFSIIPVDGLKNQKFFDELRMNYIKELDRIIACKRKNPTSCSRRFYQLTKLLDSVQPIARELHQFTFDLLIKSHMVSVDFPEMMAEIISVQVPKILSGKVKPIYFHTQ

SEQ ID NO: 14742 - protein, 315 aa, Homo sapiens
MRNRMAPENPQPDPFINRNYSNMKVIPPQDPASPSFTLLSKLECSGTVSAYCSLNLPGSTDPPTSASRVAATTAIRRRHKERTSFTHQQYEELEALFSQTMFPDRNLQEKLALRLDLPESTVKVWFRNRRFKLKKQQQQQSAKQRNQILPSKKNVPTSPRTSPSPYAFSPVISDFYSSLPSQPLDPSNWAWNSTFTESSTSDFQMQDTQWERLVASVPALYSDAYDIFQIIELYNLPDENEISSSSFHCLYQYLSPTKYQVGGQGSSLSIFAGPAVGLSPAQTWPNMTSQAFEAYSLTDSLEFQKTSNMVDLGFL

SEQ ID NO: 14743 - protein, 1499 aa, Homo sapiens
MMMARKQDVRIPTYNISVVGLSGTEKEKGQCGIGKSCLCNRFVRPSADEFHLDHTSVLSTSDFGGRVVNNDHFLYWGEVSRSLEDCVECKMHIVEQTEFIDDQTFQPHRSTALQPYIKRAAATKLASAEKLMYFCTDQLGLEQDFEQKQMPDGKLLVDGFLLGIDVSRGMNRNFDDQLKFVSNLYNQLAKTKKPIVVVLTKCDEGVERYIRDAHTFALSKKNLQVVETSARSNVNVDLAFSTLVQLIDKSRGKTKIIPYFEALKQQSQQIATAKDKYEWLVSRIVKNHNENWLSVSRKMQASPEYQDYVYLEGTQKAKKLFLQHIHRLKHEHIERRRKLYLAALPLAFEALIPNLDEIDHLSCIKAKKLLETKPEFLKWFVVLEETPWDATSHIDNMENERIPFDLMDTVPAEQLYEAHLEKLRNERKRVEMRRAFKENLETSPFITPGKPWEEARSFIMNEDFYQWLEESVYMDIYGKHQKQIIDKAKEEFQELLLEYSELFYELELDAKPSKEKMGVIQDVLGEEQRFKALQKLQAERDALILKHIHFVYHPTKETCPSCPACVDAKIEHLISSRFIRPSDRNQKNSLSDPNIDRINLVILGKDGLARELANEIRALCTNDDKYVIDGKMYELSLRPIEGNVRLPVNSFQTPTFQPHGCLCLYNSKESLSYVVESIEKSRESTLGRRDNHLVHLPLTLILVNKRGDTSGETLHSLIQQGQQIASKLQCVFLDPASAGIGYGRNINEKQISQVLKGLLDSKRNLNLVSSTASIKDLADVDLRIVMCLMCGDPFSADDILFPVLQSQTCKSSHCGSNNSVLLELPIGLHKKRIELSVLSYHSSFSIRKSRLVHGYIVFYSAKRKASLAMLRAFLCEVQDIIPIQLVALTDGAVDVLDNDLSREQLTEGEEIAQEIDGRFTSIPCSQPQHKLEIFHPFFKDVVEKKNIIEATHMYDNAAEACSTTEEVFNSPRAGSPLCNSNLQDSEEDIEPSYSLFREDTSLPSLSKDHSKLSMELEGNDGLSFIMSNFESKLNNKVPPPVKPKPPVHFEITKGDLSYLDQGHRDGQRKSVSSSPWLPQDGFDPSDYAEPMDAVVKPRNEEENIYSVPHDSTQGKIITIRNINKAQSNGSGNGSDSEMDTSSLERGRKVSIVSKPVLYRTRCTRLGRFASYRTSFSVGSDDELGPIRKKEEDQASQGYKGDNAVIPYETDEDPRRRNILRSLRRNTKKPKPKPRPSITKATWESNYFGVPLTTVVTPEKPIPIFIERCIEYIEATGLSTEGIYRVSGNKSEMESLQRQFDQDHNLDLAEKDFTVNTVAGAMKSFFSELPDPLVPYNMQIDLVEAHKINDREQKLHALKEVLKKFPKENHEVFKYVISHLNKVSHNNKVNLMTSENLSICFWPTLMRPDFSTMDALTATRTYQTIIELFIQQCPFFFYNRPITEPPGARPSSPSAVASTVPFLTSTPVTSQPSPPQSPPPTPQSPMQPLLPSQLQAEHTL

SEQ ID NO: 14744 - protein, 2285 aa, Homo sapiens
MAAQVAPAAASSLGNPPPPPPSELKKAEQQQREEAGGEAAAAAAAERGEMKAAAGQESEGPAVGPPQPLGKELQDGAESNGGGGGGGAGSGGGPGAEPDLKNSNGNAGPRPALNNNLTEPPGGGGGGSSDGVGAPPHSAAAALPPPAYGFGQPYGRSPSAVAAAAAAVFHQQHGGQQSPGLAALQSGGGGGLEPYAGPQQNSHDHGFPNHQYNSYYPNRSAYPPPAPAYALSSPRGGTPGSGAAAAAGSKPPPSSSASASSSSSSFAQQRFGAMGGGGPSAAGGGTPQPTATPTLNQLLTSPSSARGYQGYPGGDYSGGPQDGGAGKGPADMASQCWGAAAAAAAAAAASGGAQQRSHHAPMSPGSSGGGGQPLARTPQPSSPMDQMGKMRPQPYGGTNPYSQQQGPPSGPQQGHGYPGQPYGSQTPQRYPMTMQGRAQSAMGGLSYTQQIPPYGQQGPSGYGQQGQTPYYNQQSPHPQQQQPPYSQQPPSQTPHAQPSYQQQPQSQPPQLQSSQPPYSQQPSQPPHQQSPAPYPSQQSTTQQHPQSQPPYSQPQAQSPYQQQQPQQPAPSTLSQQAAYPQPQSQQSQQTAYSQQRFPPPQELSQDSFGSQASSAPSMTSSKGGQEDMNLSLQSRPSSLPDLSGSIDDLPMGTEGALSPGVSTSGISSSQGEQSNPAQSPFSPHTSPHLPGIRGPSPSPVGSPASVAQSRSGPLSPAAVPGNQMPPRPPSGQSDSIMHPSMNQSSIAQDRGYMQRNPQMPQYSSPQPGSALSPRQPSGGQIHTGMGSYQQNSMGSYGPQGGQYGPQGGYPRQPNYNALPNANYPSAGMAGGINPMGAGGQMHGQPGIPPYGTLPPGRMSHASMGNRPYGPNMANMPPQVGSGMCPPPGGMNRKTQETAVAMHVAANSIQNRPPGYPNMNQGGMMGTGPPYGQGINSMAGMINPQGPPYSMGGTMANNSAGMAASPEMMGLGDVKLTPATKMNNKADGTPKTESKSKKSSSSTTTNEKITKLYELGGEPERKMWVDRYLAFTEEKAMGMTNLPAVGRKPLDLYRLYVSVKEIGGLTQVNKNKKWRELATNLNVGTSSSAASSLKKQYIQCLYAFECKIERGEDPPPDIFAAADSKKSQPKIQPPSPAGSGSMQGPQTPQSTSSSMAEGGDLKPPTPASTPHSQIPPLPGMSRSNSVGIQDAFNDGSDSTFQKRNSMTPNPGYQPSMNTSDMMGRMSYEPNKDPYGSMRKAPGSDPFMSSGQGPNGGMGDPYSRAAGPGLGNVAMGPRQHYPYGGPYDRVRTEPGIGPEGNMSTGAPQPNLMPSNPDSGMYSPSRYPPQQQQQQQQRHDSYGNQFSTQGTPSGSPFPSQQTTMYQQQQQNYKRPMDGTYGPPAKRHEGEMYSVPYSTGQGQPQQQQLPPAQPQPASQQQAAQPSPQQDVYNQYGNAYPATATAATERRPAGGPQNQFPFQFGRDRVSAPPGTNAQQNMPPQMMGGPIQASAEVAQQGTMWQGRNDMTYNYANRQSTGSAPQGPAYHGVNRTDEMLHTDQRANHEGSWPSHGTRQPPYGPSAPVPPMTRPPPSNYQPPPSMQNHIPQVSSPAPLPRPMENRTSPSKSPFLHSGMKMQKAGPPVPASHIAPAPVQPPMIRRDITFPPGSVEATQPVLKQRRRLTMKDIGTPEAWRVMMSLKSGLLAESTWALDTINILLYDDNSIMTFNLSQLPGLLELLVEYFRRCLIEIFGILKEYEVGDPGQRTLLDPGRFSKVSSPAPMEGGEEEEELLGPKLEEEEEEEVVENDEEIAFSGKDKPASENSEEKLISKFDKLPVKIVQKNDPFVVDCSDKLGRVQEFDSGLLHWRIGGGDTTEHIQTHFESKTELLPSRPHAPCPPAPRKHVTTAEGTPGTTDQEGPPPDGPPEKRITATMDDMLSTRSSTLTEDGAKSSEAIKESSKFPFGISPAQSHRNIKILEDEPHSKDETPLCTLLDWQDSLAKRCVCVSNTIRSLSFVPGNDFEMSKHPGLLLILGKLILLHHKHPERKQAPLTYEKEEEQDQGVSCNKVEWWWDCLEMLRENTLVTLANISGQLDLSPYPESICLPVLDGLLHWAVCPSAEAQDPFSTLGPNAVLSPQRLVLETLSKLSIQDNNVDLILATPPFSRLEKLYSTMVRFLSDRKNPVCREMAVVLLANLAQGDSLAARAIAVQKGSIGNLLGFLEDSLAATQFQQSQASLLHMQNPPFEPTSVDMMRRAARALLALAKVDENHSEFTLYESRLLDISVSPLMNSLVSQVICDVLFLIGQS

SEQ ID NO: 14745 - protein, 2236 aa, Homo sapiens
MAHNAGAAAAAGTHSAKSGGSEAALKEGGSAAALSSSSSSSAAAAAASSSSSSGPGSAMETGLLPNHKLKTVGEAPAAPPHQQHHHHHHAHHHHHHAHHLHHHHALQQQLNQFQQQQQQQQQQQQQQQQQQHPISNNNSLGGAGGGAPQPGPDMEQPQHGGAKDSAAGGQADPPGPPLLSKPGDEDDAPPKMGEPAGGRYEHPGLGALGTQQPPVAVPGGGGGPAAVPEFNNYYGSAAPASGGPGGRAGPCFDQHGGQQSPGMGMMHSASAAAAGAPGSMDPLQNSHEGYPNSQCNHYPGYSRPGAGGGGGGGGGGGGGSGGGGGGGGAGAGGAGAGAVAAAAAAAAAAAGGGGGGGYGGSSAGYGVLSSPRQQGGGMMMGPGGGGAASLSKAAAGSAAGGFQRFAGQNQHPSGATPTLNQLLTSPSPMMRSYGGSYPEYSSPSAPPPPPSQPQSQAAAAGAAAGGQQAAAGMGLGKDMGAQYAAASPAWAAAQQRSHPAMSPGTPGPTMGRSQGSPMDPMVMKRPQLYGMGSNPHSQPQQSSPYPGGSYGPPGPQRYPIGIQGRTPGAMAGMQYPQQQMPPQYGQQGVSGYCQQGQQPYYSQQPQPPHLPPQAQYLPSQSQQRYQPQQDMSQEGYGTRSQPPLAPGKPNHEDLNLIQQERPSSLPDLSGSIDDLPTGTEATLSSAVSASGSTSSQGDQSNPAQSPFSPHASPHLSSIPGGPSPSPVGSPVGSNQSRSGPISPASIPGSQMPPQPPGSQSESSSHPALSQSPMPQERGFMAGTQRNPQMAQYGPQQTGPSMSPHPSPGGQMHAGISSFQQSNSSGTYGPQMSQYGPQGNYSRPPAYSGVPSASYSGPGPGMGISANNQMHGQGPSQPCGAVPLGRMPSAGMQNRPFPGNMSSMTPSSPGMSQQGGPGMGPPMPTVNRKAQEAAAAVMQAAANSAQSRQGSFPGMNQSGLMASSSPYSQPMNNSSSLMNTQAPPYSMAPAMVNSSAASVGLADMMSPGESKLPLPLKADGKEEGTPQPESKSKKSSSSTTTGEKITKVYELGNEPERKLWVDRYLTFMEERGSPVSSLPAVGKKPLDLFRLYVCVKEIGGLAQVNKNKKWRELATNLNVGTSSSAASSLKKQYIQYLFAFECKIERGEEPPPEVFSTGDTKKQPKLQPPSPANSGSLQGPQTPQSTGSNSMAEVPGDLKPPTPASTPHGQMTPMQGGRSSTISVHDPFSDVSDSSFPKRNSMTPNAPYQQGMSMPDVMGRMPYEPNKDPFGGMRKVPGSSEPFMTQGQMPNSSMQDMYNQSPSGAMSNLGMGQRQQFPYGASYDRRHEPYGQQYPGQGPPSGQPPYGGHQPGLYPQQPNYKRHMDGMYGPPAKRHEGDMYNMQYSSQQQEMYNQYGGSYSGPDRRPIQGQYPYPYSRERMQGPGQIQTHGIPPQMMGGPLQSSSSEGPQQNMWAARNDMPYPYQNRQGPGGPTQAPPYPGMNRTDDMMVPDQRINHESQWPSHVSQRQPYMSSSASMQPITRPPQPSYQTPPSLPNHISRAPSPASFQRSLENRMSPSKSPFLPSMKMQKVMPTVPTSQVTGPPPQPPPIRREITFPPGSVEASQPVLKQRRKITSKDIVTPEAWRVMMSLKSGLLAESTWALDTINILLYDDSTVATFNLSQLSGFLELLVEYFRKCLIDIFGILMEYEVGDPSQKALDHNAARKDDSQSLADDSGKEEEDAECIDDDEEDEEDEEEDSEKTESDEKSSIALTAPDAAADPKEKPKQASKFDKLPIKIVKKNNLFVVDRSDKLGRVQEFNSGLLHWQLGGGDTTEHIQTHFESKMEIPPRRRPPPPLSSAGRKKEQEGKGDSEEQQEKSIIATIDDVLSARPGALPEDANPGPQTESSKFPFGIQQAKSHRNIKLLEDEPRSRDETPLCTIAHWQDSLAKRCICVSNIVRSLSFVPGNDAEMSKHPGLVLILGKLILLHHEHPERKRAPQTYEKEEDEDKGVACSKDEWWWDCLEVLRDNTLVTLANISGQLDLSAYTESICLPILDGLLHWMVCPSAEAQDPFPTVGPNSVLSPQRLVLETLCKLSIQDNNVDLILATPPFSRQEKFYATLVRYVGDRKNPVCREMSMALLSNLAQGDALAARAIAVQKGSIGNLISFLEDGVTMAQYQQSQHNLMHMQPPPLEPPSVDMMCRAAKALLAMARVDENRSEFLLHEGRLLDISISAVLNSLVASVICDVLFQIGQL

SEQ ID NO: 14746 - protein, 1835 aa, Homo sapiens
MANSTGKAPPDERRKGLAFLDELRQFHHSRGSPFKKIPAVGGKELDLHGLYTRVTTLGGFAKVSEKNQWGEIVEEFNFPRSCSNAAFALKQYYLRYLEKYEKVHHFGEDDDEVPPGNPKPQLPIGAIPSSYNYQQHSVSDYLRQSYGLSMDFNSPNDYNKLVLSLLSGLPNEVDFAINVCTLLSNESKHVMQLEKDPKIITLLLANAGVFDDTLGSFSTVFGEEWKEKTDRDFVKFWKDIVDDNEVRDLISDRNKSHEGTSGEWIWESLFHPPRKLGINDIEGQRVLQIAVILRNLSFEEGNVKLLAANRTCLRFLLLSAHSHFISLRQLGLDTLGNIAAELLLDPVDFKTTHLMFHTVTKCLMSRDRFLKMRGMEILGNLCKAEDNGVLICEYVDQDSYREIICHLTLPDVLLVISTLEVLYMLTEMGDVACTKIAKVEKSIDMLVCLVSMDIQMFGPDALAAVKLIEHPSSSHQMLSEIRPQAIEQVQTQTHVASAPASRAVVAQHVAPPPGIVEIDSEKFACQWLNAHFEVNPDCSVSRAEMYSEYLSTCSKLARGGILTSTGFYKCLRTVFPNHTVKRVEDSSSNGQAHIHVVGVKRRAIPLPIQMYYQQQPVSTSVVRVDSVPDVSPAPSPAGIPHGSQTIGNHFQRTPVANQSSNLTATQMSFPVQGVHTVAQTVSRIPQNPSPHTHQQQNAPVTVIQSKAPIPCEVVKATVIQNSIPQTGVPVSIAVGGGPPQSSVVQNHSTGPQPVTVVNSQTLLHHPSVIPQQSPLHTVVPGQIPSGTPVTVIQQAVPQSHMFGRVQNIPACTSTVSQGQQLITTSPQPVQTSSQQTSAGSQSQDTVIIAPPQYVTTSASNIVSATSVQNFQVATGQMVTIAGVPSPQASRVGFQNIAPKPLPSQQVSSTVVQQPIQQPQQPTQQSVVIVSQPAQQGQTYAPAIHQIVLANPAALPAGQTVQLTGQPNITPSSSPSPVPATNNQVPTAMSSSSTPQSQGPPPTVSQMLSVKRQQQQQHSPAPPPQQVQVQVQQPQQVQMQVQPQQSNAGVGQPASGESSLIKQLLLPKRGPSTPGGKLILPAPQIPPPNNARAPSPQVVYQVASNQAAGFGVQGQTPAQQLLVGQQNVQLVPSAMPPSGGVQTVPISNLQILPGPLISNSPATIFQGTSGNQVTITVVPNTSFAPATVSQGNATQLIAPAGITMSGTQTGVGLPVQTLPATQASPAGQSSCTTATPPFKGDKIICQKEEEAKEATGLHVHERKIEVMENPSCRRGATNTSNGDTKENEMHVGSLLNGRKYSDSSLPPSNSGKIQSETNQCSLISNGPSLELGENGASGKQNSEQIDMQDIKSDLRKPLVNGICDFDKGDGSHLSKNIPNHKTSNHVGNGEISPMEPQGTLDITQQDTAKGDQLERISNGPVLTLGGSSVSSIQEASNAATQQFSGTDLLNGPLASSLNSDVPQQRPSVVVSPHSTTSVIQGHQIIAVPDSGSKVSHSPALSSDVRSTNGTAECKTVKRPAEDTDRETVAGIPNKVGVRIVTISDPNNAGCSATMVAVPAGADPSTVAKVAIESAVQQKQQHPPTYVQNVVPQNTPMPPSPAVQVQGQPNSSQPSPFSGSSQPGDPMRKPGQNFMCLWQSCKKWFQTPSQVFYHAATEHGGKDVYPGQCLWEGCEPFQRQRFSFITHLQDKHCSKDALLAGLKQDEPGQAGSQKSSTKQPTVGGTSSTPRAQKAIVNHPSAALMALRRGSRNLVFRDFTDEKEGPITKHIRLTAALILKNIGKYSECGRRLLKRHENNLSVLAISNMEASSTLAKCLYELNFTVQSKEQEKDSEMLQ

SEQ ID NO: 14747 - protein, 593 aa, Homo sapiens
MKLQAVMETLLQRQQRARQELEARQQLPPDPPAAPPGRARAAPDEDREPESARMQRAQMAALAAMRAAAAGLGHPASPGGSEDGPPGSEEEDAAREGTPGSPGRGREGPGEEHFEDMASDEDMKPKWEEEEMEEDLGEDEEEEEEDYEDEEEEEDEEGLGPPGPASLGTTALFPRKAQPPQAFRGDGVPRVLGGQERPGPGPAHPGGAAHVAPQLQPPDHGDWTYEEQFKQLYELDGDPKRKEFLDDLFSFMQKRGTPVNRIPIMAKQVLDLFMLYVLVTEKGGLVEVINKKLWREITKGLNLPTSITSAAFTLRTQYMKYLYPYECEKRGLSNPNELQAAIDSNRREGRRQSFGGSLFAYSPGGAHGMLSSPKLPVSSLGLAASTNGSSITPAPKIKKEEDSAIPITVPGRLPVSLAGHPVVAAQAAAVQAAAAQAAVAAQAAALEQLREKLESAEPPEKKMALVADEQQRLMQRALQQNFLAMAAQLPMSIRINSQASESRQDSAVNLTGTNGSNSISMSVEINGIMYTGVLFAQPPAPTPTSAPNKGGGGGGGSSSNAGGRGGNTGTSGGQAGPAGLSTPSTSTSNNSLP

SEQ ID NO: 14748 - protein, 561 aa, Homo sapiens
MEPLQQQQQQQQQQQKQPHLAPLQMDAREKQGQQMREAQFLYAQKLVTQPTLLSATAGRPSGSTPLGPLARVPPTAAVAQVFERGNMNSEPEEEDGGLEDEDGDDEVAEVAEKETQAASKYFHVQKVARQDPRVAPMSNLLPAPGLPPHGQQAKEDHTKDASKASPSVSTAGQPNWNLDEQLKQNGGLAWSDDADGGRGREISRDFAKLYELDGDPERKEFLDDLFVFMQKRGTPINRIPIMAKQILDLYMLYKLVTEKGGLVEIINKKIWREITKGLNLPTSITSAAFTLRTQYMKYLYAYECEKKALSSPAELQAAIDGNRREGRRPSYSSSLFGYSPAAATAAAAAGAPALLSPPKIRFPILGLGSSSGTNTSSPRISPATTLRKGDGAPVTTVPVPNRLAVPVTLASQQAGTRTAALEQLRERLESGEPAEKKASRLSEEEQRLVQQAFQRNFFSMARQLPMKIRINGRAEDRAEASAAALNLTTSSIGSINMSVDIDGTTYAGVLFAQKPVVHLITGSAPQSLGSSASSSSSSHCSPSPTSSRGTPSAEPSTSWSL

SEQ ID NO: 14749 - protein, 412 aa, Homo sapiens
MEALQKQQAARLAQGVGPLAPACPLLPPQPPLPDHRTLQAPEGALGNVGAEEEEDAEEDEEKREEAGAEEEAAEESRPGAQGPSSPSSQPPGLHPHEWTYEEQFKQLYELDADPKRKEFLDDLFSFMQKRGTPVNRVPIMAKQVLDLYALFRLVTAKGGLVEVINRKVWREVTRGLSLPTTITSAAFTLRTQYMKYLYPYECETRALSSPGELQAAIDSNRREGRRQAYTATPLFGLAGPPPRGAQDPALGPGPAPPATQSSPGPAQGSTSGLPAHACAQLSPSPIKKEESGIPNPCLALPVGLALGPTREKLAPEEPPEKRAVLMGPMDPPRPCMPPSFLPRGKVPLREERLDGPLNLAGSGISSINMALEINGVVYTGVLFARRQPVPASQGPTNPAPPPSTGPPSSILP

SEQ ID NO: 14750 - protein, 1257 aa, Homo sapiens
MKAADEPAYLTVGTDVSAKYRGAFCEAKIKTVKRLVKVKVLLKQDNTTQLVQDDQVKGPLRVGAIVETRTSDGSFQEAIISKLTDASWYTVVFDDGDERTLRRTSLCLKGERHFAESETLDQLPLTNPEHFGTPVIAKKTNRGRRSSLPVTEDEKEEESSEEEDEDKRRLNDELLGKVVSVVSATERTEWYPALVISPSCNDDITVKKDQCLVRSFIDSKFYSIARKDIKEVDILNLPESELSTKPGLQKASIFLKTRVVPDNWKMDISEILESSSSDDEDGPAEENDEEKEKEAKKTEEEVPEEELDPEERDNFLQQLYKFMEDRGTPINKPPVLGYKDLNLFKLFRLVYHQGGCDNIDSGAVWKQIYMDLGIPILNSAASYNVKTAYRKYLYGFEEYCRSANIQFRTVHHHEPKVKEEKKDLEESMEEALKLDQEMPLTEVKSEPEENIDSNSESEREEIELKSPRGRRRIARDVNSIKKEIEEEKTEDKLKDNDTENKDVDDDYETAEKKENELLLGRKNTPKQKEKKIKKQEDSDKDSDEEEEKSQEREETESKCDSEGEEDEEDMEPCLTGTKVKVKYGRGKTQKIYEASIKSTEIDDGEVLYLVHYYGWNVRYDEWVKADRIIWPLDKGGPKKKQKKKAKNKEDSEKDEKRDEERQKSKRGRPPLKSTLSSNMPYGLSKTANSEGKSDSCSSDSETEDALEKNLINEELSLKDELEKNENLNDDKLDEENPKISAHILKENDRTQMQPLETLKLEVGENEQIVQIFGNKMEKTEEVKKEAEKSPKGKGRRSKTKDLSLEIIKISSFGQNEAGSEPHIEAHSLELSSLDNKNFSSATEDEIDQCVKEKKLKRKILGQSSPEKKIRIENGMEMTNTVSQERTSDCIGSEGMKNLNFEQHFERENEGMPSLIAESNQCIQQLTSERFDSPAEETVNIPLKEDEDAMPLIGPETLVCHEVDLDDLDEKDKTSIEDVAVESSESNSLVSIPPALPPVVQHNFSVASPLTLSQDESRSVKSESDITIEVDSIAEESQEGLCERESANGFETNVASGTCSIIVQERESREKGQKRPSDGNSGLMAKKQKRTPKRTSAAAKNEKNGTGQSSDSEDLPVLDNSSKCTPVKHLNVSKPQKLARSPARISPHIKDGEKDKHREKHPNSSPRTYKWSFQLNELDNMNSTERISFLQEKLQEIRKYYMSLKSEVATIDRRRKRLKKKDREVSHAGASMSSASSDTGMSPSSSSPPQNVLAVECR

SEQ ID NO: 14751 - protein, 1312 aa, Homo sapiens
MKALDEPPYLTVGTDVSAKYRGAFCEAKIKTAKRLVKVKVTFRHDSSTVEVQDDHIKGPLKVGAIVEVKNLDGAYQEAVINKLTDASWYTVVFDDGDEKTLRRSSLCLKGERHFAESETLDQLPLTNPEHFGTPVIGKKTNRGRRSNHIPEEESSSSSSDEDEDDRKQIDELLGKVVCVDYISLDKKKALWFPALVVCPDCSDEIAVKKDNILVRSFKDGKFTSVPRKDVHEITSDTAPKPDAVLKQAFEQALEFHKSRTIPANWKTELKEDSSSSEAEEEEEEEDDEKEKEDNSSEEEEEIEPFPEERENFLQQLYKFMEDRGTPINKRPVLGYRNLNLFKLFRLVHKLGGFDNIESGAVWKQVYQDLGIPVLNSAAGYNVKCAYKKYLYGFEEYCRSANIEFQMALPEKVVNKQCKECENVKEIKVKEENETEIKEIKMEEERNIIPREEKPIEDEIERKENIKPSLGSKKNLLESIPTHSDQEKEVNIKKPEDNENLDDKDDDTTRVDESLNIKVEAEEEKAKSGDETNKEEDEDDEEAEEEEEEEEEEEDEDDDDNNEEEEFECYPPGMKVQVRYGRGKNQKMYEASIKDSDVEGGEVLYLVHYCGWNVRYDEWIKADKIVRPADKNVPKIKHRKKIKNKLDKEKDKDEKYSPKNCKLRRLSKPPFQTNPSPEMVSKLDLTDAKNSDTAHIKSIEITSILNGLQASESSAEDSEQEDERGAQDMDNNGKEESKIDHLTNNRNDLISKEEQNSSSLLEENKVHADLVISKPVSKSPERLRKDIEVLSEDTDYEEDEVTKKRKDVKKDTTDKSSKPQIKRGKRRYCNTEECLKTGSPGKKEEKAKNKESLCMENSSNSSSDEDEEETKAKMTPTKKYNGLEEKRKSLRTTGFYSGFSEVAEKRIKLLNNSDERLQNSRAKDRKDVWSSIQGQWPKKTLKELFSDSDTEAAASPPHPAPEEGVAEESLQTVAEEESCSPSVELEKPPPVNVDSKPIEEKTVEVNDRKAEFPSSGSNSVLNTPPTTPESPSSVTVTEGSRQQSSVTVSEPLAPNQEEVRSIKSETDSTIEVDSVAGELQDLQSEGNSSPAGFDASVSSSSSNQPEPEHPEKACTGQKRVKDAQGGGSSSKKQKRSHKATVVNNKKKGKGTNSSDSEELSAGESITKSQPVKSVSTGMKSHSTKSPARTQSPGKCGKNGDKDPDLKEPSNRLPKVYKWSFQMSDLENMTSAERITILQEKLQEIRKHYLSLKSEVASIDRRRKRLKKKERESAATSSSSSSPSSSSITAAVMLTLAEPSMSSASQNGMSVECR

SEQ ID NO: 14752 - protein, 594 aa, Homo sapiens
MAAPVKGNRKQSTEGDALDPPASPKPAGKQNGIQNPISLEDSPEAGGEREEEQEREEEQAFLVSLYKFMKERHTPIERVPHLGFKQINLWKIYKAVEKLGAYELVTGRRLWKNVYDELGGSPGSTSAATCTRRHYERLVLPYVRHLKGEDDKPLPTSKPRKQYKMAKENRGDDGATERPKKAKEERRMDQMMPGKTKADAADPAPLPSQEPPRNSTEQQGLASGSSVSFVGASGCPEAYKRLLSSFYCKGTHGIMSPLAKKKLLAQVSKVEALQCQEEGCRHGAEPQASPAVHLPESPQSPKGLTENSRHRLTPQEGLQAPGGSLREEAQAGPCPAAPIFKGCFYTHPTEVLKPVSQHPRDFFSRLKDGVLLGPPGKEGLSVKEPQLVWGGDANRPSAFHKGGSRKGILYPKPKACWVSPMAKVPAESPTLPPTFPSSPGLGSKRSLEEEGAAHSGKRLRAVSPFLKEADAKKCGAKPAGSGLVSCLLGPALGPVPPEAYRGTMLHCPLNFTGTPGPLKGQAALPFSPLVIPAFPAHFLATAGPSPMAAGLMHFPPTSFDSALRHRLCPASSAWHAPPVTTYAAPHFFHLNTKL

SEQ ID NO: 14753 - protein, 1188 aa, Homo sapiens
MEPNSLQWVGSPCGLHGPYIFYKAFQFHLEGKPRILSLGDFFFVRCTPKDPICIAELQLLWEERTSRQLLSSSKLYFLPEDTPQGRNSDHGEDEVIAVSEKVIVKLEDLVKWVHSDFSKWRCGFHAGPVKTEALGRNGQKEALLKYRQSTLNSGLNFKDVLKEKADLGEDEEETNVIVLSYPQYCRYRSMLKRIQDKPSSILTDQFALALGGIAVVSRNPQILYCRDTFDHPTLIENESICDEFAPNLKGRPRKKKPCPQRRDSFSGVKDSNNNSDGKAVAKVKCEARSALTKPKNNHNCKKVSNEEKPKVAIGEECRADEQAFLVALYKYMKERKTPIERIPYLGFKQINLWTMFQAAQKLGGYETITARRQWKHIYDELGGNPGSTSAATCTRRHYERLILPYERFIKGEEDKPLPPIKPRKQENSSQENENKTKVSGTKRIKHEIPKSKKEKENAPKPQDAAEVSSEQEKEQETLISQKSIPEPLPAADMKKKIEGYQEFSAKPLASRVDPEKDNETDQGSNSEKVAEEAGEKGPTPPLPSAPLAPEKDSALVPGASKQPLTSPSALVDSKQESKLCCFTESPESEPQEASFPSFPTTQPPLANQNETEDDKLPAMADYIANCTVKVDQLGSDDIHNALKQTPKVLVVQSFDMFKDKDLTGPMNENHGLNYTPLLYSRGNPGIMSPLAKKKLLSQVSGASLSSSYPYGSPPPLISKKKLIARDDLCSSLSQTHHGQSTDHMAVSRPSVIQHVQSFRSKPSEERKTINDIFKHEKLSRSDPHRCSFSKHHLNPLADSYVLKQEIQEGKDKLLEKRALPHSHMPSFLADFYSSPHLHSLYRHTEHHLHNEQTSKYPSRDMYRESENSSFPSHRHQEKLHVNYLTSLHLQDKKSAAAEAPTDDQPTDLSLPKNPHKPTGKVLGLAHSTTGPQESKGISQFQVLGSQSRDCHPKACRVSPMTMSGPKKYPESLSRSGKPHHVRLENFRKMEGMVHPILHRKMSPQNIGAARPIKRSLEDLDLVIAGKKARAVSPLDPSKEVSGKEKASEQESEGSKAAHGGHSGGGSEGHKLPLSSPIFPGLYSGSLCNSGLNSRLPAGYSHSLQYLKNQTVLSPLMQPLAFHSLVMQRGIFTSPTNSQQLYRHLAAATPVGSSYGDLLHNSIYPLAAINPQAAFPSSQLSSVHPSTKL

SEQ ID NO: 14754 - protein, 789 aa, Homo sapiens
MAATTANPEMTSDVPSLGPAIASGNSGPGIQGGGAIVQRAIKRRPGLDFDDDGEGNSKFLRCDDDQMSNDKERFARSDDEQSSADKERLARENHSEIERRRRNKMTAYITELSDMVPTCSALARKPDKLTILRMAVSHMKSLRGTGNTSTDGSYKPSFLTDQELKHLILEAADGFLFIVSCETGRVVYVSDSVTPVLNQPQSEWFGSTLYDQVHPDDVDKLREQLSTSENALTGRILDLKTGTVKKEGQQSSMRMCMGSRRSFICRMRCGSSSVDPVSVNRLSFVRNRCRNGLGSVKDGEPHFVVVHCTGYIKAWPPAGVSLPDDDPEAGQGSKFCLVAIGRLQVTSSPNCTDMSNVCQPTEFISRHNIEGIFTFVDHRCVATVGYQPQELLGKNIVEFCHPEDQQLLRDSFQQVVKLKGQVLSVMFRFRSKNQEWLWMRTSSFTFQNPYSDEIEYIICTNTNVKNSSQEPRPTLSNTIQRPQLGPTANLPLEMGSGQLAPRQQQQQTELDMVPGRDGLASYNHSQVVQPVTTTGPEHSKPLEKSDGLFAQDRDPRFSEIYHNINADQSKGISSSTVPATQQLFSQGNTFPPTPRPAENFRNSGLAPPVTIVQPSASAGQMLAQISRHSNPTQGATPTWTPTTRSGFSAQQVATQATAKTRTSQFGVGSFQTPSSFSSMSLPGAPTASPGAAAYPSLTNRGSNFAPETGQTAGQFQTRTAEGVGVWPQWQGQQPHHRSSSSEQHVQQPPAQQPGQPEVFQEMLSMLGDQSNSYNNEEFPDLTMFPPFSE

SEQ ID NO: 14755 - protein, 717 aa, Homo sapiens
MATPAAVNPPEMASDIPGSVTLPVAPMAATGQVRMAGAMPARGGKRRSGMDFDDEDGEGPSKFSRENHSEIERRRRNKMTQYITELSDMVPTCSALARKPDKLTILRMAVSHMKSMRGTGNKSTDGAYKPSFLTEQELKHLILEAADGFLFVVAAETGRVIYVSDSVTPVLNQPQSEWFGSTLYEQVHPDDVEKLREQLCTSENSMTGRILDLKTGTVKKEGQQSSMRMCMGSRRSFICRMRCGNAPLDHLPLNRITTMRKRFRNGLGPVKEGEAQYAVVHCTGYIKAWPPAGMTIPEEDADVGQGSKYCLVAIGRLQVTSSPVCMDMNGMSVPTEFLSRHNSDGIITFVDPRCISVIGYQPQDLLGKDILEFCHPEDQSHLRESFQQVVKLKGQVLSVMYRFRTKNREWMLIRTSSFTFQNPYSDEIEYIICTNTNVKQLQQQQAELEVHQRDGLSSYDLSQVPVPNLPAGVHEAGKSVEKADAIFSQERDPRFAEMFAGISASEKKMMSSASAAGTQQIYSQGSPFPSGHSGKAFSSSVVHVPGVNDIQSSSSTGQNMSQISRQLNQSQVAWTGSRPPFPGQQIPSQSSKTQSSPFGIGTSHTYPADPSSYSPLSSPATSSPSGNAYSSLANRTPGFAESGQSSGQFQGRPSEVWSQWQSQHHGQQSGEQHSHQQPGQTEVFQDMLPMPGDPTQGTGNYNIEDFADLGMFPPFSE

SEQ ID NO: 14756 - protein, 626 aa, Homo sapiens; identical to SEQ ID NO: 1081

SEQ ID NO: 14757 - protein, 636 aa, Homo sapiens
MAAEEEAAAGGKVLREENQCIAPVVSSRVSPGTRPTAMGSFSSHMTEFPRKRKGSDSDPSQSGIMTEKVVEKLSQNPLTYLLSTRIEISASSGSRVEDGEHQVKMKAFREAHSQTEKRRRDKMNNLIEELSAMIPQCNPMARKLDKLTVLRMAVQHLRSLKGLTNSYVGSNYRPSFLQDNELRHLILKTAEGFLFVVGCERGKILFVSKSVSKILNYDQASLTGQSLFDFLHPKDVAKVKEQLSSFDISPREKLIDAKTGLQVHSNLHAGRTRVYSGSRRSFFCRIKSCKISVKEEHGCLPNSKKKEHRKFYTIHCTGYLRSWPPNIVGMEEERNSKKDNSNFTCLVAIGRLQPYIVPQNSGEINVKPTEFITRFAVNGKFVYVDQRATAILGYLPQELLGTSCYEYFHQDDHNNLTDKHKAVLQSKEKILTDSYKFRAKDGSFVTLKSQWFSFTNPWTKELEYIVSVNTLVLGHSEPGEASFLPCSSQSSEESSRQSCMSVPGMSTGTVLGAGSIGTDIANEILDLQRLQSSSYLDDSSPTGLMKDTHTVNCRSMSNKELFPPSPSEMGELEATRQNQSTVAVHSHEPLLSDGAQLDFDALCDNDDTAMAAFMNYLEAEGGLGDPGDFSDIQWTL

SEQ ID NO: 14758 - protein, 562 aa, Homo sapiens
MSNQYQEEGCSERPECKSKSPTLLSSYCIDSILGRRSPCKMRLLGAAQSLPAPLTSRADPEKAVQGSPKSSSAPFEAELHLPPKLRRLYGPGGGRLLQGAAAAAAAAAAAAAAAATATAGPRGEAPPPPPPTARPGERPDGAGAAAAAAAAAAAAWDTLKISQAPQVSISRSKSYRENGAPFVPPPPALDELGGPGGVTHPEERLGVAGGPGSAPAAGGGTGTEDDEEELLEDEEDEDEEEELLEDDEEELLEDDARALLKEPRRCPVAATGAVAAAAAAAVATEGGELSPKEELLLHPEDAEGKDGEDSVCLSAGSDSEEGLLKRKQRRYRTTFTSYQLEELERAFQKTHYPDVFTREELAMRLDLTEARVQVWFQNRRAKWRKREKAGAQTHPPGLPFPGPLSATHPLSPYLDASPFPPHHPALDSAWTAAAAAAAAAFPSLPPPPGSASLPPSGAPLGLSTFLGAAVFRHPAFISPAFGRLFSTMAPLTSASTAAALLRQPTPAVEGAVASGALADPATAAADRRASSIAALRLKAKEHAAQLTQLNILPGTSTGKEVC

SEQ ID NO: 14759 - protein, 236 aa, Homo sapiens; identical to SEQ ID NO: 1202

SEQ ID NO: 14760 - protein, 193 aa, Homo sapiens
MDGGTLPRSAPPAPPVPVGCAARRRPASPELLRCSRRRRPATAETGGGAAAVARRNERERNRVKLVNLGFQALRQHVPHGGASKKLSKVETLRSAVEYIRALQRLLAEHDAVRNALAGGLRPQAVRPSAPRGPPGTTPVAASPSRASSSPGRGGSSEPGSPRSAYSSDDSGCEGALSPAERELLDFSSWLGGY

SEQ ID NO: 14761 - protein, 180 aa, Homo sapiens [sequence omitted]

SEQ ID NO: 14762 - protein, 172 aa, Homo sapiens
METRKPAERLALPYSLRTAPLGVPGTLPGLPRRDPLRVALRLDAACWEWARSGCARGWQYLPVPLDSAFEPAFLRKRNERERQRVRCVNEGYARLRDHLPRELADKRLSKVETLRAAIDYIKHLQELLERQAWGLEGAAGAVPQRRAECNSDGESKASSAPSPSSEPEEGGS

SEQ ID NO: 14763 - protein, 278 aa, Homo sapiens
MPMGAAERGAGPQSSAAPWAGSEKAAKRGPSKSWYPRAAASDVTCPTGGDGADPKPGPFGGGLALGPAPRGTMNNNFCRALVDRRPLGPPSCMQLGVMPPPRQAPLPPAEPLGNVPFLLYPGPAEPPYYDAYAGVFPYVPFPGAFGVYEYPFEPAFIQKRNERERQRVKCVNEGYARLRGHLPGALAEKRLSKVETLRAAIRYIKYLQELLSSAPDGSTPPASRGLPGTGPCPAPPATPRPDRPGDGEARAPSSLVPESSESSCFSPSPFLESEESWH

SEQ ID NO: 14764 - protein, 2969 aa, Homo sapiens
MDPRNTAMLGLGSDSEGFSRKSPSAISTGTLVSKREVELEKNTKEEEDLRKRNRERNIEAGKDDGLTDAQQQFSVKETNFSEGNLKLKIGLQAKRTKKPPKNLENYVCRPAIKTTIKHPRKALKSGKMTDEKNEHCPSKRDPSKLYKKADDVAAIECQSEEVIRLHSQGENNPLSKKLSPVHSEMADYINATPSTLLGSRDPDLKDRALLNGGTSVTEKLAQLIATCPPSKSSKTKPKKLGTGTTAGLVSKDLIRKAGVGSVAGIIHKDLIKKPTISTAVGLVTKDPGKKPVFNAAVGLVNKDSVKKLGTGTTAVFINKNLGKKPGTITTVGLLSKDSGKKLGIGIVPGLVHKESGKKLGLGTVVGLVNKDLGKKLGSTVGLVAKDCAKKIVASSAMGLVNKDIGKKLMSCPLAGLISKDAINLKAEALLPTQEPLKASCSTNINNQESQELSESLKDSATSKTFEKNVVRQNKESILEKFSVRKEIINLEKEMFNEGTCIQQDSFSSSEKGSYETSKHEKQPPVYCTSPDFKMGGASDVSTAKSPFSAVGESNLPSPSPTVSVNPLTRSPPETSSQLAPNPLLLSSTTELIEEISESVGKNQFTSESTHLNVGHRSVGHSISIECKGIDKEVNDSKTTHIDIPRISSSLGKKPSLTSESSIHTITPSVVNFTSLFSNKPFLKLGAVSASDKHCQVAESLSTSLQSKPLKKRKGRKPRWTKVVARSTCRSPKGLELERSELFKNVSCSSLSNSNSEPAKFMKNIGPPSFVDHDFLKRRLPKLSKSTAPSLALLADSEKPSHKSFATHKLSSSMCVSSDLLSDIYKPKRGRPKSKEMPQLEGPPKRTLKIPASKVFSLQSKEEQEPPILQPEIEIPSFKQGLSVSPFPKKRGRPKRQMRSPVKMKPPVLSVAPFVATESPSKLESESDNHRSSSDFFESEDQLQDPDDLDDSHRPSVCSMSDLEMEPDKKITKRNNGQLMKTIIRKINKMKTLKRKKLLNQILSSSVESSNKGKVQSKLHNTVSSLAATFGSKLGQQINVSKKGTIYIGKRRGRKPKTVLNGILSGSPTSLAVLEQTAQQAAGSALGQILPPLLPSSASSSEILPSPICSQSSGTSGGQSPVSSDAGFVEPSSVPYLHLHSRQGSMIQTLAMKKASKGRRRLSPPTLLPNSPSHLSELTSLKEATPSPISESHSDETIPSDSGIGTDNNSTSDRAEKFCGQKKRRHSFEHVSLIPPETSTVLSSLKEKHKHKCKRRNHDYLSYDKMKRQKRKRKKKYPQLRNRQDPDFIAELEELISRLSEIRITHRSHHFIPRDLLPTIFRINFNSFYTHPSFPLDPLHYIRKPDLKKKRGRPPKMREAMAEMPFMHSLSFPLSSTGFYPSYGMPYSPSPLTAAPIGLGYYGRYPPTLYPPPPSPSFTTPLPPPSYMHAGHLLLNPAKYHKKKHKLLRQEAFLTTSRTPLLSMSTYPSVPPEMAYGWMVEHKHRHRHKHREHRSSEQPQVSMDTGSSRSVLESLKRYRFGKDAVGERYKHKEKHRCHMSCPHLSPSKSLINREEQWVHREPSESSPLALGLQTPLQIDCSESSPSLSLGGFTPNSEPASSDEHTNLFTSAIGSCRVSNPNSSGRKKLTDSPGLFSAQDTSLNRLHRKESLPSNERAVQTLAGSQPTSDKPSQRPSESTNCSPTRKRSSSESTSSTVNGVPSRSPRLVASGDDSVDSLLQRMVQNEDQEPMEKSIDAVIATASAPPSSSPGRSHSKDRTLGKPDSLLVPAVTSDSCNNSISLLSEKLTSSCSPHHIKRSVVEAMQRQARKMCNYDKILATKKNLDHVNKILKAKKLQRQARTGNNFVKRRPGRPRKCPLQAVVSMQAFQAAQFVNPELNRDEEGAALHLSPDTVTDVIEAVVQSVNLNPEHKKGLKRKGWLLEEQTRKKQKPLPEEEEQENNKSFNEAPVEIPSPSETPAKPSEPESTLQPVLSLIPREKKPPRPPKKKYQKAGLYSDVYKTTDPKSRLIQLKKEKLEYTPGEHEYGLFPAPIHVVFFVSGKYLRQKRIDFQLPYDILWQWKHNQLYKKPDVPLYKKIRSNVYVDVKPLSGYEATTCNCKKPDDDTRKGCVDDCLNRMIFAECSPNTCPCGEQCCNQRIQRHEWVQCLERFRAEEKGWGIRTKEPLKAGQFIIEYLGEVVSEQEFRNRMIEQYHNHSDHYCLNLDSGMVIDSYRMGNEARFINHSCDPNCEMQKWSVNGVYRIGLYALKDMPAGTELTYDYNFHSFNVEKQQLCKCGFEKCRGIIGGKSQRVNGLTSSKNSQPMATHKKSGRSKEKRKSKHKLKKRRGHLSEEPSENINTPTRLTPQLQMKPMSNRERNFVLKHHVFLVRNWEKIRQKQEEVKHTSDNIHSASLYTRWNGICRDDGNIKSDVFMTQFSALQTARSVRTRRLAAAEENIEVARAARLAQIFKEICDGIISYKDSSRQALAAPLLNLPPKKKNADYYEKISDPLDLITIEKQILTGYYKTVEAFDADMLKVFRNAEKYYGRKSPVGRDVCRLRKAYYNARHEASAQIDEIVGETASEADSSETSVSEKENGHEKDDDVIRCICGLYKDEGLMIQCDKCMVWQHCDCMGVNSDVEHYLCEQCDPRPVDREVPMIPRPHYAQPGCVYFICLLRDDLLLRQGDCVYLMRDSRRTPDGHPVRQSYRLLSHINRDKLDIFRIEKLWKNEKEERFAFGHHYFRPHETHHSPSRRFYHNELFRVPLYEIIPLEAVVGTCCVLDLYTYCKGRPKGVKEQDVYICDYRLDKSAHLFYKIHRNRYPVCTKPYAFDHFPKKLTPKKDFSPHYVPDNYKRNGGRSSWKSERSKPPLKDLGQEDDALPLIEEVLASQEQAANEIPSLEEPEREGATANVSEGEKKTEESSQEPQSTCTPEERRHNQRERLNQILLNLLEKIPGKNAIDVTYLLEEGSGRKLRRRTLFIPENSFRK

SEQ ID NO: 14765 - protein, 628 aa, Homo sapiens
MAAAGAGPGQEAGAGPGPGAVANATGAEEGEMKPVAAGAAAPPGEGISAAPTVEPSSGEAEGGEANLVDVSGGLETESSNGKDTLEGAGDTSEVMDTQAGSVDEENGRQLGEVELQCGICTKWFTADTFGIDTSSCLPFMTNYSFHCNVCHHSGNTYFLRKQANLKEMCLSALANLTWQSRTQDEHPKTMFSKDKDIIPFIDKYWECMTTRQRPGKMTWPNNIVKTMSKERDVFLVKEHPDPGSKDPEEDYPKFGLLDQDLSNIGPAYDNQKQSSAVSTSGNLNGGIAAGSSGKGRGAKRKQQDGGTTGTTKKARSDPLFSAQRLPPHGYPLEHPFNKDGYRYILAEPDPHAPDPEKLELDCWAGKPIPGDLYRACLYERVLLALHDRAPQLKISDDRLTVVGEKGYSMVRASHGVRKGAWYFEITVDEMPPDTAARLGWSQPLGNLQAPLGYDKFSYSWRSKKGTKFHQSIGKHYSSGYGQGDVLGFYINLPEDTETAKSLPDTYKDKALIKFKSYLYFEEKDFVDKAEKSLKQTPHSEIIFYKNGVNQGVAYKDIFEGVYFPAISLYKSCTVSINFGPCFKYPPKDLTYRPMSDMGWGAVVEHTLADVLYHVETEVDGRRSPPWEP

SEQ ID NO: 14766 - protein, 271 aa, Homo sapiens
MEDSHKSTTSETAPQPGSAVQGAHISHIAQQVSSLSESEESQDSSDSIGSSQKAHGILARRPSYRKILKDLSSEDTRGRKGDGENSGVSAAVTSMSVPTPIYQTSSGQYIAIAPNGALQLASPGTDGVQGLQTLTMTNSGSTQQGTTILQYAQTSDGQQILVPSNQVVVQTASGDMQTYQIRTTPSATSLPQTVVMTSPVTLTSQTTKTDDPQLKREIRLMKNREAARECRRKKKEYVKCLENRVAVLENQNKTLIEELKTLKDLYSNKSV

SEQ ID NO: 14767 - protein, 505 aa, Homo sapiens
MKFKLHVNSARQYKDLWNMSDDKPFLCTAPGCGQRFTNEDHLAVHKHKHEMTLKFGPARNDSVIVADQTPTPTRFLKNCEEVGLFNELASPFENEFKKASEDDIKKMPLDLSPLATPIIRSKIEEPSVVETTHQDSPLPHPESTTSDEKEVPLAQTAQPTSAIVRPASLQVPNVLLTSSDSSVIIQQAVPSPTSSTVITQAPSSNRPIVPVPGPFPLLLHLPNGQTMPVAIPASITSSNVHVPAAVPLVRPVTMVPSVPGIPGPSSPQPVQSEAKMRLKAALTQQHPPVTNGDTVKGHGSGLVRTQSEESRPQSLQQPATSTTETPASPAHTTPQTQSTSGRRRRAANEDPDEKRRKFLERNRAAASRCRQKRKVWVQSLEKKAEDLSSLNGQLQSEVTLLRNEVAQLKQLLLAHKDCPVTAMQKKSGYHTADKDDSSEDISVPSSPHTEAIQHSSVSTSNGVSSTSKAEAVATSVLTQMADQSTEPALSQIVMAPSSQSQPSGS

SEQ ID NO: 14768 - protein, 181 aa, Homo sapiens
MMLQHPGQVSASEVSASAIVPCLSPPGSLVFEDFANLTPFVKEELRFAIQNKHLCHRMSSALESVTVSDRPLGVSITKAEVAPEEDERKKRRRERNKIAAAKCRNKKKEKTECLQKESEKLESVNAELKAQIEELKNEKQHLIYMLNLHRPTCIVRAQNGRTPEDERNLFIQQIKEGTLQS

SEQ ID NO: 14769 - protein, 351 aa, Homo sapiens
MTEMSFLSSEVLVGDLMSPFDQSGLGAEESLGLLDDYLEVAKHFKPHGFSSDKAKAGSSEWLAVDGLVSPSNNSKEDAFSGTDWMLEKMDLKEFDLDALLGIDDLETMPDDLLTTLDDTCDLFAPLVQETNKQPPQTVNPIGHLPESLTKPDQVAPFTFLQPLPLSPGVLSSTPDHSFSLELGSEVDITEGDRKPDYTAYVAMIPQCIKEEDTPSDNDSGICMSPESYLGSPQHSPSTRGSPNRSLPSPGVLCGSARPKPYDPPGEKMVAAKVKGEKLDKKLKKMEQNKTAATRYRQKKRAEQEALTGECKELEKKNEALKERADSLAKEIQYLKDLIEEVRKARGKKRVP

SEQ ID NO: 14770 - protein, 282 aa, Homo sapiens
MSLLATLGLELDRALLPASGLGWLVDYGKLPPAPAPLAPYEVLGGALEGGLPVGGEPLAGDGFSDWMTERVDFTALLPLEPPLPPGTLPQPSPTPPDLEAMASLLKKELEQMEDFFLDAPPLPPPSPPPLPPPPLPPAPSLPLSLPSFDLPQPPVLDTLDLLAIYCRNEAGQEEVGMPPLPPPQQPPPPSPPQPSRLAPYPHPATTRGDRKQKKRDQNKSAALRYRQRKRAEGEALEGECQGLEARNRELKERAESVEREIQYVKDLLIEVYKARSQRTRSC

SEQ ID NO: 14771 - protein, 670 aa, Homo sapiens
MGEPAGVAGTMESPFSPGLFHRLDEDWDSALFAELGYFTDTDELQLEAANETYENNFDNLDFDLDLMPWESDIWDINNQICTVKDIKAEPQPLSPASSSYSVSSPRSVDSYSSTQHVPEELDLSSSSQMSPLSLYGENSNSLSSAEPLKEDKPVTGPRNKTENGLTPKKKIQVNSKPSIQPKPLLLPAAPKTQTNSSVPAKTIIIQTVPTLMPLAKQQPIISLQPAPTKGQTVLLSQPTVVQLQAPGVLPSAQPVLAVAGGVTQLPNHVVNVVPAPSANSPVNGKLSVTKPVLQSTMRNVGSDIAVLRRQQRMIKNRESACQSRKKKKEYMLGLEARLKAALSENEQLKKENGTLKRQLDEVVSENQRLKVPSPKRRVVCVMIVLAFIILNYGPMSMLEQDSRRMNPSVSPANQRRHLLGFSAKEAQDTSDGIIQKNSYRYDHSVSNDKALMVLTEEPLLYIPPPPCQPLINTTESLRLNHELRGWVHRHEVERTKSRRMTNNQQKTRILQGALEQGSNSQLMAVQYTETTSSISRNSGSELQVYYASPRSYQDFFEAIRRRGDTFYVVSFRRDHLLLPATTHNKTTRPKMSIVLPAININENVINGQDYEVMMQIDCQVMDTRILHIKSSSVPPYLRDQQRNQTNTFFGSPPAATEATHVVSTIPESLQ

SEQ ID NO: 14772 - protein, 703 aa, Homo sapiens
MAELMLLSEIADPTRFFTDNLLSPEDWGLQNSTLYSGLDEVAEEQTQLFRCPEQDVPFDGSSLDVGMDVSPSEPPWELLPIFPDLQVKSEPSSPCSSSSLSSESSRLSTEPSSEALGVGEVLHVKTESLAPPLCLLGDDPTSSFETVQINVIPTSDDSSDVQTKIEPVSPCSSVNSEASLLSADSSSQAFIGEEVLEVKTESLSPSGCLLWDVPAPSLGAVQISMGPSLDGSSGKALPTRKPPLQPKPVVLTTVPMPSRAVPPSTTVLLQSLVQPPPVSPVVLIQGAIRVQPEGPAPSLPRPERKSIVPAPMPGNSCPPEVDAKLLKRQQRMIKNRESACQSRRKKKEYLQGLEARLQAVLADNQQLRRENAALRRRLEALLAENSELKLGSGNRKVVCIMVFLLFIAFNFGPVSISEPPSAPISPRMNKGEPQPRRHLLGFSEQEPVQGVEPLQGSSQGPKEPQPSPTDQPSFSNLTAFPGGAKELLLRDLDQLFLSSDCRHFNRTESLRLADELSGWVQRHQRGRRKIPQRAQERQKSQPRKKSPPVKAVPIQPPGPPERDSVGQLQLYRHPDRSQPAFLDAIDRREDTFYVVSFRRDHLLLPAISHNKTSRPKMSLVMPAMAPNETLSGRGAPGDYEEMMQIECEVMDTRVIHIKTSTVPPSLRKQPSPTPGNATGGPLPVSAASQAHQASHQPLYLNHP

SEQ ID NO: 14773 - protein, 494 aa, Homo sapiens
MGDDRPFVCNAPGCGQRFTNEDHLAVHKHKHEMTLKFGPARTDSVIIADQTPTPTRFLKNCEEVGLFNELASSFEHEFKKAADEDEKKARSRTVAKKLVAAAGPLDMSLPSTPDIKIKEEEPVEVDSSPPDSPASSPCSPPLKEKEVTPKPVLISTPTPTIVRPGSLPLHLGYDPLHPTLPSPTSVITQAPPSNRQMGSPTGSLPLVMHLANGQTMPVLPGPPVQMPSVISLARPVSMVPNIPGIPGPPVNSSGSISPSGHPIPSEAKMRLKATLTHQVSSINGGCGMVVGTASTMVTARPEQSQILIQHPDAPSPAQPQVSPAQPTPSTGGRRRRTVDEDPDERRQRFLERNRAAASRCRQKRKLWVSSLEKKAEELTSQNIQLSNEVTLLRNEVAQLKQLLLAHKDCPVTALQKKTQGYLESPKESSEPTGSPAPVIQHSSATAPSNGLSVRSAAEAVATSVLTQMASQRTELSMPIQSHVIMTPQSQSAGR

SEQ ID NO: 14774 - protein, 354 aa, Homo sapiens
MSRLLHAEEWAEVKELGDHHRQPQPHHLPQPPPPPQPPATLQAREHPVYPPELSLLDSTDPRAWLAPTLQGICTARAAQYLLHSPELGASEAAAPRDEVDGRGELVRRSSGGASSSKSPGPVKVREQLCKLKGGVVVDELGCSRQRAPSSKQVNGVQKQRRLAANARERRRMHGLNHAFDQLRNVIPSFNNDKKLSKYETLQMAQIYINALSELLQTPSGGEQPPPPPASCKSDHHHLRTAASYEGGAGNATAAGAQQASGGSQRPTPPGSCRTRFSAPASAGGYSVQLDALHFSTFEDSALTAMMAQKNLSPSLPGSILQPVQEENSKTSPRSHRSDGEFSPHSHYSDSDEAS

SEQ ID NO: 14775 - protein, 152 aa, Homo sapiens
MKSCKPSGPPAGARVAPPCAGGTECAGTCAGAGRLESAARRRLAANARERRRMQGLNTAFDRLRRVVPQWGQDKKLSKYETLQMALSYIMALTRILAEAERFGSERDWVGLHCEHFGRDHYLPFPGAKLPGESELYSQRLFGFQPEPFQMAT

SEQ ID NO: 14776 - protein, 321 aa, Homo sapiens
MKHIPVLEDGPWKTVCVKELNGLKKLKRKGKEPARRANGYKTFRLDLEAPEPRAVATNGLRDRTHRLQPVPVPVPVPVPVAPAVPPRGGTDTAGERGGSRAPEVSDARKRCFALGAVGPGLPTPPPPPPPAPQSQAPGGPEAQPFREPGLRPRILLCAPPARPAPSAPPAPPAPPESTVRPAPPTRPGESSYSSISHVIYNNHQDSSASPRKRPGEATAASSEIKALQQTRRLLANARERTRVHTISAAFEALRKQVPCYSYGQKLSKLAILRIACNYILSLARLADLDYSADHSNLSFSECVQRCTRTLQAEGRAKKRKE

SEQ ID NO: 14777 - protein, 2492 aa, Homo sapiens
MTAEPMSESKLNTLVQKLHDFLAHSSEESEETSSPPRLAMNQNTDKISGSGSNSDMMENSKEEGTSSSEKSKSSGSSRSKRKPSIVTKYVESDDEKPLDDETVNEDASNENSENDITMQSLPKGTVIVQPEPVLNEDKDDFKGPEFRSRSKMKTENLKKRGEDGLHGIVSCTACGQQVNHFQKDSIYRHPSLQVLICKNCFKYYMSDDISRDSDGMDEQCRWCAEGGNLICCDFCHNAFCKKCILRNLGRKELSTIMDENNQWYCYICHPEPLLDLVTACNSVFENLEQLLQQNKKKIKVDSEKSNKVYEHTSRFSPKKTSSNCNGEEKKLDDSCSGSVTYSYSALIVPKEMIKKAKKLIETTANMNSSYVKFLKQATDNSEISSATKLRQLKAFKSVLADIKKAHLALEEDLNSEFRAMDAVNKEKNTKEHKVIDAKFETKARKGEKPCALEKKDISKSEAKLSRKQVDSEHMHQNVPTEEQRTNKSTGGEHKKSDRKEEPQYEPANTSEDLDMDIVSVPSSVPEDIFENLETAMEVQSSVDHQGDGSSGTEQEVESSSVKLNISSKDNRGGIKSKTTAKVTKELYVKLTPVSLSNSPIKGADCQEVPQDKDGYKSCGLNPKLEKCGLGQENSDNEHLVENEVSLLLEESDLRRSPRVKTTPLRRPTETNPVTSNSDEECNETVKEKQKLSVPVRKKDKRNSSDSAIDNPKPNKLPKSKQSETVDQNSDSDEMLAILKEVSRMSHSSSSDTDINEIHTNHKTLYDLKTQAGKDDKGKRKRKSSTSGSDFDTKKGKSAKSSIISKKKRQTQSESSNYDSELEKEIKSMSKIGAARTTKKRIPNTKDFDSSEDEKHSKKGMDNQGHKNLKTSQEGSSDDAERKQERETFSSAEGTVDKDTTIMELRDRLPKKQQASASTDGVDKLSGKEQSFTSLEVRKVAETKEKSKHLKTKTCKKVQDGLSDIAEKFLKKDQSDETSEDDKKQSKKGTEEKKKPSDFKKKVIKMEQQYESSSDGTEKLPEREEICHFPKGIKQIKNGTTDGEKKSKKIRDKTSKKKDELSDYAEKSTGKGDSCDSSEDKKSKNGAYGREKKRCKLLGKSSRKRQDCSSSDTEKYSMKEDGCNSSDKRLKRIELRERRNLSSKRNTKEIQSGSSSSDAEESSEDNKKKKQRTSSKKKAVIVKEKKRNSLRTSTKRKQADITSSSSSDIEDDDQNSIGEGSSDEQKIKPVTENLVLSSHTGFCQSSGDEALSKSVPVTVDDDDDDNDPENRIAKKMLLEEIKANLSSDEDGSSDDEPEEGKKRTGKQNEENPGDEEAKNQVNSESDSDSEESKKPRYRHRLLRHKLTVSDGESGEEKKTKPKEHKEVKGRNRRKVSSEDSEDSDFQESGVSEEVSESEDEQRPRTRSAKKAELEENQRSYKQKKKRRRIKVQEDSSSENKSNSEEEEEEKEEEEEEEEEEEEEEEDENDDSKSPGKGRKKIRKILKDDKLRTETQNALKEEEERRKRIAEREREREKLREVIEIEDASPTKCPITTKLVLDEDEETKEPLVQVHRNMVIKLKPHQVDGVQFMWDCCCESVKKTKKSPGSGCILAHCMGLGKTLQVVSFLHTVLLCDKLDFSTALVVCPLNTALNWMNEFEKWQEGLKDDEKLEVSELATVKRPQERSYMLQRWQEDGGVMIIGYEMYRNLAQGRNVKSRKLKEIFNKALVDPGPDFVVCDEGHILKNEASAVSKAMNSIRSRRRIILTGTPLQNNLIEYHCMVNFIKENLLGSIKEFRNRFINPIQNGQCADSTMVDVRVMKKRAHILYEMLAGCVQRKDYTALTKFLPPKHEYVLAVRMTSIQCKLYQYYLDHLTGVGNNSEGGRGKAGAKLFQDFQMLSRIWTHPWCLQLDYISKENKGYFDEDSMDEFIASDSDETSMSLSSDDYTKKKKKGKKGKKDSSSSGSGSDNDVEVIKVWNSRSRGGGEGNVDETGNNPSVSLKLEESKATSSSNPSSPAPDWYKDFVTDADAEVLEHSGKMVLLFEILRMAEEIGDKVLVFSQSLISLDLIEDFLELASREKTEDKDKPLIYKGEGKWLRNIDYYRLDGSTTAQSRKKWAEEFNDETNVRGRLFIISTKAGSLGINLVAANRVIIFDASWNPSYDIQSIFRVYRFGQTKPVYVYRFLAQGTMEDKIYDRQVTKQSLSFRVVDQQQVERHFTMNELTELYTFEPDLLDDPNSEKKKKRDTPMLPKDTILAELLQIHKEHIVGYHEHDSLLDHKEEEELTEEERKAAWAEYEAEKKGLTMRFNIPTGTNLPPVSFNSQTPYIPFNLGALSAMSNQQLEDLINQGREKVVEATNSVTAVRIQPLEDIISAVWKENMNLSEAQVQALALSRQASQELDVKRREAIYNDVLTKQQMLISCVQRILMNRRLQQQYNQQQQQQMTYQQATLGHLMMPKPPNLIMNPSNYQQIDMRGMYQPVAGGMQPPPLQRAPPPMRSKNPGPSQGKSM

SEQ ID NO: 14778 - protein, 892 aa, Homo sapiens
MSERAADDVRGEPRRAAAAAGGAAAAAARQQQQQQQQQQPPPPQPQRQQHPPPPPRRTRPEDGGPGAASTSAAAMATVGERRPLPSPEVMLGQSWNLWVEASKLPGKDGTELDESFKEFGKNREVMGLCREDMPIFGFCPAHDDFYLVVCNDCNQVVKPQAFQSHYERRHSSSSKPPLAVPPTSVFSFFPSLSKSKGGSASGSNRSSSGGVLSASSSSSKLLKSPKEKLQLRGNTRPMHPIQQSRVPHGRIMTPSVKVEKIHPKMDGTLLKSAVGPTCPATVSSLVKPGLNCPSIPKPTLPSPGQILNGKGLPAPPTLEKKPEDNSNNRKFLNKRLSEREFDPDIHCGVIDLDTKKPCTRSLTCKTHSLTQRRAVQGRRKRFDVLLAEHKNKTREKELIRHPDSQQPPQPLRDPHPAPPRTSQEPHQNPHGVIPSESKPFVASKPKPHTPSLPRPPGCPAQQGGSAPIDPPPVHESPHPPLPATEPASRLSSEEGEGDDKEESVEKLDCHYSGHHPQPASFCTFGSRQIGRGYYVFDSRWNRLRCALNLMVEKHLNAQLWKKIPPVPSTTSPISTRIPHRTNSVPTSQCGVSYLAAATVSTSPVLLSSTCISPNSKSVPAHGTTLNAQPAASGAMDPVCSMQSRQVSSSSSSPSTPSGLSSVPSSPMSRKPQKLKSSKSLRPKESSGNSTNCQNASSSTSGGSGKKRKNSSPLLVHSSSSSSSSSSSSHSMESFRKNCVAHSGPPYPSTVTSSHSIGLNCVTNKANAVNVRHDQSGRGPPTGSPAESIKRMSVMVNSSDSTLSLGPFIHQSNELPVNSHGSFSHSHTPLDKLIGKKRKCSPSSSSINNSSSKPTKVAKVPAVNNVHMKHTGTIPGAQGLMNSSLLHQPKARP

SEQ ID NO: 14779 - protein, 736 aa, Homo sapiens
MSLSENSVFAYESSVHSTNVLLSLNDQRKKDVLCDVTIFVEGQRFRAHRSVLAACSSYFHSRIVGQADGELNITLPEEVTVKGFEPLIQFAYTAKLILSKENVDEVCKCVEFLSVHNIEESCFQFLKFKFLDSTADQQECPRKKCFSSHCQKTDLKLSLLDQRDLETDEVEEFLENKNVQTPQCKLRRYQGNAKASPPLQDSASQTYESMCLEKDAALALPSLCPKYRKFQKAFGTDRVRTGESSVKDIHASVQPNERSENECLGGVPECRDLQVMLKCDESKLAMEPEETKKDPASQCPTEKSEVTPFPHNSSIDPHGLYSLSLLHTYDQYGDLNFAGMQNTTVLTEKPLSGTDVQEKTFGESQDLPLKSDLGTREDSSVASSDRSSVEREVAEHLAKGFWSDICSTDTPCQMQLSPAVAKDGSEQISQKRSECPWLGIRISESPEPGQRTFTTLSSVNCPFISTLSTEGCSSNLEIGNDDYVSEPQQEPCPYACVISLGDDSETDTEGDSESCSAREQECEVKLPFNAQRIISLSRNDFQSLLKMHKLTPEQLDCIHDIRRRSKNRIAAQRCRKRKLDCIQNLESEIEKLQSEKESLLKERDHILSTLGETKQNLTGLCQKVCKEAALSQEQIQILAKYSAADCPLSFLISEKDKSTPDGELALPSIFSLSDRPPAVLPPCARGNSEPGYARGQESQQMSTATSEQAGPAEQCRQSGGISDFCQQMTDKCTTDE

SEQ ID NO: 14780 - protein, 1249 aa, Homo sapiens
MSSMWSEYTIGGVKIYFPYKAYPSQLAMMNSILRGLNSKQHCLLESPTGSGKSLALLCSALAWQQSLSGKPADEGVSEKAEVQLSCCCACHSKDFTNNDMNQGTSRHFNYPSTPPSERNGTSSTCQDSPEKTTLAAKLSAKKQASIYRDENDDFQVEKKRIRPLETTQQIRKRHCFGTEVHNLDAKVDSGKTVKLNSPLEKINSFSPQKPPGHCSRCCCSTKQGNSQESSNTIKKDHTGKSKIPKIYFGTRTHKQIAQITRELRRTAYSGVPMTILSSRDHTCVHPEVVGNFNRNEKCMELLDGKNGKSCYFYHGVHKISDQHTLQTFQGMCKAWDIEELVSLGKKLKACPYYTARELIQDADIIFCPYNYLLDAQIRESMDLNLKEQVVILDEAHNIEDCARESASYSVTEVQLRFARDELDSMVNNNIRKKDHEPLRAVCCSLINWLEANAEYLVERDYESACKIWSGNEMLLTLHKMGITTATFPILQGHFSAVLQKEEKISPIYGKEEAREVPVISASTQIMLKGLFMVLDYLFRQNSRFADDYKIAIQQTYSWTNQIDISDKNGLLVLPKNKKRSRQKTAVHVLNFWCLNPAVAFSDINGKVQTIVLTSGTLSPMKSFSSELGVTFTIQLEANHIIKNSQVWVGTIGSGPKGRNLCATFQNTETFEFQDEVGALLLSVCQTVSQGILCFLPSYKLLEKLKERWLSTGLWHNLELVKTVIVEPQGGEKTNFDELLQVYYDAIKYKGEKDGALLVAVCRGKVSEGLDFSDDNARAVITIGIPFPNVKDLQVELKRQYNDHHSKLRGLLPGRQWYEIQAYRALNQALGRCIRHRNDWGALILVDDRFRNNPSRYISGLSKWVRQQIQHHSTFESALESLAEFSKKHQKVLNVSIKDRTNIQDNESTLEVTSLKYSTPPYLLEAASHLSPENFVEDEAKICVQELQCPKIITKNSPLPSSIISRKEKNDPVFLEEAGKAEKIVISRSTSPTFNKQTKRVSWSSFNSLGQYFTGKIPKATPELGSSENSASSPPRFKTEKMESKTVLPFTDKCESSNLTVNTSFGSCPQSETIISSLKIDATLTRKNHSEHPLCSEEALDPDIELSLVSEEDKQSTSNRDFETEAEDESIYFTPELYDPEDTDEEKNDLAETDRGNRLANNSDCILAKDLFEIRTIKEVDSAREVKAEDCIDTKLNGILHIEESKIDDIDGNVKTTWINELELGKTHEIEIKNFKPSPSKNKGMFPGFK

SEQ ID NO: 14781 - protein, 841 aa, Homo sapiens
MSVDEKPDSPMYVYESTVHCTNILLGLNDQRKKDILCDVTLIVERKEFRAHRAVLAACSEYFWQALVGQTKNDLVVSLPEEVTARGFGPLLQFAYTAKLLLSRENIREVIRCAEFLRMHNLEDSCFSFLQTQLLNSEDGLFVCRKDAACQRPHEDCENSAGEEEDEEEETMDSETAKMACPRDQMLPEPISFEAAAIPVAEKEEALLPEPDVPTDTKESSEKDALTQYPRYKKYQLACTKNVYNASSHSTSGFASTFREDNSSNSLKPGLARGQIKSEPPSEENEEESITLCLSGDEPDAKDRAGDVEMDRKQPSPAPTPTAPAGAACLERSRSVASPSCLRSLFSITKSVELSGLPSTSQQHFARSPACPFDKGITQGDLKTDYTPFTGNYGQPHVGQKEVSNFTMGSPLRGPGLEALCKQEGELDRRSVIFSSSACDQVSTSVHSYSGVSSLDKDLSEPVPKGLWVGAGQSLPSSQAYSHGGLMADHLPGRMRPNTSCPVPIKVCPRSPPLETRTRTSSSCSSYSYAEDGSGGSPCSLPLCEFSSSPCSQGARFLATEHQEPGLMGDGMYNQVRPQIKCEQSYGTNSSDESGSFSEADSESCPVQDRGQEVKLPFPVDQITDLPRNDFQMMIKMHKLTSEQLEFIHDVRRRSKNRIAAQRCRKRKLDCIQNLECEIRKLVCEKEKLLSERNQLKACMGELLDNFSCLSQEVCRDIQSPEQIQALHRYCPVLRPMDLPTASSINPAPLGAEQNIAASQCAVGENVPCCLEPGAAPPGPPWAPSNTSENCTSGRRLEGTDPGTFSERGPPLEPRSQTVTVDFCQEMTDKCTTDEQPRKDYT

SEQ ID NO: 14782 - protein, 327 aa, Homo sapiens
MEGSNGFGIDSILSHRAGSPALPKGDPLLGDCRSPLELSPRSESSSDCSSPASPGRDCLETGTPRPGGASGPGLDSHLQPGQLSAPAQSRTVTSSFLIRDILADCKPLAACAPYSSSGQPAAPEPGGRLAAKAAEDFRDKLDKSGSNASSDSEYKVKEEGDREISSSRDSPPVRLKKPRKARTAFTDHQLAQLERSFERQKYLSVQDRMELAASLNLTDTQVKTWYQNRRTKWKRQTAVGLELLAEAGNYSALQRMFPSPYFYPQSLVSNLDPGAALYLYRGPSAPPPALQRPLVPRILIHGLQGASEPPPPLPPLAGVLPRAAQPR

SEQ ID NO: 14783 - protein, 387 aa, Homo sapiens
MTMEGASGSSFGIDTILSSASSGSPGMMNGDFRPLGEARTADFRSQATPSPCSEIDTVGTAPSSPISVTMEPPEPHLVADATQHHHHLHHSQQPPPPAAAPTQSLQPLPQQQQPLPPQQPPPPPPQQLGSAASAPRTSTSSFLIKDILGDSKPLAACAPYSTSVSSPHHTPKQESNAVHESFRPKLEQEDSKTKLDKREDSQSDIKCHGTKEEGDREITSSRESPPVRAKKPRKARTAFSDHQLNQLERSFERQKYLSVQDRMDLAAALNLTDTQVKTWYQNRRTKWKRQTAVGLELLAEAGNYSALQRMFPSPYFYHPSLLGSMDSTTAAAAAAAMYSSMYRTPPAPHPQLQRPLVPRVLIHGLGPGGQPALNPLSSPIPGTPHPR

SEQ ID NO: 14784 - protein, 254 aa, Homo sapiens
MQRPGEPGAARFGPPEGCADHRPHRYRSFMIEEILTEPPGPKGAAPAAAAAAAGELLKFGVQALLAARPFHSHLAVLKAEQAAVFKFPLAPLGCSGLSSALLAAGPGLPGAAGAPHLPLELQLRGKLEAAGPGEPGTKAKKGRRSRTVFTELQLMGLEKRFEKQKYLSTPDRIDLAESLGLSQLQVKTWYQNRRMKWKKIVLQGGGLESPTKPKGRPKKNSIPTSEQLTEQERAKDAEKPAEVPGEPSDRSRED

SEQ ID NO: 14785 - protein, 279 aa, Homo sapiens
MHCHAELRLSSPGQLKAARRRYKTFMIDEILSKETCDYFEKLSLYSVCPSLVVRPKPLHSCTGSPSLRAYPLLSVITRQPTVISHLVPATPGIAQALSCHQVTEAVSAEAPGGEALASSESETEQPTPRQKKPRRSRTIFTELQLMGLEKKFQKQKYLSTPDRLDLAQSLGLTQLQVKTWYQNRRMKWKKMVLKGGQEAPTKPKGRPKKNSIPTSEEIEAEEKMNSQAQGQEQLEPSQGQEELCEAQEPKARDVPLEMAEPPDPPQELPIPSSEPPPLS

SEQ ID NO: 14786 - protein, 125 aa, Homo sapiens
MPHSSDSSDSSFSRSPPPGKQDSSDDVRRVQRREKNRIAAQKSRQRQTQKADTLHLESEDLEKQNAALRKEIKQLTEELKYFTSVLNSHEPLCSVLAASTPSPPEVVYSAHAFHQPHVSSPRFQP

SEQ ID NO: 14787 - protein, 274 aa, Homo sapiens
MHLCGGNGLLTQTDPKEQQRQLKKQKNRAAAQRSRQKHTDKADALHQQHESLEKDNLALRKEIQSLQAELAWWSRTLHVHERLCPMDCASCSAPGLLGCWDQAEGLLGPGPQGQHGCREQLELFQTPGSCYPAQPLSPGPQPHDSPSLLQCPLPSLSLGPAVVAEPPVQLSPSPLLFASHTGSSLQGSSSKLSALQPSLTAQTAPPQPLELEHPTRGKLGSSPDNPSSALGLARLQSREHKPALSAATWQGLVVDPSPHPLLAFPLLSSAQVHF

SEQ ID NO: 14788 - protein, 127 aa, Homo sapiens
MSQGLPAAGSVLQRSVAAPGNQPQPQPQQQSPEDDDRKVRRREKNRVAAQRSRKKQTQKADKLHEEYESLEQENTMLRREIGKLTEELKHLTEALKEHEKMCPLLLCPMNFVPVPPRPDPVAGCLPR

SEQ ID NO: 14789 - protein, 941 aa, Homo sapiens
MKGSNRNKDHSAEGEGVGKRPKRKCLQWHPLLAKKLLDFSEEEEEEDEEEDIDKVQLLGADGLEQDVGETEDDESPEQRARRPMNAFLLFCKRHRSLVRQEHPRLDNRGATKILADWWAVLDPKEKQKYTDMAKEYKDAFMKANPGYKWCPTTNKPVKSPTPTVNPRKKLWAFPSDSSRDLPSPKKAKTEEMPQLNFGMADPTQMGGLSMLLLAGEHALGTPEVSSGTCRPDVSESPELRQKSPLFQFAEISSSTSHSDASTKQCQTSALFQFAEISSNTSQLGGAEPVKRCGKSALFQLAEMCLASEGMKMEESKLIKAKESDGGRIKELEKGKEEKEIKMEKTDETRLQKEAEFEKSAKENLRDSKELRNFEALQIDDIMAIKMEDPKEIRKEELEEDHKCSHFPDFSYSASSKIIISDVPSRKDHMCHPHGIMIIEDPAALNKPEKLKKKKKKSKMDRHGNDKSTPKKTCKKRQSSESDIESVIYTIEAVAKGDWGIEKLGDTPRKKVRTSSSGKGSILDAKPPKKKVKSREKKMSKEKSSDTTKESRPPDFISISASKNISGETPEGIKAEPLTPMEDALPPSLSGQAKPEDSDCHRKIETCGSRKSERSCKGALYKTLVSEGMLTSLRANVDRGKRSSGKGNSSDHEGCWNEESWTFSQSGTSGSKKFKKTKPKEDCLLGSAKLDEEFEKKFNSLPQYSPVTFDRKCVPVPRKKKKTGNVSSEPTKTSKGPFQSQKKNLFHKIVSKYKHKKEKPNVPEKGSGDKWSNKQLFLDAIHPTEAIFSEDRNTMEPVHKVKNIPSIFNTPEPTTTQEPLVGSQKRKARKTKITHLVRTADGRVSPAGGTLDDKPKEQLQRSLPKATETDCNDKCSHNTEVGETRSSTPEMPAVSAFFSLAALAEVAAMENVHRGQRSTPLTHDGQPKEMPQAPVLISCADQ

SEQ ID NO: 14790 - protein, 835 aa, Homo sapiens
MSRRKQGKPQHLSKREFSPEPLEAILTDDEPDHGPLGAPEGDHDLLTCGQCQMNFPLGDILIFIEHKRKQCNGSLCLEKAVDKPPSPSPIEMKKASNPVEVGIQVTPEDDDCLSTSSRGICPKQEHIADKLLHWRGLSSPRSAHGALIPTPGMSAEYAPQGICKDEPSSYTCTTCKQPFTSAWFLLQHAQNTHGLRIYLESEHGSPLTPRVGIPSGLGAECPSQPPLHGIHIADNNPFNLLRIPGSVSREASGLAEGRFPPTPPLFSPPPRHHLDPHRIERLGAEEMALATHHPSAFDRVLRLNPMAMEPPAMDFSRRLRELAGNTSSPPLSPGRPSPMQRLLQPFQPGSKPPFLATPPLPPLQSAPPPSQPPVKSKSCEFCGKTFKFQSNLVVHRRSHTGEKPYKCNLCDHACTQASKLKRHMKTHMHKSSPMTVKSDDGLSTASSPEPGTSDLVGSASSALKSVVAKFKSENDPNLIPENGDEEEEEDDEEEEEEEEEEEEELTESERVDYGFGLSLEAARHHENSSRGAVVGVGDESRALPDVMQGMVLSSMQHFSEAFHQVLGEKHKRGHLAEAEGHRDTCDEDSVAGESDRIDDGTVNGRGCSPGESASGGLSKKLLLGSPSSLSPFSKRIKLEKEFDLPPAAMPNTENVYSQWLAGYAASRQLKDPFLSFGDSRQSPFASSSEHSSENGSLRFSTPPGELDGGISGRSGTGSGGSTPHISGPGPGRPSSKEGRRSDTCEYCGKVFKNCSNLTVHRRSHTGERPYKCELCNYACAQSSKLTRHMKTHGQVGKDVYKCEICKMPFSVYSTLEKHMKKWHSDRVLNNDIKTE

SEQ ID NO: 14791 - protein, 894 aa, Homo sapiens
MSRRKQGNPQHLSQRELITPEADHVEAAILEEDEGLEIEEPSGLGLMVGGPDPDLLTCGQCQMNFPLGDILVFIEHKRKQCGGSLGACYDKALDKDSPPPSSRSELRKVSEPVEIGIQVTPDEDDHLLSPTKGICPKQENIAGPCRPAQLPAVAPIAASSHPHSSVITSPLRALGALPPCLPLPCCSARPVSGDGTQGEGQTEAPFGCQCQLSGKDEPSSYICTTCKQPFNSAWFLLQHAQNTHGFRIYLEPGPASSSLTPRLTIPPPLGPEAVAQSPLMNFLGDSNPFNLLRMTGPILRDHPGFGEGRLPGTPPLFSPPPRHHLDPHRLSAEEMGLVAQHPSAFDRVMRLNPMAIDSPAMDFSRRLRELAGNSSTPPPVSPGRGNPMHRLLNPFQPSPKSPFLSTPPLPPMPPGGTPPPQPPAKSKSCEFCGKTFKFQSNLIVHRRSHTGEKPYKCQLCDHACSQASKLKRHMKTHMHKAGSLAGRSDDGLSAASSPEPGTSELAGEGLKAADGDFRHHESDPSLGHEPEEEDEEEEEEEEELLLENESRPESSFSMDSELSRNRENGGGGVPGVPGAGGGAAKALADEKALVLGKVMENVGLGALPQYGELLADKQKRGAFLKRAAGGGDAGDDDDAGGCGDAGAGGAVNGRGGGFAPGTEPFPGLFPRKPAPLPSPGLNSAAKRIKVEKDLELPPAALIPSENVYSQWLVGYAASRHFMKDPFLGFTDARQSPFATSSEHSSENGSLRFSTPPGDLLDGGLSGRSGTASGGSTPHLGGPGPGRPSSKEGRRSDTCEYCGKVFKNCSNLTVHRRSHTGERPYKCELCNYACAQSSKLTRHMKTHGQIGKEVYRCDICQMPFSVYSTLEKHMKKWHGEHLLTNDVKIEQAERS

SEQ ID NO: 14792 - protein, 454 aa, Homo sapiens
MPRCPAGAMDEGPVDLRTRPKAAGLPGAALPLRKRPLRAPSPEPAAPRGAAGLVVPLDPLRGGCDLPAVPGPPHGLARPEALYYPGALLPLYPTRAMGSPFPLVNLPTPLYPMMCPMEHPLSADIAMATRADEDGDTPLHIAVVQGNLPAVHRLVNLFQQGGRELDIYNNLRQTPLHLAVITTLPSVVRLLVTAGASPMALDRHGQTAAHLACEHRSPTCLRALLDSAAPGTLDLEARNYDGLTALHVAVNTECQETVQLLLERGADIDAVDIKSGRSPLIHAVENNSLSMVQLLLQHGANVNAQMYSGSSALHSASGRGLLPLVRTLVRSGADSSLKNCHNDTPLMVARSRRVIDILRGKATRPASTSQPDPSPDRSANTSPESSSRLSSNGLLSASPSSSPSQSPPRDPPGFPMAPPNFFLPSPSPPAFLPFAGVLRGPGRPVPPSPAPGGS

SEQ ID NO: 14793 - protein, 706 aa, Homo sapiens
MASPADSCIQFTRHASDVLLNLNRLRSRDILTDVVIVVSREQFRAHKTVLMACSGLFYSIFTDQLKCNLSVINLDPEINPEGFCILLDFMYTSRLNLREGNIMAVMATAMYLQMEHVVDTCRKFIKASEAEMVSAIKPPREEFLNSRMLMPQDIMAYRGREVVENNLPLRSAPGCESRAFAPSLYSGLSTPPASYSMYSHLPVSSLLFSDEEFRDVRMPVANPFPKERALPCDSARPVPGEYSRPTLEVSPNVCHSNIYSPKETIPEEARSDMHYSVAEGLKPAAPSARNAPYFPCDKASKEEERPSSEDEIALHFEPPNAPLNRKGLVSPQSPQKSDCQPNSPTESCSSKNACILQASGSPPAKSPTDPKACNWKKYKFIVLNSLNQNAKPEGPEQAELGRLSPRAYTAPPACQPPMEPENLDLQSPTKLSASGEDSTIPQASRLNNIVNRSMTGSPRSSSESHSPLYMHPPKCTSCGSQSPQHAEMCLHTAGPTFPEEMGETQSEYSDSSCENGAFFCNECDCRFSEEASLKRHTLQTHSDKPYKCDRCQASFRYKGNLASHKTVHTGEKPYRCNICGAQFNRPANLKTHTRIHSGEKPYKCETCGARFVQVAHLRAHVLIHTGEKPYPCEICGTRFRHLQTLKSHLRIHTGEKPYHCEKCNLHFRHKSQLRLHLRQKHGAITNTKVQYRVSATDLPPELPKAC

SEQ ID NO: 14794 - protein, 479 aa, Homo sapiens
MGSPAAPEGALGYVREFTRHSSDVLGNLNELRLRGILTDVTLLVGGQPLRAHKAVLIACSGFFYSIFRGRAGVGVDVLSLPGGPEARGFAPLLDFMYTSRLRLSPATAPAVLAAATYLQMEHVVQACHRFIQASYEPLGISLRPLEAEPPTPPTAPPPGSPRRSEGHPDPPTESRSCSQGPPSPASPDPKACNWKKYKYIVLNSQASQAGSLVGERSSGQPCPQARLPSGDEASSSSSSSSSSSEEGPIPGPQSRLSPTAATVQFKCGAPASTPYLLTSQAQDTSGSPSERARPLPGSEFFSCQNCEAVAGCSSGLDSLVPGDEDKPYKCQLCRSSFRYKGNLASHRTVHTGEKPYHCSICGARFNRPANLKTHSRIHSGEKPYKCETCGSRFVQVAHLRAHVLIHTGEKPYPCPTCGTRFRHLQTLKSHVRIHTGEKPYHCDPCGLHFRHKSQLRLHLRQKHGAATNTKVHYHILGGP

SEQ ID NO: 14795 - protein, 920 aa, Homo sapiens
MGRSNSRSHSSRSKSRSQSSSRSRSRSHSRKKRYSSRSRSRTYSRSRSRDRMYSRDYRRDYRNNRGMRRPYGYRGRGRGYYQGGGGRYHRGGYRPVWNRRHSRSPRRGRSRSRSPKRRSVSSQRSRSRSRRSYRSSRSPRSSSSRSSSPYSKSPVSKRRGSQEKQTKKAEGEPQEESPLKSKSQEEPKDTFEHDPSESIDEFNKSSATSGDIWPGLSAYDNSPRSPHSPSPIATPPSQSSSCSDAPMLSTVHSAKNTPSQHSHSIQHSPERSGSGSVGNGSSRYSPSQNSPIHHIPSRRSPAKTIAPQNAPRDESRGRSSFYPDGGDQETAKTGKFLKRFTDEESRVFLLDRGNTRDKEASKEKGSEKGRAEGEWEDQEALDYFSDKESGKQKFNDSEGDDTEETEDYRQFRKSVLADQGKSFATASHRNTEEEGLKYKSKVSLKGNRESDGFREEKNYKLKETGYVVERPSTTKDKHKEEDKNSERITVKKETQSPEQVKSEKLKDLFDYSPPLHKNLDAREKSTFREESPLRIKMIASDSHRPEVKLKMAPVPLDDSNRPASLTKDRLLASTLVHSVKKEQEFRSIFDHIKLPQASKSTSESFIQHIVSLVHHVKEQYFKSAAMTLNERFTSYQKATEEHSTRQKSPEIHRRIDISPSTLRKHTRLAGEERVFKEENQKGDKKLRCDSADLRHDIDRRRKERSKERGDSKGSRESSGSRKQEKTPKDYKEYKSYKDDSKHKREQDHSRSSSSSASPSSPSSREEKESKKEREEEFKTHHEMKEYSGFAGVSRPRGTFFRIRGRGRARGVFAGTNTGPNNSNTTFQKRPKEEEWDPEYTPKSKKYFLHDDRDDGVDYWAKRGRGRGTFQRGRGRFNFKKSGSSPKWTHDKYQGDGIVEDEEETMENNEEKKDRRKEEKE

SEQ ID NO: 14796 - protein, 189 aa, Homo sapiens
MKTKNRPPRRRAPVQDTEATPGEGTPDGSLPNPGPEPAKGLRSRPARAAARAPGEGRRRRPGPSGPGGRRDSSIQRRLESNERERQRMHKLNNAFQALREVIPHVRADKKLSKIETLTLAKNYIKSLTATILTMSSSRLPGLEGPGPKLYQHYQQQQQVAGGALGATEAQPQGHLQRYSTQIHSFREGT

SEQ ID NO: 14797 - protein, 235 aa, Homo sapiens
MLRGAPGLGLTARKGAEDSAEDLGGPCPEPGGDSGVLGANGASCSRGEAEEPAGRRRARPVRSKARRMAANVRERKRILDYNEAFNALRRALRHDLGGKRLSKIATLRRAIHRIAALSLVLRASPAPRGPCGHLECHGPAARGDTGDTGASPPPPAGPSLARPDAARPSVPSAPRCASCPPHAPLARPSAVAEGPGLAQASGGSWRRCPGASSAGPPPWPRGYLRSAPGMGHPRS

SEQ ID NO: 14798 - protein, 547 aa, Homo sapiens
MAGTKNKTRAQAKTEKKAAIQAKAGAEREATGVVRPVAKTRAKAKAKTGSKTDAVAEMKAVSKNKVVAETKEGALSEPKTLGKAMGDFTPKAGNESTSSTCKNEAGTDAWFWAGEEATINSWFWNGEEAGNSFSTKNDKPEIGAQVCAEELEPAAGADCKPRSGAEEEEEENVIGNWFWEGDDTSFDPNPKPVSRIVKPQPVYEINEKNRPKDWSEVTIWPNAPAVTPAVLGFRSQAPSEASPPSYIVLASAEENACSLPVATACRPSRNTRSCSQPIPECRFDSDPCIQTIDEIRRQIRIREVNGIKPFACPCKMECYMDSEEFEKLVSLLKSTTDPLIHKIARIAMGVHNVHPFAQEFINEVGVVTLIESLLSFPSPEMRKKTVITLNPPSGDERQRKIELHVKHMCKETMSFPLNSPGQQSGLKILGQLTTDFVHHYIVANYFSELFHLLSSGNCKTRNLVLKLLLNMSENPTAARDMINMKALAALKLIFNQKEAKANLVSGVAIFINIKEHIRKGSIVVVDHLSYNTLMAIFREVKEIIETM

SEQ ID NO: 14799 - protein, 381 aa, Homo sapiens
MERGMHLGAAAAGEDDLFLHKSLSASTSKRLEAAFRSTPPGMDLSLAPPPRERPASSSSSPLGCFEPADPEGAGLLLPPPGGGGGGSAGSGGGGGGGVGVPGLLVGSAGVGGDPSLSSLPAGAALCLKYGESASRGSVAESSGGEQSPDDDSDGRCELVLRAGVADPRASPGAGGGGAKAAEGCSNAHLHGGASVPPGGLGGGGGGGSSSGSSGGGGGSGSGSGGSSSSSSSSSKKSKEQKALRLNINARERRRMHDLNDALDELRAVIPYAHSPSVRKLSKIATLLLAKNYILMQAQALEEMRRLVAYLNQGQAISAASLPSSAAAAAAAAALHPALGAYEQAAGYPFSAGLPPAASCPEKCALFNSVSSSLCKQCTEKP

SEQ ID NO: 14800 - protein, 225 aa, Homo sapiens
MAELKSLSGDAYLALSHGYAAAAAGLAYGAAREPEAARGYGTPGPGGDLPAAPAPRAPAQAAESSGEQSGDEDDAFEQRRRRRGPGSAADGRRRPREQRSLRLSINARERRRMHDLNDALDGLRAVIPYAHSPSVRKLSKIATLLLAKNYILMQAQALDEMRRLVAFLNQGQGLAAPVNAAPLTPFGQATVCPFSAGAALGPCPDKCAAFSGTPSALCKHCHEKP

SEQ ID NO: 14801 - protein, 412 aa, Homo sapiens
MERIPSAQPPPACLPKAPGLEHGDLPGMYPAHMYQVYKSRRGIKRSEDSKETYKLPHRLIEKKRRDRINECIAQLKDLLPEHLKLTTLGHLEKAVVLELTLKHVKALTNLIDQQQQKIIALQSGLQAGELSGRNVETGQEMFCSGFQTCAREVLQYLAKHENTRDLKSSQLVTHLHRVVSELLQGGTSRKPSDPAPKVMDFKEKPSSPAKGSEGPGKNCVPVIQRTFAHSSGEQSGSDTDTDSGYGGESEKGDLRSEQPCFKSDHGRRFTMGERIGAIKQESEEPPTKKNRMQLSDDEGHFTSSDLISSPFLGPHPHQPPFCLPFYLIPPSATAYLPMLEKCWYPTSVPVLYPGLNASAAALSSFMNPDKISAPLLMPQRLPSPLPAHPSVDSSVLLQALKPIPPLNLETKD

SEQ ID NO: 14802 - protein, 482 aa, Homo sapiens
MDEGIPHLQERQLLEHRDFIGLDYSSLYMCKPKRSMKRDDTKDTYKLPHRLIEKKRRDRINECIAQLKDLLPEHLKLTTLGHLEKAVVLELTLKHLKALTALTEQQHQKIIALQNGERSLKSPIQSDLDAFHSGFQTCAKEVLQYLSRFESWTPREPRCVQLINHLHAVATQFLPTPQLLTQQVPLSKGTGAPSAAGSAAAPCLERAGQKLEPLAYCVPVIQRTQPSAELAAENDTDTDSGYGGEAEARPDREKGKGAGASRVTIKQEPPGEDSPAPKRMKLDSRGGGSGGGPGGGAAAAAAALLGPDPAAAAALLRPDAALLSSLVAFGGGGGAPFPQPAAAAAPFCLPFCFLSPSAAAAYVQPFLDKSGLEKYLYPAAAAAPFPLLYPGIPAPAAAAAAAAAAAAAAAAFPCLSSVLSPPPEKAGAAAATLLPHEVAPLGAPHPQHPHGRTHLPFAGPREPGNPESSAQEDPSQPGKEAP

SEQ ID NO: 14803 - protein, 825 aa, Homo sapiens
MLDICLEKRVGTTLAAPKCNSSTVRFQGLAEGTKGTMKMDMEDADMTLWTEAEFEEKCTYIVNDHPWDSGADGGTSVQAEASLPRNLLFKYATNSEEVIGVMSKEYIPKGTRFGPLIGEIYTNDTVPKNANRKYFWRIYSRGELHHFIDGFNEEKSNWMRYVNPAHSPREQNLAACQNGMNIYFYTIKPIPANQELLVWYCRDFAERLHYPYPGELTMMNLTQTQSSLKQPSTEKNELCPKNVPKREYSVKEILKLDSNPSKGKDLYRSNISPLTSEKDLDDFRRRGSPEMPFYPRVVYPIRAPLPEDFLKASLAYGIERPTYITRSPIPSSTTPSPSARSSPDQSLKSSSPHSSPGNTVSPVGPGSQEHRDSYAYLNASYGTEGLGSYPGYAPLPHLPPAFIPSYNAHYPKFLLPPYGMNCNGLSAVSSMNGINNFGLFPRLCPVYSNLLGGGSLPHPMLNPTSLPSSLPSDGARRLLQPEHPREVLVPAPHSAFSFTGAAASMKDKACSPTSGSPTAGTAATAEHVVQPKATSAAMAAPSSDEAMNLIKNKRNMTGYKTLPYPLKKQNGKIKYECNVCAKTFGQLSNLKVHLRVHSGERPFKCQTCNKGFTQLAHLQKHYLVHTGEKPHECQVCHKRFSSTSNLKTHLRLHSGEKPYQCKVCPAKFTQFVHLKLHKRLHTRERPHKCSQCHKNYIHLCSLKVHLKGNCAAAPAPGLPLEDLTRINEEIEKFDISDNADRLEDVEDDISVISVVEKEILAVVRKEKEETGLKVSLQRNMGNGLLSSGCSLYESSDLPLMKLPPSNPLPLVPVKVKQETVEPMDP

SEQ ID NO: 14804 - protein, 396 aa, Homo sapiens; identical to SEQ ID NO: 1493

SEQ ID NO: 14805 - protein, 994 aa, Homo sapiens; identical to SEQ ID NO: 1515

SEQ ID NO: 14806 - protein, 1099 aa, Homo sapiens
MAHLGPTPPPHSLNYKSEDRLSEQDWPAYFKVPCCGVDTSQIESEEAEVDVRERETQRDREPKRARDLTLRDSCTDNSMQFGTRTTTAEPGFMGTWQNADTNLLFRMSQQAIRCTLVNCTCECFQPGKINLRTCDQCKHGWVAHALDKLSTQHLYHPTQVEIVQSNVVFDISSLMLYGTQAVPVRLKILLDRLFSVLKQEEVLHILHGLGWTLRDYVRGYILQDAAGKVLDRWAIMSREEEIITLQQFLRFGETKSIVELMAIQEKEGQAVAVPSSKTDSDIRTFIESNNRTRSPSLLAHLENSNPSSIHHFENIPNSLAFLLPFQYINPVSAPLLGLPPNGLLLEQPGLRLREPSLSTQNEYNESSESEVSPTPYKNDQTPNRNALTSITNVEPKTEPACVSPIQNSAPVSDLTKTEHPKSSFRIHRMRRMGSASRKGRVFCNACGKTFYDKGTLKIHYNAVHLKIKHRCTIEGCNMVFSSLRSRNRHSANPNPRLHMPMLRNNRDKDLIRATSGAATPVIASTKSNLALTSPGRPPMGFTTPPLDPVLQNPLPSQLVFSGLKTVQPVPPFYRSLLTPGEMVSPPTSLPTSPIIPTSGTIEQHPPPPSEPVVPAVMMATHEPSADLAPKKKPRKSSMPVKIEKEIIDTADEFDDEDDDPNDGGAVVNDMSHDNHCHSQEEMSPGMSVKDFSKHNRTRCISRTEIRRADSMTSEDQEPERDYENESESSEPKLGEESMEGDEHIHSEVSEKVLMNSERPDENHSEPSHQDVIKVKEEFTDPTYDMFYMSQYGLYNGGGASMAALHESFTSSLNYGSPQKFSPEGDLCSSPDPKICYVCKKSFKSSYSVKLHYRNVHLKEMHVCTVAGCNAAFPSRRSRDRHSANINLHRKLLTKELDDMGLDSSQPSLSKDLRDEFLVKIYGAQHPMGLDVREDASSPAGTEDSHLNGYGRGMAEDYMVLDLSTTSSLQSSSSIHSSRESDAGSDEGILLDDIDGASDSGESAHKAEAPALPGSLGAEVSGSLMFSSLSGSNGGIMCNICHKMYSNKGTLRVHYKTVHLREMHKCKVPGCNMMFSSVRSRNRHSQNPNLHKNIPFTSVD

SEQ ID NO: 14807 - protein, 137 aa, Homo sapiens; identical to SEQ ID NO: 1532

SEQ ID NO: 14808 - protein, 86 aa, Homo sapiens
MELSAEYLREKLQRDLEAEHVEVEDTTLNRCSCSFRVLVVSAKFEGKPLLQRHRLVNACLAEELPHIHAFEQKTLTPDQWARERQK

SEQ ID NO: 14809 - protein, 107 aa, Homo sapiens
MAAWSPAAAAPLLRGIRGLPLHHRMFATQTEGELRVTQILKEKFPRATAIKVTDISGGCGAMYEIKIESEEFKEKRTVQQHQMVNQALKEEIKEMHGLRIFTSVPKR

SEQ ID NO: 14810 - protein, 3046 aa, Homo sapiens
MRGRRGRPPKQPAAPAAERCAPAPPPPPPPPTSGPIGGLRSRHRGSSRGRWAAAQAEVAPKTRLSSPRGGSSSRRKPPPPPPAPPSTSAPGRGGRGGGGGRTGGGGGGGHLARTTAARRAVNKVVYDDHESEEEEEEEDMVSEEEEEEDGDAEETQDSEDDEEDEMEEDDDDSDYPEEMEDDDDDASYCTESSFRSHSTYSSTPGRRKPRVHRPRSPILEEKDIPPLEFPKSSEDLMVPNEHIMNVIAIYEVLRNFGTVLRLSPFRFEDFCAALVSQEQCTLMAEMHVVLLKAVLREEDTSNTTFGPADLKDSVNSTLYFIDGMTWPEVLRVYCESDKEYHHVLPYQEAEDYPYGPVENKIKVLQFLVDQFLTTNIAREELMSEGVIQYDDHCRVCHKLGDLLCCETCSAVYHLECVKPPLEEVPEDEWQCEVCVAHKVPGVTDCVAEIQKNKPYIRHEPIGYDRSRRKYWFLNRRLIIEEDTENENEKKIWYYSTKVQLAELIDCLDKDYWEAELCKILEEMREEIHRHMDITEDLTNKARGSNKSFLAAANEEILESIRAKKGDIDNVKSPEETEKDKNETENDSKDAEKNREEFEDQSLEKDSDDKTPDDDPEQGKSEEPTEVGDKGNSVSANLGDNTTNATSEETSPSEGRSPVGCLSETPDSSNMAEKKVASELPQDVPEEPNKTCESSNTSATTTSIQPNLENSNSSSELNSSQSESAKAADDPENGERESHTPVSIQEEIVGDFKSEKSNGELSESPGAGKGASGSTRIITRLRNPDSKLSQLKSQQVAAAAHEANKLFKEGKEVLVVNSQGEISRLSTKKEVIMKGNINNYFKLGQEGKYRVYHNQYSTNSFALNKHQHREDHDKRRHLAHKFCLTPAGEFKWNGSVHGSKVLTISTLRLTITQLENNIPSSFLHPNWASHRANWIKAVQMCSKPREFALALAILECAVKPVVMLPIWRESLGHTRLHRMTSIEREEKEKVKKKEKKQEEEETMQQATWVKYTFPVKHQVWKQKGEEYRVTGYGGWSWISKTHVYRFVPKLPGNTNVNYRKSLEGTKNNMDENMDESDKRKCSRSPKKIKIEPDSEKDEVKGSDAAKGADQNEMDISKITEKKDQDVKELLDSDSDKPCKEEPMEVDDDMKTESHVNCQESSQVDVVNVSEGFHLRTSYKKKTKSSKLDGLLERRIKQFTLEEKQRLEKIKLEGGIKGIGKTSTNSSKNLSESPVITKAKEGCQSDSMRQEQSPNANNDQPEDLIQGCSESDSSVLRMSDPSHTTNKLYPKDRVLDDVSIRSPETKCPKQNSIENDIEEKVSDLASRGQEPSKSKTKGNDFFIDDSKLASADDIGTLICKNKKPLIQEESDTIVSSSKSALHSSVPKSTNDRDATPLSRAMDFEGKLGCDSESNSTLENSSDTVSIQDSSEEDMIVQNSNESISEQFRTREQDVEVLEPLKCELVSGESTGNCEDRLPVKGTEANGKKPSQQKKLEERPVNKCSDQIKLKNTTDKKNNENRESEKKGQRTSTFQINGKDNKPKIYLKGECLKEISESRVVSGNVEPKVNNINKIIPENDIKSLTVKESAIRPFINGDVIMEDFNERNSSETKSHLLSSSDAEGNYRDSLETLPSTKESDSTQTTTPSASCPESNSVNQVEDMEIETSEVKKVTSSPITSEEESNLSNDFIDENGLPINKNENVNGESKRKTVITEVTTMTSTVATESKTVIKVEKGDKQTVVSSTENCAKSTVTTTTTTVTKLSTPSTGGSVDIISVKEQSKTVVTTTVTDSLTTTGGTLVTSMTVSKEYSTRDKVKLMKFSRPKKTRSGTALPSYRKFVTKSSKKSIFVLPNDDLKKLARKGGIREVPYFNYNAKPALDIWPYPSPRPTFGITWRYRLQTVKSLAGVSLMLRLLWASLRWDDMAAKAPPGGGTTRTETSETEITTTEIIKRRDVGPYGIRSEYCIRKIICPIGVPETPKETPTPQRKGLRSSALRPKRPETPKQTGPVIIETWVAEEELELWEIRAFAERVEKEKAQAVEQQAKKRLEQQKPTVIATSTTSPTSSTTSTISPAQKVMVAPISGSVTTGTKMVLTTKVGSPATVTFQQNKNFHQTFATWVKQGQSNSGVVQVQQKVLGIIPSSTGTSQQTFTSFQPRTATVTIRPNTSGSGGTTSNSQVITGPQIRPGMTVIRTPLQQSTLGKAIIRTPVMVQPGAPQQVMTQIIRGQPVSTAVSAPNTVSSTPGQKSLTSATSTSNIQSSASQPPRPQQGQVKLTMAQLTQLTQGHGGNQGLTVVIQGQGQTTGQLQLIPQGVTVLPGPGQQLMQAAMPNGTVQRFLFTPLATTATTASTTTTTVSTTAAGTGEQRQSKLSPQMQVHQDKTLPPAQSSSVGPAEAQPQTAQPSAQPQPQTQPQSPAQPEVQTQPEVQTQTTVSSHVPSEAQPTHAQSSKPQVAAQSQPQSNVQGQSPVRVQSPSQTRIRPSTPSQLSPGQQSQVQTTTSQPIPIQPHTSLQIPSQGQPQSQPQVQSSTQTLSSGQTLNQVTVSSPSRPQLQIQQPQPQVIAVPQLQQQVQVLSQIQSQVVAQIQAQQSGVPQQIKLQLPIQIQQSSAVQTHQIQNVVTVQAASVQEQLQRVQQLRDQQQKKKQQQIEIKREHTLQASNQSEIIQKQVVMKHNAVIEHLKQKKSMTPAEREENQRMIVCNQVMKYILDKIDKEEKQAAKKRKREESVEQKRSKQNATKLSALLFKHKEQLRAEILKKRALLDKDLQIEVQEELKRDLKIKKEKDLMQLAQATAVAAPCPPVTPAPPAPPAPPPSPPPPPAVQHTGLLSTPTLPAASQKRKREEEKDSSSKSKKKKMISTTSKETKKDTKLYCICKTPYDESKFYIGCDRCQNWYHGRCVGILQSEAELIDEYVCPQCQSTEDAMTVLTPLTEKDYEGLKRVLRSLQAHKMAWPFLEPVDPNDAPDYYGVIKEPMDLATMEERVQRRYYEKLTEFVADMTKIFDNCRYYNPSDSPFYQCAEVLESFFVQKLKGFKASRSHNNKLQSTAS

SEQ ID NO: 14811 - protein, 1863 aa, Homo sapiens
MDLSALRVEEVQNVINAMQKILECPICLELIKEPVSTKCDHIFCKFCMLKLLNQKKGPSQCPLCKNDITKRSLQESTRFSQLVEELLKIICAFQLDTGLEYANSYNFAKKENNSPEHLKDEVSIIQSMGYRNRAKRLLQSEPENPSLQETSLSVQLSNLGTVRTLRTKQRIQPQKTSVYIELGSDSSEDTVNKATYCSVGDQELLQITPQGTRDEISLDSAKKAACEFSETDVTNTEHHQPSNNDLNTTEKRAAERHPEKYQGSSVSNLHVEPCGTNTHASSLQHENSSLLLTKDRMNVEKAEFCNKSKQPGLARSQHNRWAGSKETCNDRRTPSTEKKVDLNADPLCERKEWNKQKLPCSENPRDTEDVPWITLNSSIQKVNEWFSRSDELLGSDDSHDGESESNAKVADVLDVLNEVDEYSGSSEKIDLLASDPHEALICKSERVHSKSVESNIEDKIFGKTYRKKASLPNLSHVTENLIIGAFVTEPQIIQERPLTNKLKRKRRPTSGLHPEDFIKKADLAVQKTPEMINQGTNQTEQNGQVMNITNSGHENKTKGDSIQNEKNPNPIESLEKESAFKTKAEPISSSISNMELELNIHNSKAPKKNRLRRKSSTRHIHALELVVSRNLSPPNCTELQIDSCSSSEEIKKKKYNQMPVRHSRNLQLMEGKEPATGAKKSNKPNEQTSKRHDSDTFPELKLTNAPGSFTKCSNTSELKEFVNPSLPREEKEEKLETVKVSNNAEDPKDLMLSGERVLQTERSVESSSISLVPGTDYGTQESISLLEVSTLGKAKTEPNKCVSQCAAFENPKGLIHGCSKDNRNDTEGFKYPLGHEVNHSRETSIEMEESELDAQYLQNTFKVSKRQSFAPFSNPGNAEEECATFSAHSGSLKKQSPKVTFECEQKEENQGKNESNIKPVQTVNITAGFPVVGQKDKPVDNAKCSIKGGSRFCLSSQFRGNETGLITPNKHGLLQNPYRIPPLFPIKSFVKTKCKKNLLEENFEEHSMSPEREMGNENIPSTVSTISRNNIRENVFKEASSSNINEVGSSTNEVGSSINEIGSSDENIQAELGRNRGPKLNAMLRLGVLQPEVYKQSLPGSNCKHPEIKKQEYEEVVQTVNTDFSPYLISDNLEQPMGSSHASQVCSETPDDLLDDGEIKEDTSFAENDIKESSAVFSKSVQKGELSRSPSPFTHTHLAQGYRRGAKKLESSEENLSSEDEELPCFQHLLFGKVNNIPSQSTRHSTVATECLSKNTEENLLSLKNSLNDCSNQVILAKASQEHHLSEETKCSASLFSSQCSELEDLTANTNTQDPFLIGSSKQMRHQSESQGVGLSDKELVSDDEERGTGLEENNQEEQSMDSNLGEAASGCESETSVSEDCSGLSSQSDILTTQQRDTMQHNLIKLQQEMAELEAVLEQHGSQPSNSYPSIISDSSALEDLRNPEQSTSEKAVLTSQKSSEYPISQNPEGLSADKFEVSADSSTSKNKEPGVERSSPSKCPSLDDRWYMHSCSGSLQNRNYPSQEELIKVVDVEEQQLEESGPHDLTETSYLPRQDLEGTPYLESGISLFSDDPESDPSEDRAPESARVGNIPSSTSALKVPQLKVAESAQSPAAAHTTDTAGYNAMEESVSREKPELTASTERVNKRMSMVVSGLTPEEFMLVYKFARKHHITLTNLITEETTHVVMKTDAEFVCERTLKYFLGIAGGKWVVSYFWVTQSIKERKMLNEHDFEVRGDVVNGRNHQGPKRARESQDRKIFRGLEICCYGPFTNMPTDQLEWMVQLCGASVVKELSSFTLGTGVHPIVVVQPDAWTEDNGFHAIGQMCEAPVVTREWVLDSVALYQCQELDTYLIPQIPHSHY

SEQ ID NO: 14812 - protein, 233 aa, Homo sapiens
MNLNFTSPLHPASSQRPTSFFIEDILLHKPKPLREVAPDHFASSLASRVPLLDYGYPLMPTPTLLAPHAHHPLHKGDHHHPYFLTTSGMPVPALFPHPQHAELPGKHCRRRKARTVFSDSQLSGLEKRFEIQRYLSTPERVELATALSLSETQVKTWFQNRRMKHKKQLRKSQDEPKAPDGPESPEGSPRGSEAATAAEARLSLPAGPFVLTEPEDEVDIGDEGELGSGPHVL

SEQ ID NO: 14813 - protein, 1177 aa, Homo sapiens
MDVYPPRRQGLPRARSPGGSSRGSPSVSCSRLRQVQSILTQSSKSRPDGILCILGIDSRYNEGCRELANYLLFGLYNQNTSDFEKTGFSEEVLDDVIILIKSDSVHLYCNPVNFRYLLPYVAHWRNLHFHCMTENEYEDEEAAEEFKITSFVDMVRDCSRIGIPYSSQGHLQIFDMFVVEKWPIVQAFALEGIGGDGFFTMKYELQDVSLNLWNVYSKMDPMSLESLLSDDLVAFEHQWTSFFANFDTEIPFLLELSESQAGEPFRSYFSHGMISSHITENSPNRQPFVLFGNHSTRENLNAGNFNFPSEGHLVRSTGPGGSFAKHMVAQCVSPKGPLACSRTYFFGATHVPYLGGDSKLPKKTEQIRLLSQIYAAVIEAVLAGIACYAKTSSLTKAKEVAEQTLGSGLDSFELIPFKAALRSKMTFHIHAVNNQGRIVPLDSEDSLSFVKTACMAVYDIPDLLGGNGCLGSVVFSESFLTSQILVKEKDGTVTTETSSVVLTAAVPRFCSWLVEDNEVKLSEKTQQAVRGDESFLGTYLTGGEGAYLYSSNLQSWPEEGNVHFFSSGLLFSHCRHRSIIISKDHMNSISFYDGDSTSTVAALLIDFKSSLLPHLPVHFHGSSNFLMIALFPKSKIYQAFYSEVFSLWKQQDNSGISLKVIQEDGLSVEQKRLHSSAQKLFSALSQPAGEKRSSLKLLSAKLPELDWFLQHFAISSISQEPVMRTHLPVLLQQAEINTTHRIESDKVIISIVTGLPGCHASELCAFLVTLHKECGRWMVYRQIMDSSECFHAAHFQRYLSSALEAQQNRSARQSAYIRKKTRLLVVLQGYTDVIDVVQALQTHPDSNVKASFTIGAITACVEPMSCYMEHRFLFPKCLDQCSQGLVSNVVFTSHTTEQRHPLLVQLQSLIRAANPAAAFILAENGIVTRNEDIELILSENSFSSPEMLRSRYLMYPGWYEGKLNAGSVYPLMVQICVWFGRPLEKTRFVAKCKAIQSSIKPSPFSGNIYHILGKVKFSDSERTMEVCYNTLANSLSIMPVLEGPTPPPDSKSVSQDSSGQQECYLVFIGCSLKEDSIKDWLRQSAKQKPQRKALKTRGMLTQQEIRSIHVKRHLEPLPAGYFYNGTQFVNFFGDKTDFHPLMDQFMNDYVEEANREIEKYNQELEQQEYHDLFELKP

SEQ ID NO: 14814 - protein, 1673 aa, Homo sapiens
MWRAEGKWLPKTSRKSVSQSVFCGTSTYCVLNTVPPIEDDHGNSNSSHVKIFLPKKLLECLPKCSSLPKERHRWNTNEEIAAYLITFEKHEEWLTTSPKTRPQNGSMILYNRKKVKYRKDGYCWKKRKDGKTTREDHMKLKVQGVECLYGCYVHSSIIPTFHRRCYWLLQNPDIVLVHYLNVPAIEDCGKPCGPILCSINTDKKEWAKWTKEELIGQLKPMFHGIKWTCSNGNSSSGFSVEQLVQQILDSHQTKPQPRTHNCLCTGSLGAGGSVHHKCNSAKHRIISPKVEPRTGGYGSHSEVQHNDVSEGKHEHSHSKGSSREKRNGKVAKPVLLHQSSTEVSSTNQVEVPDTTQSSPVSISSGLNSDPDMVDSPVVTGVSGMAVASVMGSLSQSATVFMSEVTNEAVYTMSPTAGPNHHLLSPDASQGLVLAVSSDGHKFAFPTTGSSESLSMLPTNVSEELVLSTTLDGGRKIPETTMNFDPDCFLNNPKQGQTYGGGGLKAEMVSSNIRHSPPGERSFSFTTVLTKEIKTEDTSFEQQMAKEAYSSSAAAVAASSLTLTAGSSLLPSGGGLSPSTTLEQMDFSAIDSNKDYTSSFSQTGHSPHIHQTPSPSFFLQDASKPLPVEQNTHSSLSDSGGTFVMPTVKTEASSQTSSCSGHVETRIESTSSLHLMQFQANFQAMTAEGEVTMETSQAAEGSEVLLKSGELQACSSEHYLQPETNGVIRSAGGVPILPGNVVQGLYPVAQPSLGNASNMELSLDHFDISFSNQFSDLINDFISVEGGSSTIYGHQLVSGDSTALSQSEDGARAPFTQAEMCLPCCSPQQGSLQLSSSEGGASTMAYMHVAEVVSAASAQGTLGMLQQSGRVFMVTDYSPEWSYPEGGVKVLITGPWQEASNNYSCLFDQISVPASLIQPGVLRCYCPAHDTGLVTLQVAFNNQIISNSVVFEYKARALPTLPSSQHDWLSLDDNQFRMSILERLEQMERRMAEMTGSQQHKQASGGGSSGGGSGSGNGGSQAQCASGTGALGSCFESRVVVVCEKMMSRACWAKSKHLIHSKTFRGMTLLHLAAAQGYATLIQTLIKWRTKHADSIDLELEVDPLNVDHFSCTPLMWACALGHLEAAVVLYKWDRRAISIPDSLGRLPLGIARSRGHVKLAECLEHLQRDEQAQLGQNPRIHCPASEEPSTESWMAQWHSEAISSPEIPKGVTVIASTNPELRRPRSEPSNYYSSESHKDYPAPKKHKLNPEYFQTRQEKLLPTALSLEEPNIRKQSPSSKQSVPETLSPSEGVRDFSRELSPPTPETAAFQASGSQPVGKWNSKDLYIGVSTVQVTGNPKGTSVGKEAAPSQVRPREPMSVLMMANREVVNTELGSYRDSAENEECGQPMDDIQVNMMTLAEHIIEATPDRIKQENFVPMESSGLERTDPATISSTMSWLASYLADADCLPSAAQIRSAYNEPLTPSSNTSLSPVGSPVSEIAFEKPNLPSAADWSEFLSASTSEKVENEFAQLTLSDHEQRELYEAARLVQTAFRKYKGRPLREQQEVAAAVIQRCYRKYKQYALYKKMTQAAILIQSKFRSYYEQKKFQQSRRAAVLIQKYYRSYKKCGKRRQARRTAVIVQQKLRSSLLTKKQDQAARKIMRFLRRCRHSPLVDHRLYKRSERIEKGQGT

SEQ ID NO: 14815 - protein, 1202 aa, Homo sapiens
MNTKDTTEVAENSHHLKIFLPKKLLECLPRCPLLPPERLRWNTNEEIASYLITFEKHDEWLSCAPKTRPQNGSIILYNRKKVKYRKDGYLWKKRKDGKTTREDHMKLKVQGMECLYGCYVHSSIVPTFHRRCYWLLQNPDIVLVHYLNVPALEDCGKGCSPIFCSISSDRREWLKWSREELLGQLKPMFHGIKWSCGNGTEEFSVEHLVQQILDTHPTKPAPRTHACLCSGGLGSGSLTHKCSSTKHRIISPKVEPRALTLTSIPHAHPPEPPPLIAPLPPELPKAHTSPSSSSSSSSSGFAEPLEIRPSPPTSRGGSSRGGTAILLLTGLEQRAGGLTPTRHLAPQADPRPSMSLAVVVGTEPSAPPAPPSPAFDPDRFLNSPQRGQTYGGGQGVSPDFPEAEAAHTPCSALEPAAALEPQAAARGPPPQSVAGGRRGNCFFIQDDDSGEELKGHGAAPPIPSPPPSPPPSPAPLEPSSRVGRGEALFGGPVGASELEPFSLSSFPDLMGELISDEAPSIPAPTPQLSPALSTITDFSPEWSYPEGGVKVLITGPWTEAAEHYSCVFDHIAVPASLVQPGVLRCYCPAHEVGLVSLQVAGREGPLSASVLFEYRARRFLSLPSTQLDWLSLDDNQFRMSILERLEQMEKRMAEIAAAGQVPCQGPDAPPVQDEGQGPGFEARVVVLVESMIPRSTWKGPERLAHGSPFRGMSLLHLAAAQGYARLIETLSQWRSVETGSLDLEQEVDPLNVDHFSCTPLMWACALGHLEAAVLLFRWNRQALSIPDSLGRLPLSVAHSRGHVRLARCLEELQRQEPSVEPPFALSPPSSSPDTGLSSVSSPSELSDGTFSVTSAYSSAPDGSPPPAPLPASEMTMEDMAPGQLSSGVPEAPLLLMDYEATNSKGPLSSLPALPPASDDGAAPEDADSPQAVDVIPVDMISLAKQIIEATPERIKREDFVGLPEAGASMRERTGAVGLSETMSWLASYLENVDHFPSSTPPSELPFERGRLAVPSAPSWAEFLSASTSGKMESDFALLTLSDHEQRELYEAARVIQTAFRKYKGRRLKEQQEVAAAVIQRCYRKYKQLTWIALKFALYKKMTQAAILIQSKFRSYYEQKRFQQSRRAAVLIQQHYRSYRRRPGPPHRTSATLPARNKGSFLTKKQDQAARKIMRFLRRCRHRMRELKQNQELEGLPQPGLAT

SEQ ID NO: 14816 - protein, 147 aa, Homo sapiens
MSSEPPPPPQPPTHQASVGLLDTPRSRERSPSPLRGNVVPSPLPTRRTRTFSATVRASQGPVYKGVCKCFCRSKGHGFITPADGGPDIFLHISDVEGEYVPVEGDEVTYKMCSIPPKNEKLQAVEVVITHLAPGTKHETWSGHVISS

SEQ ID NO: 14817 - protein, 1759 aa, Homo sapiens
MDLGTAEGTRCTDPPAGKPAMAPKRKGGLKLNAICAKLSRQVVVEKRADAGSHTEGSPSQPRDQERSGPESGAARAPRSEEDKRRAVIEKWVNGEYSEEPAPTPVLGRIAREGLELPPEGVYMVQPQGCSDEEDHAEEPSKDGGALEEKDSDGAASKEDSGPSTRQASGEASSLRDYAASTMTEFLGMFGYDDQNTRDELARKISFEKLHAGSTPEAATSSMLPTSEDTLSKRARFSKYEEYIRKLKAGEQLSWPAPSTKTEERVGKEVVGTLPGLRLPSSTAHLETKATILPLPSHSSVQMQNLVARASKYDFFIQKLKTGENLRPQNGSTYKKPSKYDLENVKYLHLFKPGEGSPDMGGAIAFKTGKVGRPSKYDVRGIQKPGPAKVPPTPSLAPAPLASVPSAPSAPGPGPEPPASLSFNTPEYLKSTFSKTDSITTGTVSTVKNGLPTDKPAVTEDVNIYQKYIARFSGSQHCGHIHCAYQYREHYHCLDPECNYQRFTSKQDVIRHYNMHKKRDNSLQHGFMRFSPLDDCSVYYHGCHLNGKSTHYHCMQVGCNKVYTSTSDVMTHENFHKKNTQLINDGFQRFRATEDCGTADCQFYGQKTTHFHCRRPGCTFTFKNKCDIEKHKSYHIKDDAYAKDGFKKFYKYEECKYEGCVYSKATNHFHCIRAGCGFTFTSTSQMTSHKRKHERRHIRSSGALGLPPSLLGAKDTEHEESSNDDLVDFSALSSKNSSLSASPTSQQSSASLAAATAATEAGPSATKPPNSKISGLLPQGLPGSIPLALALSNSGLPTPTPYFPILAGRGSTSLPVGTPSLLGAVSSGSAASATPDTPTLVASGAGDSAPVAAASVPAPPASIMERISASKGLISPMMARLAAAALKPSATFDPGSGQQVTPARFPPAQVKPEPGESTGAPGPHEASQDRSLDLTVKEPSNESNGHAVPANSSLLSSLMNKMSQGNPGLGSLLNIKAEAEGSPAAEPSPFLGKAVKALVQEKLAEPWKVYLRRFGTKDFCDGQCDFLHKAHFHCVVEECGALFSTLDGAIKHANFHFRTEGGAAKGNTEAAFPASAAETKPPMAPSSPPVPPVTTATVSSLEGPAPSPASVPSTPTLLAWKQLASTIPQMPQIPASVPHLPASPLATTSLENAKPQVKPGFLQFQENDPCLATDCKYANKFHFHCLFGNCKYVCKTSGKAESHCLDHINPNNNLVNVRDQFAYYSLQCLCPNQHCEFRMRGHYHCLRTGCYFVTNITTKLPWHIKKHEKAERRAANGFKYFTKREECGRLGCKYNQVNSHFHCIREGCQFSFLLKHQMTSHARKHMRRMLGKNFDRVPPSQGPPGLMDAETDECMDYTGCSPGAMSSESSTMDRSCSSTPVGNESTAAGNTISMPTASGAKKRFWIIEDMSPFGKRRKTASSRKMLDEGMMLEGFRRFDLYEDCKDAACQFSLKVTHYHCTRENCGYKFCGRTHMYKHAQHHDRVDNLVLDDFKRFKASLSCHFADCPFSGTSTHFHCLRCRFRCTDSTKVTAHRKHHGKQDVISAAGFCQFSSSADCAVPDCKYKLKCSHFHCTFPGCRHTVVGMSQMDSHKRKHEKQERGEPAAEGPAPGPPISLDGSLSLGAEPGSLLFLQSAAAGLGLALGDAGDPGPPDAAAPGPREGAAAAAAAAGESSQEDEEEELELPEEEAEDDEDEDDDEDDDDEDDDEDDDDEDLRTDSEESLPEAAAEAAGAGARTPALAALAALGAPGPAPTAASSP

SEQ ID NO: 14818 - protein, 182 aa, Homo sapiens
MPRVVPDQRSKFENEEFFRKLSRECEIKYTGFRDRPHEERQARFQNACRDGRSEIAFVATGTNLSLQFFPASWQGEQRQTPSREYVDLEREAGKVYLKAPMILNGVCVIWKGWIDLQRLDGMGCLEFDEERAQQEDALAQQAFEEARRRTREFEDRDRSHREEMEVRVSQLLAVTGKKTTRP

SEQ ID NO: 14819 - protein, 727 aa, Homo sapiens
MESEDTKKTQEMKTDLNLLLECLKYQMDNAFSQKEALVTIHSICQQNSNASVYFREIGGLMFVKNLAKSSEHSMVKEAALYTLGAIAEKNVYCQQTLCTSELFEDLTWFLSNDSNINLKRMSVYVILVLVSNNRTGQTLVRETGCITVLSRLFRTVISKHELDLSDKNVFQSYQLWSSVCSTLCVCVNNPQNDENQMFCCSLFPHANEWLKNCTTPEIIRPICSFIGLTLANNTYVQKYFVSVGGLDVLSQVLMQLESDSHETLSSAKLAVVVTKTVDACIADNPTFGIVLSKYHIVSKLLALLLHESLDSGEKFSIMLTLGHCTEDCEENQYDLFKNNGLPLMIQALTESQNEELNKAATFVLHNCKKITEKLSLSLGEYPFDENETQQLKDISVKENNLEEHWRKAKEILHRIEQLEREGNEEEIQRENYQDNISSMNISIQNTWKHLHADRIGRGSKAEDEDKSHSRQLQSYKSHGVMSKACTNDDQMKTPLKSANPVHACYRESEQNKTLYKAKSSCNQNLHEETTFEKNFVSQSSDHVFKHPVHIAKNIKQQLPVTDPFTLCSDIINKEVVSFLATPSCSEMLTYRCSGCIAVEKSLNSRNFSKLLHSCPYQCDRHKVIVEAEDRYKSELRKSLICNKKILLTPRRRQRLSNESTTPGGIKKRRIRKNFTEEEVNYLFNGVKKMGNHWNSILWSFPFQQGRKAVDLAHKYHKLTKHPTCAAS

SEQ ID NO: 14820 - protein, 802 aa, Homo sapiens
MPRIMIKGGVWRNTEDEILKAAVMKYGKNQWSRIASLLHRKSAKQCKARWYEWLDPSIKKTEWSREEEEKLLHLAKLMPTQWRTIAPIIGRTAAQCLEHYEFLLDKAAQRDNEEETTDDPRKLKPGEIDPNPETKPARPDPIDMDEDELEMLSEARARLANTQGKKAKRKAREKQLEEARRLAALQKRRELRAAGIEIQKKRKRKRGVDYNAEIPFEKKPALGFYDTSEENYQALDADFRKLRQQDLDGELRSEKEGRDRKKDKQHLKRKKESDLPSAILQTSGVSEFTKKRSKLVLPAPQISDAELQEVVKVGQASEIARQTAEESGITNSASSTLLSEYNVTNNSVALRTPRTPASQDRILQEAQNLMALTNVDTPLKGGLNTPLHESDFSGVTPQRQVVQTPNTVLSTPFRTPSNGAEGLTPRSGTTPKPVINSTPGRTPLRDKLNINPEDGMADYSDPSYVKQMERESREHLRLGLLGLPAPKNDFEIVLPENAEKELEEREIDDTYIEDAADVDARKQAIRDAERVKEMKRMHKAVQKDLPRPSEVNETILRPLNVEPPLTDLQKSEELIKKEMITMLHYDLLHHPYEPSGNKKGKTVGFGTNNSEHITYLEHNPYEKFSKEELKKAQDVLVQEMEVVKQGMSHGELSSEAYNQVWEECYSQVLYLPGQSRYTRANLASKKDRIESLEKRLEINRGHMTTEAKRAAKMEKKMKILLGGYQSRAMGLMKQLNDLWDQIEQAHLELRTFEELKKHEDSAIPRRLECLKEDVQRQQEREKELQHRYADLLLEKETLKSKF

SEQ ID NO: 14821 - protein, 265 aa, Homo sapiens
MYVGYVLDKDSPVYPGPARPASLGLGPQAYGPPAPPPAPPQYPDFSSYSHVEPAPAPPTAWGAPFPAPKDDWAAAYGPGPAAPAASPASLAFGPPPDFSPVPAPPGPGPGLLAQPLGGPGTPSSPGAQRPTPYEWMRRSVAAGGGGGSGKTRTKDKYRVVYTDHQRLELEKEFHYSRYITIRRKSELAANLGLTERQVKIWFQNRRAKERKVNKKKQQQQQPPQPPMAHDITATPAGPSLGGLCPSNTSLLATSSPMPVKEEFLP

SEQ ID NO: 14822 - protein, 313 aa, Homo sapiens
MYVSYLLDKDVSMYPSSVRHSGGLNLAPQNFVSPPQYPDYGGYHVAAAAAAAANLDSAQSPGPSWPAAYGAPLREDWNGYAPGGAAAAANAVAHGLNGGSPAAAMGYSSPADYHPHHHPHHHPHHPAAAPSCASGLLQTLNPGPPGPAATAAAEQLSPGGQRRNLCEWMRKPAQQSLGSQVKTRTKDKYRVVYTDHQRLELEKEFHYSRYITIRRKAELAATLGLSERQVKIWFQNRRAKERKINKKKLQQQQQQQPPQPPPPPPQPPQPQPGPLRSVPEPLSPVSSLQASVPGSVPGVLGPTGGVLNPTVTQ

SEQ ID NO: 14823 - protein, 284 aa, Homo sapiens
MYGSCLLEKEAGMYPGTLMSPGGDGTAGTGGTGGGGSPMPASNFAAAPAFSHYMGYPHMPSMDPHWPSLGVWGSPYSPPREDWSVYPGPSSTMGTVPVNDVTSSPAAFCSTDYSNLGPVGGGTSGSSLPGQAGGSLVPTDAGAAKASSPSRSRHSPYAWMRKTVQVTGKTRTKEKYRVVYTDHQRLELEKEFHCNRYITIQRKSELAVNLGLSERQVKIWFQNRRAKERKMIKKKISQFENSGGSVQSDSDSISPGELPNTFFTTPSAVRGFQPIEIQQVIVSE

SEQ ID NO: 14824 - protein, 358 aa, Homo sapiens
MESADFYEAEPRPPMSSHLQSPPHAPSSAAFGFPRGAGPAQPPAPPAAPEPLGGICEHETSIDISAYIDPAAFNDEFLADLFQHSRQQEKAKAAVGPTGGGGGGDFDYPGAPAGPGGAVMPGGAHGPPPGYGCAAAGYLDGRLEPLYERVGAPALRPLVIKQEPREEDEAKQLALAGLFPYQPPPPPPPSHPHPHPPPAHLAAPHLQFQIAHCGQTTMHLQPGHPTPPPTPVPSPHPAPALGAAGLPGPGSALKGLGAAHPDLRASGGSGAGKAKKSVDKNSNEYRVRRERNNIAVRKSRDKAKQRNVETQQKVLELTSDNDRLRKRVEQLSRELDTLRGIFRQLPESSLVKAMGNCA

SEQ ID NO: 14825 - protein, 345 aa, Homo sapiens
MQRLVAWDPACLPLPPPPPAFKSMEVANFYYEADCLAAAYGGKAAPAAPPAARPGPRPPAGELGSIGDHERAIDFSPYLEPLGAPQAPAPATATDTFEAAPPAPAPAPASSGQHHDFLSDLFSDDYGGKNCKKPAEYGYVSLGRLGAAKGALHPGCFAPLHPPPPPPPPPAELKAEPGFEPADCKRKEEAGAPGGGAGMAAGFPYALRAYLGYQAVPSGSSGSLSTSSSSSPPGTPSPADAKAPPTACYAGAAPAPSQVKSKAKKTVDKHSDEYKIRRERNNIAVRKSRDKAKMRNLETQHKVLELTAENERLQKKVEQLSRELSTLRNLFKQLPEPLLASSGHC

SEQ ID NO: 14826 - protein, 269 aa, Homo sapiens
MSAALFSLDGPARGAPWPAEPAPFYEPGRAGKPGRGAEPGALGEPGAAAPAMYDDESAIDFSAYIDSMAAVPTLELCHDELFADLFNSNHKAGGAGPLELLPGGPARPLGPGPAAPRLLKREPDWGDGDAPGSLLPAQVAACAQTVVSLAAAGQPTPPTSPEPPRSSPRQTPAPGPAREKSAGKRGPDRGSPEYRQRRERNNIAVRKSRDKAKRRNQEMQQKLVELSAENEKLHQRVEQLTRDLAGLRQFFKQLPSPPFLPAAGTADCR

SEQ ID NO: 14827 - protein, 281 aa, Homo sapiens
MSHGTYYECEPRGGQQPLEFSGGRAGPGELGDMCEHEASIDLSAYIESGEEQLLSDLFAVKPAPEARGLKGPGTPAFPHYLPPDPRPFAYPPHTFGPDRKALGPGIYSSPGSYDPRAVAVKEEPRGPEGSRAASRGSYNPLQYQVAHCGQTAMHLPPTLAAPGQPLRVLKAPLATAAPPCSPLLKAPSPAGPLHKGKKAVNKDSLEYRLRRERNNIAVRKSRDKAKRRILETQQKVLEYMAENERLRSRVEQLTQELDTLRNLFRQIPEAANLIKGVGGCS

SEQ ID NO: 14828 - protein, 150 aa, Homo sapiens
MSKISQQNSTPGVNGISVIHTQAHASGLQQVPQLVPAGPGGGGKAVAPSKQSKKSSPMDRNSDEYRQRRERNNMAVKKSRLKSKQKAQDTLQRVNQLKEENERLEAKIKLLTKELSVLKDLFLEHAHNLADNVQSISTENTTADGDNAGQ

SEQ ID NO: 14829 - protein, 1054 aa, Homo sapiens
MAAVKEPLEFHAKRPWRPEEAVEDPDEEDEDNTSEAENGFSLEEVLRLGGTKQDYLMLATLDENEEVIDGGKKGAIDDLQQGELEAFIQNLNLAKYTKASLVEEDEPAEKENSSKKEVKIPKINNKNTAESQRTSVNKVKNKNRPEPHSDENGSTTPKVKKDKQNIFEFFERQTLLLRPGGKWYDLEYSNEYSLKPQPQDVVSKYKTLAQKLYQHEINLFKSKTNSQKGASSTWMKAIVSSGTLGDRMAAMILLIQDDAVHTLQFVETLVNLVKKKGSKQQCLMALDTFKELLITDLLPDNRKLRIFSQRPFDKLEQLSSGNKDSRDRRLILWYFEHQLKHLVAEFVQVLETLSHDTLVTTKTRALTVAHELLCNKPEEEKALLVQVVNKLGDPQNRIATKASHLLETLLCKHPNMKGVVSGEVERLLFRSNISSKAQYYAICFLNQMALSHEESELANKLITVYFCFFRTCVKKKDVESKMLSALLTGVNRAYPYSQTGDDKVREQIDTLFKVLHIVNFNTSVQALMLLFQVMNSQQTISDRYYTALYRKMLDPGLMTCSKQAMFLNLVYKSLKADIVLRRVKAFVKRLLQVTCQQMPPFICGALYLVSEILKAKPGLRSQLDDHPESDDEENFIDANDDEDMEKFTDADKETEIVKKLETEETVPETDVETKKPEVASWVHFDNLKGGKQLNKYDPFSRNPLFCGAENTSLWELKKLSVHFHPSVALFAKTILQGNYIQYSGDPLQDFTLMRFLDRFVYRNPKPHKGKENTDSVVMQPKRKHFIKDIRHLPVNSKEFLAKEESQIPVDEVFFHRYYKKVAVKEKQKRDADEESIEDVDDEEFEELIDTFEDDNCFSSGKDDMDFAGNVKKRTKGAKDNTLDEDSEGSDDELGNLDDDEVSLGSMDDEEFAEVDEDGGTFMDVLDDESESVPELEVHSKVSTKKSKRKGTDDFDFAGSFQGPRKKKRNLNDSSLFVSAEEFGHLLDENMGSKFDNIGMNAMANKDNASLKQLRWEAERDDWLHNRDAKSIIKKKKHFKKKRIKTTQKTKKQRK

SEQ ID NO: 14830 - protein, 561 aa, Homo sapiens
MADHNPDSDSTPRTLLRRVLDTADPRTPRRPRSARAGARRALLETASPRKLSGQTRTIARGRSHGARSVGRSAHIQASGHLEEQTPRTLLKNILLTAPESSILMPESVVKPVPAPQAVQPSRQESSCGSLELQLPELEPPTTLAPGLLAPGRRKQRLRLSVFQQGVDQGLSLSQEPQGNADASSLTRSLNLTFATPLQPQSVQRPGLARRPPARRAVDVGAFLRDLRDTSLAPPNIVLEDTQPFSQPMVGSPNVYHSLPCTPHTGAEDAEQAAGRKTQSSGPGLQKNSPGKPAQFLAGEAEEVNAFALGFLSTSSGVSGEDEVEPLHDGVEEAEKKMEEEGVSVSEMEATGAQGPSRVEEAEGHTEVTEAEGSQGTAEADGPGASSGDEDASGRAASPESASSTPESLQARRHHQFLEPAPAPGAAVLSSEPAEPLLVRHPPRPRTTGPRPRQDPHKAGLSHYVKLFSFYAKMPMERKALEMVEKCLDKYFQHLCDDLEVFAAHAGRKTVKPEDLELLMRRQGLVTDQVSLHVLVERHLPLEYRQLLIPCAYSGNSVFPAQ

SEQ ID NO: 14831 - protein, 383 aa, Homo sapiens
MFWTFKEWFWLERFWLPPTIKWSDLEDHDGLVFVKPSHLYVTIPYAFLLLIIRRVFEKFVASPLAKSFGIKETVRKVTPNTVLENFFKHSTRQPLQTDIYGLAKKCNLTERQVERWFRSRRNQERPSRLKKFQEACWRFAFYLMITVAGIAFLYDKPWLYDLWEVWNGYPKQPLLPSQYWYYILEMSFYWSLLFRLGFDVKRKDFLAHIIHHLAAISLMSFSWCANYIRSGTLVMIVHDVADIWLESAKMFSYAGWTQTCNTLFFIFSTIFFISRLIVFPFWILYCTLILPMYHLEPFFSYIFLNLQLMILQVLHLYWGYYILKMLNRCIFMKSIQDVRSDDEDYEEEEEEEEEEATKGKEMDCLKNGLRAERHLIPNGQHGH

SEQ ID NO: 14832 - protein, 384 aa, Homo sapiens
MAGILAWFWNERFWLPHNVTWADLKNTEEATFPQAEDLYLAFPLAFCIFMVRLIFERFVAKPCAIALNIQANGPQIAPPNAILEKVFTAITKHPDEKRLEGLSKQLDWDVRSIQRWFRQRRNQEKPSTLTRFCESMWRFSFYLYVFTYGVRFLKKTPWLWNTRHCWYNYPYQPLTTDLHYYYILELSFYWSLMFSQFTDIKRKDFGIMFLHHLVSIFLITFSYVNNMARVGTLVLCLHDSADALLEAAKMANYAKFQKMCDLLFVMFAVVFITTRLGIFPLWVLNTTLFESWEIVGPYPSWWVFNLLLLLVQGLNCFWSYLIVKIACKAVSRGKVSKDDRSDIESSSDEEDSEPPGKNPHTATTTNGTSGTNGYLLTGSCSMDD

SEQ ID NO: 14833 - protein, 812 aa, Homo sapiens
MEAFQELRKPSARLECDHCSFRGTDYENVQIHMGTIHPEFCDEMDAGGLGKMIFYQKSAKLFHCHKCFFTSKMYSNVYYHITSKHASPDKWNDKPKNQLNKETDPVKSPPLPEHQKIPCNSAEPKSIPALSMETQKLGSVLSPESPKPTPLTPLEPQKPGSVVSPELQTPLPSPEPSKPASVSSPEPPKSVPVCESQKLAPVPSPEPQKPAPVSPESVKATLSNPKPQKQSHFPETLGPPSASSPESPVLAASPEPWGPSPAASPESRKSARTTSPEPRKPSPSESPEPWKPFPAVSPEPRRPAPAVSPGSWKPGPPGSPRPWKSNPSASSGPWKPAKPAPSVSPGPWKPIPSVSPGPWKPTPSVSSASWKSSSVSPSSWKSPPASPESWKSGPPELRKTAPTLSPEHWKAVPPVSPELRKPGPPLSPEIRSPAGSPELRKPSGSPDLWKLSPDQRKTSPASLDFPESQKSSRGGSPDLWKSSFFIEPQKPVFPETRKPGPSGPSESPKAASDIWKPVLSIDTEPRKPALFPEPAKTAPPASPEARKRALFPEPRKHALFPELPKSALFSESQKAVELGDELQIDAIDDQKCDILVQEELLASPKKLLEDTLFPSSKKLKKDNQESSDAELSSSEYIKTDLDAMDIKGQESSSDQEQVDVESIDFSKENKMDMTSPEQSRNVLQFTEEKEAFISEEEIAKYMKRGKGKYYCKICCCRAMKKGAVLHHLVNKHNVHSPYKCTICGKAFLLESLLKNHVAAHGQSLLKCPRCNFESNFPRGFKKHLTHCQSRHNEEANKKLMEALEPPLEEQQI

SEQ ID NO: 14834 - protein, 1608 aa, Homo sapiens
MYSAHRPLMPASSAASRGLGMFVWTNVEPRSVAVFPWHSLVPFLAPSQPDPSVQPSEAQQPASHPVASNQSKEPAESAAVAHERPPGGTGSADPERPPGATCPESPGPGPPHPLGVVESGKGPPPTTEEEASGPPGEPRLDSETESDHDDAFLSIMSPEIQLPLPPGKRRTQSLSALPKERDSSSEKDGRSPNKREKDHIRRPMNAFMIFSKRHRALVHQRHPNQDNRTVSKILGEWWYALGPKEKQKYHDLAFQVKEAHFKAHPDWKWCNKDRKKSSSEAKPTSLGLAGGHKETRERSMSETGTAAAPGVSSELLSVAAQTLLSSDTKAPGSSSCGAERLHTVGGPGSARPRAFSHSGVHSLDGGEVDSQALQELTQMVSGPASYSGPKPSTQYGAPGPFAAPGEGGALAATGRPPLLPTRASRSQRAASEDMTSDEERMVICEEEGDDDVIADDGFGTTDIDLKCKERVTDSESGDSSGEDPEGNKGFGRKVFSPVIRSSFTHCRPPLDPEPPGPPDPPVAFGKGYGSAPSSSASSPASSSASAATSFSLGSGTFKAQESGQGSTAGPLRPPPPGAGGPATPSKATRFLPMDPATFRRKRPESVGGLEPPGPSVIAAPPSGGGNILQTLVLPPNKEEQEGGGARVPSAPAPSLAYGAPAAPLSRPAATMVTNVVRPVSSTPVPIASKPFPTSGRAEASPNDTAGARTEMGTGSRVPGGSPLGVSLVYSDKKSAAATSPAPHLVAGPLLGTVGKAPATVTNLLVGTPGYGAPAPPAVQFIAQGAPGGGTTAGSGAGAGSGPNGPVPLGILQPGALGKAGGITQVQYILPTLPQQLQVAPAPAPAPGTKAAAPSGPAPTTSIRFTLPPGTSTNGKVLAATAPTPGIPILQSVPSAPPPKAQSVSPVQAPPPGGSAQLLPGKVLVPLAAPSMSVRGGGAGQPLPLVSPPFSVPVQNGAQPPSKIIQLTPVPVSTPSGLVPPLSPATLPGPTSQPQKVLLPSSTRITYVQSAGGHALPLGTSPASSQAGTVTSYGPTSSVALGFTSLGPSGPAFVQPLLSAGQAPLLAPGQVGVSPVPSPQLPPACAAPGGPVITAFYSGSPAPTSSAPLAQPSQAPPSLVYTVATSTTPPAATILPKGPPAPATATPAPTSPFPSATAGSMTYSLVAPKAQRPSPKAPQKVKAAIASIPVGSFEAGASGRPGPAPRQPLEPGPVREPTAPESELEGQPTPPAPPPLPETWTPTARSSPPLPPPAEERTSAKGPETMASKFPSSSSDWRVPGQGLENRGEPPTPPSPAPAPAVAPGGSSESSSGRAAGDTPERKEAAGTGKKVKVRPPPLKKTFDSVDNRVLSEVDFEERFAELPEFRPEEVLPSPTLQSLATSPRAILGSYRKKRKNSTDLDSAPEDPTSPKRKMRRRSSCSSEPNTPKSAKCEGDIFTFDRTGTEAEDVLGELEYDKVPYSSLRRTLDQRRALVMQLFQDHGFFPSAQATAAFQARYADIFPSKVCLQLKIREVRQKIMQAATPTEQPPGAEAPLPVPPPTGTAAAPAPTPSPAGGPDPTSPSSDSGTAQAAPPLPPPPESGPGQPGWEGAPQPSPPPPGPSTAATGR

SEQ ID NO: 14835 - protein, 898 aa, Homo sapiens
MFSQQQQQQLQQQQQQLQQLQQQQLQQQQLQQQQLLQLQQLLQQSPPQAPLPMAVSRGLPPQQPQQPLLNLQGTNSASLLNGSMLQRALLLQQLQGLDQFAMPPATYDTAGLTMPTATLGNLRGYGMASPGLAAPSLTPPQLATPNLQQFFPQATRQSLLGPPPVGVPMNPSQFNLSGRNPQKQARTSSSTTPNRKDSSSQTMPVEDKSDPPEGSEEAAEPRMDTPEDQDLPPCPEDIAKEKRTPAPEPEPCEASELPAKRLRSSEEPTEKEPPGQLQVKAQPQARMTVPKQTQTPDLLPEALEAQVLPRFQPRVLQVQAQVQSQTQPRIPSTDTQVQPKLQKQAQTQTSPEHLVLQQKQVQPQLQQEAEPQKQVQPQVQPQAHSQGPRQVQLQQEAEPLKQVQPQVQPQAHSQPPRQVQLQLQKQVQTQTYPQVHTQAQPSVQPQEHPPAQVSVQPPEQTHEQPHTQPQVSLLAPEQTPVVVHVCGLEMPPDAVEAGGGMEKTLPEPVGTQVSMEEIQNESACGLDVGECENRAREMPGVWGAGGSLKVTILQSSDSRAFSTVPLTPVPRPSDSVSSTPAATSTPSKQALQFFCYICKASCSSQQEFQDHMSEPQHQQRLGEIQHMSQACLLSLLPVPRDVLETEDEEPPPRRWCNTCQLYYMGDLIQHRRTQDHKIAKQSLRPFCTVCNRYFKTPRKFVEHVKSQGHKDKAKELKSLEKEIAGQDEDHFITVDAVGCFEGDEEEEEDDEDEEEIEVEEELCKQVRSRDISREEWKGSETYSPNTAYGVDFLVPVMGYICRICHKFYHSNSGAQLSHCKSLGHFENLQKYKAAKNPSPTTRPVSRRCAINARNALTALFTSSGRPPSQPNTQDKTPSKVTARPSQPPLPRRSTRLKT

SEQ ID NO: 14836 - protein, 846 aa, Homo sapiens
MLFTVSCSKMSSIVDRDDSSIFDGLVEEDDKDKAKRVSRNKSEKKRRDQFNVLIKELGSMLPGNARKMDKSTVLQKSIDFLRKHKEITAQSDASEIRQDWKPTFLSNEEFTQLMLEALDGFFLAIMTDGSIIYVSESVTSLLEHLPSDLVDQSIFNFIPEGEHSEVYKILSTHLLESDSLTPEYLKSKNQLEFCCHMLRGTIDPKEPSTYEYVKFIGNFKSLNSVSSSAHNGFEGTIQRTHRPSYEDRVCFVATVRLATPQFIKEMCTVEEPNEEFTSRHSLEWKFLFLDHRAPPIIGYLPFEVLGTSGYDYYHVDDLENLAKCHEHLMQYGKGKSCYYRFLTKGQQWIWLQTHYYITYHQWNSRPEFIVCTHTVVSYAEVRAERRRELGIEESLPETAADKSQDSGSDNRINTVSLKEALERFDHSPTPSASSRSSRKSSHTAVSDPSSTPTKIPTDTSTPPRQHLPAHEKMVQRRSSFSSQSINSQSVGSSLTQPVMSQATNLPIPQGMSQFQFSAQLGAMQHLKDQLEQRTRMIEANIHRQQEELRKIQEQLQMVHGQGLQMFLQQSNPGLNFGSVQLSSGNSSNIQQLAPINMQGQVVPTNQIQSGMNTGHIGTTQHMIQQQTLQSTSTQSQQNVLSGHSQQTSLPSQTQSTLTAPLYNTMVISQPAAGSMVQIPSSMPQNSTQSAAVTTFTQDRQIRFSQGQQLVTKLVTAPVACGAVMVPSTMLMGQVVTAYPTFATQQQQSQTLSVTQQQQQQSSQEQQLTSVQQPSQAQLTQPPQQFLQTSRLLHGNPSTQLILSAAFPLQQSTFPQSHHQQHQSQQQQQLSRHRTDSLPDPSKVQPQ

SEQ ID NO: 14837 - protein, 575 aa, Homo sapiens
MSRSPDAKEDPVECPLCMEPLEIDDINFFPCTCGYQICRFCWHRIRTDENGLCPACRKPYPEDPAVYKPLSQEELQRIKNEKKQKQNERKQKISENRKHLASVRVVQKNLVFVVGLSQRLADPEVLKRPEYFGKFGKIHKVVINNSTSYAGSQGPSASAYVTYIRSEDALRAIQCVNNVVVDGRTLKASLGTTKYCSYFLKNMQCPKPDCMYLHELGDEAASFTKEEMQAGKHQEYEQKLLQELYKLNPNFLQLSTGSVDKNKNKVTPLQRYDTPIDKPSDSLSIGNGDNSQQISNSDTPSPPPGLSKSNPVIPISSSNHSARSPFEGAVTESQSLFSDNFRHPNPIPSGLPPFPSSPQTSSDWPTAPEPQSLFTSETIPVSSSTDWQAAFGFGSSKQPEDDLGFDPFDVTRKALADLIEKELSVQDQPSLSPTSLQNSSSHTTTAKGPGSGFLHPAAATNANSLNSTFSVLPQRFPQFQQHRAVYNSFSFPGQAARYPWMAFPRNSIMHLNHTANPTSNSNFLDLNLPPQHNTGLGGIPVAGEEEVKVSTMPLSTSSHSLQQGQQPTSLHTTVA

SEQ ID NO: 14838 - protein, 301 aa, Homo sapiens
MSYPTKEGSDTAGNAHKNSENEPPNDCSTDIESPSADPNMIYQVETNPINREPGTATSQEDVVPQAAENSELETEIQKDQREEDLKEELLLLQTPIPRKLVSHKPLNDRSRSHSGKVEMKANNFPINHKTRFRLSTSWRVPFINSHEIRSMILHLLCDRYFSQAAGCQNTMWVKRKYIACLYHPNSFTHHERAITFRRPSRVHYYRPLTERMTSGKFCKSTDTKGKCRFRAIVRSVLFVSQIQIESIFNIKGFVDILTYIHTMNVMITNTNNGWKYFCPICGRLFNTYSELRQHSCSSSGN

SEQ ID NO: 14839 - protein, 1269 aa, Homo sapiens
MTVKLGDGGSGEDGLKKLGKRAADEESLEGEGAGGADAAEESSGTKRDEKTPRAGADGPPAPPGAPQAPSPPQGSPQDQHHFLRSSVRPQSKRPRKDPPSAVGSGNAGGSGPRGKGAEGGGSSSGNVSGVAPAAPAGGSRSSSRNLGSSGGEKEEGKKVRRQWESWSTEDKNTFFEGLYEHGKDFEAIQNNIALKYKKKGKPASMVKNKEQVRHFYYRTWHKITKYIDFDHVFSRGLKKSSQELYGLICYGELRKKIGGCMDDKNATKLNELIQVGATTVRYKGRNLRIKAPMCRALKKLCDPDGLSDEEDQKPVRLPLKVPIELQPRNNHAWARVQSLAQNPRLRMIVELHRKVSSLIEFLKQKWALHEVRVRKTLEERQLQDSCSAPMQEKVTLHLFPGENCTLTPLPGVARVVHSKAFCTVHWQEGGRCKQSAKDAHVLPPAQILGIQSGQGTARGQVKCPRSGAEGKGVGRPPPAADALQSSGESSPESAPGEGAALSLSSPDAPDRPPPRHQDTGPCLEKTPAEGRDSPTREPGALPCACGQLPDLEDELSLLDPLPRYLKSCQDLIVPEQCRCADTRPGSEQPPLGGAASPEVLAPVSKEAADLAPTGPSPRPGPGLLLDVCTKDLADAPAEELQEKGSPAGPPPSQGQPAARPPKEVPASRLAQQLREEGWNLQTSESLTLAEVYLMMGKPSKLQLEYDWLGPGRQDPRPGSLPTALHKQRLLSCLLKLISTEVNPKLALEANTISTASVRPAQEEQSMTPPGKVVTVSSRSPRCPRNQASLRSSKTFPPSSAPCSSGLRNPPRPLLVPGPSSTGSNDSDGGLFAVPTTLPPNSRHGKLFSPSKEAELTFRQHLNSISMQSDFFLPKPRKLRNRHLRKPLVVQRTLLPRPSENQSHNVCSFSILSNSSVTGRGSFRPIQSSLTKAALSRPIVPKVLPPQATSHLASAIDLAATSAGILSGNPLPALDTEGLSGISPLSSDEVTGAISGQDSTGTHQDGDTLPTVGGSDPFVSIPSRPEQEPVADSFQGSSVLSLSELPKAPLQNGLSIPLSSSESSSTRLSPPDVSALLDISLPGPPEDALSQGEPATHISDSIIEIAISSGQYGEGVPLSPAKLNGSDSSKSLPSPSSSPQPHWIASPTHDPQWYPSDSTDSSLSSLFASFISPEKSRKMLPTPIGTNSGTSLLGPSLLDGNSRDSFVSRSLADVAEVVDSQLVCMMNENSIDYISRFNDLAQELSIAEPGRREALFDGGGGGPAVSDLSQ

SEQ ID NO: 14840 - protein, 341 aa, Homo sapiens
MTMESGAENQQSGDAAVTEAENQQMTVQAQPQIATLAQVSMPAAHATSSAPTVTLVQLPNGQTVQVHGVIQAAQPSVIQSPQVQTVQSSCKDLKRLFSGTQISTIAESEDSQESVDSVTDSQKRREILSRRPSYRKILNDLSSDAPGVPRIEEEKSEEETSAPAITTVTVPTPIYQTSSGQYIAITQGGAIQLANNGTDGVQGLQTLTMTNAAATQPGTTILQYAQTTDGQQILVPSNQVVVQAASGDVQTYQIRTAPTSTIAPGVVMASSPALPTQPAEEAARKREVRLMKNREAARECRRKKKEYVKCLENRVAVLENQNKTLIEELKALKDLYCHKSD

SEQ ID NO: 14841 - protein, 371 aa, Homo sapiens
MELELDAGDQDLLAFLLEESGDLGTAPDEAVRAPLDWALPLSEVPSDWEVDDLLCSLLSPPASLNILSSSNPCLVHHDHTYSLPRETVSMDLESESCRKEGTQMTPQHMEELAEQEIARLVLTDEEKSLLEKEGLILPETLPLTKTEEQILKRVRRKIRNKRSAQESRRKKKVYVGGLESRVLKYTAQNMELQNKVQLLEEQNLSLLDQLRKLQAMVIEISNKTSSSSTCILVLLVSFCLLLVPAMYSSDTRGSLPAEHGVLSRQLRALPSEDPYQLELPALQSEVPKDSTHQWLDGSDCVLQAPGNTSCLLHYMPQAPSAEPPLEWPFPDLFSEPLCRGPILPLQANLTRKGGWLPTGSPSVILQDRYSG

SEQ ID NO: 14842 - protein, 519 aa, Homo sapiens
MDAVLEPFPADRLFPGSSFLDLGDLNESDFLNNAHFPEHLDHFTENMEDFSNDLFSSFFDDPVLDEKSPLLDMELDSPTPGIQAEHSYSLSGDSAPQSPLVPIKMEDTTQDAEHGAWALGHKLCSIMVKQEQSPELPVDPLAAPSAMAAAAAMATTPLLGLSPLSRLPIPHQAPGEMTQLPVIKAEPLEVNQFLKVTPEDLVQMPPTPPSSHGSDSDGSQSPRSLPPSSPVRPMARSSTAISTSPLLTAPHKLQGTSGPLLLTEEEKRTLIAEGYPIPTKLPLTKAEEKALKRVRRKIKNKISAQESRRKKKEYVECLEKKVETFTSENNELWKKVETLENANRTLLQQLQKLQTLVTNKISRPYKMAATQTGTCLMVAALCFVLVLGSLVPCLPEFSSGSQTVKEDPLAADGVYTASQMPSRSLLFYDDGAGLWEDGRSTLLPMEPPDGWEINPGGPAEQRPRDHLQHDHLDSTHETTKYLSEAWPKDGGNGTSPDFSHSKEWFHDRDLGPNTTIKLS

SEQ ID NO: 14843 - protein, 520 aa, Homo sapiens
MEVLESGEQGVLQWDRKLSELSEPGDGEALMYHTHFSELLDEFSQNVLGQLLNDPFLSEKSVSMEVEPSPTSPAPLIQAEHSYSLCEEPRAQSPFTHITTSDSFNDDEVESEKWYLSTDFPSTSIKTEPVTDEPPPGLVPSVTLTITAISTPLEKEEPPLEMNTGVDSSCQTIIPKIKLEPHEVDQFLNFSPKEAPVDHLHLPPTPPSSHGSDSEGSLSPNPRLHPFSLPQTHSPSRAAPRAPSALSSSPLLTAPHKLQGSGPLVLTEEEKRTLIAEGYPIPTKLPLSKSEEKALKKIRRKIKNKISAQESRRKKKEYMDSLEKKVESCSTENLELRKKVEVLENTNRTLLQQLQKLQTLVMGKVSRTCKLAGTQTGTCLMVVVLCFAVAFGSFFQGYGPYPSATKMALPSQHSLQEPYTASVVRSRNLLIYEEHSPPEESSSPGSAGELGGWDRGSSLLRVSGLESRPDVDLPHFIISNETSLEKSVLLELQQHLVSAKLEGNETLKVVELDRRVNTTF

SEQ ID NO: 14844 - protein, 461 aa, Homo sapiens
MNTDLAAGKMASAACSMDPIDSFELLDLLFDRQDGILRHVELGEGWGHVKDQQVLPNPDSDDFLSSILGSGDSLPSSPLWSPEGSDSGISEDLPSDPQDTPPRSGPATSPAGCHPAQPGKGPCLSYHPGNSCSTTTPGPVIQVPEASVTIDLEMWSPGGRICAEKPADPVDLSPRCNLTVKDLLLSGSSGDLQQHHLGASYLLRPGAGHCQELVLTEDEKKLLAKEGITLPTQLPLTKYEERVLKKIRRKIRNKQSAQESRKKKKEYIDGLETRMSACTAQNQELQRKVLHLEKQNLSLLEQLKKLQAIVVQSTSKSAQTGTCVAVLLLSFALIILPSISPFGPNKTESPGDFAPVRVFSRTLHNDAASRVAADAVPGSEAPGPRPEADTTREESPGSPGADWGFQDTANLTNSTEELDNATLVLRNATEGLGQVALLDWVAPGPSTGSGRAGLEAAGDEL

SEQ ID NO: 14845 - protein, 395 aa, Homo sapiens
MDLGIPDLLDAWLEPPEDIFSTGSVLELGLHCPPPEVPVTRLQEQGLQGWKSGGDRGCGLQESEPEDFLKLFIDPNEVYCSEASPGSDSGISEDPCHPDSPPAPRATSSPMLYEVVYEAGALERMQGETGPNVGLISIQLDQWSPAFMVPDSCMVSELPFDAHAHILPRAGTVAPVPCTTLLPCQTLFLTDEEKRLLGQEGVSLPSHLPLTKAEERVLKKVRRKIRNKQSAQDSRRRKKEYIDGLESRVAACSAQNQELQKKVQELERHNISLVAQLRQLQTLIAQTSNKAAQTSTCVLILLFSLALIILPSFSPFQSRPEAGSEDYQPHGVTSRNILTHKDVTENLETQVVESRLREPPGAKDANGSTRTLLEKMGGKPRPSGRIRSVLHADEM

SEQ ID NO: 14846 - protein, 508 aa, Homo sapiens
MIYEESKMNLEQERPFVCSAPGCSQRFPTEDHLMIHRHKHEMTLKFPSIKTDNMLSDQTPTPTRFLKNCEEVGLFSELDCSLEHEFRKAQEEESSKRNISMHNAVGGAMTGPGTHQLSSARLPNHDTNVVIQQAMPSPQSSSVITQAPSTNRQIGPVPGSLSSLLHLHNRQRQPMPASMPGTLPNPTMPGSSAVLMPMERQMSVNSSIMGMQGPNLSNPCASPQVQPMHSEAKMRLKAALTHHPAAMSNGNMNTMGHMMEMMGSRQDQTPHHHMHSHPHQHQTLPPHHPYPHQHQHPAHHPHPQPHHQQNHPHHHSHSHLHAHPAHHQTSPHPPLHTGNQAQVSPATQQMQPTQTIQPPQPTGGRRRRVVDEDPDERRRKFLERNRAAATRCRQKRKVWVMSLEKKAEELTQTNMQLQNEVSMLKNEVAQLKQLLLTHKDCPITAMQKESQGYLSPESSPPASPVPACSQQQVIQHNTITTSSSVSEVVGSSTLSQLTTHRTDLNPIL

SEQ ID NO: 14847 - protein, 2442 aa, Homo sapiens
MAENLLDGPPNPKRAKLSSPGFSANDSTDFGSLFDLENDLPDELIPNGGELGLLNSGNLVPDAASKHKQLSELLRGGSGSSINPGIGNVSASSPVQQGLGGQAQGQPNSANMASLSAMGKSPLSQGDSSAPSLPKQAASTSGPTPAASQALNPQAQKQVGLATSSPATSQTGPGICMNANFNQTHPGLLNSNSGHSLINQASQGQAQVMNGSLGAAGRGRGAGMPYPTPAMQGASSSVLAETLTQVSPQMTGHAGLNTAQAGGMAKMGITGNTSPFGQPFSQAGGQPMGATGVNPQLASKQSMVNSLPTFPTDIKNTSVTNVPNMSQMQTSVGIVPTQAIATGPTADPEKRKLIQQQLVLLLHAHKCQRREQANGEVRACSLPHCRTMKNVLNHMTHCQAGKACQVAHCASSRQIISHWKNCTRHDCPVCLPLKNASDKRNQQTILGSPASGIQNTIGSVGTGQQNATSLSNPNPIDPSSMQRAYAALGLPYMNQPQTQLQPQVPGQQPAQPQTHQQMRTLNPLGNNPMNIPAGGITTDQQPPNLISESALPTSLGATNPLMNDGSNSGNIGTLSTIPTAAPPSSTGVRKGWHEHVTQDLRSHLVHKLVQAIFPTPDPAALKDRRMENLVAYAKKVEGDMYESANSRDEYYHLLAEKIYKIQKELEEKRRSRLHKQGILGNQPALPAPGAQPPVIPQAQPVRPPNGPLSLPVNRMQVSQGMNSFNPMSLGNVQLPQAPMGPRAASPMNHSVQMNSMGSVPGMAISPSRMPQPPNMMGAHTNNMMAQAPAQSQFLPQNQFPSSSGAMSVGMGQPPAQTGVSQGQVPGAALPNPLNMLGPQASQLPCPPVTQSPLHPTPPPASTAAGMPSLQHTTPPGMTPPQPAAPTQPSTPVSSSGQTPTPTPGSVPSATQTQSTPTVQAAAQAQVTPQPQTPVQPPSVATPQSSQQQPTPVHAQPPGTPLSQAAASIDNRVPTPSSVASAETNSQQPGPDVPVLEMKTETQAEDTEPDPGESKGEPRSEMMEEDLQGASQVKEETDIAEQKSEPMEVDEKKPEVKVEVKEEEESSSNGTASQSTSPSQPRKKIFKPEELRQALMPTLEALYRQDPESLPFRQPVDPQLLGIPDYFDIVKNPMDLSTIKRKLDTGQYQEPWQYVDDVWLMFNNAWLYNRKTSRVYKFCSKLAEVFEQEIDPVMQSLGYCCGRKYEFSPQTLCCYGKQLCTIPRDAAYYSYQNRYHFCEKCFTEIQGENVTLGDDPSQPQTTISKDQFEKKKNDTLDPEPFVDCKECGRKMHQICVLHYDIIWPSGFVCDNCLKKTGRPRKENKFSAKRLQTTRLGNHLEDRVNKFLRRQNHPEAGEVFVRVVASSDKTVEVKPGMKSRFVDSGEMSESFPYRTKALFAFEEIDGVDVCFFGMHVQEYGSDCPPPNTRRVYISYLDSIHFFRPRCLRTAVYHEILIGYLEYVKKLGYVTGHIWACPPSEGDDYIFHCHPPDQKIPKPKRLQEWYKKMLDKAFAERIIHDYKDIFKQATEDRLTSAKELPYFEGDFWPNVLEESIKELEQEEEERKKEESTAASETTEGSQGDSKNAKKKNNKKTNKNKSSISRANKKKPSMPNVSNDLSQKLYATMEKHKEVFFVIHLHAGPVINTLPPIVDPDPLLSCDLMDGRDAFLTLARDKHWEFSSLRRSKWSTLCMLVELHTQGQDRFVYTCNECKHHVETRWHCTVCEDYDLCINCYNTKSHAHKMVKWGLGLDDEGSSQGEPQSKSPQESRRLSIQRCIQSLVHACQCRNANCSLPSCQKMKRVVQHTKGCKRKTNGGCPVCKQLIALCCYHAKHCQENKCPVPFCLNIKHKLRQQQIQHRLQQAQLMRRRMATMNTRNVPQQSLPSPTSAPPGTPTQQPSTPQTPQPPAQPQPSPVSMSPAGFPSVARTQPPTTVSTGKPTSQVPAPPPPAQPPPAAVEAARQIEREAQQQQHLYRVNINNSMPPGRTGMGTPGSQMAPVSLNVPRPNQVSGPVMPSMPPGQWQQAPLPQQQPMPGLPRPVISMQAQAAVAGPRMPSVQPPRSISPSALQDLLRTLKSPSSPQQQQQVLNILKSNPQLMAAFIKQRTAKYVANQPGMQPQPGLQSQPGMQPQPGMHQQPSLQNLNAMQAGVPRPGVPPQQQAMGGLNPQGQALNIMNPGHNPNMASMNPQYREMLRRQLLQQQQQQQQQQQQQQQQQQGSAGMAGGMAGHGQFQQPQGPGGYPPAMQQQQRMQQHLPLQGSSMGQMAAQMGQLGQMGQPGLGADSTPNIQQALQQRILQQQQMKQQIGSPGQPNPMSPQQHMLSGQPQASHLPGQQIATSLSNQVRSPAPVQSPRPQSQPPHSSPSPRIQPQPSPHHVSPQTGSPHPGLAVTMASSIDQGHLGNPEQSAMLPQLNTPSRSALSSELSLVGDTTGDTLEKFVEGL

SEQ ID NO: 14848 - protein, 120 aa, Homo sapiens
MDDSKVVGGKVKKPGKRGRKPAKIDLKAKLERSRQSARECRARKKLRYQYLEELVSSRERAICALREELEMYKQWCMAMDQGKIPSEIKALLTGEEQNKSQQNSSRHTKAGKTDANSNSW

SEQ ID NO: 14849 - protein, 639 aa, Homo sapiens
MPQPSVSGMDPPFGDAFRSHTFSEQTLMSTDLLANSSDPDFMYELDREMNYQQNPRDNFLSLEDCKDIENLESFTDVLDNEGALTSNWEQWDTYCEDLTKYTKLTSCDIWGTKEVDYLGLDDFSSPYQDEEVISKTPTLAQLNSEDSQSVSDSLYYPDSLFSVKQNPLPSSFPGKKITSRAAAPVCSSKTLQAEVPLSDCVQKASKPTSSTQIMVKTNMYHNEKVNFHVECKDYVKKAKVKINPVQQSRPLLSQIHTDAAKENTCYCGAVAKRQEKKGMEPLQGHATPALPFKETQELLLSPLPQEGPGSLAAGESSSLSASTSVSDSSQKKEEHNYSLFVSDNLGEQPTKCSPEEDEEDEEDVDDEDHDEGFGSEHELSENEEEEEEEEDYEDDKDDDISDTFSEPGYENDSVEDLKEVTSISSRKRGKRRYFWEYSEQLTPSQQERMLRPSEWNRDTLPSNMYQKNGLHHGKYAVKKSRRTDVEDLTPNPKKLLQIGNELRKLNKVISDLTPVSELPLTARPRSRKEKNKLASRACRLKKKAQYEANKVKLWGLNTEYDNLLFVINSIKQEIVNRVQNPRDERGPNMGQKLEILIKDTLGLPVAGQTSEFVNQVLEKTAEGNPTGGLVGLRIPTSKV

SEQ ID NO: 14850 - protein, 354 aa, Homo sapiens
MRHSLTKLLAASGSNSPTRSESPEPAATCSLPSDLTRAAAGEEETAAAGSPGRKQQFGDEGELEAGRGSRGGVAVRAPSPEEMEEEAIASLPGEETEDMDFLSGLELADLLDPRQPDWHLDPGLSSPGPLSSSGGGSDSGGLWRGDDDDEAAAAEMQRFSDLLQRLLNGIGGCSSSSDSGSAEKRRRKSPGGGGGGGSGNDNNQAATKSPRKAAAAAARLNRLKKKEYVMGLESRVRGLAAENQELRAENRELGKRVQALQEESRYLRAVLANETGLARLLSRLSGVGLRLTTSLFRDSPAGDHDYALPVGKQKQDLLEEDDSAGGVCLHVDKDKVSVEFCSACARKASSSLKM

SEQ ID NO: 14851 - protein, 361 aa, Homo sapiens
MSKCARKKYIKTNPRQMTMETVESQHDGSITASLTESKSAHVQTQTGQNSIPALAQVSVAGSGTRRGSPAVTLVQLPSGQTIHVQGVIQTPQPWVIQSSEIHTVQVAAIAETDESAESEGVIDSHKRREILSRRPSYRKILNELSSDVPGVPKIEEERSEEEGTPPSIATMAVPTSIYQTSTGQYIAIAQGGTIQISNPGSDGVQGLQALTMTNSGAPPPGATIVQYAAQSADGTQQFFVPGSQVVVQDEETELAPSHMAAATGDMPTYQIRAPTAALPQGVVMAASPGSLHSPQQLAEEATRKRELRLMKNREAAKECRRRKKEYVKCLESRVAVLEVQNKKLIEELETLKDICSPKTDY

SEQ ID NO: 14852 - protein, 299 aa, Homo sapiens [sequence omitted]

SEQ ID NO: 14853 - protein, 589 aa, Homo sapiens
MTGLLKRKFDQLDEDNSSVSSSSSSSGCQSRSCSPSSSVSRAWDSEEEGPWDQMPLPDRDFCGPRSFTPLSILKRARRERPGRVAFDGITVFYFPRCQGFTSVPSRGGCTLGMALRHSACRRFSLAEFAQEQARARHEKLRQRLKEEKLEMLQWKLSAAGVPQAEAGLPPVVDAIDDASVEEDLAVAVAGGRLEEVSFLQPYPARRRRALLRASGVRRIDREEKRELQALRQSREDCGCHCDRICDPETCSCSLAGIKCQMDHTAFPCGCCREGCENPMGRVEFNQARVQTHFIHTLTRLQLEQEAESFRELEAPAQGSPPSPGEEALVPTFPLAKPPMNNELGDNSCSSDMTDSSTASSSASGTSEAPDCPTHPGLPGPGFQPGVDDDSLARILSFSDSDFGGEEEEEEEGSVGNLDNLSCFHPADIFGTSDPGGLASWTHSYSGCSFTSGVLDENANLDASCFLNGGLEGSREGSLPGTSVPPSMDAGRSSSVDLSLSSCDSFELLQALPDYSLGPHYTSQKVSDSLDNIEAPHFPLPGLSPPGDASSCFLESLMGFSEPAAEALDPFIDSQFEDTVPASLMEPVPV

SEQ ID NO: 14854 - protein, 543 aa, Homo sapiens
MDAFTGSGLKRKFDDVDVGSSVSNSDDEISSSDSADSCDSLNPPTTASFTPTSILKRQKQLRRKNVRFDQVTVYYFARRQGFTSVPSQGGSSLGMAQRHNSVRSYTLCEFAQEQEVNHREILREHLKEEKLHAKKMKLTKNGTVESVEADGLTLDDVSDEDIDVENVEVDDYFFLQPLPTKRRRALLRASGVHRIDAEEKQELRAIRLSREECGCDCRLYCDPEACACSQAGIKCQVDRMSFPCGCSRDGCGNMAGRIEFNPIRVRTHYLHTIMKLELESKRQVSRPAAPDEEPSPTASCSLTGAQGSETQDFQEFIAENETAVMHLQSAEELERLKAEEDSSGSSASLDSSIESLGVCILEEPLAVPEELCPGLTAPILIQAQLPPGSSVLCFTENSDHPTASTVNSPSYLNSGPLVYYQVEQRPVLGVKGEPGTEEGSASFPKEKDLNVFSLPVTSLVACSSTDPAALCKSEVGKTPTLEALLPEDCNPEEPENEDFHPSWSPSSLPFRTDNEEGCGMVKTSQQNEDRPPEDSSLELPLAV

SEQ ID NO: 14855 - protein, 585 aa, Homo sapiens
MSGILKRKFEEVDGSSPCSSVRESDDEVSSSESADSGDSVNPSTSSHFTPSSILKREKRLRTKNVHFSCVTVYYFTRRQGFTSVPSQGGSTLGMSSRHNSVRQYTLGEFAREQERLHREMLREHLREEKLNSLKLKMTKNGTVESEEASTLTLDDISDDDIDLDNTEVDEYFFLQPLPTKKRRALLRASGVKKIDVEEKHELRAIRLSREDCGCDCRVFCDPDTCTCSLAGIKCQVDRMSFPCGCTKEGCSNTAGRIEFNPIRVRTHFLHTIMKLELEKNREQQIPTLNGCHSEISAHSSSMGPVAHSVEYSIADSFEIETEPQAAVLHLQSAEELDCQGEEEEEEEDGSSFCSGVTDSSTQSLAPSESDEEEEEEEEEEEEEDDDDDKGDGFVEGLGTHAEVVPLPSVLCYSDGTAVHESHAKNASFYANSSTLYYQIDSHIPGTPNQISENYSERDTVKNGTLSLVPYTMTPEQFVDYARQAEEAYGASHYPAANPSVIVCCSSSENDSGVPCNSLYPEHRSNHPQVEFHSYLKGPSQEGFVSALNGDSHISEHPAENSLSLAEKSILHEECIKSPVVETVPV

SEQ ID NO: 14856 - protein, 727 aa, Homo sapiens
MEGDAVEAIVEESETFIKGKERKTYQRRREGGQEEDACHLPQNQTDGGEVVQDVNSSVQMVMMEQLDPTLLQMKTEVMEGTVAPEAEAAVDDTQIITLQVVNMEEQPINIGELQLVQVPVPVTVPVATTSVEELQGAYENEVSKEGLAESEPMICHTLPLPEGFQVVKVGANGEVETLEQGELPPQEDPSWQKDPDYQPPAKKTKKTKKSKLRYTEEGKDVDVSVYDFEEEQQEGLLSEVNAEKVVGNMKPPKPTKIKKKGVKKTFQCELCSYTCPRRSNLDRHMKSHTDERPHKCHLCGRAFRTVTLLRNHLNTHTGTRPHKCPDCDMAFVTSGELVRHRRYKHTHEKPFKCSMCDYASVEVSKLKRHIRSHTGERPFQCSLCSYASRDTYKLKRHMRTHSGEKPYECYICHARFTQSGTMKMHILQKHTENVAKFHCPHCDTVIARKSDLGVHLRKQHSYIEQGKKCRYCDAVFHERYALIQHQKSHKNEKRFKCDQCDYACRQERHMIMHKRTHTGEKPYACSHCDKTFRQKQLLDMHFKRYHDPNFVPAAFVCSKCGKTFTRRNTMARHADNCAGPDGVEGENGGETKKSKRGRKRKMRSKKEDSSDSENAEPDLDDNEDEEEPAVEIEPEPEPQPVTPAPPPAKKRRGRPPGRTNQPKQNQPTAIIQVEDQNTGAIENIIVEVKKEPDAEPAEGEEEEAQPAATDAPNGDLTPEMILSMMDR

SEQ ID NO: 14857 - protein, 663 aa, Homo sapiens
MAATEISVLSEQFTKIKELELMPEKGLKEEEKDGVCREKDHRSPSELEAERTSGAFQDSVLEEEVELVLAPSEESEKYILTLQTVHFTSEAVELQDMSLLSIQQQEGVQVVVQQPGPGLLWLEEGPRQSLQQCVAISIQQELYSPQEMEVLQFHALEENVMVASEDSKLAVSLAETTGLIKLEEEQEKNQLLAERTKEQLFFVETMSGDERSDEIVLTVSNSNVEEQEDQPTAGQADAEKAKSTKNQRKTKGAKGTFHCDVCMFTSSRMSSFNRHMKTHTSEKPHLCHLCLKTFRTVTLLRNHVNTHTGTRPYKCNDCNMAFVTSGELVRHRRYKHTHEKPFKCSMCKYASVEASKLKRHVRSHTGERPFQCCQCSYASRDTYKLKRHMRTHSGEKPYECHICHTRFTQSGTMKIHILQKHGENVPKYQCPHCATIIARKSDLRVHMRNLHAYSAAELKCRYCSAVFHERYALIQHQKTHKNEKRFKCKHCSYACKQERHMTAHIRTHTGEKPFTCLSCNKCFRQKQLLNAHFRKYHDANFIPTVYKCSKCGKGFSRWINLHRHSEKCGSGEAKSAASGKGRRTRKRKQTILKEATKGQKEAAKGWKEAANGDEAAAEEASTTKGEQFPGEMFPVACRETTARVKEEVDEGVTCEMLLNTMDK

SEQ ID NO: 14858 - protein, 1505 aa, Homo sapiens
MLCVAGARLKRELDATATVLANRQDESEQSRKRLIEQSREFKKNTPEDLRKQVAPLLKSFQGEIDALSKRSKEAEAAFLNVYKRLIDVPDPVPALDLGQQLQLKVQRLHDIETENQKLRETLEEYNKEFAEVKNQEVTIKALKEKIREYEQTLKNQAETIALEKEQKLQNDFAEKERKLQETQMSTTSKLEEAEHKVQSLQTALEKTRTELFDLKTKYDEETTAKADEIEMIMTDLERANQRAEVAQREAETLREQLSSANHSLQLASQIQKAPDVEQAIEVLTRSSLEVELAAKEREIAQLVEDVQRLQASLTKLRENSASQISQLEQQLSAKNSTLKQLEEKLKGQADYEEVKKELNILKSMEFAPSEGAGTQDAAKPLEVLLLEKNRSLQSENAALRISNSDLSGSARRKGKDQPESRRPGSLPAPPPSQLPRNPGEQASNTNGTHQFSPAGLSQDFFSSSLASPSLPLASTGKFALNSLLQRQLMQSFYSKAMQEAGSTSMIFSTGPYSTNSISSQSPLQQSPDVNGMAPSPSQSESAGSVSEGEEMDTAEIARQVKEQLIKHNIGQRIFGHYVLGLSQGSVSEILARPKPWNKLTVRGKEPFHKMKQFLSDEQNILALRSIQGRQRENPGQSLNRLFQEVPKRRNGSEGNITTRIRASETGSDEAIKSILEQAKRELQVQKTAEPAQPSSASGSGNSDDAIRSILQQARREMEAQQAALDPALKQAPLSQSDITILTPKLLSTSPMPTVSSYPPLAISLKKPSAAPEAGASALPNPPALKKEAQDAPGLDPQGAADCAQGVLRQVKNEVGRSGAWKDHWWSAVQPERRNAASSEEAKAEETGGGKEKGSGGSGGGSQPRAERSQLQGPSSSEYWKEWPSAESPYSQSSELSLTGASRSETPQNSPLPSSPIVPMSKPTKPSVPPLTPEQYEVYMYQEVDTIELTRQVKEKLAKNGICQRIFGEKVLGLSQGSVSDMLSRPKPWSKLTQKGREPFIRMQLWLNGELGQGVLPVQGQQQGPVLHSVTSLQDPLQQGCVSSESTPKTSASCSPAPESPMSSSESVKSLTELVQQPCPPIEASKDSKPPEPSDPPASDSQPTTPLPLSGHSALSIQELVAMSPELDTYGITKRVKEVLTDNNLGQRLFGETILGLTQGSVSDLLARPKPWHKLSLKGREPFVRMQLWLNDPNNVEKLMDMKRMEKKAYMKRRHSSVSDSQPCEPPSVGTEYSQGASPQPQHQLKKPRVVLAPEEKEALKRAYQQKPYPSPKTIEDLATQLNLKTSTVINWFHNYRSRIRRELFIEEIQAGSQGQAGASDSPSARSGRAAPSSEGDSCDGVEATEGPGSADTEEPKSQGEAEREEVPRPAEQTEPPPSGTPGPDDARDDDHEGGPVEGPGPLPSPASATATAAPAAPEDAATSAAAAPGEGPAAPSSAPPPSNSSSSSAPRRPSSLQSLFGLPEAAGARDSRDNPLRKKKAANLNSIIHRLEKAASREEPIEWEF

SEQ ID NO: 14859 - protein, 678 aa, Homo sapiens
MAANVGSMFQYWKRFDLQQLQRELDATATVLANRQDESEQSRKRLIEQSREFKKNTPEDLRKQVAPLLKSFQGEIDALSKRSKEAEAAFLNVYKRLIDVPDPVPALDLGQQLQLKVQRLHDIETENQKLRETLEEYNKEFAEVKNQEVTIKALKEKIREYEQTLKNQAETIALEKEQKLQNDFAEKERKLQETQMSTTSKLEEAEHKVQSLQTALEKTRTELFDLKTKYDEETTAKADEIEMIMTDLERANQRAEVAQREAETLREQLSSANHSLQLASQIQKAPDVEQAIEVLTRSSLEVELAAKEREIAQLVEDVQRLQASLTKLRENSASQISQLEQQLSAKNSTLKQLEEKLKGQADYEEVKKELNILKSMEFAPSEGAGTQDAAKPLEVLLLEKNRSLQSENAALRISNSDLSGRCAELQVRITEAVATATEQRELIARLEQDLSIIQSIQRPDAEGAAEHRLEKIPEPIKEATALFYGPAAPASGALPEGQVDSLLSIISSQRERFRARNQELEAENRLAQHTLQALQSELDSLRADNIKLFEKIKFLQSYPGRGSGSDDTELRYSSQYEERLDPFSSFSKRERQRKYLSLSPWDKATLSMGRLVLSNKMARTIGFFYTLFLHCLVFLVLYKLAWSESMERDCATFCAKKFADHLHKFHENDNGAAAGDLWQ

SEQ ID NO: 14860 - protein, 1486 aa, Homo sapiens
MAANVGSMFQYWKRFDLRRLQKELNSVASELSARQEESEHSHKHLIELRREFKKNVPEEIREMVAPVLKSFQAEVVALSKRSQEAEAAFLSVYKQLIEAPDPVPVFEAARSLDDRLQPPSFDPSGQPRRDLHTSWKRNPELLSPKEQREGTSPAGPTLTEGSRLPGIPGKALLTETLLQRNEAEKQKGLQEVQITLAARLGEAEEKIKVLHSALKATQAELLELRRKYDEEAASKADEVGLIMTNLEKANQRAEAAQREVESLREQLASVNSSIRLACCSPQGPSGDKVNFTLCSGPRLEAALASKDREILRLLKDVQHLQSSLQELEEASANQIADLERQLTAKSEAIEKLEEKLQAQSDYEEIKTELSILKAMKLASSTCSLPQGMAKPEDSLLIAKEAFFPTQKFLLEKPSLLASPEEDPSEDDSIKDSLGTEQSYPSPQQLPPPPGPEDPLSPSPGQPLLGPSLGPDGTRTFSLSPFPSLASGERLMMPPAAFKGEAGGLLVFPPAFYGAKPPTAPATPAPGPEPLGGPEPADGGGGGAAGPGAEEEQLDTAEIAFQVKEQLLKHNIGQRVFGHYVLGLSQGSVSEILARPKPWRKLTVKGKEPFIKMKQFLSDEQNVLALRTIQVRQRGSITPRIRTPETGSDDAIKSILEQAKKEIESQKGGEPKTSVAPLSIANGTTPASTSEDAIKSILEQARREMQAQQQALLEMEVAPRGRSVPPSPPERPSLATASQNGAPALVKQEEGSGGPAQAPLPVLSPAAFVQSIIRKVKSEIGDAGYFDHHWASDRGLLSRPYASVSPSLSSSSSSGYSGQPNGRAWPRGDEAPVPPEDEAAAGAEDEPPRTGELKAEGATAEAGARLPYYPAYVPRTLKPTVPPLTPEQYELYMYREVDTLELTRQVKEKLAKNGICQRIFGEKVLGLSQGSVSDMLSRPKPWSKLTQKGREPFIRMQLWLSDQLGQAVGQQPGASQASPTEPRSSPSPPPSPTEPEKSSQEPLSLSLESSKENQQPEGRSSSSLSGKMYSGSQAPGGIQEIVAMSPELDTYSITKRVKEVLTDNNLGQRLFGESILGLTQGSVSDLLSRPKPWHKLSLKGREPFVRMQLWLNDPHNVEKLRDMKKLEKKAYLKRRYGLISTGSDSESPATRSECPSPCLQPQDLSLLQIKKPRVVLAPEEKEALRKAYQLEPYPSQQTIELLSFQLNLKTNTVINWFHNYRSRMRREMLVEGTQDEPDLDPSGGPGILPPGHSHPDPTPQSPDSETEDQKPTVKELELQEGPEENSTPLTTQDKAQVRIKQEQMEEDAEEEAGSQPQDSGELDKGQGPPKEEHPDPPGNDGLPKVAPGPLLPGGSTPDCPSLHPQQESEAGERLHPDPLSFKSASESSRCSLEVSLNSPSAASSPGLMMSVSPVPSSSAPISPSPPGAPPAKVPSASPTADMAGALHPSAKVNPNLQRRHEKMANLNNIIYRVERAANREEALEWEF

SEQ ID NO: 14861 - protein, 656 aa, Homo sapiens
MEGDGSDPEPPDAGEDSKSENGENAPIYCICRKPDINCFMIGCDNCNEWFHGDCIRITEKMAKAIREWYCRECREKDPKLEIRYRHKKSRERDGNERDSSEPRDEGGGRKRPVPDPDLQRRAGSGTGVGAMLARGSASPHKSSPQPLVATPSQHHQQQQQQIKRSARMCGECEACRRTEDCGHCDFCRDMKKFGGPNKIRQKCRLRQCQLRARESYKYFPSSLSPVTPSESLPRPRRPLPTQQQPQPSQKLGRIREDEGAVASSTVKEPPEATATPEPLSDEDLPLDPDLYQDFCAGAFDDHGLPWMSDTEESPFLDPALRKRAVKVKHVKRREKKSEKKKEERYKRHRQKQKHKDKWKHPERADAKDPASLPQCLGPGCVRPAQPSSKYCSDDCGMKLAANRIYEILPQRIQQWQQSPCIAEEHGKKLLERIRREQQSARTRLQEMERRFHELEAIILRAKQQAVREDEESNEGDSDDTDLQIFCVSCGHPINPRVALRHMERCYAKYESQTSFGSMYPTRIEGATRLFCDVYNPQSKTYCKRLQVLCPEHSRDPKVPADEVCGCPLVRDVFELTGDFCRLPKRQCNRHYCWEKLRRAEVDLERVRVWYKLDELFEQERNVRTAMTNRAGLLALMLHQTIQHDPLTTDLRSSADR

SEQ ID NO: 14862 - protein, 760 aa, Homo sapiens
MAVPAALIPPTQLVPPQPPISTSASSSGTTTSTSSATSSPAPSIGPPASSGPTLFRPEPIASAAAAAATVTSTGGGGGGGGGGSGGGGGSSGNGGGGGGGGGGSNCNPNLAAASNGSGGGGGGISAGGGVASSTPINASTGSSSSSSSSSSSSSSSSSSSSSSSSCGPLPGKPVYSTPSPVENTPQNNECKMVDLRGAKVASFTVEGCELICLPQAFDLFLKHLVGGLHTVYTKLKRLEITPVVCNVEQVRILRGLGAIQPGVNRCKLISRKDFETLYNDCTNASSRPGRPPKRTQSVTSPENSHIMPHSVPGLMSPGIIPPTGLTAAAAAAAAATNAAIAEAMKVKKIKLEAMSNYHASNNQHGADSENGDMNSSVGSSDGSWDKETLPSSPSQGPQASITHPRMPGARSLPLSHPLNHLQQSHLLPNGLELPFMMMPHPLIPVSLPPASVTMAMSQMNHLSTIANMAAAAQVQSPPSRVETSVIKERVPDSPSPAPSLEEGRRPGSHPSSHRSSSVSSSPARTESSSDRIPVHQNGLSMNQMLMGLSPNVLPGPKEGDLAGHDMGHESKRMHIEKDETPLSTPTARDSLDKLSLTGHGQPLPPGFPSPFLFPDGLSSIETLLTNIQGLLKVAIDNARAQEKQVQLEKTELKMDFLRERELRETLEKQLAMEQKNRAIVQKRLKKEKKAKRKLQEALEFETKRREQAEQTLKQAASTDSLRVLNDSLTPEIEADRSGGRTDAERTIQDGRLYLKTTVMY

SEQ ID NO: 14863 - protein, 599 aa, Homo sapiens
MAVSASPVISATSSGAGVPGGLFRAEPLYSTPREPPRLTPNMINSFVVNNHSNSAGGGGRGNTNTNECRMVDMHGMKVASFLMDGQELICLPQVFDLFLKHLVGGLHTVYTKLKRLDISPVVCTVEQVRILRGLGAIQPGVNRCKLITRKDFETLFTDCTNARRKRQMTRKQAVNSSRPGRPPKRSLGVLQENARLLTHAVPGLLSPGLITPTGITAAAMAEAMKLQKMKLMAMNTLQGNGSQNGTESEPDDLNSNTGGSESSWDKDKMQSPFAAPGPQHGIAHAALAGQPGIGGAPTLNPLQQNHLLTNRLDLPFMMMPHPLLPVSLPPASVAMAMNQMNHLNTIANMAAAAQIHSPLSRAGTSVIKERIPESPSPAPSLEENHRPGSQTSSHTSSSVSSSPSQMDHHLERMEEVPVQIPIMKSPLDKIQLTPGQALPAGFPGPFIFADSLSSVETLLTNIQGLLKVALDNARIQEKQIQQEKKELRLELYREREIRENLERQLAVELQSRTTMQKRLKKEKKTKRKLQEALEFESKRREQVEQALKQATTSDSGLRMLKDTGIPDIEIENNGTPHDSAAMQGGNYYCLEMAQQLYSA

SEQ ID NO: 14864 - protein, 325 aa, Homo sapiens
MARPVSDRTPAPLLLGGPAGTPPGGGALLGLRSLLQGTSKPKEPASCLLKEKERKAALPAATTPGPGLETAGPADAPAGAVVGGGSPRGRPGPVPAPGLLAPLLWERTLPFGDVEYVDLDAFLLEHGLPPSPPPPGGPSPEPSPARTPAPSPGPGSCGSASPRSSPGHAPARAALGTASGHRAGLTSRDTPSPVDPDTVEVLMTFEPDPADLALSSIPGHETFDPRRHRFSEEELKPQPIMKKARKIQVPEEQKDEKYWSRRYKNNEAAKRSRDARRLKENQISVRAAFLEKENALLRQEVVAVRQELSHYRAVLSRYQAQHGAL

SEQ ID NO: 14865 - protein, 343 aa, Homo sapiens
MMFPGLLAPPAGYPSLLRPTPTLTLPQSLQSAFSGHSSFLVEDLIRISRPPAYLPRSVPTASMSPPRQGAPTALTDTGASDLGSPGPGSRRGGSPPTAFSPASETTFLKFGVNAILSSGPRTETSPALLQSVPPKTFAFPYFEGSFQPFIRSSYFPASSSVVPIPGTFSWPLAARGKPRRGMLRRAVFSDVQRKALEKMFQKQKYISKPDRKKLAAKLGLKDSQVKIWFQNRRMKWRNSKERELLSSGGCREQTLPTKLNPHPDLSDVGQKGPGNEEEEEGPGSPSHRLAYHASSDPQHLRDPRLPGPLPPSPAHSSSPGKPSDFSDSEEEEEGEEQEEITVS

SEQ ID NO: 14866 - protein, 339 aa, Homo sapiens
MLPSAVAAHAGAYWDVVASSALLNLPAAPGFGNLGKSFLIENLLRVGGAPTPRLQPPAPHDPATALATAGAQLRPLPASPVPLKLCPAAEQVSPAGAPYGTRWAFQVLSPSADSARLPGRAPGDRDCTFQPSAPAPSKPFLLSTPPFYSACCGGSCRRPASSTAFPREESMLPLLTQDSNSKARRGILRRAVFSEDQRKALEKMFQKQKYISKTDRKKLAINLGLKESQVKIWFQNRRMKWRNSKEKEVLSNRCIQEVGLQEDPLSRSALGFPSPCPSIWDVPQQHSSPRWRENSPEPSERLIQESSGAPPPEANSLQGALYLCSEEEAGSKGVLTGAV

SEQ ID NO: 14867 - protein, 427 aa, Homo sapiens
MAPKKRPETQKTSEIVLRPRNKRSRSPLELEPEAKKLCAKGSGPSRRCDSDCLWVGLAGPQILPPCRSIVRTLHQHKLGRASWPSVQQGLQQSFLHTLDSYRILQKAAPFDRRATSLAWHPTHPSTVAVGSKGGDIMLWNFGIKDKPTFIKGIGAGGSITGLKFNPLNTNQFYASSMEGTTRLQDFKGNILRVFASSDTINIWFCSLDVSASSRMVVTGDNVGNVILLNMDGKELWNLRMHKKKVTHVALNPCCDWFLATASVDQTVKIWDLRQVRGKASFLYSLPHRHPVNAACFSPDGARLLTTDQKSEIRVYSASQWDCPLGLIPHPHRHFQHLTPIKAAWHPRYNLIVVGRYPDPNFKSCTPYELRTIDVFDGNSGKMMCQLYDPESSGISSLNEFNPMGDTLASAMGYHILIWSQEEARTRK

SEQ ID NO: 14868 - protein, 169 aa, Homo sapiens
MAAESLPFSFGTLSSWELEAWYEDLQEVLSSDENGGTYVSPPGNEEEESKIFTTLDPASLAWLTEEEPEPAEVTSTSQSPHSPDSSQSSLAQEEEEEDQGRTRKRKQSGHSPARAGKQRMKEKEQENERKVAQLAEENERLKQEIERLTREVEATRRALIDRMVNLHQA

SEQ ID NO: 14869 - protein, 565 aa, Homo sapiens; identical to SEQ ID NO: 4098

SEQ ID NO: 14870 - protein, 255 aa, Homo sapiens
MTMTTMPESLNSPVSGKAVFMEFGPPNQQMSPSPMSHGHYSMHCLHSAGHSQPDGAYSSASSFSRPLGYPYVNSVSSHASSPYISSVQSYPGSASLAQSRLEDPGADSEKSTVVEGGEVRFNGKGKKIRKPRTIYSSLQLQALNRRFQQTQYLALPERAELAASLGLTQTQVKIWFQNKRSKFKKLMKQGGAALEGSALANGRALSAGSPPVPPGWNPNSSSGKGSGGNAGSYIPSYTSWYPSAHQEAMQQPQLM

SEQ ID NO: 14871 - protein, 328 aa, Homo sapiens
MTGVFDSLVADMHSTQIAASSTYHQHQQPPSGGGAGPGGNSSSSSSLHKPQESPTLPVSTATDSSYYTNQQHPAGGGGGGGSPYAHMGSYQYQASGLNNVPYSAKSSYDLGYTAAYTSYAPYGTSSSPANNEPEKEDLEPEIRIVNGKPKKVRKPRTIYSSFQLAALQRRFQKTQYLALPERAELAASLGLTQTQVKIWFQNRRSKFKKMWKSGEIPSEQHPGASASPPCASPPVSAPASWDFGVPQRMAGGGGPGSGGSGAGSSGSSPSSAASAFLGNYPWYHQTSGSASHLQATAPLLHPTQTPQPHHHHHHHGGGGAPVSAGTIF

SEQ ID NO: 14872 - protein, 287 aa, Homo sapiens
MSGSFDRKLSSILTDISSSLSCHAGSKDSPTLPESSVTDLGYYSAPQHDYYSGQPYGQTVNPYTYHHQFNLNGLAGTGAYSPKSEYTYGASYRQYGAYREQPLPAQDPVSVKEEPEAEVRMVNGKPKKVRKPRTIYSSYQLAALQRRFQKAQYLALPERAELAAQLGLTQTQVKIWFQNRRSKFKKLYKNGEVPLEHSPNNSDSMACNSPPSPALWDTSSHSTPAPARSQLPPPLPYSASPSYLDDPTNSWYHAQNLSGPHLQQQPPQPATLHHASPGPPPNPGAVY

SEQ ID NO: 14873 - protein, 240 aa, Homo sapiens
MTSLPCPLPGRDASKAVFPDLAPVPSVAAAYPLGLSPTTAASPNLSYSRPYGHLLSYPYTEPANPGDSYLSCQQPAALSQPLCGPAEHPQELEADSEKPRLSPEPSERRPQAPAKKLRKPRTIYSSLQLQHLNQRFQHTQYLALPERAQLAAQLGLTQTQVKIWFQNKRSKYKKLLKQNSGGQEGDFPGRTFSVSPCSPPLPSLWDLPKAGTLPTSGYGNSFGAWYQHHSSDVLASPQMM

SEQ ID NO: 14874 - protein, 289 aa, Homo sapiens
MTGVFDRRVPSIRSGDFQAPFQTSAAMHHPSQESPTLPESSATDSDYYSPTGGAPHGYCSPTSASYGKALNPYQYQYHGVNGSAGSYPAKAYADYSYASSYHQYGGAYNRVPSATNQPEKEVTEPEVRMVNGKPKKVRKPRTIYSSFQLAALQRRFQKTQYLALPERAELAASLGLTQTQVKIWFQNKRSKIKKIMKNGEMPPEHSPSSSDPMACNSPQSPAVWEPQGSSRSLSHHPHAHPPTSNQSPASSYLENSASWYTSAASSINSHLPPPGSLQHPLALASGTLY

SEQ ID NO: 14875 - protein, 175 aa, Homo sapiens
MSHSQHSPYLQSYHNSSAAAQTRGDDTDQQKTTVIENGEIRFNGKGKKIRKPRTIYSSLQLQALNHRFQQTQYLALPERAELAASLGLTQTQVKIWFQNKRSKFKKLLKQGSNPHESDPLQGSAALSPRSPALPPVWDVSASAKGVSMPPNSYMPGYSHWYSSPHQDTMQRPQMM

SEQ ID NO: 14876 - protein, 467 aa, Homo sapiens
MATGADVRDILELGGPEGDAASGTISKKDIINPDKKKSKKSSETLTFKRPEGMHREVYALLYSDKKDAPPLLPSDTGQGYRTVKAKLGSKKVRPWKWMPFTNPARKDGAMFFHWRRAAEEGKDYPFARFNKTVQVPVYSEQEYQLYLHDDAWTKAETDHLFDLSRRFDLRFVVIHDRYDHQQFKKRSVEDLKERYYHICAKLANVRAVPGTDLKIPVFDAGHERRRKEQLERLYNRTPEQVAEEEYLLQELRKIEARKKEREKRSQDLQKLITAADTTAEQRRTERKAPKKKLPQKKEAEKPAVPETAGIKFPDFKSAGVTLRSQRMKLPSSVGQKKIKALEQMLLELGVELSPTPTEELVHMFNELRSDLVLLYELKQACANCEYELQMLRHRHEALARAGVLGGPATPASGPGPASAEPAVTEPGLGPDPKDTIIDVVGAPLTPNSRKRRESASSSSSVKKAKKP

SEQ ID NO: 14877 - protein, 382 aa, Homo sapiens
MQHYGVNGYSLHAMNSLSAMYNLHQQAAQQAQHAPDYRPSVHALTLAERLAGCTFQDIILEARYGSQHRKQRRSRTAFTAQQLEALEKTFQKTHYPDVVMRERLAMCTNLPEARVQVWFKNRRAKFRKKQRSLQKEQLQKQKEAEGSHGEGKAEAPTPDTQLDTEQPPRLPGSDPPAELHLSLSEQSASESAPEDQPDREEDPRAGAEDPKAEKSPGADSKGLGCKRGSPKADSPGSLTITPVAPGGGLLGPSHSYSSSPLSLFRLQEQFRQHMAATNNLVHYSSFEVGGPAPAAAAAAAAVPYLGVNMAPLGSLHCQSYYQSLSAAAAAHQGVWGSPLLPAPPAGLAPASATLNSKTTSIENLRLRAKQHAASLGLDTLPN

SEQ ID NO: 14878 - protein, 373 aa, Homo sapiens
MPNDEAFSKPSTPSEAPHAPGVPPQGRAGGFGKASGALVGAASGSSAGGSSRGGGSGSGASDLGAGSKKSPRLPKCARCRNHGYASPLKGHKRFCMWRDCQCKKCNLIAERQRVMAAQVALRRQQAQEEELGISHPIPLPSAAELLVKRENNGSNPCLMTECSGTSQPPPASVPTTAASEGRMVIQDIPAVTSRGHVENTPDLVSDSTYYSSFYQPSLFPYYNNLYNCPQYSMALAADSASGEVGNPLGGSPVKNSLRGLPGPYVPGQTGNQWQMKNMENRHAMSSQYRMHSYYPPPSYLGQSVPQFFTFEDAPSYPEARASVFSPPSSQDSGLVSLSSSSPISNKSTKAVLECEPASEPSSFTVTPVIEEDE

SEQ ID NO: 14879 - protein, 561 aa, Homo sapiens
MADPQAGSAAGDWEIDVESLELEEDVCGAPRSTPPGPSPPPADGDCEDDEDDDGVDEDAEEEGDGEEAGASPGMPGQPEQRGGPQPRPPLAPQASPAGTGPRERCTPAGGGAEPRKLSRTPKCARCRNHGVVSCLKGHKRFCRWRDCQCANCLLVVERQRVMAAQVALRRQQATEDKKGLSGKQNNFERKAVYQRQVRAPSLLAKSILEGYRPIPAETYVGGTFPLPPPVSDRMRKRRAFADKELENIMLEREYKEREMLETSQAAALFLPNRMVPGPDYNSYKSAYSPSPVEPPSKDFCNFLPTCLDLTMQYSGSGNMELISSNVSVATTYRQYPLSSRFLVWPKCGPISDTLLYQQCLLNATTSVQALKPGASWDLKGARVQDGLSAEQDMMPSKLEGSLVLPHTPEIQTTRSDLQGHQAVPERSAFSPPRRNFSPIVDTDSLAAQGHVLTKISKENTRHPLPLRHNPFHSLFQQTLTDKSGPELKTPFVKEAFEETPKKHRECLVKDNQKYTFTIDRCAKDLFVAKQVGTKLSVNEPLSFSVESILKRPSSAITRVSQ

SEQ ID NO: 14880 - protein, 472 aa, Homo sapiens
MNGYGSPYLYMGGPVSQPPRAPLQRTPKCARCRNHGVLSWLKGHKRYCRFKDCTCEKCILIIERQRVMAAQVALRRQQANESLESLIPDSLRALPGPPPPGDAVAAPQPPPASQPSQPQPPRPAAELAAAAALRWTAEPQPGALQAQLAKPDLTEERLGDGKSADNTEVFSDKDTDQRSSPDVAKSKGCFTPESPEIVSVEEGGYAVQKNGGNPESRPDSPKCHAEQNHLLIEGPSGTVSLPFSLKANRPPLEVLKKIFPNQKPTVLELILKGCGGDLVSAVEVLLSSRSSVTGAERTSAEPESLALPSNGHIFEHTLSSYPISSSKWSVGSAFRVPDTLRFSADSSNVVPSPLAGPLQPPFPQPPRYPLMLRNTLARSQSSPFLPNDVTLWNTMTLQQQYQLRSQYVSPFPSNSTSVFRSSPVLPARATEDPRISIPDDGCPFVSKQSIYTEDDYDERSDSSDSRTLNTSS

SEQ ID NO: 14881 - protein, 504 aa, Homo sapiens
MERSQCGSRDRGVSGRPHLAPGLVVAAPPPPSPALPVPSGMQVPPAFLRPPSLFLRAAAAAAAAAAATSGSGGCPPAPGLESGVGAVGCGYPRTPKCARCRNHGVVSALKGHKRFCRWRDCACAKCTLIAERQRVMAAQVALRRQQAQEESEARGLQRLLCSGLSWPPGGRASGGGGRAENPQSTGGPAAGAALGLGALRQASGSATPAFEVFQQDYPEEKQEQKESKCESCQNGQEELISKSHQLYLGSSSRSNGVIGKQSIGSSISEYSNKPDSILSPHPGEQSGGEESPRSLSSSDLESGNESEWVKDLTATKASLPTVSSRPRDPLDILTKIFPNYRRSRLEGILRFCKGDVVQAIEQVLNGKEHKPDNRNLANSEELENTAFQRASSFSLAGIGFGTLGNKSAFSPLQTTSASYGGDSSLYGVNPRVGISPLRLAYSSAGRGLSGFMSPYLTPGLVPTLPFRPALDYAFSGMIRDSSYLSSKDSITCGRLYFRPNQDNP

SEQ ID NO: 14882 - protein, 542 aa, Homo sapiens; identical to SEQ ID NO: 4340

SEQ ID NO: 14883 - protein, 342 aa, Homo sapiens
MADKMVRTPKCSRCRNHGFLVPVKGHAGKCRWKQCLCEKCYLISERQKIMAAQKVLKTQAAEEEQEAALCAQGPKQASGAAAAAPAPVPVPAASLRPLSPGTPSGDADPGPEGRAAACFFEQPPRGRNPGPRALQPVLGGRSHVEPSERAAVAMPSLAGPPFGAEAAGSGYPGPLDLRRPMRTVPGPLFTDFVRPLNINPDRALGPEYPGGSSMHPYCPFPLGYLDAPPGVPLQQGFRHVSRSQYQGGGLVSEPGGDFQPSYYLPPPPPPLPPLPPLPPQPQFLPPGYLSALHFLPPPPPPPPPSSFSLTVLFDTDKENTDDQDAEVLSGEPSQPSSQEQSD

SEQ ID NO: 14884 - protein, 192 aa, Homo sapiens
MAAPPKAPIRVRNLTIRAGALTGKENNMLQPETHIFTAPEEGSSQGALLLGQAPEPLSLPCTPVTLEQQLVSPSGDPHRAPALPSICSTLILQPCATLDPLLLQPQVPKVSDQALVSAHSEWQRKLEAAEALLTLRNSAQAPPDSISLHQPCNPPAPAGDKGFQPPSPSLRPRPASSISLPIGHLGCISLLS

SEQ ID NO: 14885 - protein, 367 aa, Homo sapiens
MEPSDMPAGYHCPLDSAPWDETRDPQSTELIPRRAISRSPTCARCRNHGVTAHLKGHKRLCLFQACECHKCVLILERRRVMAAQVALRRQQEAQLKKHLMRRGEASPKAPNHFRKGTTQPQVPSGKENIAPQPQTPHGAVLLAPTPPGKNSCGPLLLSHPPEASPLSWTPVPPGPWVPGHWLPPGFSMPPPVVCRLLYQEPAVSLPPFPGFDPGTSLQLPTHGPFTTCPGSHPVLTAPLSGEPQGPPSQPRTHSTLILQPCGTPDPLQLQPQASGASCLARTSGPSEWQLQQEAAEALVGLKDSSQAPRVTPSVPPNPAWISLLHPCGPPAPAGGRGFQPVGPCLRPSPAPSVALHIGRLGSISLLS

SEQ ID NO: 14886 - protein, 760 aa, Homo sapiens
MSTVEEDSDTVTVETVNSVTLTQDTEGNLILHCPQNEADEIDSEDSIEPPHKRLCLSSEDDQSIDDSTPCISVVALPLSENDQSFEVTMTATTEVADDEVTEGTVTQIQILQNEQLDEISPLGNEEVSAVSQAWFTTKEDKDSLTNKGHKWKQGMWSKEEIDILMNNIERYLKARGIKDATEIIFEMSKDERKDFYRTIAWGLNRPLFAVYRRVLRMYDDRNHVGKYTPEEIEKLKELRIKHGNDWATIGAALGRSASSVKDRCRLMKDTCNTGKWTEEEEKRLAEVVHELTSTEPGDIVTQGVSWAAVAERVGTRSEKQCRSKWLNYLNWKQSGGTEWTKEDEINLILRIAELDVADENDINWDLLAEGWSSVRSPQWLRSKWWTIKRQIANHKDVSFPVLIKGLKQLHENQKNNPTLLENKSGSGVPNSNTNSSVQHVQIRVARLEDNTAISSSPMAALQIPVQITHVSSADSPATVDSETITLNSGTLQTFEILPSFHLQPTGTPGTYLLQTSSSQGLPLTLTASPTVTLTAAAPASPEQIIVHALSPEHLLNTSDNVTVQCHTPRVIIQTVATEDITSSISQAELTVDSDIQSSDFPEPPDALEADTFPDEIHHPKMTVEPSFNDAHVSKFSDQNSTELMNSVMVRTEEEISDTDLKQEESPSDLASAYVTEGLESPTIEEQVDQTIDDETILIVPSPHGFIQASDVIDTESVLPLTTLTDPILQHHQEESNIIGSSLGSPVSEDSKDVEDLVNCH

SEQ ID NO: 14887 - protein, 554 aa, Homo sapiens
MTAPCSQPAQLPGRRQLGLVPFPPPPPRTPLLWLLLLLLAAVAPARGWESGDLELFDLVEEVQLNFYQFLGVQQDASSADIRKAYRKLSLTLHPDKNKDENAETQFRQLVAIYEVLKDDERRQRYDDILINGLPDWRQPVFYYRRVRKMSNAELALLLFIILTVGHYAVVWSIYLEKQLDELLSRKKREKKKKTGSKSVDVSKLGASEKNERLLMKPQWHDLLPCKLGIWFCLTLKALPHLIQDAGQFYAKYKETRLKEKEDALTRTELETLQKQKKVKKPKPEFPVYTPLETTYIQSYDHGTSIEEIEEQMDDWLENRNRTQKKQAPEWTEEDLSQLTRSMVKFPGGTPGRWEKIAHELGRSVTDVTTKAKQLKDSVTCSPGMVRLSELKSTVQNSRPIKTATTLPDDMITQREDAEGVAAEEEQEGDSGEQETGATDARPRRRKPARLLEATAKPEPEEKSRAKRQKDFDIAEQNESSDEESLRKERARSAEEPWTQNQQKLLELALQQYPRGSSDRWDKIARCVPSKSKEDCIARYKLLVELVQKKKQAKS

SEQ ID NO: 14888 - protein, 621 aa, Homo sapiens
MLLLPSAADGRGTAITHALTSASTLCQVEPVGRWFEAFVKRRNRNASASFQELEDKKELSEESEDEELQLEEFPMLKTLDPKDWKNQDHYAVLGLGHVRYKATQRQIKAAHKAMVLKHHPDKRKAAGEPIKEGDNDYFTCITKAYEMLSDPVKRRAFNSVDPTFDNSVPSKSEAKDNFFEVFTPVFERNSRWSNKKNVPKLGDMNSSFEDVDIFYSFWYNFDSWREFSYLDEEEKEKAECRDERRWIEKQNRATRAQRKKEEMNRIRTLVDNAYSCDPRIKKFKEEEKAKKEAEKKAKAEAKRKEQEAKEKQRQAELEAARLAKEKEEEEVRQQALLAKKEKDIQKKAIKKERQKLRNSCKTWNHFSDNEAERVKMMEEVEKLCDRLELASLQCLNETLTSCTKEVGKAALEKQIEEINEQIRKEKEEAEARMRQASKNTEKSTGGGGNGSKNWSEDDLQLLIKAVNLFPAGTNSRWEVIANYMNIHSSSGVKRTAKDVIGKAKSLQKLDPHQKDDINKKAFDKFKKEHGVVPQADNATPSERFEGPYTDFTPWTTEEQKLLEQALKTYPVNTPERWEKIAEAVPGRTKKDCMKRYKELVEMVKAKKAAQEQVLNASRAKK

SEQ ID NO: 14889 - protein, 531 aa, Homo sapiens
MKCHYEALGVRRDASEEELKKAYRKLALKWHPDKNLDNAAEAAEQFKLIQAAYDVLSDPQERAWYDNHREALLKGGFDGEYQDDSLDLLRYFTVTCYSGYGDDEKGFYTVYRNVFEMIAKEELESVLEEEVDDFPTFGDSQSDYDTVVHPFYAYWQSFCTQKNFAWKEEYDTRQASNRWEKRAMEKENKKIRDKARKEKNELVRQLVAFIRKRDKRVQAHRKLVEEQNAEKARKAEEMRRQQKLKQAKLVEQYREQSWMTMANLEKELQEMEARYEKEFGDGSDENEMEEHELKDEEDGKDSDEAEDAELYDDLYCPACDKSFKTEKAMKNHEKSKKHREMVALLKQQLEEEEENFSRPQIDENPLDDNSEEEMEDAPKQKLSKKQKKKKQKPAQNYDDNFNVNGPGEGVKVDPEDTNLNQDSAKELEDSPQENVSVTEIIKPCDDPKSEAKSVPKPKGKKTKDMKKPVRVPAEPQTMSVLISCTTCHSEFPSRNKLFDHLKATGHARAPSSSSLNSATSSQSKKEKRKNR

SEQ ID NO: 14890 - protein, 1616 aa, Homo sapiens
MPARTAPARVPTLAVPAISLPDDVRRRLKDLERDSLTEKECVKEKLNLLHEFLQTEIKNQLCDLETKLRKEELSEEGYLAKVKSLLNKDLSLENGAHAYNREVNGRLENGNQARSEARRVGMADANSPPKPLSKPRTPRRSKSDGEAKPEPSPSPRITRKSTRQTTITSHFAKGPAKRKPQEESERAKSDESIKEEDKDQDEKRRRVTSRERVARPLPAEEPERAKSGTRTEKEEERDEKEEKRLRSQTKEPTPKQKLKEEPDREARAGVQADEDEDGDEKDEKKHRSQPKDLAAKRRPEEKEPEKVNPQISDEKDEDEKEEKRRKTTPKEPTEKKMARAKTVMNSKTHPPKCIQCGQYLDDPDLKYGQHPPDAVDEPQMLTNEKLSIFDANESGFESYEALPQHKLTCFSVYCKHGHLCPIDTGLIEKNIELFFSGSAKPIYDDDPSLEGGVNGKNLGPINEWWITGFDGGEKALIGFSTSFAEYILMDPSPEYAPIFGLMQEKIYISKIVVEFLQSNSDSTYEDLINKIETTVPPSGLNLNRFTEDSLLRHAQFVVEQVESYDEAGDSDEQPIFLTPCMRDLIKLAGVTLGQRRAQARRQTIRHSTREKDRGPTKATTTKLVYQIFDTFFAEQIEKDDREDKENAFKRRRCGVCEVCQQPECGKCKACKDMVKFGGSGRSKQACQERRCPNMAMKEADDDEEVDDNIPEMPSPKKMHQGKKKKQNKNRISWVGEAVKTDGKKSYYKKVCIDAETLEVGDCVSVIPDDSSKPLYLARVTALWEDSSNGQMFHAHWFCAGTDTVLGATSDPLELFLVDECEDMQLSYIHSKVKVIYKAPSENWAMEGGMDPESLLEGDDGKTYFYQLWYDQDYARFESPPKTQPTEDNKFKFCVSCARLAEMRQKEIPRVLEQLEDLDSRVLYYSATKNGILYRVGDGVYLPPEAFTFNIKLSSPVKRPRKEPVDEDLYPEHYRKYSDYIKGSNLDAPEPYRIGRIKEIFCPKKSNGRPNETDIKIRVNKFYRPENTHKSTPASYHADINLLYWSDEEAVVDFKAVQGRCTVEYGEDLPECVQVYSMGGPNRFYFLEAYNAKSKSFEDPPNHARSPGNKGKGKGKGKGKPKSQACEPSEPEIEIKLPKLRTLDVFSGCGGLSEGFHQAGISDTLWAIEMWDPAAQAFRLNNPGSTVFTEDCNILLKLVMAGETTNSRGQRLPQKGDVEMLCGGPPCQGFSGMNRFNSRTYSKFKNSLVVSFLSYCDYYRPRFFLLENVRNFVSFKRSMVLKLTLRCLVRMGYQCTFGVLQAGQYGVAQTRRRAIILAAAPGEKLPLFPEPLHVFAPRACQLSVVVDDKKFVSNITRLSSGPFRTITVRDTMSDLPEVRNGASALEISYNGEPQSWFQRQLRGAQYQPILRDHICKDMSALVAARMRHIPLAPGSDWRDLPNIEVRLSDGTMARKLRYTHHDRKNGRSSSGALRGVCSCVEAGKACDPAARQFNTLIPWCLPHTGNRHNHWAGLYGRLEWDGFFSTTVTNPEPMGKQGRVLHPEQHRVVSVRECARSQGFPDTYRLFGNILDKHRQVGNAVPPPLAKAIGLEIKLCMLAKARESASAKIKEEEAAKD

SEQ ID NO: 14891 - protein, 912 aa, Homo sapiens
MPAMPSSGPGDTSSSAAEREEDRKDGEEQEEPRGKEERQEPSTTARKVGRPGRKRKHPPVESGDTPKDPAVISKSPSMAQDSGASELLPNGDLEKRSEPQPEEGSPAGGQKGGAPAEGEGAAETLPEASRAVENGCCTPKEGRGAPAEAGKEQKETNIESMKMEGSRGRLRGGLGWESSLRQRPMPRLTFQAGDPYYISKRKRDEWLARWKREAEKKAKVIAGMNAVEENQGPGESQKVEEASPPAVQQPTDPASPTVATTPEPVGSDAGDKNATKAGDDEPEYEDGRGFGIGELVWGKLRGFSWWPGRIVSWWMTGRSRAAEGTRWVMWFGDGKFSVVCVEKLMPLSSFCSAFHQATYNKQPMYRKAIYEVLQVASSRAGKLFPVCHDSDESDTAKAVEVQNKPMIEWALGGFQPSGPKGLEPPEEEKNPYKEVYTDMWVEPEAAAYAPPPPAKKPRKSTAEKPKVKEIIDERTRERLVYEVRQKCRNIEDICISCGSLNVTLEHPLFVGGMCQNCKNCFLECAYQYDDDGYQSYCTICCGGREVLMCGNNNCCRCFCVECVDLLVGPGAAQAAIKEDPWNCYMCGHKGTYGLLRRREDWPSRLQMFFANNHDQEFDPPKVYPPVPAEKRKPIRVLSLFDGIATGLLVLKDLGIQVDRYIASEVCEDSITVGMVRHQGKIMYVGDVRSVTQKHIQEWGPFDLVIGGSPCNDLSIVNPARKGLYEGTGRLFFEFYRLLHDARPKEGDDRPFFWLFENVVAMGVSDKRDISRFLESNPVMIDAKEVSAAHRARYFWGNLPGMNRPLASTVNDKLELQECLEHGRIAKFSKVRTITTRSNSIKQGKDQHFPVFMNEKEDILWCTEMERVFGFPVHYTDVSNMSRLARQRLLGRSWSVPVIRHLFAPLKEYFACV

SEQ ID NO: 14892 - protein, 853 aa, Homo sapiens
MKGDTRHLNGEEDAGGREDSILVNGACSDQSSDSPPILEAIRTPEIRGRRSSSRLSKREVSSLLSYTQDLTGDGDGEDGDGSDTPVMPKLFRETRTRSESPAVRTRNNNSVSSRERHRPSPRSTRGRQGRNHVDESPVEFPATRSLRRRATASAGTPWPSPPSSYLTIDLTDDTEDTHGTPQSSSTPYARLAQDSQQGGMESPQVEADSGDGDSSEYQDGKEFGIGDLVWGKIKGFSWWPAMVVSWKATSKRQAMSGMRWVQWFGDGKFSEVSADKLVALGLFSQHFNLATFNKLVSYRKAMYHALEKARVRAGKTFPSSPGDSLEDQLKPMLEWAHGGFKPTGIEGLKPNNTQPVVNKSKVRRAGSRKLESRKYENKTRRRTADDSATSDYCPAPKRLKTNCYNNGKDRGDEDQSREQMASDVANNKSSLEDGCLSCGRKNPVSFHPLFEGGLCQTCRDRFLELFYMYDDDGYQSYCTVCCEGRELLLCSNTSCCRCFCVECLEVLVGTGTAAEAKLQEPWSCYMCLPQRCHGVLRRRKDWNVRLQAFFTSDTGLEYEAPKLYPAIPAARRRPIRVLSLFDGIATGYLVLKELGIKVGKYVASEVCEESIAVGTVKHEGNIKYVNDVRNITKKNIEEWGPFDLVIGGSPCNDLSNVNPARKGLYEGTGRLFFEFYHLLNYSRPKEGDDRPFFWMFENVVAMKVGDKRDISRFLECNPVMIDAIKVSAAHRARYFWGNLPGMNRPVIASKNDKLELQDCLEYNRIAKLKKVQTITTKSNSIKQGKNQLFPVVMNGKEDVLWCTELERIFGFPVHYTDVSNMGRGARQKLLGRSWSVPVIRHLFAPLKDYFACE

SEQ ID NO: 14893 - protein, 386 aa, Homo sapiens
MAAIPALDPEAEPSMDVILVGSSELSSSVSPGTGRDLIAYEVKANQRNIEDICICCGSLQVHTQHPLFEGGICAPCKDKFLDALFLYDDDGYQSYCSICCSGETLLICGNPDCTRCYCFECVDSLVGPGTSGKVHAMSNWVCYLCLPSSRSGLLQRRRKWRSQLKAFYDRESENPLEMFETVPVWRRQPVRVLSLFEDIKKELTSLGFLESGSDPGQLKHVVDVTDTVRKDVEEWGPFDLVYGATPPLGHTCDRPPSWYLFQFHRLLQYARPKPGSPRPFFWMFVDNLVLNKEDLDVASRFLEMEPVTIPDVHGGSLQNAVRVWSNIPAIRSRHWALVSEEELSLLAQNKQSSKLAAKWPTKLVKNCFLPLREYFKYFSTELTSSL

SEQ ID NO: 14894 - protein, 380 aa, Homo sapiens
MGGLSARPTAGRTDPAGTCWGQDPGSKMATVIPGPLSLGEDFYREAIEHCRSYNARLCAERSLRLPFLDSQTGVAQNNCYIWMEKTHRGPGLAPGQIYTYPARCWRKKRRLNILEDPRLRPCEYKIDCEAPLKKEGGLPEGPVLEALLCAETGEKKIELKEEETIMDCQKQQLLEFPHDLEVEDLEDDIPRRKNRAKGKAYGIGGLRKRQDTASLEDRDKPYVCDKFYKELAWVPEAQRKHTAKKAPDGTVIPNGYCDFCLGGSKKTGCPEDLISCADCGRSGHPSCLQFTVNMTAAVRTYRWQCIECKSCSLCGTSENDGASWAGLTPQDQLLFCDDCDRGYHMYCLSPPMAEPPEGSWSCHLCLRHLKEKASAYITLT

SEQ ID NO: 14895 - protein, 391 aa, Homo sapiens
MAAVVENVVKLLGEQYYKDAMEQCHNYNARLCAERSVRLPFLDSQTGVAQSNCYIWMEKRHRGPGLASGQLYSYPARRWRKKRRAHPPEDPRLSFPSIKPDTDQTLKKEGLISQDGSSLEALLRTDPLEKRGAPDPRVDDDSLGEFPVTNSRARKRILEPDDFLDDLDDEDYEEDTPKRRGKGKSKGKGVGSARKKLDASILEDRDKPYACDICGKRYKNRPGLSYHYAHSHLAEEEGEDKEDSQPPTPVSQRSEEQKSKKGPDGLALPNNYCDFCLGDSKINKKTGQPEELVSCSDCGRSGHPSCLQFTPVMMAAVKTYRWQCIECKCCNICGTSENDDQLLFCDDCDRGYHMYCLTPSMSEPPEGSWSCHLCLDLLKEKASIYQNQNSS

SEQ ID NO: 14896 - protein, 378 aa, Homo sapiens; identical to SEQ ID NO: 4420

SEQ ID NO: 14897 - protein, 191 aa, Homo sapiens
MPGSEDLRKGKDQMHSHRKRTMFTKKQLEDLNILFNENPYPNPSLQKEMASKIDIHPTVLQVWFKNHRAKLKKAKCKHIHQKQETPQPPIPEGGVSTSVGLRNADTLPRLPNAAHPIGLVYTGHRVPSFQLILYPNLKVPANDFIGHRIVHFGCCRDPNIYCLYPILESQVCAPSFHSGSPACSSNQSRER

SEQ ID NO: 14898 - protein, 176 aa, Homo sapiens
MASSSGNDDDLTIPRAAINKMIKETLPNVRVANDARELVVNCCTEFIHLISSEANEICNKSEKKTISPEHVIQALESLGFGSYISEVKEVLQECKTVALKRRKASSRLENLGIPEEELLRQQQELFAKARQQQAELAQQEWLQMQQAAQQAQLAAASASASNQAGSSQDEEDDDDI

SEQ ID NO: 14899 - protein, 205 aa, Homo sapiens
MPSKKKKYNARFPPARIKKIMQTDEEIGKVAAAVPVIISRALELFLESLLKKACQVTQSRNAKTMTTSHLKQCIELEQQFDFLKDLVASVPDMQGDGEDNHMDGDKGARRGRKPGSGGRKNGGMGTKSKDKKLSGTDSEQEDESEDTDTDGEEETSQPPPQASHPSAHFQSPPTPFLPFASTLPLPPAPPGPSAPDEEDEEDYDS

SEQ ID NO: 14900 - protein, 263 aa, Homo sapiens
MFYFHCPPQLEGTATFGNHSSGDFDDGFLRRKQRRNRTTFTLQQLEALEAVFAQTHYPDVFTREELAMKINLTEARVQVWFQNRRAKWRKTERGASDQEPGAKEPMAEVTPPPVRNINSPPPGDQARSKKEALEAQQSLGRTVGPAGPFFPSCLPGTLLNTATYAQALSHVASLKGGPLCSCCVPDPMGLSFLPTYGCQSNRTASVATLRMKAREHSEAVLQSANLLPSTSSSPGPVAKPAPPDGSQEKTSPTKEQSEAEKSV

SEQ ID NO: 14901 - protein, 424 aa, Homo sapiens
MALPTPSDSTLPAEARGRGRRRRLVWTPSQSEALRACFERNPYPGIATRERLAQAIGIPEPRVQIWFQNERSRQLRQHRRESRPWPGRRGPPEGRRKRTAVTGSQTALLLRAFEKDRFPGIAAREELARETGLPESRIQIWFQNRRARHPGQGGRAPAQAGGLCSAAPGGGHPAPSWVAFAHTGAWGTGLPAPHVPCAPGALPQGAFVSQAARAAPALQPSQAAPAEGISQPAPARGDFAYAAPAPPDGALSHPQAPRWPPHPGKSREDRDPQRDGLPGPCAVAQPGPAQAGPQGQGVLAPPTSQGSPWWGWGRGPQVAGAAWEPQAGAAPPPQPAPPDASASARQGQMQGIPAPSQALQEPAPWSALPCGLLLDELLASPEFLQQAQPLLETEAPGELEASEEAASLEAPLSEEEYRALLEEL

SEQ ID NO: 14902 - protein, 374 aa, Homo sapiens
MALPTPSDSTLPAEARGRGRRRRLVWTPSQSEALRACFERNPYPGIATRERLAQAIGIPEPRVQIWFQNERSRQLRQHRRESRPWPGRRGPPEGRRKRTAVTGSQTALLLRAFEKDRFPGIAAREELARETGLPESRIQIWFQNRRARHPGQGGRAPAQAGGLCSAAPGGGHPAPSWVAFAHTGAWGTGLPAPHVPCAPGALPQGAFVSQAARAAPALQPSQAAPAEGISQPAPARGDFAYAAPAPPDGALSHPQAPRWPPHPGKSREDRDPQRDGLPGPCAVAQPGPAQAGPQGQGVLAPPTSQGSPWWGWGRGPQVAGAAWEPQAGAAPPPQPAPPDASAASTDASHPGASQPLQEPGRSSTVTSSLLYELL

SEQ ID NO: 14903 - protein, 204 aa, Homo sapiens
MAEDTYSHKMVKTNHRRCRTKFTEEQLKILINTFNQKPYPGYATKQKLALEINTEESRIQIWFQNRRARHGFQKRPEAETLESSQSQGQDQPGVEFQSREARRCRTTYSASQLHTLIKAFMKNPYPGIDSREELAKEIGVPESRVQIWFQNRRSRLLLQRKREPVASLEQEEQGKIPEGLQGAEDTQNGTNFTSDSHFSGARTW

SEQ ID NO: 14904 - protein, 437 aa, Homo sapiens
MALAGAPAGGPCAPALEALLGAGALRLLDSSQIVIISAAQDASAPPAPTGPAAPAAGPCDPDLLLFATPQAPRPTPSAPRPALGRPPVKRRLDLETDHQYLAESSGPARGRGRHPGKGVKSPGEKSRYETSLNLTTKRFLELLSHSADGVVDLNWAAEVLKVQKRRIYDITNVLEGIQLIAKKSKNHIQWLGSHTTVGVGGRLEGLTQDLRQLQESEQQLDHLMNICTTQLRLLSEDTDSQRLAYVTCQDLRSIADPAEQMVMVIKAPPETQLQAVDSSENFQISLKSKQGPIDVFLCPEETVGGISPGKTPSQEVTSEEENRATDSATIVSPPPSSPPSSLTTDPSQSLLSLEQEPLLSRMGSLRAPVDEDRLSPLVAADSLLEHVREDFSGLLPEEFISLSPPHEALDYHFGLEEGEGIRDLFDCDFGDLTPLDF

SEQ ID NO: 14905 - protein, 437 aa, Homo sapiens
MLQGPRALASAAGQTPKVVPAMSPTELWPSGLSSPQLCPATATYYTPLYPQTAPPAAAPGTCLDATPHGPEGQVVRCLPAGRLPAKRKLDLEGIGRPVVPEFPTPKGKCIRVDGLPSPKTPKSPGEKTRYDTSLGLLTKKFIYLLSESEDGVLDLNWAAEVLDVQKRRIYDITNVLEGIQLIRKKAKNNIQWVGRGMFEDPTRPGKQQQLGQELKELMNTEQALDQLIQSCSLSFKHLTEDKANKRLAYVTYQDIRAVGNFKEQTVIAVKAPPQTRLEVPDRTEDNLQIYLKSTQGPIEVYLCPEEVQEPDSPSEEPLPSTSTLCPSPDSAQPSSSTDPSIMEPTASSVPAPAPTPQQAPPPPSLVPLEATDSLLELPHPLLQQTEDQFLSPTLACSSPLISFSPSLDQDDYLWGLEAGEGISDLFDSYDLGDLLIN

SEQ ID NO: 14906 - protein, 465 aa, Homo sapiens
MRKGIQPALEQYLVTAGGGEGAAVVAAAAAASMDKRALLASPGFAAAAAAAAAPGAYIQILTTNTSTTSCSSSLQSGAVAAGPLLPSAPGAEQTAGSLLYTTPHGPSSRAGLLQQPPALGRGGSGGGGGPPAKRRLELGESGHQYLSDGLKTPKGKGRAALRSPDSPKTPKSPSEKTRYDTSLGLLTKKFIQLLSQSPDGVLDLNKAAEVLKVQKRRIYDITNVLEGIHLIKKKSKNNVQWMGCSLSEDGGMLAQCQGLSKEVTELSQEEKKLDELIQSCTLDLKLLTEDSENQRLAYVTYQDIRKISGLKDQTVIVVKAPPETRLEVPDSIESLQIHLASTQGPIEVYLCPEETETHSPMKTNNQDHNGNIPKPASKDLASTNSGHSDCSVSMGNLSPLASPANLLQQTEDQIPSNLEGPFVNLLPPLLQEDYLLSLGEEEGISDLFDAYDLEKLPLVEDFMCS

SEQ ID NO: 14907 - protein, 413 aa, Homo sapiens
MAEAGPQAPPPPGTPSRHEKSLGLLTTKFVSLLQEAKDGVLDLKLAADTLAVRQKRRIYDITNVLEGIGLIEKKSKNSIQWKGVGPGCNTREIADKLIELKAEIEELQQREQELDQHKVWVQQSIRNVTEDVQNSCLAYVTHEDICRCFAGDTLLAIRAPSGTSLEVPIPEGLNGQKKYQIHLKSVSGPIEVLLVNKEAWSSPPVAVPVPPPEDLLQSPSAVSTPPPLPKPALAQSQEASRPNSPQLTPTAVPGSAEVQGMAGPAAEITVSGGPGTDSKDSGELSSLPLGPTTLDTRPLQSSALLDSSSSSSSSSSSSSNSNSSSSSGPNPSTSFEPIKADPTGVLELPKELSEIFDPTRECMSSELLEELMSSEVFAPLLRLSPPPGDHDYIYNLDESEGVCDLFDVPVLNL

SEQ ID NO: 14908 - protein, 346 aa, Homo sapiens; identical to SEQ ID NO: 4478

SEQ ID NO: 14909 - protein, 281 aa, Homo sapiens
MSQQRPARKLPSLLLDPTEETVRRRCRDPINVEGLLPSKIRINLEDNVQYVSMRKALKVKRPRFDVSLVYLTRKFMDLVRSAPGGILDLNKVATKLGVRKRRVYDITNVLDGIDLVEKKSKNHIRWIGSDLSNFGAVPQQKKLQEELSDLSAMEDALDELIKDCAQQLFELTDDKENERLAYVTYQDIHSIQAFHEQIVIAVKAPAETRLDVPAPREDSITVHIRSTNGPIDVYLCEVEQGQTSNKRSEGVGTSSSESTHPEGPEEEENPQQSEELLEVSN

SEQ ID NO: 14910 - protein, 911 aa, Homo sapiens
MEVNCLTLKDLISPRQPRLDFAVEDGENAQKENIFVDRSRMAPKTPIKNEPIDLSKQKKFTPERNPITPVKFVDRQQAEPWTPTANLKMLISAASPDIRDREKKKGLFRPIENKDDAFTDSLQLDVVGDSAVDEFEKQRPSRKQKSLGLLCQKFLARYPSYPLSTEKTTISLDEVAVSLGVERRRIYDIVNVLESLHLVSRVAKNQYGWHGRHSLPKTLRNLQRLGEEQKYEEQMAYLQQKELDLIDYKFGERKKDGDPDSQEQQLLDFSEPDCPSSSANSRKDKSLRIMSQKFVMLFLVSKTKIVTLDVAAKILIEESQDAPDHSKFKTKVRRLYDIANVLTSLALIKKVHVTEERGRKPAFKWIGPVDFSSSDEELVDVSASVLPELKRETYGQIQVCAKQKLARHGSFNTVQASERIQRKVNSEPSSPYREEQGSGGYSLEIGSLAAVYRQKIEDNSQGKAFASKRVVPPSSSLDPVAPFPVLSVDPEYCVNPLAHPVFSVAQTDLQAFSMQNGLNGQVDVSLASAASAVESLKPALLAGQPLVYVPSASLFMLYGSLQEGPASGSGSERDDRSSEAPATVELSSAPSAQKRLCEERKPQEEDEPATKRQSREYEDGPLSLVMPKKPSDSTDLASPKTMGNRASIPLKDIHVNGQLPAAEEISGKATANSLVSSEWGNPSRNTDVEKPSKENESTKEPSLLQYLCVQSPAGLNGFNVLLSGSQTPPTVGPSSGQLPSFSVPCMVLPSPPLGPFPVLYSPAMPGPVSSTLGALPNTGPVNFSLPGLGSIAQLLVGPTAVVNPKSSTLPSADPQLQSQPSLNLSPVMSRSHSVVQQPESPVYVGHPVSVVKLHQSPVPVTPKSIQRTHRETFFKTPGSLGDPVLKRRERNQSRNTSSAQRRLEIPSGGAD

SEQ ID NO: 14911 - protein, 867 aa, Homo sapiens
MENEKENLFCEPHKRGLMKTPLKESTTANIVLAEIQPDFGPLTTPTKPKEGSQGEPWTPTANLKMLISAVSPEIRNRDQKRGLFDNRSGLPEAKDCIHEHLSGDEFEKSQPSRKEKSLGLLCHKFLARYPNYPNPAVNNDICLDEVAEELNVERRRIYDIVNVLESLHMVSRLAKNRYTWHGRHNLNKTLGTLKSIGEENKYAEQIMMIKKKEYEQEFDFIKSYSIEDHIIKSNTGPNGHPDMCFVELPGVEFRAASVNSRKDKSLRVMSQKFVMLFLVSTPQIVSLEVAAKILIGEDHVEDLDKSKFKTKIRRLYDIANVLSSLDLIKKVHVTEERGRKPAFKWTGPEISPNTSGSSPVIHFTPSDLEVRRSSKENCAKNLFSTRGKPNFTRHPSLIKLVKSIESDRRKINSAPSSPIKTNKAESSQNSAPFPSKMAQLAAICKMQLEEQSSESRQKVKVQLARSGPCKPVAPLDPPVNAEMELTAPSLIQPLGMVPLIPSPLSSAVPLILPQAPSGPSYAIYLQPTQAHQSVTPPQGLSPTVCTTHSSKATGSKDSTDATTEKAANDTSKASASTRPGSLLPAPERQGAKSRTREPAGERGSKRASMLEDSGSKKKFKEDLKGLENVSATLFPSGYLIPLTQCSSLGAESILSGKENSSALSPNHRIYSSPIAGVIPVTSSELTAVNFPSFHVTPLKLMVSPTSVAAVPVGNSPALASSHPVPIQNPSSAIVNFTLQHLGLISPNVQLSASPGSGIVPVSPRIESVNVAPENAGTQQGRATNYDSPVPGQSQPNGQSVAVTGAQQPVPVTPKGSQLVAESFFRTPGGPTKPTSSSCMDFEGANKTSLGTLFVPQRKLEVSTEDVH

SEQ ID NO: 14912 - protein, 784 aa, Homo sapiens
MEGAMAVRVTAAHTAEAQAEAGREAGEGAVAAVAAALAPSGFLGLPAPFSEEDEDDVHRCGRCQAEFTALEDFVQHKIQKACQRAPPEALPATPATTALLGQEVVPAAPGPEEPITVAHIVVEAASLAADISHASDLVGGGHIKEVIVAAEAELGDGEMAEAPGSPRQQGLGLAGEGEQAQVKLLVNKDGRYVCALCHKTFKTGSILKAHMVTHSSRKDHECKLCGASFRTKGSLIRHHRRHTDERPYKCSKCGKSFRESGALTRHLKSLTPCTEKIRFSVSKDVVVSKEDARAGSGAGAAGLGTATSSVTGEPIETSPVIHLVTDAKGTVIHEVHVQMQELSLGMKALAPEPPVSQELPCSSEGSRENLLHQAMQNSGIVLERAAGEEGALEPAPAAGSSPQPLAVAAPQLPVLEVQPLETQVASEASAVPRTHPCPQCSETFPTAATLEAHKRGHTGPRPFACAQCGKAFPKAYLLKKHQEVHVRERRFRCGDCGKLYKTIAHVRGHRRVHSDERPYPCPKCGKRYKTKNAQQVHFRTHLEEKPHVCQFCSRGFREKGSLVRHVRHHTGEKPFKCYKCGRGFAEHGTLNRHLRTKGGCLLEVEELLVSEDSPAAATTVLTEDPHTVLVEFSSVVADTQEYIIEATADDAETSEATEIIEGTQTEVDSHIMKVVQQIVHQASAGHQIIVQNVTMDEETALGPEAAAADTITIATPESLTEQVAMTLASAISEGTVLAARAGTSGTEQATVTMVSSEDIEILEHAGELVIASPEGQLEVQTVIV

SEQ ID NO: 14913 - protein, 591 aa, Homo sapiens
MFGIQESIQRSGSSMKEEPLGSGMNAVRTWMQGAGVLDANTAAQSGVGLARAHFEKQPPSNLRKSNFFHFVLALYDRQGQPVEIERTAFVGFVEKEKEANSEKTNNGIHYRLQLLYSNGIRTEQDFYVRLIDSMTKQAIVYEGQDKNPEMCRVLLTHEIMCSRCCDKKSCGNRNETPSDPVIIDRFFLKFFLKCNQNCLKNAGNPRDMRRFQVVVSTTVNVDGHVLAVSDNMFVHNNSKHGRRARRLDPSEGTPSYLEHATPCIKAISPSEGWTTGGATVIIIGDNFFDGLQVIFGTMLVWSELITPHAIRVQTPPRHIPGVVEVTLSYKSKQFCKGTPGRFIYTALNEPTIDYGFQRLQKVIPRHPGDPERLPKEVILKRAADLVEALYGMPHNNQEIILKRAADIAEALYSVPRNHNQLPALANTSVHAGMMGVNSFSGQLAVNVSEASQATNQGFTRNSSSVSPHGYVPSTTPQQTNYNSVTTSMNGYGSAAMSNLGGSPTFLNGSAANSPYAIVPSSPTMASSTSLPSNCSSSSGIFSFSPANMVSAVKQKSAFAPVVRPQTSPPPTCTSTNGNSLQAISGMIVPPM

SEQ ID NO: 14914 - protein, 575 aa, Homo sapiens
MFGIQDTLGRGPTLKEKSLGAEMDSVRSWVRNVGVVDANVAAQSGVALSRAHFEKQPPSNLRKSNFFHFVLALYDRQGQPVEIERTAFVDFVENDKEQGNEKTNNGTHYKLQLLYSNGVRTEQDLYVRLIDSVTKQPIAYEGQNKNPEMCRVLLTHEVMCSRCCEKKSCGNRNETPSDPVIIDRFFLKFFLKCNQNCLKTAGNPRDMRRFQVVLSTTVNVDGHVLAVSDNMFVHNNSKHGRRARRLDPSEATPCIKAISPSEGWTTGGAMVIIIGDNFFDGLQVVFGTMLVWSELITPHAIRVQTPPRHIPGVVEVTLSYKSKQFCKGAPGRFIYTALNEPTIDYGFQRLQKVIPRHPGDPERLAKEMLLKRAADLVEALYGTPHNNQDIILKRAADIAEALYSVPRNPSQLPALSSSPAHSGMMGINSYGSQLGVSISESTQGNNQGYIRNTSSISPRGYSSSSTPQQSNYSTSSNSMNGYSNVPMANLGVPGSPGFLNGSPTGSPYGIMSSSPTVGSSSTSSILPFSSSVFPAVKQKSAFAPVIRPQGSPSPACSSGNGNGFRAMTGLVVPPM

SEQ ID NO: 14915 - protein, 596 aa, Homo sapiens
MFGIQENIPRGGTTMKEEPLGSGMNPVRSWMHTAGVVDANTAAQSGVGLARAHFEKQPPSNLRKSNFFHFVLALYDRQGQPVEIERTAFVDFVEKEKEPNNEKTNNGIHYKLQLLYSNGVRTEQDLYVRLIDSMTKQAIVYEGQDKNPEMCRVLLTHEIMCSRCCDKKSCGNRNETPSDPVIIDRFFLKFFLKCNQNCLKNAGNPRDMRRFQVVVSTTVNVDGHVLAVSDNMFVHNNSKHGRRARRLDPSEGTAPSYLENATPCIKAISPSEGWTTGGATVIIIGDNFFDGLQVVFGTMLVWSELITPHAIRVQTPPRHIPGVVEVTLSYKSKQFCKGAPGRFVYTALNEPTIDYGFQRLQKVIPRHPGDPERLPKEVLLKRAADLVEALYGMPHNNQEIILKRAADIAEALYSVPRNHNQIPTLGNNPAHTGMMGVNSFSSQLAVNVSETSQANDQVGYSRNTSSVSPRGYVPSSTPQQSNYNTVSTSMNGYGSGAMASLGVPGSPGFLNGSSANSPYGIVPSSPTMAASSVTLPSNCSSTHGIFSFSPANVISAVKQKSAFAPVVRPQASPPPSCTSANGNGLQAMSGLVVPPM

SEQ ID NO: 14916 - protein, 602 aa, Homo sapiens
MFPAQDALPRSGLNLKEEPLLPAGLGSVRSWMQGAGILDASTAAQSGVGLARAHFEKQPPSNLRKSNFFHFVLAMYDRQGQPVEVERTAFIDFVEKDREPGAEKTNNGIHYRLRLVYNNGLRTEQDLYVRLIDSMSKQAIIYEGQDKNPEMCRVLLTHEIMCSRCCDRKSCGNRNETPSDPVIIDRFFLKFFLKCNQNCLKNAGNPRDMRRFQVVVSTTVSVDGHVLAVSDNMFVHNNSKHGRRARRLDPSEAATPCIKAISPGEGWTTGGATVIVIGDNFFDGLQVVFGNVLVWSELITPHAIRVQTPPRHIPGVVEVTLSYKSKQFCKGCPGRFVYTALNEPTIDYGFQRLQKVIPRHPGDPERLPKEVLLKRAADLAEALYGVPGSNQELLLKRAADVAEALYSTPRAPGPLAPLAPSHPHPAVVGINAFSSPLAIAVGDATPGPEPGYARSCSSASPRGFAPSPGSQQSGYGGGLGAGLGGYGAPGVAGLGVPGSPSFLNGSTATSPFAIMPSSPPLAAASSMSLPAAAPTTSVFSFSPVNMISAVKQRSAFAPVLRPPSSPPQACPRAHGEGLPDQSFEDSDKFHSPARGLQGLAYS

SEQ ID NO: 14917 - protein, 706 aa, Homo sapiens
MTTLKEAVTFKDVAVVFTEEELRLLDLAQRKLYREVMLENFRNLLSVGHQSLHRDTFHFLKEEKFWMMETATQREGNLGGKIQMEMETVSESGTHEGLFSHQTWEQISSDLTRFQDSMVNSFQFSKQDDMPCQVDAGLSIIHVRQKPSEGRTCKKSFSDVSVLDLHQQLQSREKSHTCDECGKSFCYSSALRIHQRVHMGEKLYNCDVCGKEFNQSSHLQIHQRIHTGEKPFKCEQCGKGFSRRSGLYVHRKLHTGVKPHICEKCGKAFIHDSQLQEHQRIHTGEKPFKCDICCKSFRSRANLNRHSMVHMREKPFRCDTCGKSFGLKSALNSHRMVHTGEKRYKCEECGKRFIYRQDLYKHQIDHTGEKPYNCKECGKSFRWASGLSRHVRVHSGETTFKCEECGKGFYTNSQRYSHQRAHSGEKPYRCEECGKGYKRRLDLDFHQRVHRGEKPYNCKECGKSFGWASCLLNHQRIHSGEKPFKCEECGKRFTQNSQLYTHRRVHSGEKPFKCEECGKRFTQNSQLYSHRRVHTGVKPYKCEECGKGFNSKFNLDMHQRVHTGERPYNCKECGKSFSRASSILNHKRLHGDEKPFKCEECGKRFTENSQLHSHQRVHTGEKPYKCEKCGKSFRWASTHLTHQRLHSREKLLQCEDCGKSIVHSSCLKDQQRDQSGEKTSKCEDCGKRYKRRLNLDTLLSLFLNDT

SEQ ID NO: 14918 - protein, 476 aa, Homo sapiens
MMTAKAVDKIPVTLSGFVHQLSDNIYPVEDLAATSVTIFPNAELGGPFDQMNGVAGDGMINIDMTGEKRSLDLPYPSSFAPVSAPRNQTFTYMGKFSIDPQYPGASCYPEGIINIVSAGILQGVTSPASTTASSSVTSASPNPLATGPLGVCTMSQTQPDLDHLYSPPPPPPPYSGCAGDLYQDPSAFLSAATTSTSSSLAYPPPPSYPSPKPATDPGLFPMIPDYPGFFPSQCQRDLHGTAGPDRKPFPCPLDTLRVPPPLTPLSTIRNFTLGGPSAGVTGPGASGGSEGPRLPGSSSAAAAAAAAAAYNPHHLPLRPILRPRKYPNRPSKTPVHERPYPCPAEGCDRRFSRSDELTRHIRIHTGHKPFQCRICMRNFSRSDHLTTHIRTHTGEKPFACDYCGRKFARSDERKRHTKIHLRQKERKSSAPSASVPAPSTASCSGGVQPGGTLCSSNSSSLGGGPLAPCSSRTRTP

SEQ ID NO: 14919 - protein, 387 aa, Homo sapiens
MTGKLAEKLPVTMSSLLNQLPDNLYPEEIPSALNLFSGSSDSVVHYNQMATENVMDIGLTNEKPNPELSYSGSFQPAPGNKTVTYLGKFAFDSPSNWCQDNIISLMSAGILGVPPASGALSTQTSTASMVQPPQGDVEAMYPALPPYSNCGDLYSEPVSFHDPQGNPGLAYSPQDYQSAKPALDSNLFPMIPDYNLYHHPNDMGSIPEHKPFQGMDPIRVNPPPITPLETIKAFKDKQIHPGFGSLPQPPLTLKPIRPRKYPNRPSKTPLHERPHACPAEGCDRRFSRSDELTRHLRIHTGHKPFQCRICMRSFSRSDHLTTHIRTHTGEKPFACEFCGRKFARSDERKRHAKIHLKQKEKKAEKGGAPSASSAPPVSLAPVVTTCA

SEQ ID NO: 14920 - protein, 589 aa, Homo sapiens
MAVARGVGSPEPAPPQLYKWGGCGLGEPGSALERRGAAARGRCGRARAPRLPDSFPRGECPKPGARAPRSVRCGEPLPPASPPPARPQAQRARPRAPHSRRRAMLHLSEFSEPDALLVKSTEGCCAEPSAELPRLPARDAPAATGYPGAGDFLSWALNSCGASGDLADSCFLEGPAPTPPPGLSYSGSFFIQAVPEHPHDPEALFNLMSGILGLAPFPGPEAAASRSPLDAPFPAGSDALLPGPPDLYSPDLGAAPFPEAFWEASPCAGAPSQCLYEPQLSPPDVKPGLRAPPASPALDAVSAFKGPYAPWELLSVGAPGNCGSQGDYQAAPEARFPVIGTKIEDLLSISCPAELPAVPANRLYPSGAYDAFPLAPGDLGEGAEGLPGLLTPPSGEGGSSGDGGEFLASTQPQLSPLGLRSAAAADFPKPLVADIPGSSGVAAPPVPPPPPTPFPQAKARRKGRRGGKCSTRCFCPRPHAKAFACPVESCVRSFARSDELNRHLRIHTGHKPFQCRICLRNFSRSDHLTTHVRTHTGEKPFACDVCGRRFARSDEKKRHSKVHLKQKARAEERLKGLGFYSLGLSFASL

SEQ ID NO: 14921 - protein, 300 aa, Homo sapiens; identical to SEQ ID NO: 4634

SEQ ID NO: 14922 - protein, 619 aa, Homo sapiens
MAAVVQQNDLVFEFASNVMEDERQLGDPAIFPAVIVEHVPGADILNSYAGLACVEEPNDMITESSLDVAEEEIIDDDDDDITLTVEASCHDGDETIETIEAAEALLNMDSPGPMLDEKRINNNIFSSPEDDMVVAPVTHVSVTLDGIPEVMETQQVQEKYADSPGASSPEQPKRKKGRKTKPPRPDSPATTPNISVKKKNKDGKGNTIYLWEFLLALLQDKATCPKYIKWTQREKGIFKLVDSKAVSRLWGKHKNKPDMNYETMGRALRYYYQRGILAKVEGQRLVYQFKEMPKDLIYINDEDPSSSIESSDPSLSSSATSNRNQTSRSRVSSSPGVKGGATTVLKPGNSKAAKPKDPVEVAQPSEVLRTVQPTQSPYPTQLFRTVHVVQPVQAVPEGEAARTSTMQDETLNSSVQSIRTIQAPTQVPVVVSPRNQQLHTVTLQTVPLTTVIASTDPSAGTGSQKFILQAIPSSQPMTVLKENVMLQSQKAGSPPSIVLGPAQVQQVLTSNVQTICNGTVSVASSPSFSATAPVVTFSPRSSQLVAHPPGTVITSVIKTQETKTLTQEVEKKESEDHLKENTEKTEQQPQPYVMVVSSSNGFTSQVAMKQNELLEPNSF

SEQ ID NO: 14923 - protein, 593 aa, Homo sapiens
MTSAVVDSGGTILELSSNGVENQEESEKVSEYPAVIVEPVPSARLEQGYAAQVLVYDDETYMMQDVAEEQEVETENVETVEASVHSSNAHCTDKTIEAAEALLHMESPTCLRDSRSPVEVFVPPCVSTPEFIHAAMRPDVITETVVEVSTEESEPMDTSPIPTSPDSHEPMKKKKVGRKPKTQQSPISNGSPELGIKKKPREGKGNTTYLWEFLLDLLQDKNTCPRYIKWTQREKGIFKLVDSKAVSKLWGKHKNKPDMNYETMGRALRYYYQRGILAKVEGQRLVYQFKDMPKNIVVIDDDKSETCNEDLAGTTDEKSLERVSLSAESLLKAASSVRSGKNSSPINCSRAEKGVARVVNITSPGHDASSRSPTTTASVSATAAPRTVRVAMQVPVVMTSLGQKISTVAVQSVNAGAPLITSTSPTTATSPKVVIQTIPTVMPASTENGDKITMQPAKIITIPATQLAQCQLQTKSNLTGSGSINIVGTPLAVRALTPVSIAHGTPVMRLSMPTQQASGQTPPRVISAVIKGPEVKSEAVAKKQEHDVKTLQLVEEKPADGNKTVTHVVVVSAPSAIALPVTMKTEGLVTCEK

SEQ ID NO: 14924 - protein, 371 aa, Homo sapiens
MAATCEISNIFSNYFSAMYSSEDSTLASVPPAATFGADDLVLTLSNPQMSLEGTEKASWLGEQPQFWSKTQVLDWISYQVEKNKYDASAIDFSRCDMDGATLCNCALEELRLVFGPLGDQLHAQLRDLTSSSSDELSWIIELLEKDGMAFQEALDPGPFDQGSPFAQELLDDGQQASPYHPGSCGAGAPSPGSSDVSTAGTGASRSSHSSDSGGSDVDLDPTDGKLFPSDGFRDCKKGDPKHGKRKRGRPRKLSKEYWDCLEGKKSKHAPRGTHLWEFIRDILIHPELNEGLMKWENRHEGVFKFLRSEAVAQLWGQKKKNSNMTYEKLSRAMRYYYKREILERVDGRRLVYKFGKNSSGWKEEEVLQSRN

SEQ ID NO: 14925 - protein, 663 aa, Homo sapiens
MAITLQPSDLIFEFASNGMDDDIHQLEDPSVFPAVIVEQVPYPDLLHLYSGLELDDVHNGIITDGTLCMTQDQILEGSFLLTDDNEATSHTMSTAEVLLNMESPSDILDEKQIFSTSEMLPDSDPAPAVTLPNYLFPASEPDALNRAGDTSDQEGHSLEEKASREESAKKTGKSKKRIRKTKGNRSTSPVTDPSIPIRKKSKDGKGSTIYLWEFLLALLQDRNTCPKYIKWTQREKGIFKLVDSKAVSKLWGKQKNKPDMNYETMGRALRYYYQRGILAKVEGQRLVYQFKEMPKDLVVIEDEDESSEATAAPPQASTASVASASTTRRTSSRVSSRSAPQGKGSSSWEKPKIQHVGLQPSASLELGPSLDEEIPTTSTMLVSPAEGQVKLTKAVSASSVPSNIHLGVAPVGSGSALTLQTIPLTTVLTNGPPASTTAPTQLVLQSVPAASTFKDTFTLQASFPLNASFQDSQVAAPGAPLILSGLPQLLAGANRPTNPAPPTVTGAGPAGPSSQPPGTVIAAFIRTSGTTAAPRVKEGPLRSSSYVQGMVTGAPMEGLLVPEETLRELLRDQAHLQPLPTQVVSRGSHNPSLLGNQTLSPPSRPTVGLTPVAELELSSGSGSLLMAEPSVTTSGSLLTRSPTPAPFSPFNPTSLIKMEPHDI

SEQ ID NO: 14926 - protein, 265 aa, Homo sapiens
MPSLPHSHRVMLDSVTHSTFLPNASFCDPLMSWTDLFSNEEYYPAFEHQTACDSYWTSVHPEYWTKRHVWEWLQFCCDQYKLDTNCISFCNFNISGLQLCSMTQEEFVEAAGLCGEYLYFILQNIRTQGYSFFNDAEESKATIKDYADSNCLKTSGIKSQDCHSHSRTSLQSSHLWEFVRDLLLSPEENCGILEWEDREQGIFRVVKSEALAKMWGQRKKNDRMTYEKLSRALRYYYKTGILERVDRRLVYKFGKNAHGWQEDKL

SEQ ID NO: 14927 - protein, 428 aa, Homo sapiens
MDPSVTLWQFLLQLLREQGNGHIISWTSRDGGEFKLVDAEEVARLWGLRKNKTNMNYDKLSRALRYYYDKNIIRKVSGQKFVYKFVSYPEVAGCSTEDCPPQPEVSVTSTMPNVAPAAIHAAPGDTVSGKPGTPKGAGMAGPGGLARSSRNEYMRSGLYSTFTIQSLQPQPPPHPRPAVVLPSAAPAGAAAPPSGSRSTSPSPLEACLEAEEAGLPLQVILTPPEAPNLKSEELNVEPGLGRALPPEVKVEGPKEELEVAGERGFVPETTKAEPEVPPQEGVPARLPAVVMDTAGQAGGHAASSPEISQPQKGRKPRDLELPLSPSLLGGPGPERTPGSGSGSGLQAPGPALTPSLLPTHTLTPVLLTPSSLPPSIHFWSTLSPIAPRSPAKLSFQFPSSGSAQVHIPSISVDGLSTPVVLSPGPQKP

SEQ ID NO: 14928 - protein, 407 aa, Homo sapiens
MESAITLWQFLLQLLLDQKHEHLICWTSNDGEFKLLKAEEVAKLWGLRKNKTNMNYDKLSRALRYYYDKNIIKKVIGQKFVYKFVSFPEILKMDPHAVEISRESLLLQDSDCKASPEGREAHKHGLAALRSTSRNEYIHSGLYSSFTINSLQNPPDAFKAIKTEKLEEPPEDSPPVEEVRTVIRFVTNKTDKHVTRPVVSLPSTSEAAAASAFLASSVSAKISSLMLPNAASISSASPFSSRSPSLSPNSPLPSEHRSLFLEAACHDSDSLEPLNLSSGSKTKSPSLPPKAKKPKGLEISAPPLVLSGTDIGSIALNSPALPSGSLTPAFFTAQTPNGLLLTPSPLLSSIHFWSSLSPVAPLSPARLQGPSTLFQFPTLLNGHMPVPIPSLDRAASPVLLSSNSQKS

SEQ ID NO: 14929 - protein, 431 aa, Homo sapiens
MDSAITLWQFLLQLLQKPQNKHMICWTSNDGQFKLLQAEEVARLWGIRKNKPNMNYDKLSRALRYYYVKNIIKKVNGQKFVYKFVSYPEILNMDPMTVGRIEGDCESLNFSEVSSSSKDVENGGKDKPPQPGAKTSSRNDYIHSGLYSSFTLNSLNSSNVKLFKLIKTENPAEKLAEKKSPQEPTPSVIKFVTTPSKKPPVEPVAATISIGPSISPSSEETIQALETLVSPKLPSLEAPTSASNVMTAFATTPPISSIPPLQEPPRTPSPPLSSHPDIDTDIDSVASQPMELPENLSLEPKDQDSVLLEKDKVNNSSRSKKPKGLELAPTLVITSSDPSPLGILSPSLPTASLTPAFFSQTPIILTPSPLLSSIHFWSTLSPVAPLSPARLQGANTLFQFPSVLNSHGPFTLSGLDGPSTPGPFSPDLQKT

SEQ ID NO: 14930 - protein, 1045 aa, Homo sapiens
MNLQAQPKAQNKRKRCLFGGQEPAPKEQPPPLQPPQQSIRVKEEQYLGHEGPGGAVSTSQPVELPPPSSLALLNSVVYGPERTSAAMLSQQVASVKWPNSVMAPGRGPERGGGGGVSDSSWQQQPGQPPPHSTWNCHSLSLYSATKGSPHPGVGVPTYYNHPEALKREKAGGPQLDRYVRPMMPQKVQLEVGRPQAPLNSFHAAKKPPNQSLPLQPFQLAFGHQVNRQVFRQGPPPPNPVAAFPPQKQQQQQQPQQQQQQQQAALPQMPLFENFYSMPQQPSQQPQDFGLQPAGPLGQSHLAHHSMAPYPFPPNPDMNPELRKALLQDSAPQPALPQVQIPFPRRSRRLSKEGILPPSALDGAGTQPGQEATGNLFLHHWPLQQPPPGSLGQPHPEALGFPLELRESQLLPDGERLAPNGREREAPAMGSEEGMRAVSTGDCGQVLRGGVIQSTRRRRRASQEANLLTLAQKAVELASLQNAKDGSGSEEKRKSVLASTTKCGVEFSEPSLATKRAREDSGMVPLIIPVSVPVRTVDPTEAAQAGGLDEDGKGPEQNPAEHKPSVIVTRRRSTRIPGTDAQAQAEDMNVKLEGEPSVRKPKQRPRPEPLIIPTKAGTFIAPPVYSNITPYQSHLRSPVRLADHPSERSFELPPYTPPPILSPVREGSGLYFNAIISTSTIPAPPPITPKSAHRTLLRTNSAEVTPPVLSVMGEATPVSIEPRINVGSRFQAEIPLMRDRALAAADPHKADLVWQPWEDLESSREKQRQVEDLLTAACSSIFPGAGTNQELALHCLHESRGDILETLNKLLLKKPLRPHNHPLATYHYTGSDQWKMAERKLFNKGIAIYKKDFFLVQKLIQTKTVAQCVEFYYTYKKQVKIGRNGTLTFGDVDTSDEKSAQEEVEVDIKTSQKFPRVPLPRRESPSEERLEPKREVKEPRKEGEEEVPEIQEKEEQEEGRERSRRAAAVKATQTLQANESASDILILRSHESNAPGSAGGQASEKPREGTGKSRRALPFSEKKKKTETFSKTQNQENTFPCKKCGR

SEQ ID NO: 14931 - protein, 257 aa, Homo sapiens
MFQPAAKRGFTIESLVAKDGGTGGGTGGGGAGSHLLAAAASEEPLRPTALNYPHPSAAEAAFVSGFPAAAAAGAGRSLYGGPELVFPEAMNHPALTVHPAHQLGASPLQPPHSFFGAQHRDPLHFYPWVLRNRFFGHRFQASDVPQDGLLLHGPFARKPKRIRTAFSPSQLLRLERAFEKNHYVVGAERKQLAGSLSLSETQVKVWFQNRRTKYKRQKLEEEGPESEQKKKGSHHINRWRIATKQANGEDIDVTSND

SEQ ID NO: 14932 - protein, 252 aa, Homo sapiens
MFQPAPKRCFTIESLVAKDSPLPASRSEDPIRPAALSYANSSPINPFLNGFHSAAAAAAGRGVYSNPDLVFAEAVSHPPNPAVPVHPVPPPHALAAHPLPSSHSPHPLFASQQRDPSTFYPWLIHRYRYLGHRFQGNDTSPESFLLHNALARKPKRIRTAFSPSQLLRLEHAFEKNHYVVGAERKQLAHSLSLTETQVKVWFQNRRTKFKRQKLEEEGSDSQQKKKGTHHINRWRIATKQASPEEIDVTSDD

SEQ ID NO: 14933 - protein, 392 aa, Homo sapiens
MEEQQPEPKSQRDSALGAAAAATPGGLSLSLSPGASGSSGSGSDGDSVPVSPQPAPPSPPAAPCLPPLAHHPHLPPHPPPPPPQHLAAPAHQPQPAAQLHRTTNFFIDNILRPDFGCKKEQPPPQLLVAAAARGGAGGGGRVERDRGQTAAGRDPVHPLGTRAPGAASLLCAPDANCGPPDGSQPAAAGAGASKAGNPAAAAAAAAAAVAAAAAAAAAKPSDTGGGGSGGGAGSPGAQGTKYPEHGNPAILLMGSANGGPVVKTDSQQPLVWPAWVYCTRYSDRPSSGPRTRKLKKKKNEKEDKRPRTAFTAEQLQRLKAEFQANRYITEQRRQTLAQELSLNESQIKIWFQNKRAKIKKATGIKNGLALHLMAQGLYNHSTTTVQDKDESE

SEQ ID NO: 14934 - protein, 333 aa, Homo sapiens
MEENDPKPGEAAAAVEGQRQPESSPGGGSGGGGGSSPGEADTGRRRALMLPAVLQAPGNHQHPHRITNFFIDNILRPEFGRRKDAGTCCAGAGGGRGGGAGGEGGASGAEGGGGAGGSEQLLGSGSREPRQNPPCAPGAGGPLPAAGSDSPGDGEGGSKTLSLHGGAKKGGDPGGPLDGSLKARGLGGGDLSVSSDSDSSQAGANLGAQPMLWPAWVYCTRYSDRPSSGPRSRKPKKKNPNKEDKRPRTAFTAEQLQRLKAEFQTNRYLTEQRRQSLAQELSLNESQIKIWFQNKRAKIKKATGNKNTLAVHLMAQGLYNHSTTAKEGKSDSE

SEQ ID NO: 14935 - protein, 434 aa, Homo sapiens
MSILKIHAREIFDSRGNPTVEVDLFTSKGLFRAAVPSGASTGIYEALELRDNDKTRYMGKGVSKAVEHINKTIAPALVSKKLNVTEQEKIDKLMIEMDGTENKSKFGANAILGVSLAVCKAGAVEKGVPLYRHIADLAGNSEVILPVPAFNVINGGSHAGNKLAMQEFMILPVGAANFREAMRIGAEVYHNLKNVIKEKYGKDATNVGDEGGFAPNILENKEGLELLKTAIGKAGYTDKVVIGMDVAASEFFRSGKYDLDFKSPDDPSRYISPDQLADLYKSFIKDYPVVSIEDPFDQDDWGAWQKFTASAGIQVVGDDLTVTNPKRIAKAVNEKSCNCLLLKVNQIGSVTESLQACKLAQANGWGVMVSHRSGETEDTFIADLVVGLCTGQIKTGAPCRSERLAKYNQLLRIEEELGSKAKFAGRNFRNPLAK

SEQ ID NO: 14936 - protein, 686 aa, Homo sapiens
MQLGEQLLVSSVNLPGAHFYPLESARGGSGGSAGHLPSAAPSPQKLDLDKASKKFSGSLSCEAVSGEPAAASAGAPAAMLSDTDAGDAFASAAAVAKPGPPDGRKGSPCGEEELPSAAAAAAAAAAAAAATARYSMDSLSSERYYLQSPGPQGSELAAPCSLFPYQAAAGAPHGPVYPAPNGARYPYGSMLPPGGFPAAVCPPGRAQFGPGAGAGSGAGGSSGGGGGPGTYQYSQGAPLYGPYPGAAAAGSCGGLGGLGVPGSGFRAHVYLCNRPLWLKFHRHQTEMIITKQGRRMFPFLSFNINGLNPTAHYNVFVEVVLADPNHWRFQGGKWVTCGKADNNMQGNKMYVHPESPNTGSHWMRQEISFGKLKLTNNKGANNNNTQMIVLQSLHKYQPRLHIVEVTEDGVEDLNEPSKTQTFTFSETQFIAVTAYQNTDITQLKIDHNPFAKGFRDNYDSSHQIVPGGRYGVQSFFPEPFVNTLPQARYYNGERTVPQTNGLLSPQQSEEVANPPQRWLVTPVQQPGTNKLDISSYESEYTSSTLLPYGIKSLPLQTSHALGYYPDPTFPAMAGWGGRGSYQRKMAAGLPWTSRTSPTVFSEDQLSKEKVKEEIGSSWIETPPSIKSLDSNDSGVYTSACKRRRLSPSNSSNENSPSIKCEDINAEEYSKDTSKGMGGYYAFYTTP

SEQ ID NO: 14937 - protein, 870 aa, Homo sapiens
MTADKEKKRSSSERRKEKSRDAARCRRSKETEVFYELAHELPLPHSVSSHLDKASIMRLAISFLRTHKLLSSVCSENESEAEADQQMDNLYLKALEGFIAVVTQDGDMIFLSENISKFMGLTQVELTGHSIFDFTHPCDHEEIRENLSLKNGSGFGKKSKDMSTERDFFMRMKCTVTNRGRTVNLKSATWKVLHCTGQVKVYNNCPPHNSLCGYKEPLLSCLIIMCEPIQHPSHMDIPLDSKTFLSRHSMDMKFTYCDDRITELIGYHPEELLGRSAYEFYHALDSENMTKSHQNLCTKGQVVSGQYRMLAKHGGYVWLETQGTVIYNPRNLQPQCIMCVNYVLSEIEKNDVVFSMDQTESLFKPHLMAMNSIFDSSGKGAVSEKSNFLFTKLKEEPEELAQLAPTPGDAIISLDFGNQNFEESSAYGKAILPPSQPWATELRSHSTQSEAGSLPAFTVPQAAAPGSTTPSATSSSSSCSTPNSPEDYYTSLDNDLKIEVIEKLFAMDTEAKDQCSTQTDFNELDLETLAPYIPMDGEDFQLSPICPEERLLAENPQSTPQHCFSAMTNIFQPLAPVAPHSPFLLDKFQQQLESKKTEPEHRPMSSIFFDAGSKASLPPCCGQASTPLSSMGGRSNTQWPPDPPLHFGPTKWAVGDQRTEFLGAAPLGPPVSPPHVSTFKTRSAKGFGARGPDVLSPAMVALSNKLKLKRQLEYEEQAFQDLSGGDPPGGSTSHLMWKRMKNLRGGSCPLMPDKPLSANVPNDKFTQNPMRGLGHPLRHLPLPQPPSAISPGENSKSRFPPQCYATQYQDYSLSSAHKVSGMASRLLGPSFESYLLPELTRYDCEVNVPVLGSSTLLQGGDLLRALDQAT

SEQ ID NO: 14938 - protein, 548 aa, Homo sapiens
MKTPADTGFAFPDWAYKPESSPGSRQIQLWHFILELLRKEEYQGVIAWQGDYGEFVIKDPDEVARLWGVRKCKPQMNYDKLSRALRYYYNKRILHKTKGKRFTYKFNFNKLVLVNYPFIDVGLAGGAVPQSAPPVPSGGSHFRFPPSTPSEVLSPTEDPRSPPACSSSSSSLFSAVVARRLGRGSVSDCSDGTSELEEPLGEDPRARPPGPPDLGAFRGPPLARLPHDPGVFRVYPRPRGGPEPLSPFPVSPLAGPGSLLPPQLSPALPMTPTHLAYTPSPTLSPMYPSGGGGPSGSGGGSHFSFSPEDMKRYLQAHTQSVYNYHLSPRAFLHYPGLVVPQPQRPDKCPLPPMAPETPPVPSSASSSSSSSSSPFKFKLQPPPLGRRQRAAGEKAVAGADKSGGSAGGLAEGAGALAPPPPPPQIKVEPISEGESEEVEVTDISDEDEEDGEVFKTPRAPPAPPKPEPGEAPGASQCMPLKLRFKRRWSEDCRLEGGGGPAGGFEDEGEDKKVRGEGPGEAGGPLTPRRVSSDLQHATAQLSLEHRDS

SEQ ID NO: 14939 - protein, 486 aa, Homo sapiens
MIQTVPDPAAHIKEALSVVSEDQSLFECAYGTPHLAKTEMTASSSSDYGQTSKMSPRVPQQDWLSQPPARVTIKMECNPSQVNGSRNSPDECSVAKGGKMVGSPDTVGMNYGSYMEEKHMPPPNMTTNERRVIVPADPTLWSTDHVRQWLEWAVKEYGLPDVNILLFQNIDGKELCKMTKDDFQRLTPSYNADILLSHLHYLRETPLPHLTSDDVDKALQNSPRLMHARNTGGAAFIFPNTSVYPEATQRITTRPDLPYEPPRRSAWTGHGHPTPQSKAAQPSPSTVPKTEDQRPQLDPYQILGPTSSRLANPGSGQIQLWQFLLELLSDSSNSSCITWEGTNGEFKMTDPDEVARRWGERKSKPNMNYDKLSRALRYYYDKNIMTKVHGKRYAYKFDFHGIAQALQPHPPESSLYKYPSDLPYMGSYHAHPQKMNFVAPHPPALPVTSSSFFAAPNPYWNSPTGGIYPNTRLPTSHMPSHLGTYY

SEQ ID NO: 14940 - protein, 1159 aa, Homo sapiens
MPVRRGHVAPQNTFLDTIIRKFEGQSRKFIIANARVENCAVIYCNDGFCELCGYSRAEVMQRPCTCDFLHGPRTQRRAAAQIAQALLGAEERKVEIAFYRKDGSCFLCLVDVVPVKNEDGAVIMFILNFEVVMEKDMVGSPAHDTNHRGPPTSWLAPGRAKTFRLKLPALLALTARESSVRSGGAGGAGAPGAVVVDVDLTPAAPSSESLALDEVTAMDNHVAGLGPAEERRALVGPGSPPRSAPGQLPSPRAHSLNPDASGSSCSLARTRSRESCASVRRASSADDIEAMRAGVLPPPPRHASTGAMHPLRSGLLNSTSDSDLVRYRTISKIPQITLNFVDLKGDPFLASPTSDREIIAPKIKERTHNVTEKVTQVLSLGADVLPEYKLQAPRIHRWTILHYSPFKAVWDWLILLLVIYTAVFTPYSAAFLLKETEEGPPATECGYACQPLAVVDLIVDIMFIVDILINFRTTYVNANEEVVSHPGRIAVHYFKGWFLIDMVAAIPFDLLIFGSGSEELIGLLKTARLLRLVRVARKLDRYSEYGAAVLFLLMCTFALIAHWLACIWYAIGNMEQPHMDSRIGWLHNLGDQIGKPYNSSGLGGPSIKDKYVTALYFTFSSLTSVGFGNVSPNTNSEKIFSICVMLIGSLMYASIFGNVSAIIQRLYSGTARYHTQMLRVREFIRFHQIPNPLRQRLEEYFQHAWSYTNGIDMNAVLKGFPECLQADICLHLNRSLLQHCKPFRGATKGCLRALAMKFKTTHAPPGDTLVHAGDLLTALYFISRGSIEILRGDVVVAILGKNDIFGEPLNLYARPGKSNGDVRALTYCDLHKIHRDDLLEVLDMYPEFSDHFWSSLEITFNLRDTNMIPGSPGSTELEGGFSRQRKRKLSFRRRTDKDTEQPGEVSALGPGRAGAGPSSRGRPGGPWGESPSSGPSSPESSEDEGPGRSSSPLRLVPFSSPRPPGEPPGGEPLMEDCEKSSDTCNPLSGAFSGVSNIFSFWGDSRGRQYQELPRCPAPTPSLLNIPLSSPGRRPRGDVESRLDALQRQLNRLETRLSADMATVLQLLQRQMTLVPPAYSAVTTPGPGPTSTSPLLPVSPLPTLTLDSLSQVSQFMACEELPPGAPELPQEGPTRRLSLPGQLGALTSQPLHRHGSDPGS

SEQ ID NO: 14941 - protein, 595 aa, Homo sapiens [sequence omitted]

SEQ ID NO: 14942 - protein, 530 aa, Homo sapiens
MDIKNSPSSLNSPSSYNCSQSILPLEHGSIYIPSSYVDSHHEYPAMTFYSPAVMNYSIPSNVTNLEGGPGRQTTSPNVLWPTPGHLSPLVVHRQLSHLYAEPQKSPWCEARSLEHTLPVNRETLKRKVSGNRCASPVTGPGSKRDAHFCAVCSDYASGYHYGVWSCEGCKAFFKRSIQGHNDYICPATNQCTIDKNRRKSCQACRLRKCYEVGMVKCGSRRERCGYRLVRRQRSADEQLHCAGKAKRSGGHAPRVRELLLDALSPEQLVLTLLEAEPPHVLISRPSAPFTEASMMMSLTKLADKELVHMISWAKKIPGFVELSLFDQVRLLESCWMEVLMMGLMWRSIDHPGKLIFAPDLVLDRDEGKCVEGILEIFDMLLATTSRFRELKLQHKEYLCVKAMILLNSSMYPLVTATQDADSSRKLAHLLNAVTDALVWVIAKSGISSQQQSMRLANLLMLLSHVRHASNKGMEHLLNMKCKNVVPVYDLLLEMLNAHVLRGCKSSITGSECSPAEDSKSKEGSQNPQSQ

SEQ ID NO: 14943 - protein, 423 aa, Homo sapiens
MSSQVVGIEPLYIKAEPASPDSPKGSSETETEPPVALAPGPAPTRCLPGHKEEEDGEGAGPGEQGGGKLVLSSLPKRLCLVCGDVASGYHYGVASCEACKAFFKRTIQGSIEYSCPASNECEITKRRRKACQACRFTKCLRVGMLKEGVRLDRVRGGRQKYKRRPEVDPLPFPGPFPAGPLAVAGGPRKTAAPVNALVSHLLVVEPEKLYAMPDPAGPDGHLPAVATLCDLFDREIVVTISWAKSIPGFSSLSLSDQMSVLQSVWMEVLVLGVAQRSLPLQDELAFAEDLVLDEEGARAAGLGELGAALLQLVRRLQALRLEREEYVLLKALALANSDSVHIEDAEAVEQLREALHEALLEYEAGRAGPGGGAERRRAGRLLLTLPLLRQTAGKVLAHFYGVKLEGKVPMHKLFLEMLEAMMD

SEQ ID NO: 14944 - protein, 433 aa, Homo sapiens
MSSDDRHLGSSCGSFIKTEPSSPSSGIDALSHHSPSGSSDASGGFGLALGTHANGLDSPPMFAGAGLGGTPCRKSYEDCASGIMEDSAIKCEYMLNAIPKRLCLVCGDIASGYHYGVASCEACKAFFKRTIQGNIEYSCPATNECEITKRRRKSCQACRFMKCLKVGMLKEGVRLDRVRGGRQKYKRRLDSESSPYLSLQISPPAKKPLTKIVSYLLVAEPDKLYAMPPPGMPEGDIKALTTLCDLADRELVVIIGWAKHIPGFSSLSLGDQMSLLQSAWMEILILGIVYRSLPYDDKLVYAEDYIMDEEHSRLAGLLELYRAILQLVRRYKKLKVEKEEFVTLKALALANSDSMYIEDLEAVQKLQDLLHEALQDYELSQRHEEPWRTGKLLLTLPLLRQTAAKAVQHFYSVKLQGKVPMHKLFLEMLEAKV

SEQ ID NO: 14945 - protein, 458 aa, Homo sapiens
MDSVELCLPESFSLHYEEELLCRMSNKDRHIDSSCSSFIKTEPSSPASLTDSVNHHSPGGSSDASGSYSSTMNGHQNGLDSPPLYPSAPILGGSGPVRKLYDDCSSTIVEDPQTKCEYMLNSMPKRLCLVCGDIASGYHYGVASCEACKAFFKRTIQGNIEYSCPATNECEITKRRRKSCQACRFMKCLKVGMLKEGVRLDRVRGGRQKYKRRIDAENSPYLNPQLVQPAKKPYNKIVSHLLVAEPEKIYAMPDPTVPDSDIKALTTLCDLADRELVVIIGWAKHIPGFSTLSLADQMSLLQSAWMEILILGVVYRSLSFEDELVYADDYIMDEDQSKLAGLLDLNNAILQLVKKYKSMKLEKEEFVTLKAIALANSDSMHIEDVEAVQKLQDVLHEALQDYEAGQHMEDPRRAGKMLMTLPLLRQTSTKAVQHFYNIKLEGKVPMHKLFLEMLEAKV

SEQ ID NO: 14946 - protein, 406 aa, Homo sapiens
MESLRGYTHSDIGYRSLAVGEDIEEVNDEKLTVTSLMARGGEDEENTRSKPEYGTEAENNVGTEGSVPSDDQDREGGGGHEPEQQQEEPPLTKPEQQQEEPPLLELKQEQEEPPQTTVEGPQPAEGPQTAEGPQPPERKRRRRTAFTQFQLQELENFFDESQYPDVVARERLAARLNLTEDRVQVWFQNRRAKWKRNQRVLMLRNTATADLAHPLDMFLGGAYYAAPALDPALCVHLVPQLPRPPVLPVPPMPPRPPMVPMPPRPPIAPMPPMAPVPPGSRMAPVPPGPRMAPVPPWPPMAPVPPWPPMAPVPTGPPMAPVPPGPPMARVPPGPPMARVPPGPPMAPLPPGPPMAPLPPGPPMAPLPPGPPMAPLPPRSHVPHTGLAPVHITWAPVINSYYACPFF

SEQ ID NO: 14947 - protein, 441 aa, Homo sapiens
MKAAVDLKPTLTIIKTEKVDLELFPSPDMECADVPLLTPSSKEMMSQALKATFSGFTKEQQRLGIPKDPRQWTETHVRDWVMWAVNEFSLKGVDFQKFCMNGAALCALGKDCFLELAPDFVGDILWEHLEILQKEDVKPYQVNGVNPAYPESRYTSDYFISYGIEHAQCVPPSEFSEPSFITESYQTLHPISSEELLSLKYENDYPSVILRDPLQTDTLQNDYFAIKQEVVTPDNMCMGRTSRGKLGGQDSFESIESYDSCDRLTQSWSSQSSFNSLQRVPSYDSFDSEDYPAALPNHKPKGTFKDYVRDRADLNKDKPVIPAAALAGYTGSGPIQLWQFLLELLTDKSCQSFISWTGDGWEFKLSDPDEVARRWGKRKNKPKMNYEKLSRGLRYYYDKNIIHKTAGKRYVYRFVCDLQSLLGYTPEELHAMLDVKPDADE

SEQ ID NO: 14948 - protein, 469 aa, Homo sapiens
MNDFGIKNMDQVAPVANSYRGTLKRQPAFDTFDGSLFAVFPSLNEEQTLQEVPTGLDSISHDSANCELPLLTPCSKAVMSQALKATFSGFKKEQRRLGIPKNPWLWSEQQVCQWLLWATNEFSLVNVNLQRFGMNGQMLCNLGKERFLELAPDFVGDILWEHLEQMIKENQEKTEDQYEENSHLTSVPHWINSNTLGFGTEQAPYGMQTQNYPKGGLLDSMCPASTPSVLSSEQEFQMFPKSRLSSVSVTYCSVSQDFPGSNLNLLTNNSGTPKDHDSPENGADSFESSDSLLQSWNSQSSLLDVQRVPSFESFEDDCSQSLCLNKPTMSFKDYIQERSDPVEQGKPVIPAAVLAGFTGSGPIQLWQFLLELLSDKSCQSFISWTGDGWEFKLADPDEVARRWGKRKNKPKMNYEKLSRGLRYYYDKNIIHKTSGKRYVYRFVCDLQNLLGFTPEELHAILGVQPDTED

SEQ ID NO: 14949 - protein, 477 aa, Homo sapiens
MDGFYDQQVPYMVTNSQRGRNCNEKPTNVRKRKFINRDLAHDSEELFQDLSQLQETWLAEAQVPDNDEQFVPDYQAESLAFHGLPLKIKKEPHSPCSEISSACSQEQPFKFSYGEKCLYNVSAYDQKPQVGMRPSNPPTPSSTPVSPLHHASPNSTHTPKPDRAFPAHLPPSQSIPDSSYPMDHRFRRQLSEPCNSFPPLPTMPREGRPMYQRQMSEPNIPFPPQGFKQEYHDPVYEHNTMVGSAASQSFPPPLMIKQEPRDFAYDSEVPSCHSIYMRQEGFLAHPSRTEGCMFEKGPRQFYDDTCVVPEKFDGDIKQEPGMYREGPTYQRRGSLQLWQFLVALLDDPSNSHFIAWTGRGMEFKLIEPEEVARRWGIQKNRPAMNYDKLSRSLRYYYEKGIMQKVAGERYVYKFVCDPEALFSMAFPDNQRPLLKTDMERHINEEDTVPLSHFDESMAYMPEGGCCNPHPYNEGYVY

SEQ ID NO: 14950 - protein, 342 aa, Homo sapiens
MDLWNWDEASPQEVPPGNKLAGLEGAKLGFCFPDLALQGDTPTATAETCWKGTSSSLASFPQLDWGSALLHPEVPWGAEPDSQALPWSGDWTDMACTAWDSWSGASQTLGPAPLGPGPIPAAGSEGAAGQNCVPVAGEATSWSRAQAAGSNTSWDCSVGPDGDTYWGSGLGGEPRTDCTISWGGPAGPDCTTSWNPGLHAGGTTSLKRYQSSALTVCSEPSPQSDRASLARCPKTNHRGPIQLWQFLLELLHDGARSSCIRWTGNSREFQLCDPKEVARLWGERKRKPGMNYEKLSRGLRYYYRRDIVRKSGGRKYTYRFGGRVPSLAYPDCAGGGRGAETQ

SEQ ID NO: 14951 - protein, 512 aa, Homo sapiens
MKAGCSIVEKPEGGGGYQFPDWAYKTESSPGSRQIQLWHFILELLQKEEFRHVIAWQQGEYGEFVIKDPDEVARLWGRRKCKPQMNYDKLSRALRYYYNKRILHKTKGKRFTYKFNFNKLVMPNYPFINIRSSGVVPQSAPPVPTASSRFHFPPLDTHSPTNDVQPGRFSASSLTASGQESSNGTDRKTELSELEDGSAADWRRGVDPVSSRNAIGGGGIGHQKRKPDIMLPLFARPGMYPDPHSPFAVSPIPGRGGVLNVPISPALSLTPTIFSYSPSPGLSPFTSSSCFSFNPEEMKHYLHSQACSVFNYHLSPRTFPRYPGLMVPPLQCQMHPEESTQFSIKLQPPPVGRKNRERVESSEESAPVTTPTMASIPPRIKVEPASEKDPESLRQSAREKEEHTQEEGTVPSRTIEEEKGTIFARPAAPPIWPSVPISTPSGEPLEVTEDSEDRPGKEPSAPEKKEDALMPPKLRLKRRWNDDPEARELSKSGKFLWNGSGPQGLATAAADA

SEQ ID NO: 14952 - protein, 361 aa, Homo sapiens
MHCSCLAEGIPANPGNWISGLAFPDWAYKAESSPGSRQIQLWHFILELLQKEEFRHVIAWQQGEYGEFVIKDPDEVARLWGRRKCKPQMNYDKLSRALRYYYNKRILHKTKGKRFTYKFNFSKLIVVNYPLWEVRAPPSPHLLLGAPALCRPALVPVGVQSELLHSMLFAHQAMVEQLTGQQTPRGPPETSGDKKGSSSSVYRLGSAPGPCRLGLCCHLGSVQGELPGVASFTPPLPPPLPSNWTCLSGPFLPPLPSEQQLPGAFKPDILLPGPRSLPGAWHFPGLPLLAGLGQGAGERLWLLSLRPEGLEVKPAPMMEAKGGLDPREVFCPETRRLKTGEESLTSPNLENLKAVWPLDPP

SEQ ID NO: 14953 - protein, 484 aa, Homo sapiens
MERRMKAGYLDQQVPYTFSSKSPGNGSLREALIGPLGKLMDPGSLPPLDSEDLFQDLSHFQETWLAEAQVPDSDEQFVPDFHSENLAFHSPTTRIKKEPQSPRTDPALSCSRKPPLPYHHGEQCLYSSAYDPPRQIAIKSPAPGALGQSPLQPFPRAEQRNFLRSSGTSQPHPGHGYLGEHSSVFQQPLDICHSFTSQGGGREPLPAPYQHQLSEPCPPYPQQSFKQEYHDPLYEQAGQPAVDQGGVNGHRYPGAGVVIKQEQTDFAYDSDVTGCASMYLHTEGFSGPSPGDGAMGYGYEKPLRPFPDDVCVVPEKFEGDIKQEGVGAFREGPPYQRRGALQLWQFLVALLDDPTNAHFIAWTGRGMEFKLIEPEEVARLWGIQKNRPAMNYDKLSRSLRYYYEKGIMQKVAGERYVYKFVCEPEALFSLAFPDNQRPALKAEFDRPVSEEDTVPLSHLDESPAYLPELAGPAQPFGPKGGYSY

SEQ ID NO: 14954 - protein, 510 aa, Homo sapiens
MDGFYDQQVPFMVPGKSRSEECRGRPVIDRKRKFLDTDLAHDSEELFQDLSQLQEAWLAEAQVPDDEQFVPDFQSDNLVLHAPPPTKIKRELHSPSSELSSCSHEQALGANYGEKCLYNYCAYDRKPPSGFKPLTPPTTPLSPTHQNPLFPPPQATLPTSGHAPAAGPVQGVGPAPAPHSLPEPGPQQQTFAVPRPPHQPLQMPKMMPENQYPSEQRFQRQLSEPCHPFPPQPGVPGDNRPSYHRQMSEPIVPAAPPPPQGFKQEYHDPLYEHGVPGMPGPPAHGFQSPMGIKQEPRDYCVDSEVPNCQSSYMRGGYFSSSHEGFSYEKDPRLYFDDTCVVPERLEGKVKQEPTMYREGPPYQRRGSLQLWQFLVTLLDDPANAHFIAWTGRGMEFKLIEPEEVARRWGIQKNRPAMNYDKLSRSLRYYYEKGIMQKVAGERYVYKFVCDPDALFSMAFPDNQRPFLKAESECHLSEEDTLPLTHFEDSPAYLLDMDRCSSLPYAEGFAY

SEQ ID NO: 14955 - protein, 452 aa, Homo sapiens
MSETPAQCSIKQERISYTPPESPVPSYASSTPLHVPVPRALRMEEDSIRLPAHLRLQPIYWSRDDVAQWLKWAENEFSLRPIDSNTFEMNGKALLLLTKEDFRYRSPHSGDVLYELLQHILKQRKPRILFSPFFHPGNSIHTQPEVILHQNHEEDNCVQRTPRPSVDNVHHNPPTIELLHRSRSPITTNHRPSPDPEQRPLRSPLDNMIRRLSPAERAQGPRPHQENNHQESYPLSVSPMENNHCPASSESHPKPSSPRQESTRVIQLMPSPIMHPLILNPRHSVDFKQSRLSEDGLHREGKPINLSHREDLAYMNHIMVSVSPPEEHAMPIGRIADCRLLWDYVYQLLSDSRYENFIRWEDKESKIFRIVDPNGLARLWGNHKNRTNMTYEKMSRALRHYYKLNIIRKEPGQRLLFRFMKTPDEIMSGRTDRLEHLESQELDEQIYQEDEC

SEQ ID NO: 14956 - protein, 341 aa, Homo sapiens
MQEGELAISPISPVAAMPPLGTHVQARCEAQINLLGEGGICKLPGRLRIQPALWSREDVLHWLRWAEQEYSLPCTAEHGFEMNGRALCILTKDDFRHRAPSSGDVLYELLQYIKTQRRALVCGPFFGGIFRLKTPTQHSPVPPEEVTGPSQMDTRRGHLLQPPDPGLTSNFGHLDDPGLARWTPGKEESLNLCHCAELGCRTQGVCSFPAMPQAPIDGRIADCRLLWDYVYQLLLDTRYEPYIKWEDKDAKIFRVVDPNGLARLWGNHKNRVNMTYEKMSRALRHYYKLNIIKKEPGQKLLFRFLKTPGKMVQDKHSHLEPLESQEQDRIEFKDKRPEISP

SEQ ID NO: 14957 - protein, 407 aa, Homo sapiens
MESRKDMVVFLDGGQLGTLVGKRVSNLSEAVGSPLPEPPEKMVPRGCLSPRAVPPATRERGGGGPEEEPVDGLAGSAAGPGAEPQVAGAAMLGPGPPAPSVDSLSGQGQPSSSDTESDFYEEIEVSCTPDCATGNAEYQHSKGSGSEALVGSPNGGSETPKSNGGSGGGGSQGTLACSASDQMRRYRTAFTREQIARLEKEFYRENYVSRPRRCELAAALNLPETTIKVWFQNRRMKDKRQRLAMTWPHPADPAFYTYMMSHAAAAGGLPYPFPSHLPLPYYSPVGLGAASAASAAASPFSGSLRPLDTFRVLSQPYPRPELLCAFRHPPLYPGPAHGLGASAGGPCSCLACHSGPANGLAPRAAAASDFTCASTSRSDSFLTFAPSVLSKASSVALDQREEVPLTR

SEQ ID NO: 14958 - protein, 476 aa, Homo sapiens
MMERIRKEMILMERGLHSPTAGKRFSNLSNSAGNAVLEALENSQHPARLSPRLPSAPLHSALGELPAKGKFEIDTLFNLQHTGSESTVSSEISSAAESRKKPGHYSEAAAEADMSSDVEVGCSALRSPGGLGAAQLKENNGKGYAESGSAAGTTTSASGSGLGSLHGGSGGSGGSAALGGSGSGADQVRRYRTAFTREQIARLEKEFYRENYVSRPRRCELAAALNLPETTIKVWFQNRRMKDKRQRLAMSWPHPADPSFYTYMMTHAAATGSLPYPFHSHVPLHYYPHVGVTAAAAAAAASGAAAAASSPFATSIRPLDTFRALSHPYSRPELLCSFRHPGLYQAPAAAAGLNSAASAAAAAAAAAAAASSAAAAGAPPSGGSAPCSCLSCHSSQSAAAAAAAAAAALGSRGGGGGGGGGGGGGGGGAGAGGGSDFGCSAAAPRSESGFLPYSAAVLSKTAVSPPDQRDEAPLTR

SEQ ID NO: 14959 - protein, 747 aa, Homo sapiens
MEIPNPPTSKCITYWKRKVKSEYMRLRQLKRLQANMGAKALYVANFAKVQEKTQILNEEWKKLRVQPVQSMKPVSGHPFLKKCTIESIFPGFASQHMLMRSLNTVALVPIMYSWSPLQQNFMVEDETVLCNIPYMGDEVKEEDETFIEELINNYDGKVHGEEEMIPGSVLISDAVFLELVDALNQYSDEEEEGHNDTSDGKQDDSKEDLPVTRKRKRHAIEGNKKSSKKQFPNDMIFSAIASMFPENGVPDDMKERYRELTEMSDPNALPPQCTPNIDGPNAKSVQREQSLHSFHTLFCRRCFKYDCFLHPFHATPNVYKRKNKEIKIEPEPCGTDCFLLLEGAKEYAMLHNPRSKCSGRRRRRHHIVSASCSNASASAVAETKEGDSDRDTGNDWASSSSEANSRCQTPTKQKASPAPPQLCVVEAPSEPVEWTGAEESLFRVFHGTYFNNFCSIARLLGTKTCKQVFQFAVKESLILKLPTDELMNPSQKKKRKHRLWAAHCRKIQLKKDNSSTQVYNYQPCDHPDRPCDSTCPCIMTQNFCEKFCQCNPDCQNRFPGCRCKTQCNTKQCPCYLAVRECDPDLCLTCGASEHWDCKVVSCKNCSIQRGLKKHLLLAPSDVAGWGTFIKESVQKNEFISEYCGELISQDEADRRGKVYDKYMSSFLFNLNNDFVVDATRKGNKIRFANHSVNPNCYAKVVMVNGDHRIGIFAKRAIQAGEELFFDYRYSQADALKYVGIERETDVL

SEQ ID NO: 14960 - protein, 746 aa, Homo sapiens
MGQTGKKSEKGPVCWRKRVKSEYMRLRQLKRFRRADEVKSMFSSNRQKILERTEILNQEWKQRRIQPVHILTSVSSLRGTRECSVTSDLDFPTQVIPLKTLNAVASVPIMYSWSPLQQNFMVEDETVLHNIPYMGDEVLDQDGTFIEELIKNYDGKVHGDRECGFINDEIFVELVNALGQYNDDDDDDDGDDPEEREEKQKDLEDHRDDKESRPPRKFPSDKIFEAISSMFPDKGTAEELKEKYKELTEQQLPGALPPECTPNIDGPNAKSVQREQSLHSFHTLFCRRCFKYDCFLHPFHATPNTYKRKNTETALDNKPCGPQCYQHLEGAKEFAAALTAERIKTPPKRPGGRRRGRLPNNSSRPSTPTINVLESKDTDSDREAGTETGGENNDKEEEEKKDETSSSSEANSRCQTPIKMKPNIEPPENVEWSGAEASMFRVLIGTYYDNFCAIARLIGTKTCRQVYEFRVKESSIIAPAPAEDVDTPPRKKKRKHRLWAAHCRKIQLKKDGSSNHVYNYQPCDHPRQPCDSSCPCVIAQNFCEKFCQCSSECQNRFPGCRCKAQCNTKQCPCYLAVRECDPDLCLTCGAADHWDSKNVSCKNCSIQRGSKKHLLLAPSDVAGWGIFIKDPVQKNEFISEYCGEIISQDEADRRGKVYDKYMCSFLFNLNNDFVVDATRKGNKIRFANHSVNPNCYAKVMMVNGDHRIGIFAKRAIQTGEELFFDYRYSQADALKYVGIEREMEIP

SEQ ID NO: 14961 - protein, 330 aa, Homo sapiens
MKRRQKRKHLENEESQETAEKGGGMSKSQEDALQPGSTRVAKGWSQGVGEVTSTSEYCSCVSSSRKLIHSGIQRIHRDSPQPQSPLAQVQERGETPPRSQHVSLSSYSSYKTCVSSLCVNKEERGMKIYYMQVQMNKGVAVSWETEETLESLEKQPRMEEVTLSEVVRVGTPPSDVSTRNLLSDSEPSGEEKEHEERTESDSLPGSPTVEDTPRAKTPDWLVTMENGFRCMACCRVFTTMEALQEHVQFGIREGFSCHVFHLTMAQLTGNMESESTQDEQEEENGNEKEEEEKPEAKEEEGQPTEEDLGLRRSWSQCPGCVFHSPKDRNS

SEQ ID NO: 14962 - protein, 166 aa, Homo sapiens
MAAYPESCVDTTVLDFVADLSLASPRRPLLCDFAPGVSLGDPALALREGRPRRMARFEEGDPEEEECEVDQGDGEEEEEEERGRGVSLLGRPKRKRVITYAQRQAANIRERKRMFNLNEAFDQLRRKVPTFAYEKRLSRIETLRLAIVYISFMTELLESCEKKESG

SEQ ID NO: 14963 - protein, 238 aa, Homo sapiens
MRQSGASQPLLINMYLPDPVGDGLFKDGKNPSWGPLSPAVQKGSGQIQLWQFLLELLADRANAGCIAWEGGHGEFKLTDPDEVARRWGERKSKPNMNYDKLSRALRYYYDKNIMSKVHGKRYAYRFDFQGLAQACQPPPAHAHAAAAAAAAAAAAQDGALYKLPAGLAPLPFPGLSKLNLMAASAGVAPAGFSYWPGPGPAATAAAATAALYPSPSLQPPPGPFGAVAAASHLGGHYH

SEQ ID NO: 14964 - protein, 475 aa, Homo sapiens
MDSSCHNATTKMLATAPARGNMMSTSKPLAFSIERIMARTPEPKALPVPHFLQGALPKGEPKHSLHLNSSIPCMIPFVPVAYDTSPKAGVTGSEPRKASLEAPAAPAAVPSAPAFSCSDLLNCALSLKGDLARDALPLQQYKLVRPRVVNHSSFHAMGALCYLNRGDGPCHPAAGVNIHPVASYFLSSPLHPQPKTYLAERNKLVVPAVEKYPSGVAFKDLSQAQLQHYMKESAQLLSEKIAFKTSDFSRGSPNAKPKVFTCEVCGKVFNAHYNLTRHMPVHTGARPFVCKVCGKGFRQASTLCRHKIIHTQEKPHKCNQCGKAFNRSSTLNTHTRIHAGYKPFVCEFCGKGFHQKGNYKNHKLTHSGEKQFKCNICNKAFHQVYNLTFHMHTHNDKKPFTCPTCGKGFCRNFDLKKHVRKLHDSSLGLARTPAGEPGTEPPPPLPQQPPMTLPPLQPPLPTPGPLQPGLHQGHQ

SEQ ID NO: 14965 - protein, 459 aa, Homo sapiens
MASSASLETMVPPACPRAGASPATSKTLAFSIERIMAKTSEPRAPFEPRPGALEADGSQGKKLLNLCSPLPCMIPLQPLGYEVPSKTLLSYSELWKSSLRAGGGGGGGGGGGGGGGGAPVCGASGLCKTNCGVCCKAELGLAPSALPAGRVIKPQVINQAVGLPASGSLYYFNYLDSTAYPPSELLSGHLFPSGLLNAQAPAALAAHPKLFLLENAKLAGLAADKFPHPAPYPHKERLPAPLEQVLKENSALTAERGGVKGHSKLPGGSADGKPKNFTCEVCGKVFNAHYNLTRHMPVHTGARPFVCKVCGKGFRQASTLCRHKIIHTQEKPHKCNQCGKAFNRSSTLNTHIRIHAGYKPFVCEFCGKGFHQKGNYKNHKLTHSGEKQYKCTICNKAFHQVYNLTFHMHTHNDKKPFTCATCGKGFCRNFDLKKHVRKLHDSVGPAAPSAKDLTRTVQS

SEQ ID NO: 14966 - protein, 219 aa, Homo sapiens
MDPAPGVLDPRAAPPALLGTPQAEVLEDVLREQFGPLPQLAAVCRLKRLPSGGYSSTENLQLVLERRRVANAKERERIKNLNRGFARLKALVPFLPQSRKPSKVDILKGATEYIQVLSDLLEGAKDSKKQDPDEQSYSNNSSESHTSSARQLSRNITQHISCAFGLKNEEEGPWADGGSGEPAHACRHSVMSTTEIISPTRSLDRFPEVELLSHRLPQV

SEQ ID NO: 14967 - protein, 496 aa, Homo sapiens
MDDVPAPTPAPAPPAAAAPRVPFHCSECGKSFRYRSDLRRHFARHTALKPHACPRCGKGFKHSFNLANHLRSHTGERPYRCSACPKGFRDSTGLLHHQVVHTGEKPYCCLVCELRFSSRSSLGRHLKRQHRGVLPSPLQPGPGLPALSAPCSVCCNVGPCSVCGGSGAGGGEGPEGAGAGLGSWGLAEAAAAAAASLPPFACGACARRFDHGRELAAHWAAHTDVKPFKCPRCERDFNAPALLERHKLTHDLQGPGAPPAQAWAAGPGAGPETAGEGTAAEAGDAPLASDRRLLLGPAGGGVPKLGGLLPEGGGEAPAPAAAAEPSEDTLYQCDCGTFFASAAALASHLEAHSGPATYGCGHCGALYAALAALEEHRRVSHGEGGGEEAATAAREREPASGEPPSGSGRGKKIFGCSECEKLFRSPRDLERHVLVHTGEKPFPCLECGKFFRHECYLKRHRLLHGTERPFPCHICGKGFITLSNLSRHLKLHRGMD

SEQ ID NO: 14968 - protein, 452 aa, Homo sapiens
MDGTIKEALSVVSDDQSLFDSAYGAAAHLPKADMTASGSPDYGQPHKINPLPPQQEWINQPVRVNVKREYDHMNGSRESPVDCSVSKCSKLVGGGESNPMNYNSYMDEKNGPPPPNMTTNERRVIVPADPTLWTQEHVRQWLEWAIKEYSLMEIDTSFFQNMDGKELCKMNKEDFLRATTLYNTEVLLSHLSYLRESSLLAYNTTSHTDQSSRLSVKEDPSYDSVRRGAWGNNMNSGLNKSPPLGGAQTISKNTEQRPQPDPYQILGPTSSRLANPGSGQIQLWQFLLELLSDSANASCITWEGTNGEFKMTDPDEVARRWGERKSKPNMNYDKLSRALRYYYDKNIMTKVHGKRYAYKFDFHGIAQALQPHPTESSMYKYPSDISYMPSYHAHQQKVNFVPPHPSSMPVTSSSFFGAASQYWTSPTGGIYPNPNVPRHPNTHVPSHLGSYY

SEQ ID NO: 14969 - protein, 380 aa, Homo sapiens
MMFSGFNADYEASSSRCSSASPAGDSLSYYHSPADSFSSMGSPVNAQDFCTDLAVSSANFIPTVTAISTSPDLQWLVQPALVSSVAPSQTRAPHPFGVPAPSAGAYSRAGVVKTMTGGRAQSIGRRGKVEQLSPEEEEKRRIRRERNKMAAAKCRNRRRELTDTLQAETDQLEDEKSALQTEIANLLKEKEKLEFILAAHRPACKIPDDLGFPEEMSVASLDLTGGLPEVATPESEEAFTLPLLNDPEPKPSVEPVKSISSMELKTEPFDDFLFPASSRPSGSETARSVPDMDLSGSFYAADWEPLHSGSLGMGPMATELEPLCTPVVTCTPSCTAYTSSFVFTYPEADSFPSCAAAHRKGSSSNEPSSDSLSSPTLLAL

SEQ ID NO: 14970 - protein, 338 aa, Homo sapiens
MFQAFPGDYDSGSRCSSSPSAESQYLSSVDSFGSPPTAAASQECAGLGEMPGSFVPTVTAITTSQDLQWLVQPTLISSMAQSQGQPLASQPPVVDPYDMPGTSYSTPGMSGYSSGGASGSGGPSTSGTTSGPGPARPARARPRRPREETLTPEEEEKRRVRRERNKLAAAKCRNRRRELTDRLQAETDQLEEEKAELESEIAELQKEKERLEFVLVAHKPGCKIPYEEGPGPGPLAEVRDLPGSAPAKEDGFSWLLPPPPPPPLPFQTSQDAPPNLTASLFTHSEVQVLGDPFPVVNPSYTSSFVLTCPEVSAFAGAQRTSGSDQPSDPLNSPSLLAL

SEQ ID NO: 14971 - protein, 271 aa, Homo sapiens
MFRDFGEPGPSSGNGGGYGGPAQPPAAAQAAQQKFHLVPSINTMSGSQELQWMVQPHFLGPSSYPRPLTYPQYSPPQPRPGVIRALGPPPGVRRRPCEQISPEEEERRRVRRERNKLAAAKCRNRRKELTDFLQAETDKLEDEKSGLQREIEELQKQKERLELVLEAHRPICKIPEGAKEGDTGSTSGTSSPPAPCRPVPCISLSPGPVLEPEALHTPTLMTTPSLTPFTPSLVFTYPSTPEPCASAHRKSSSSSGDPSSDPLGSPTLLAL

SEQ ID NO: 14972 - protein, 326 aa, Homo sapiens
MYQDYPGNFDTSSRGSSGSPAHAESYSSGGGGQQKFRVDMPGSGSAFIPTINAITTSQDLQWMVQPTVITSMSNPYPRSHPYSPLPGLASVPGHMALPRPGVIKTIGTTVGRRRRDEQLSPEEEEKRRIRRERNKLAAAKCRNRRRELTEKLQAETEELEEEKSGLQKEIAELQKEKEKLEFMLVAHGPVCKISPEERRSPPAPGLQPMRSGGGSVGAVVVKQEPLEEDSPSSSSAGLDKAQRSVIKPISIAGGFYGEEPLHTPIVVTSTPAVTPGTSNLVFTYPSVLEQESPASPSESCSKAHRRSSSSGDQSSDSLNSPTLLAL

SEQ ID NO: 14973 - protein, 472 aa, Homo sapiens
MLGTVKMEGHETSDWNSYYADTQEAYSSVPVSNMNSGLGSMNSMNTYMTMNTMTTSGNMTPASFNMSYANPGLGAGLSPGAVAGMPGGSAGAMNSMTAAGVTAMGTALSPSGMGAMGAQQAASMNGLGPYAAAMNPCMSPMAYAPSNLGRSRAGGGGDAKTFKRSYPHAKPPYSYISLITMAIQQAPSKMLTLSEIYQWIMDLFPYYRQNQQRWQNSIRHSLSFNDCFVKVARSPDKPGKGSYWTLHPDSGNMFENGCYLRRQKRFKCEKQPGAGGGGGSGSGGSGAKGGPESRKDPSGASNPSADSPLHRGVHGKTGQLEGAPAPGPAASPQTLDHSGATATGGASELKTPASSTAPPISSGPGALASVPASHPAHGLAPHESQLHLKGDPHYSFNHPFSINNLMSSSEQQHKLDFKAYEQALQYSPYGSTLPASLPLGSASVTTRSPIEPSALEPAYYQGVYSRPVLNTS

SEQ ID NO: 14974 - protein, 457 aa, Homo sapiens
MLGAVKMEGHEPSDWSSYYAEPEGYSSVSNMNAGLGMNGMNTYMSMSAAAMGSGSGNMSAGSMNMSSYVGAGMSPSLAGMSPGAGAMAGMGGSAGAAGVAGMGPHLSPSLSPLGGQAAGAMGGLAPYANMNSMSPMYGQAGLSRARDPKTYRRSYTHAKPPYSYISLITMAIQQSPNKMLTLSEIYQWIMDLFPFYRQNQQRWQNSIRHSLSFNDCFLKVPRSPDKPGKGSFWTLHPDSGNMFENGCYLRRQKRFKCEKQLALKEAAGAAGSGKKAAAGAQASQAQLGEAAGPASETPAGTESPHSSASPCQEHKRGGLGELKGTPAAALSPPEPAPSPGQQQQAAAHLLGPPHHPGLPPEAHLKPEHHYAFNHPFSINNLMSSEQQHHHSHHHHQPHKMDLKAYEQVMHYPGYGSPMPGSLAMGPVTNKTGLDASPLAADTSYYQGVYSRPIMNSS

SEQ ID NO: 14975 - protein, 350 aa, Homo sapiens
MLGSVKMEAHDLAEWSYYPEAGEVYSPVTPVPTMAPLNSYMTLNPLSSPYPPGGLPASPLPSGPLAPPAPAAPLGPTFPGLGVSGGSSSSGYGAPGPGLVHGKEMPKGYRRPLAHAKPPYSYISLITMAIQQAPGKMLTLSEIYQWIMDLFPYYRENQQRWQNSIRHSLSFNDCFVKVARSPDKPGKGSYWALHPSSGNMFENGCYLRRQKRFKLEEKVKKGGSGAATTTRNGTGSAASTTTPAATVTSPPQPPPPAPEPEAQGGEDVGALDCGSPASSTPYFTGLELPGELKLDAPYNFNHPFSINNLMSEQTPAPPKLDVGFGGYGAEGGEPGVYYQGLYSRSLLNAS

SEQ ID NO: 14976 - protein, 325 aa, Homo sapiens
MPRPGRNTYSDQKPPYSYISLTAMAIQSSPEKMLPLSEIYKFIMDRFPYYRENTQRWQNSLRHNLSFNDCFIKIPRRPDQPGKGSFWALHPSCGDMFENGSFLRRRKRFKVLKSDHLAPSKPADAAQYLQQQAKLRLSALAASGTHLPQMPAAAYNLGGVAQPSGFKHPFAIENIIAREYKMPGGLAFSAMQPVPAAYPLPNQLTTMGSSLGTGWPHVYGSAGMIDSATPISMASGDYSAYGVPLKPLCHAAGQTLPAIPVPIKPTPAAVPALPALPAPIPTLLSNSPPSLSPTSSQTATSQSSPATPSETLTSPASALHSVAVH

SEQ ID NO: 14977 - protein, 432 aa, Homo sapiens
MPRPGKSSYSDQKPPYSYISLTAMAIQHSAEKMLPLSDIYKFIMERFPYYREHTQRWQNSLRHNLSFNDCFIKIPRRPDQPGKGSFWALHPDCGDMFENGSFLRRRKRFKVLRADHTHLHAGSTKSAPGAGPGGHLHPHHHHHPHHHHHHHAAAHHHHHHHPPQPPPPPPPPPPHMVHYFHQQPPTAPQPPPHLPSQPPQQPPQQSQPQQPSHPGKMQEAAAVAAAAAAAAAAAVGSVGRLSQFPPYGLGSAAAAAAAAAASTSGFKHPFAIENIIGRDYKGVLQAGGLPLASVMHHLGYPVPGQLGNVVSSVWPHVGVMDSVAAAAAAAAAAGVPVGPEYGAFGVPVKSLCHSASQSLPAMPVPIKPTPALPPVSALQPGLTVPAASQQPPAPSTVCSAAAASPVASLLEPTAPTSAESKGGSLHSVLVHS

SEQ ID NO: 14978 - protein, 553 aa, Homo sapiens
MQARYSVSSPNSLGVVPYLGGEQSYYRAAAAAAGGGYTAMPAPMSVYSHPAHAEQYPGGMARAYGPYTPQPQPKDMVKPPYSYIALITMAIQNAPDKKITLNGIYQFIMDRFPFYRDNKQGWQNSIRHNLSLNECFVKVPRDDKKPGKGSYWTLDPDSYNMFENGSFLRRRRRFKKKDAVKDKEEKDRLHLKEPPPPGRQPPPAPPEQADGNAPGPQPPPVRIQDIKTENGTCPSPPQPLSPAAALGSGSAAAVPKIESPDSSSSSLSSGSSPPGSLPSARPLSLDGADSAPPPPAPSAPPPHHSQGFSVDNIMTSLRGSPQSAAAELSSGLLASAAASSRAGIAPPLALGAYSPGQSSLYSSPCSQTSSAGSSGGGGGGAGAAGGAGGAGTYHCNLQAMSLYAAGERGGHLQGAPGGAGGSAVDDPLPDYSLPPVTSSSSSSLSHGGGGGGGGGGQEAGHHPAAHQGRLTSWYLNQAGGDLGHLASAAAAAAAAGYPGQQQNFHSVREMFESQRIGLNNSPVNGNSSCQMAFPSSQSLYRTSGAFVYDCSKF

SEQ ID NO: 14979 - protein, 501 aa, Homo sapiens
MQARYSVSDPNALGVVPYLSEQNYYRAAGSYGGMASPMGVYSGHPEQYSAGMGRSYAPYHHHQPAAPKDLVKPPYSYIALITMAIQNAPEKKITLNGIYQFIMDRFPFYRENKQGWQNSIRHNLSLNECFVKVPRDDKKPGKGSYWTLDPDSYNMFENGSFLRRRRRFKKKDVSKEKEERAHLKEPPPAASKGAPATPHLADAPKEAEKKVVIKSEAASPALPVITKVETLSPESALQGSPRSAASTPAGSPDGSLPEHHAAAPNGLPGFSVENIMTLRTSPPGGELSPGAGRAGLVVPPLALPYAAAPPAAYGQPCAQGLEAGAAGGYQCSMRAMSLYTGAERPAHMCVPPALDEALSDHPSGPTSPLSALNLAAGQEGALAATGHHHQHHGHHHPQAPPPPPAPQPQPTPQPGAAAAQAASWYLNHSGDLNHLPGHTFAAQQQTFPNVREMFNSHRLGIENSTLGESQVSGNASCQLPYRSTPPLYRHAAPYSYDCTKY

SEQ ID NO: 14980 - protein, 465 aa, Homo sapiens
MTLSTEMSDASGLAEETDIDVVGEGEDEEDEEEEDDDEGGGGGPRLAVPAQRRRRRRSYAGEDELEDLEEEEDDDDILLAPPAGGSPAPPGPAPAAGAGAGGGGGGGGAGGGGSAGSGAKNPLVKPPYSYIALITMAILQSPKKRLTLSEICEFISGRFPYYREKFPAWQNSIRHNLSLNDCFVKIPREPGNPGKGNYWTLDPESADMFDNGSFLRRRKRFKRQPLLPPNAAAAESLLLRGAGAAGGAGDPAAAAALFPPAPPPPPHAYGYGPYGCGYGLQLPPYAPPSALFAAAAAAAAAAAFHPHSPPPPPPPHGAAAELARTAFGYRPHPLGAALPGPLPASAAKAGGPGASALARSPFSIESIIGGSLGPAAAAAAAAQAAAAAQASPSPSPVAAPPAPGSSGGGCAAQAAVGPAAALTRSLVAAAAAAASSVSSSAALGTLHQGTALSSVENFTARISNC

SEQ ID NO: 14981 - protein, 495 aa, Homo sapiens
MTLGSCCCEIMSSESSPAALSEADADIDVVGGGSGGGELPARSGPRAPRDVLPHGHEPPAEEAEADLAEDEEESGGCSDGEPRALASRGAAAAAGSPGPGAAAARGAAGPGPGPPSGGAATRSPLVKPPYSYIALITMAILQSPKKRLTLSEICEFISGRFPYYREKFPAWQNSIRHNLSLNDCFVKIPREPGNPGKGNYWTLDPESADMFDNGSFLRRRKRFKRQPLPPPHPHPHPHPELLLRGGAAAAGDPGAFLPGFAAYGAYGYGYGLALPAYGAPPPGPAPHPHPHPHAFAFAAAAAAAPCQLSVPPGRAAAPPPGPPTASVFAGAGSAPAPAPASGSGPGPGPAGLPAFLGAELGCAKAFYAASLSPPAAGTAAGLPTALLRQGLKTDAGGGAGGGGAGAGQRPSFSIDHIMGHGGGGAAPPGAGEGSPGPPFAAAAGPGGQAQVLAMLTAPALAPVAGHIRLSHPGDALLSSGSRFASKVAGLSGCHF

SEQ ID NO: 14982 - protein, 478 aa, Homo sapiens
MTLSGGGSASDMSGQTVLTAEDVDIDVVGEGDDGLEEKDSDAGCDSPAGPPELRLDEADEVPPAAPHHGQPQPPHQQPLTLPKEAAGAGAGPGGDVGAPEADGCKGGVGGEEGGASGGGPGAGSGSAGGLAPSKPKNSLVKPPYSYIALITMAILQSPQKKLTLSGICEFISNRFPYYREKFPAWQNSIRHNLSLNDCFVKIPREPGNPGKGNYWTLDPQSEDMFDNGSFLRRRKRFKRHQQEHLREQTALMMQSFGAYSLAAAAGAAGPYGRPYGLHPAAAAGAYSHPAAAAAAAAAAALQYPYALPPVAPVLPPAVPLLPSGELGRKAAAFGSQLGPGLQLQLNSLGAAAAAAGTAGAAGTTASLIKSEPSARPSFSIENIIGGGPAAPGGSAVGAGVAGGTGGSGGGSTAQSFLRPPGTVQSAALMATHQPLSLSRTTATIAPILSVPLSGQFLQPAASAAAAAAAAAQAKWPAQ

SEQ ID NO: 14983 - protein, 439 aa, Homo sapiens
MNLPRAERLRSTPQRSLRDSDGEDGKIDVLGEEEDEDEEEAASQQFLEQSLQPGLQVARWGGVALPREHIEGGGGPSDPSEFGTEFRAPPRSAAASEDARQPAKPPSSYIALITMAILQSPHKRLTLSGICAFISDRFPYYRRKFPAWQNSIRHNLSLNDCFVKIPREPGRPGKGNYWSLDPASQDMFDNGSFLRRRKRFQRHQPTPGAHLPHPFPLPAAHAALHNPRPGPLLGAPAPPQPVPGAYPNTGPGRRPYALLHPHPPRYLLLSAPAYAGAPKKAEGADLATPAPFPCCSPHLVLSLGRRARVWRRHREADASLSALRVSCKGSGERVQGLRRVCPRPRGATAPCSSDRQACRTILQQQQRHQEEDCANGCAPTKGAVLGGHLSAASALLRYQAVAEGSGLTSLAAPLGGEGTSPVFLVSPTPSSLAESAGPS

SEQ ID NO: 14984 - protein, 408 aa, Homo sapiens
MNLPRAERPRSTPQRSLRDSDGEDGKIDVLGEEEDEDEVEDEEEEASQKFLEQSLQPGLQVARWGGVALPREHIEGGGPSDPSEFGTEFRAPPRSAAASEDARQPAKPPYSYIALITMAILQSPHKRLTLSGICAFISGRFPYYRRKFPAWQNSIRHNLSLNDCFVKIPREPGHPGKGTYWSLDPASQDMFDNGSFLRRRKRFKRHQLTPGAHLPHPFPLPAAHAALHNPRPGPLLGAPALPQPVPGAYPNTAPGRRPYALLHPHPPRYLLLSAPAYAGAPKKAEGADLATPGTLPVLQPSLGPQPWEEGKGLASPPGGGCISFSIESIMQGVRGAGTGAAQSLSPTAWSYCPLLQRPSSLSDNFAATAAASGGGLRQRLRSHQGRGAGRAPVGRVGAAAVSGGGRGL

SEQ ID NO: 14985 - protein, 417 aa, Homo sapiens
MNLPRAERLRSTPQRSLRDSDGEDGKIDVLGEEEDEDEVEDEEEAASQQFLEQSLQPGLQVARWGGVALPREHIEGGGGPSDPSEFGTKFRAPPRSAAASEDARQPAKPPYSYIALITMAILQNPHKRLTLSGICAFISGRFPYYRRKFPAWQNSIRHNLSLNDCFVKIPREPGHPGKGNYWSLDPASQDMFDNGSFLRRRKRFKRHQLTPGAHLPHPFPLPAAHAALHNPRPGPLLGAPAPPQPVPGAYPNTAPGRRPYALLHPHPLRYLLLSAPVYAGAPKKAEGAALATPAPFPCCSPHLVLSLGRRARVWRRHREADASLSALRVLCKGSGERVQGLRRICPRPRGATATCSSDHQACCIPRPLPLCCKCPPPPLLGQFCSNSSSIRRRTAPTAALPPRARCWAGTCRPRRPC

SEQ ID NO: 14986 - protein, 416 aa, Homo sapiens
MNLPRAERPRSTPQRSLRDSDGEDGKIDVLGEEEDEDEVEDEEEEARQQFLEQSLQPGLQVARWGGVALPREHIEGGGGPSDPSEFGTKFRAPPRSAAASEDARQPAKPPYSYIALITMAILQNPHKRLTLSGICAFISGRFPYYRRKFPAWQNSIRHNLSLNDCFVKIPREPGHPGKGNYWSLDPASQDMFDNGSFLRRRKRFKRHQLTPGAHLPHPFPLPAAHAALHNPHPGPLLGAPAPPQPVPGAYPNTAPGRRPYALLHPHPLRYLLLSARVYAGAPKKAEGADLATPAPFPCCSPHLVLSLGRRARVWRRHREADASLSALRVLCKGSGERVQGLRRVCPRPRGATATCSSDHQACCIPKPLPLCCKCPPPLLLGQFCSNSSSIRRTAPTAALPPRARCWAGTCRPRRRC

SEQ ID NO: 14987 - protein, 416 aa, Homo sapiens
MNLPRAERPRSTPQRSLRDSDGEDGKIDVLGEEEDEDEVEDEEEEARQQFLEQSLQPGLQVARWGGVALPREHIEGGGGPSDPSEFGTKFRAPPRSAAASEDARQPAKPPYSYIALITMAILQNPHKRLTLSGICAFISGRFPYYRRKFPAWQNSIRHNLSLNDCFVKIPREPGHPGKGNYWSLDPASQDMFDNGSFLRRRKRFKRHQLTPGAHLPHPFPLPAAHAALHNPHPGPLLGAPAPPQPVPGAYPNTAPGRCPYALLHPHPLRYLLLSAPVYAGAPKKAEGADLATPAPFPCCSPHLVLSLGRRARVWRRHREADASLSALRVLCKGSGERVQGLRRVCPRPRGATATCSSDHQACCIPKPLPLCCKCPPPLLLGQFCSNSSSIRRTAPTAALPPRARCWAGTCRPRRRC

SEQ ID NO: 14988 - protein, 417 aa, Homo sapiens
MNLPRAERLRSTPQRSLRDSDGEDGKIDVLGEEEDEDEVEDEEEAASQQFLEQSLQPGLQVARWGGVALPREHIEGGGGPSDPSEFGTKFRAPPRSAAASEDARQPAKPPYSYIALITMAILQNPHKRLTLSGICAFISGRFPYYRRKFPAWQNSIRHNLSLNDCFVKIPREPGHPGKGNYWSLDPASQDMFDNGSFLRRRKRFKRHQLTPGAHLPHPFPLPAAHAALHNPHPGPLLGAPAPPQPVPGAYPNTAPGRRPYALLHPHPLRYLLLSAPVYAGAPKKAEGAALATPAPFPCCSPHLVLSLGRRARVWRRHREADASLSALRVLCKGSGERVQGLRRVCPRPRGATATCSSDHQACCIPRPLPLCCKCPPPPLLGQFCSNSSSIRRRTAPTAALPPRARCWAGTCRPRRPC

SEQ ID NO: 14989 - protein, 373 aa, Homo sapiens
MTAESGPPPPQPEVLATVKEERGETAAGAGVPGEATGRGAGGRRRKRPLQRGKPPYSYIALIAMAIAHAPERRLTLGGIYKFITERFPFYRDNPKKWQNSIRHNLTLNDCFLKIPREAGRPGKGNYWALDPNAEDMFESGSFLRRRKRFKRSDLSTYPAYMHDAAAAAAAAAAAAAAAAIFPGAVPAARPPYPGAVYAGYAPPSLAAPPPVYYPAASPGPCRVFGLVPERPLSPELGPAPSGPGGSCAFASAGAPATTTGYQPAGCTGARPANPSAYAAAYAGPDGAYPQGAGSAIFAAAGRLAGPASPPAGGSSGGVETTVDFYGRTSPGQFGALGACYNPGGQLGGASAGAYHARHAAAYPGGIDRFVSAM

SEQ ID NO: 14990 - protein, 319 aa, Homo sapiens
MAGRSDMDPPAAFSGFPALPAVAPSGPPPSPLAGAEPGREPEEAAAGRGEAAPTPAPGPGRRRRRPLQRGKPPYSYIALIAMALAHAPGRRLTLAAIYRFITERFAFYRDSPRKWQNSIRHNLTLNDCFVKVPREPGNPGKGNYWTLDPAAADMFDNGSFLRRRKRFKRAELPAHAAAAPGPPLPFPYAPYAPAPGPALLVPPPSAGPGPSPPARLFSVDSLVNLQPELAGLGAPEPPCCAAPDAAAAAFPPCAAAASPPLYSQVPDRLVLPATRPGPGPLPAEPLLALAGPAAALGPLSPGEAYLRQPGFASGLERYL

SEQ ID NO: 14991 - protein, 379 aa, Homo sapiens
MSSAPEKQQPPHGGGGGGGGGGGAAMDPASSGPSKAKKTNAGIRRPEKPPYSYIALIVMAIQSSPTKRLTLSEIYQFLQSRFPFFRGSYQGWKNSVRHNLSLNECFIKLPKGLGRPGKGHYWTIDPASEFMFEEGSFRRRPRGFRRKCQALKPMYSMMNGLGFNHLPDTYGFQGSAGGLSCPPNSLALEGGLGMMNGHLPGNVDGMALPSHSVPHLPSNGGHSYMGGCGGAAAGEYPHHDSSVPASPLLPTGAGGVMEPHAVYSGSAAAWPPSASAALNSGASYIKQQPLSPCNPAANPLSGSLSTHSLEQPYLHQNSHNAPAELQGIPRYHSQSPSMCDRKEFVFSFNAMASSSMHSAGGGSYYHQQVTYQDIKPCVM

SEQ ID NO: 14992 - protein, 444 aa, Homo sapiens
MTTEGGPPPAPLRRACSPVPGALQAALMSPPPAAAAAAAAAPETTSSSSSSSSASCASSSSSSNSASAPSAACKSAGGGGAGAGSGGAKKASSGLRRPEKPPYSYIALIVMAIQSSPSKRLTLSEIYQFLQARFPFFRGAYQGWKNSVRHNLSLNECFIKLPKGLGRPGKGHYWTIDPASEFMFEEGSFRRRPRGFRRKCQALKPMYHRVVSGLGFGASLLPQGFDFQAPPSAPLGCHSQGGYGGLDMMPAGYDAGAGAPSHAHPHHHHHHHVPHMSPNPGSTYMASCPVPAGPGGVGAAGGGGGGDYGPDSSSSPVPSSPAMASAIECHSPYTSPAAHWSSPGASPYLKQPPALTPSSNPAASAGLHSSMSSYSLEQSYLHQNAREDLSVGLPRYQHHSTPVCDRKDFVLNFNGISSFHPSASGSYYHHHHQSVCQDIKPCVM

SEQ ID NO: 14993 - protein, 489 aa, Homo sapiens [sequence omitted]

SEQ ID NO: 14994 - protein, 365 aa, Homo sapiens
MGPCSGSRLGPPEAESPSQPPKRRKKRYLRHDKPPYTYLAMIALVIQAAPSRRLKLAQIIRQVQAVFPFFREDYEGWKDSIRHNLSSNRCFRKVPKDPAKPQAKGNFWAVDVSLIPAEALRLQNTALCRRWQNGGARGAFAKDLGPYVLHGRPYRPPSPPPPPSEGFSIKSLLGGSGEGAPWPGLAPQSSPVPAGTGNSGEEAVPTPPLPSSERPLWPLCPLPGPTRVEGETVQGGAIGPSTLSPEPRAWPLHLLQGTAVPGGRSSGGHRASLWGQLPTSYLPIYTPNVVMPLAPPPTSCPQCPSTSPAYWGVAPETRGPPGLLCDLDALFQGVPPNKSIYDVWVSHPRDLAAPGPGWLLSWCSL

SEQ ID NO: 14995 - protein, 378 aa, Homo sapiens
MSSFDLPAPSPPRCSPQFPSIGQEPPEMNLYYENFFHPQGVPSPQRPSFEGGGEYGATPNPYLWFNGPTMTPPPYLPGPNASPFLPQAYGVQRPLLPSVSGLGGSDLGWLPIPSQEELMKLVRPPYSYSALIAMAIHGAPDKRLTLSQIYQYVADNFPFYNKSKAGWQNSIRHNLSLNDCFKKVPRDEDDPGKGNYWTLDPNCEKMFDNGNFRRKRKRKSDVSSSTASLALEKTESSLPVDSPKTTEPQDILDGASPGGTTSSPEKRPSPPPSGAPCLNSFLSSMTAYVSGGSPTSHPLVTPGLSPEPSDKTGQNSLTFNSFSPLTNLSNHSGGGDWANPMPTNMLSYGGSVLSQFSPHFYNSVNTSGVLYPREGTEV

SEQ ID NO: 14996 - protein, 318 aa, Homo sapiens
MATYCDDLGPSSAPPGQAQATAHPPGYEPGDLGAVGGGPLLWVNAPALSPKSYASGPGPAPPYAAPSYGAPGPLLGAPGGLAGADLAWLSLSGQQELLRLVRPPYSYSALIAMAIQSAPLRKLTLSQIYQYVAGNFPFYKRSKAGWQNSIRHNLSLNDCFKKVPRDEDDPGKGNYWTLDPNCEKMFDNGNFRRKRKRRAEASAAVRSGARSVGGAEAPALEPPSAACLDLQASPSPSAPEAATCFSGFASAMSALAGGLGTFPGGLAGDFSFGRRPPTVATHAPQTLNPSPGFAPGHQTAAAGFRLSHLLYSREGTEV

SEQ ID NO: 14997 - protein, 420 aa, Homo sapiens
MALYCGDNFGVYSQPGLPPPAATAAAPGAPPAARAPYGLADYAAPPAAAANPYLWLNGPGVGGPPSAAAAAAAAYLGAPPPPPPPGAAAGPFLQPPPAAGTFGCSQRPFAQPAPAAPASPAAPAGPGELGWLSMASREDLMKMVRPPYSYSALIAMAIQSAPERKLTLSHIYQFVADSFPFYQRSKAGWQNSIRHNLSLNDCFKKVPRDEDDPGKGNYWTLDPNCEKMFDNGNFRRKRKRRSEASNGSTVAAGTSKSEEGLSSGLGSGVGGKPEEESPSTLLRPSHSPEPPEGTKSTASSPGGPMLTSTPCLNTFFSSLSSLSVSSSVSTQRALPGSRHLGIQGAQLPSSGVFSPTSISEASADTLQLSNSTSNSTGQRSSYYSPFPASTSGGQSSPFSSPFHNFSMVNSLIYPREGSEV

SEQ ID NO: 14998 - protein, 421 aa, Homo sapiens
MAESWLRLSGAGPAEEAGPEGGLEEPDALDDSLTSLQWLQEFSILNAKAPALPPGGTDPHGYHQVPGSAAPGSPLAADPACLGQPHTPGKPTSSCTSRSAPPGLQAPPPDDVDYATNPHVKPPYSYATLICMAMQASKATKITLSAIYKWITDNFCYFRHADPTWQNSIRHNLSLNKCFIKVPREKDEPGKGGFWRIDPQYAERLLSGAFKKRRLPPVHIHPAFARQAAQEPSAVPRAGPLTVNTEAQQLLREFEEATGEAGWGAGEGRLGHKRKQPLPKRVAKVPRPPSTLLPTPEEQGELEPLKGNFDWEAIFDAGTLGGELGALEALELSPPLSPASHVDVDLTIHGRHIDCPATWGPSVEQAADSLDFDETFLATSFLQHPWDESGSGCLPPEPLFEAGDATLASDLQDWASVGAFL

SEQ ID NO: 14999 - protein, 574 aa, Homo sapiens
MASDLESSLTSIDWLPQLTLRATIEKLGSASQAGPPGSSRKCSPGSPTDPNATLSKDEAAVHQDGKPRYSYATLITYAINSSPAKKMTLSEIYRWICDNFPYYKNAGIGWKNSIRHNLSLNKCFRKVPRPRDDPGKGSYWTIDTCPDISRKRRHPPDDDLSQDSPEQEASKSPRGGVAGSGEASLPPEGNPQMSLQSPTSIASYSQGTGSVDGGAVAAGASGRESAEGPPPLYNTNHDFKFSYSEINFQDLSWSFRNLYKSMLEKSSSSSQHGFSSLLGDIPPSNNYYMYQQQQPPPPQQQQQQQQPPQPPPQQSQPQQQQAPAQGPSAVGGAPPLHTPSTDGCTPPGGKQAGAEGYGPPPVMAMHPPPLQHGGYHPHQHHPHSHPAQQPPPPQPQAQGQAPINNTGFAFPSDWCSNIDSLKESFKMVNRLNWSSIEQSQFSELMESLRQAEQKNWTLDQHHIANLCDSLNHFLTQTGHVPPQGGTHRPPAPARIADSCALTSGKQESAMSQVNSYGHPQAPHLYPGPSPMYPIPTQDSAGYNRPAHHMVPRPSVPPPGANEEIPDDFDWDLIT

SEQ ID NO: 15000 - protein, 622 aa, Homo sapiens
MGLYGQACPSVTSLRMTSELESSLTSMDWLPQLTMRAAIQKSDATQNAHGTGISKKNALLDPNTTLDQEEVQQHKDGKPPYSYASLITFAINSSPKKKMTLSEIYQWICDNFPYYREAGSGWKNSIRHNLSLNKCFLKVPRSKDDPGKGSYWAIDTNPKEDVLPTRPKKRARSVERASTPYSIDSDSLGMECIISGSASPTLAINTVTNKVTLYNTDQDGSDSPRSSLNNSLSDQSLASVNLNSVGSVHSYTPVTSHPESVSQSLTPQQQPQYNLPERDKQLLFSEYNFEDLSASFRSLYKSVFEQSLSQQGLMNIPSESSQQSHTSCTYQHSPSSTVSTHPHSNQSSLSNSHGSGLNTTGSNSVAQVSLSHPQMHTQPSPHPPHRPHGLPQHPQRSPHPAPHPQQHSQLQSPHPQHPSPHQHIQHHPNHQHQTLTHQAPPPPQQVSCNSGVSNDWYATLDMLKESCRIASSVNWSDVDLSQFQGLMESMRQADLKNWSLDQVQFADLCSSLNQFFTQTGLIHSQSNVQQNVCHGAMHPTKPSQHIGTGNLYIDSRQNLPPSVMPPPGYPHIPQALSTPGTTMAGHHRAMNQQHMMPSQAFQMRRSLPPDDIQDDFDWDSIV

SEQ ID NO: 15001 - protein, 733 aa, Homo sapiens
MAEVGEDSGARALLALRSAPCSPVLCAAAAAAAFPAAAPPPAPAQPQPPPGPPPPPPPPLPPGAIAGAGSSGGSSGVSGDSAVAGAAPALVAAAAASVRQSPGPALARLEGREFEFLMRQPSVTIGRNSSQGSVDLSMGLSSFISRRHLQLSFQEPHFYLRCLGKNGVFVDGAFQRRGAPALQLPKQCTFRFPSTAIKIQFTSLYHKEEAPASPLRPLYPQISPLKIHIPEPDLRSMVSPVPSPTGTISVPNSCPASPRGAGSSSYRFVQNVTSDLQLAAEFAAKAASEQQADTSGGDSPKDESKPPFSYAQLIVQAISSAQDRQLTLSGIYAHITKHYPYYRTADKGWQNSIRHNLSLNRYFIKVPRSQEEPGKGSFWRIDPASEAKLVEQAFRKRRQRGVSCFRTPFGPLSSRSAPASPTHPGLMSPRSGGLQTPECLSREGSPIPHDPEFGSKLASVPEYRYSQSAPGSPVSAQPVIMAVPPRPSSLVAKPVAYMPASIVTSQQPAGHAIHVVQQAPTVTMVRVVTTSANSANGYILTSQGAAGGSHDAAGAAVLDLGSEARGLEEKPTIAFATIPAAGGVIQTVASQMAPGVPGHTVTILQPATPVTLGQHHLPVRAVTQNGKHAVPTNSLAGNAYALTSPLQLLATQASSSAPVVVTRVCEVGPKEPAAAVAATATTTPATATTASASASSTGEPEVKRSRVEEPSGAVTTPAGVIAAAGPQGPGTGE

SEQ ID NO: 15002 - protein, 660 aa, Homo sapiens
MAAAAAALSGAGTPPAGGGAGGGGAGGGGSPPGGWAVARLEGREFEYLMKKRSVTIGRNSSQGSVDVSMGHSSFISRRHLEIFTPPGGGGHGGAAPELPPAQPRPDAGGDFYLRCLGKNGVFVDGVFQRRGAPPLQLPRVCTFRFPSTNIKITFTALSSEKREKQEASESPVKAVQPHISPLTINIPDTMAHLISPLPSPTGTISAANSCPSSPRGAGSSGYKVGRVMPSDLNLMADNSQPENEKEASGGDSPKDDSKPPYSYAQLIVQAITMAPDKQLTLNGIYTHITKNYPYYRTADKGWQNSIRHNLSLNRYFIKVPRSQEEPGKGSFWRIDPASESKLIEQAFRKRRPRGVPCFRTPLGPLSSRSAPASPNHAGVLSAHSSGAQTPESLSREGSPAPLEPEPGAAQPKLAVIQEARFAQSAPGSPLSSQPVLITVQRQLPQAIKPVTYTVATPVTTSTSQPPVVQTVHVVHQIPAVSVTSVAGLAPANTYTVSGQAVVTPAAVLAPPKAEAQENGDHREVKVKVEPIPAIGHATLGTASRIIQTAQTTPVQTVTIVQQAPLGQHQLPIKTVTQNGTHVASVPTAVHGQVNNAAASPLHMLATHASASASLPTKRHNGDQPEQPELKRIKTEDGEGIVIALSVDTPPAAVREKGVQN

SEQ ID NO: 15003 - protein, 345 aa, Homo sapiens
MSHLFDPRLPALAASPMLYLYGPERPGLPLAFAPAAALAASGRAETPQKPPYSYIALIAMAIQDAPEQRVTLNGIYQFIMDRFPFYHDNRQGWQNSIRHNLSLNDCFVKVPREKGRPGKGSYWTLDPRCLDMFENGNYRRRKRKPKPGPGAPEAKRPRAETHQRSAEAQPEAGSGAGGSGPAISRLQAAPAGPSPLLDGPSPPAPLHWPGTASPNEDAGDAAQGAAAVAVGQAARTGDGPGSPLRPASRSSPKSSDKSKSFSIDSILAGKQGQKPPSGDELLGGAKPGPGGRLGASLLAASSSLRPPFNASLMLDPHVQGGFYQLGIPFLSYFPLQVPDTVLHFQ

SEQ ID NO: 15004 - protein, 376 aa, Homo sapiens
MMASYPEPEDAAGALLAPETGRTVKEPEGPPPSPGKGGGGGGGTAPEKPDPAQKPPYSYVALIAMAIRESAEKRLTLSGIYQYIIAKFPFYEKNKKGWQNSIRHNLSLNECFIKVPREGGGERKGNYWTLDPACEDMFEKGNYRRRRRMKRPFRPPPAHFQPGKGLFGAGGAAGGCGVAGAGADGYGYLAPPKYLQSGFLNNSWPLPQPPSPMPYASCQMAAAAAAAAAAAAAAGPGSPGAAAVVKGLAGPAASYGPYTRVQSMALPPGVVNSYNGLGGPPAAPPPPPHPHPHPHAHHLHAAAAPPPAPPHHGAAAPPPGQLSPASPATAAPPAPAPTSAPGLQFACARQPELAMMHCSYWDHDSKTGALHSRLDL

SEQ ID NO: 15005 - protein, 763 aa, Homo sapiens
MKTSPRRPLILKRRRLPLPVQNAPSETSEEEPKRSPAQQESNQAEASKEVAESNSCKFPAGIKIINHPTMPNTQVVAIPNNANIHSIITALTAKGKESGSSGPNKFILISCGGAPTQPPGLRPQTQTSYDAKRTEVTLETLGPKPAARDVNLPRPPGALCEQKRETCADGEAAGCTINNSLSNIQWLRKMSSDGLGSRSIKQEMEEKENCHLEQRQVKVEEPSRPSASWQNSVSERPPYSYMAMIQFAINSTERKRMTLKDIYTWIEDHFPYFKHIAKPGWKNSIRHNLSLHDMFVRETSANGKVSFWTIHPSANRYLTLDQVFKPLDPGSPQLPEHLESQQKRPNPELRRNMTIKTELPLGARRKMKPLLPRVSSYLVPIQFPVNQSLVLQPSVKVPLPLAASLMSSELARHSKRVRIAPKVLLAEEGIAPLSSAGPGKEEKLLFGEGFSPLLPVQTIKEEEIQPGEEMPHLARPIKVESPPLEEWPSPAPSFKEESSHSWEDSSQSPTPRPKKSYSGLRSPTRCVSEMLVIQHRERRERSRSRRKQHLLPPCVDEPELLFSEGPSTSRWAAELPFPADSSDPASQLSYSQEVGGPFKTPIKETLPISSTPSKSVLPRTPESWRLTPPAKVGGLDFSPVQTSQGASDPLPDPLGLMDLSTTPLQSAPPLESPQRLLSSEPLDLISVPFGNSSPSDIDVPKPGSPEPQVSGLAANRSLTEGLVLDTMNDSLSKILLDISFPGLDEDPLGPDNINWSQFIPELQ

SEQ ID NO: 15006 - protein, 648 aa, Homo sapiens
MVSLPPPQSDVTLPGPTRLEGERQGDLMQAPGLPGSPAPQSKHAGFSCSSFVSDGPPERTPSLPPHSPRIASPGPEQVQGHCPAGPGPGPFRLSPSDKYPGFGFEEAAASSPGRFLKGSHAPFHPYKRPFHEDVFPEAETTLALKGHSFKTPGPLEAFEEIPVDVAEAEAFLPGFSAEAWCNGLPYPSQEHGPQVLGSEVKVKPPVLESGAGMFCYQPPLQHMYCSSQPPFHQYSPGGGSYPIPYLGSSHYQYQRMAPQASTDGHQPLFPKPIYSYSILIFMALKNSKTGSLPVSEIYNFMTEHFPYFKTAPDGWKNSVRHNLSLNKCFEKVENKSGSSSRKGCLWALNPAKIDKMQEELQKWKRKDPIAVRKSMAKPEELDSLIGDKREKLGSPLLGCPPPGLSGSGPIRPLAPPAGLSPPLHSLHPAPGPIPGKNPLQDLLMGHTPSCYGQTYLHLSPGLAPPGPPQPLFPQPDGHLELRAQPGTPQDSPLPAHTPPSHSAKLLAEPSPARTMHDTLLPDGDLGTDLDAINPSLTDFDFQGNLWEQLKDDSLALDPLVLVTSSPTSSSMPPPQPPPHCFPPGPCLTETGSGAGDLAAPGSGGSGALGDLHLTTLYSAFMELEPTPPTAPAGPSVYLSPSSKPVALA

SEQ ID NO: 15007 - protein, 431 aa, Homo sapiens
MGPVIGMTPDKRAETPGAEKIAGLSQIYKMGSLPEAVDAARPKATLVDSESADDELTNLNWLHESTNLLTNFSLGSEGLPIVSPLYDIEGDDVPSFGPACYQNPEKKSATSKPPYSFSLLIYMAIEHSPNKCLPVKEIYSWILDHFPYFATAPTGWKNSVRHNLSLNKCFQKVERSHGKVNGKGSLWCVDPEYKPNLIQALKKQPFSSASSQNGSLSPHYLSSVIKQNQVRNLKESDIDAAAAMMLLNTSIEQGILECEKPLPLKTALQKKRSYGNAFHHPSAVRLQESDSLATSIDPKEDHNYSASSMAAQRCASRSSVSSLSSVDEVYEFIPKNSHVGSDGSEGFHSEEDTDVDYEDDPLGDSGYASQPCAKISEKGQSGKKMRKQTCQEIDEELKEAAGSLLHLAGIRTCLGSLISTAKTQNQKQRKK

SEQ ID NO: 15008 - protein, 490 aa, Homo sapiens
MGPVMPPSKKPESSGISVSSGLSQCYGGSGFSKALQEDDDLDFSLPDIRLEEGAMEDEELTNLNWLHESKNLLKSFGESVLRSVSPVQDLDDDTPPSPAHSDMPYDARQNPNCKPPYSFSCLIFMAIEDSPTKRLPVKDIYNWILEHFPYFANAPTGWKNSVRHNLSLNKCFKKVDKERSQSIGKGSLWCIDPEYRQNLIQALKKTPYHPHPHVFNTPPTCPQAYQSTSGPPIWPGSTFFKRNGALLQDPDIDAASAMMLLNTPPEIQAGFPPGVIQNGARVLSRGLFPGVRPLPITPIGVTAAMRNGITSCRMRTESEPSCGSPVVSGDPKEDHNYSSAKSSNARSTSPTSDSISSSSSSADDHYEFATKGSQEGSEGSEGSFRSHESPSDTEEDDRKHSQKEPKDSLGDSGYASQHKKRQHFAKARKVPSDTLPLKKRRTEKPPESDDEEMKEAAGSLLHLAGIRSCLNNITNRTAKGQKEQKETTKN

SEQ ID NO: 15009 - protein, 517 aa, Homo sapiens
MIESDTSSIMSGIIRNSGQNHHPSPQEYRLLATTSDDDLPGDLQSLSWLTAVDVPRLQQMASGRVDLGGPCVPHPHPGALAGVADLHVGATPSPLLHGPAGMAPRGMPGLGPITGHRDSMSQFPVGGQPSSGLQDPPHLYSPATQPQFPLPPGAQQCPPVGLYGPPFGVRPPYPQPHVAVHSSQELHPKHYPKPIYSYSCLIAMALKNSKTGSLPVSEIYSFMKEHFPYFKTAPDGWKNSVRHNLSLNKCFEKVENKMSGSSRKGCLWALNLARIDKMEEEMHKWKRKDLAAIHRSMANPEELDKLISDRPESCRRPGKPGEPEAPVLTHATTVAVAHGCLAVSQLPPQPLMTLSLQSVPLHHQVQPQAHLAPDSPAPAQTPPLHALPDLSPSPLPHPAMGRAPVDFINISTDMNTEVDALDPSIMDFALQGNLWEEMKDEGFSLDTLGAFADSPLGCDLGASGLTPASGGSDQSFPDLQVTGLYTAYSTPDSVAASGTSSSSQYLGAQGNKPIALL

SEQ ID NO: 15010 - protein, 655 aa, Homo sapiens
MAEAPQVVEIDPDFEPLPRPRSCTWPLPRPEFSQSNSATSSPAPSGSAAANPDAAAGLPSASAAAVSADFMSNLSLLEESEDFPQAPGSVAAAVAAAAAAAATGGLCGDFQGPEAGCLHPAPPQPPPPGPLSQHPPVPPAAAGPLAGQPRKSSSSRRNAWGNLSYADLITKAIESSAEKRLTLSQIYEWMVKSVPYFKDKGDSNSSAGWKNSIRHNLSLHSKFIRVQNEGTGKSSWWMLNPEGGKSGKSPRRRAASMDNNSKFAKSRSRAAKKKASLQSGQEGAGDSPGSQFSKWPASPGSHSNDDFDNWSTFRPRTSSNASTISGRLSPIMTEQDDLGEGDVHSMVYPPSAAKMASTLPSLSEISNPENMENLLDNLNLLSSPTSLTVSTQSSPGTMMQQTPCYSFAPPNTSLNSPSPNYQKYTYGQSSMSPLPQMPIQTLQDNKSSYGGMSQYNCAPGLLKELLTSDSPPHNDIMTPVDPGVAQPNSRVLGQNVMMGPNSVMSTYGSQASHNKMMNPSSHTHPGHAQQTSAVNGRPLPHTVSTMPHTSGMNRLTQVKTPVQVPLPHPMQMSALGGYSSVSSCNGYGRMGLLHQEKLPSDLDGMFIERLDCDMESIIRNDLMDGDTLDFNFDNVLPNQSFPHSVKTTTHSWVSG

SEQ ID NO: 15011 - protein, 673 aa, Homo sapiens
MAEAPASPAPLSPLEVELDPEFEPQSRPRSCTWPLQRPELQASPAKPSGETAADSMIPEEEDDEDDEDGGGRAGSAMAIGGGGGSGTLGSGLLLEDSARVLAPGGQDPGSGPATAAGGLSGGTQALLQPQQPLPPPQPGAAGGSGQPRKCSSRRNAWGNLSYADLITRAIESSPDKRLTLSQIYEWMVRCVPYFKDKGDSNSSAGWKNSIRHNLSLHSRFMRVQNEGTGKSSWWIINPDGGKSGKAPRRRAVSMDNSNKYTKSRGRAAKKKAALQTAPESADDSPSQLSKWPGSPTSRSSDELDAWTDFRSRTNSNASTVSGRLSPIMASTELDEVQDDDAPLSPMLYSSSASLSPSVSKPCTVELPRLTDMAGTMNLNDGLTENLMDDLLDNITLPPSQPSPTGGLMQRSSSFPYTTKGSGLGSPTSSFNSTVFGPSSLNSLRQSPMQTIQENKPATFSSMSHYGNQTLQDLLTSDSLSHSDVMMTQSDPLMSQASTAVSAQNSRRNVMLRNDPMMSFAAQPNQGSLVNQNLLHHQHQTQGALGGSRALSNSVSNMGLSESSSLGSAKHQQQSPVSQSMQTLSDSLSGSSLYSTSANLPVMGHEKFPSDLDLDMFNGSLECDMESIIRSELMDADGLDFNFDSLISTQNVVGLNVGNFTGAKQASSQSWVPG

SEQ ID NO: 15012 - protein, 505 aa, Homo sapiens
MDPGNENSATEAAAIIDLDPDFEPQSRPRSCTWPLPRPEIANQPSEPPEVEPDLGEKVHTEGRSEPILLPSRLPEPAGGPQPGILGAVTGPRKGGSRRNAWGNQSYAELISQAIESAPEKRLTLAQIYEWMVRTVPYFKDKGDSNSSAGWKNSIRHNLSLHSKFIKVHNEATGKSSWWMLNPEGGKSGKAPRRRAASMDSSSKLLRGRSKAPKKKPSVLPAPPEGATPTSPVGHFAKWSGSPCSRNREEADMWTTFRPRSSSNASSVSTRLSPLRPESEVLAEEIPASVSSYAGGVPPTLNEGLELLDGLNLTSSHSLLSRSGLSGFSLQHPGVTGPLHTYSSSLFSPAEGPLSAGEGCFSSSQALEALLTSDTPPPPADVLMTQVDPILSQAPTLLLLGGLPSSSKLATGVGLCPKPLEAPGPSSLVPTLSMIAPPPVMASAPIPKALGTPVLTPPTEAASQDRMPQDLDLDMYMENLECDMDNIISDLMDEGEGLDFNFEPDP

SEQ ID NO: 15013 - protein, 492 aa, Homo sapiens
MAAKLRAHQVDVDPDFAPQSRPRSCTWPLPQPDLAGDEDGALGAGVAEGAEDCGPERRATAPAMAPAPPLGAEVGPLRKAKSSRRNAWGNLSYADLITKAIESAPDKRLTLSQIYDWMVRYVPYFKDKGDSNSSAGWKNSIRHNLSLHTRFIRVQNEGTGKSSWWMLNPEGGKTGKTPRRRAVSMDNGAKFLRIKGKASKKKQLQAPERSPDDSSPSAPAPGPVPAAAKWAASPASHASDDYEAWADFRGGGRPLLGEAAELEDDEALEALAPSSPLMYPSPASALSPALGSRCPGELPRLAELGGPLGLHGGGGAGLPEGLLDGAQDAYGPRPAPRPGPVLGAPGELALAGAAAAYPGKGAAPYAPPAPSRSALAHPISLMTLPGEAGAAGLAPPGHAAAFGGPPGGLLLDALPGPYAAAAAGPLGAAPDRFPADLDLDMFSGSLECDVESIILNDFMDSDEMDFNFDSALPPPPPGLAGAPPPNQSWVPG

SEQ ID NO: 15014 - protein, 677 aa, Homo sapiens
MMQESGTETKSNGSAIQNGSGGSNHLLECGGLREGRSNGETPAVDIGAADLAHAQQQQQQALQVARQLLLQQQQQQQVSGLKSPKRNDKQPALQVPVSVAMMTPQVITPQQMQQILQQQVLSPQQLQVLLQQQQALMLQQQQLQEFYKKQQEQLQLQLLQQQHAGKQPKEQQQVATQQLAFQQQLLQMQQLQQQHLLSLQRQGLLTIQPGQPALPLQPLAQGMIPTELQQLWKEVTSAHTAEETTGNNHSSLDLTTTCVSSSAPSKTSLIMNPHASTNGQLSVHTPKRESLSHEEHPHSHPLYGHGVCKWPGCEAVCEDFQSFLKHLNSEHALDDRSTAQCRVQMQVVQQLELQLAKDKERLQAMMTHLHVKSTEPKAAPQPLNLVSSVTLSKSASEASPQSLPHTPTTPTAPLTPVTQGPSVITTTSMHTVGPIRRRYSDKYNVPISSADIAQNQEFYKNAEVRPPFTYASLIRQAILESPEKQLTLNEIYNWFTRMFAYFRRNAATWKNAVRHNLSLHKCFVRVENVKGAVWTVDEVEFQKRRPQKISGNPSLIKNMQSSHAYCTPLNAALQASMAENSIPLYTTASMGNPTLGNLASAIREELNGAMEHTNSNESDSSPGRSPMQAVHPVHVKEEPLDPEEAEGPLSLVTTANHSPDFDHDRDYEDEPVNEDME

SEQ ID NO: 15015 - protein, 431 aa, Homo sapiens
MPNPRPGKPSAPSLALGPSPGASPSWRAAPKASDLLGARGPGGTFQGRDLRGGAHASSSSLNPMPPSQLQLPTLPLVMVAPSGARLGPLPHLQALLQDRPHFMHQLSTVDAHARTPVLQVHPLESPAMISLTPPTTATGVFSLKARPGLPPGINVASLEWVSREPALLCTFPNPSAPRKDSTLSAVPQSSYPLLANGVCKWPGCEKVFEEPEDFLKHCQADHLLDEKGRAQCLLQREMVQSLEQQLVLEKEKLSAMQAHLAGKMALTKASSVASSDKGSCCIVAAGSQGPVVPAWSGPREAPDSLFAVRRHLWGSHGNSTFPEFLHNMDYFKFHNMRPPFTYATLIRWAILEAPEKQRTLNEIYHWFTRMFAFFRNHPATWKNAIRHNLSLHKCFVRVESEKGAVWTVDELEFRKKRSQRPSRCSNPTPGP

SEQ ID NO: 15016 - protein, 680 aa, Homo sapiens
MMVESASETIRSAPSGQNGVGSLSGQADGSSGGATGTTASGTGREVTTGADSNGEMSPAELLHFQQQQALQVARQFLLQQASGLSSPGNNDSKQSASAVQVPVSVAMMSPQMLTPQQMQQILSPPQLQALLQQQQALMLQQLQEYYKKQQEQLHLQLLTQQQAGKPQPKEALGNKQLAFQQQLLQMQQLQQQHLLNLQRQGLVSLQPNQASGPLQTLPQAAVCPTDLPQLWKGEGAPGQPAEDSVKQEGLDLTGTAATATSFAAPPKVSPPLSHHTLPNGQPTVLTSRRDSSSHEETPGSHPLYGHGECKWPGCETLCEDLGQFIKHLNTEHALDDRSTAQCRVQMQVVQQLEIQLAKESERLQAMMAHLHMRPSEPKPFSQPLNPVPGSSSFSKVTVSAADSFPDGLVHPPTSAAAPVTPLRPPGLGSASLHGGGPARRRSSDKFCSPISSELAQNHEFYKNADVRPPFTYASLIRQAILETPDRQLTLNEIYNWFTRMFAYFRRNTATWKNAVRHNLSLHKCFVRVENVKGAVWTVDEREYQKRRPPKMTGSPTLVKNMISGLSYGALNASYQAALAESSFPLLNSPGMLNPGSASSLLPLSHDDVGAPVEPLPSNGSSSPPRLSPPQYSHQVQVKEEPAEAEEDRQPGPPLGAPNPSASGPPEDRDLEEELPGEELS

SEQ ID NO: 15017 - protein, 403 aa, Homo sapiens
MKLEVFVPRAAHGDKQGSDLEGAGGSDAPSPLSAAGDDSLGSDGDCAANSPAAGGGARDTQGDGEQSAGGGPGAEEAIPAAAAAAVVAEGAEAGAAGPGAGGAGSGEGARSKPYTRRPKPPYSYIALIAMAIRDSAGGRLTLAEINEYLMGKFPFFRGSYTGWRNSVRHNLSLNDCFVKVLRDPSRPWGKDNYWMLNPNSEYTFADGVFRRRRKRLSHRAPVPAPGLRPEEAPGLPAAPPPAPAAPASPRMRSPARQEERASPAGKFSSSFAIDSILRKPFRSRRLRDTAPGTTLQWGAAPCPPLPAFPALLPAAPCRALLPLCAYGAGEPARLGAREAEVPPTAPPLLLAPLPAAAPAKPLRGPAAGGAHLYCPLRLPAALQAASVRRPGPHLPYPVETLLA

SEQ ID NO: 15018 - protein, 292 aa, Homo sapiens
MGNELFLAFTTSHLPLAEQKLARYKLRIVKPPKLPLEKKPNPDKDGPDYEPNLWMWVNPNIVYPPGKLEVSGRRKREDLTSTLPSSQPPQKEEDASCSEAAGVESLSQSSSKRSPPRKRFAFSPSTWELTEEEEAEDQEDSSSMALPSPHKRAPLQSRRLRQASSQAGRLWSRPPLNYFHLIALALRNSSPCGLNVQQIYSFTRKHFPFFRTAPEGWKNTVRHNLCFRDSFEKVPVSMQGGASTRPRSCLWKLTEEGHRRFAEEARALASTRLESIQQCMSQPDVMPFLFDL

SEQ ID NO: 15019 - protein, 311 aa, Homo sapiens
MDLKLKDCEFWYSLHGQVPGLLDWDMRNELFLPCTTDQCSLAEQILAKYRVGVMKPPEMPQKRRPSPDGDGPPCEPNLWMWVDPNILCPLGSQEAPKPSGKEDLTNISPFPQPPQKDEGSNCSEDKVVESLPSSSSEQSPLQKQGIHSPSDFELTEEEAEEPDDNSLQSPEMKCYQSQKLWQINNQEKSWQRPPLNCSHLIALALRNNPHCGLSVQEIYNFTRQHFPFFWTAPDGWKSTIHYNLCFLDSFEKVPDSLKDEDNARPRSCLWKLTKEGHRRFWEETRVLAFAQRERIQECMSQPELLTSLFDL

SEQ ID NO: 15020 - protein, 330 aa, Homo sapiens
MQQQPLPGPGAPTTEPTKPPYSYIALIAMAIQSSPGQRATLSGIYRYIMGRFAFYRHNRPGWQNSIRHNLSLNECFVKVPRDDRKPGKGSYWTLDPDCHDMFEHGSFLRRRRRFTRQTGAEGTRGPAKARRGPLRATSQDPGVPNATTGRQCSFPPELPDPKGLSFGGLVGAMPASMCPATTDGRPRPPMEPKEISTPKPACPGELPVATSSSSCPAFGFPAGFSEAESFNKAPTPVLSPESGIGSSYQCRLQALNFCMGADPGLEHLLASAAPSPAPPTPPGSLRAPLPLPTDHKEPWVAGGFPVQGGSGYPLGLTPCLYRTPGMFFFE

SEQ ID NO: 15021 - protein, 431 aa, Homo sapiens; identical to SEQ ID NO: 15015

SEQ ID NO: 15022 - protein, 644 aa, Homo sapiens
MADYSTVPPPSSGSAGGGGGGGGGGGVNDAFKDALQRARQIAAKIGGDAGTSLNSNDYGYGGQKRPLEDGDQPDAKKVAPQNDSFGTQLPPMHQQQSRSVMTEEYKVPDGMVGFIIGRGGEQISRIQQESGCKIQIAPDSGGLPERSCMLTGTPESVQSAKRLLDQIVEKGRPAPGFHHGDGPGNAVQEIMIPASKAGLVIGKGGETIKQLQERAGVKMVMIQDGPQNTGADKPLRITGDPYKVQQAKEMVLELIRDQGGFREVRNEYGSRIGGNEGIDVPIPRFAVGIVIGRNGEMIKKIQNDAGVRIQFKPDDGTTPERIAQITGPPDRCQHAAEIITDLLRSVQAGNPGGPGPGGRGRGRGQGNWNMGPPGGLQEFNFIVPTGKTGLIIGKGGETIKSISQQSGARIELQRNPPPNADPNMKLFTIRGTPQQIDYARQLIEEKIGGPVNPLGPPVPHGPHGVPGPHGPPGPPGPGTPMGPYNPAPYNPGPPGPAPHGPPAPYAPQGWGNAYPHWQQQAPPDPAKAGTDPNSAAWAAYYAHYYQQQAQPPPAAPAGAPTTTQTNGQGDQQNPAPAGQVDYTKAWEEYYKKMGQAVPAPTGAPPGGQPDYSAAWAEYYRQQAAYYAQTSPQGMPQHPPAPQGQ

SEQ ID NO: 15023 - protein, 572 aa, Homo sapiens
MAELVQGQSAPVGMKAEGFVDALHRVRQIAAKIDSIPHLNNSTPLVDPSVYGYGVQKRPLDDGVGNQLGALVHQRTVITEEFKVPDKMVGFIIGRGGEQISRIQAESGCKIQIASESSGIPERPCVLTGTPESIEQAKRLLGQIVDRCRNGPGFHNDIDSNSTIQEILIPASKVGLVIGRGGETIKQLQERTGVKMVMIQDGPLPTGADKPLRITGDAFKVQQAREMVLEIIREKDQADFRGVRGDFNSRMGGGSIEVSVPRFAVGIVIGRNGEMIKKIQNDAGVRIQFKPDDGISPERAAQVMGPPDRCQHAAHIISELILTAQERDGFGGLAAARGRGRGRGDWSVGAPGGVQEITYTVPADKCGLVIGKGGENIKSINQQSGAHVELQRNPPPNSDPNLRRFTIRGVPQQIEVARQLIDEKVGGTNLGAPGAFGQSPFSQPPAPPHQNTFPPRSSGCFPNMAAKVNGNPHSTPVSGPPAFLTQGWGSTYQAWQQPTQQVPSQQSQPQSSQPNYSKAWEDYYKKQSHAASAAPQASSPPDYTMAWAEYYRQQVAFYGQTLGQAQAHSQEQ

SEQ ID NO: 15024 - protein, 454 aa, Homo sapiens
MTKREAEELIEIEIDGTEKAECTEESIVEQTYAPAECVSQAIDINEPIGNLKKLLEPRLQCSLDAHEICLQDIQLDPERSLFDQGVKTDGTVQLSVQVISYQGIEPKLNILEIVKPADTVEVVIDPDAHHAESEAHLVEEAQVITLDGTKHITTISDETSEQVTRWAAALEGYRKEQERLGIPYDPIQWSTDQVLHWVVWVMKEFSMTDIDLTTLNISGRELCSLNQEDFFQRVPRGEILWSHLELLRKYVLASQEQQMNEIVTIDQPVQIIPASVQSATPTTIKVINSSAKAAKVQRAPRISGEDRSSPGNRTGNNGQIQLWQFLLELLTDKDARDCISWVGDEGEFKLNQPELVAQKWGQRKNKPTMNYEKLSRALRYYYDGDMICKVQGKRFVYKFVCDLKTLIGYSAAELNRLVTECEQKKLAKMQLHGIAQPVTAVALATASLQTEKDN

SEQ ID NO: 15025 - protein, 395 aa, Homo sapiens
MSLVDLGKKLLEAARAGQDDEVRILMANGAPFTTDWLGTSPLHLAAQYGHYSTTEVLLRAGVSRDARTKVDRTPLHMAASEGHASIVEVLLKHGADVNAKDMLKMTALHWATEHNHQEVVELLIKYGADVHTQSKFCKTAFDISIDNGNEDLAEILQIAMQNQINTNPESPDTVTIHAATPQFIIGPGGVVNLTGLVSSENSSKATDETGVSAVQFGNSSTSVLATLAALAEASAPLSNSSETPVVATEEVVTAESVDGAIQQVVSSGGQQVITIVTDGIQLGNLHSIPTSGIGQPIIVTMPDGQQVLTVPATDIAEETVISEEPPAKRQCIEIIENRVESAEIEEREALQKQLDEANREAQKYRQQLLKKEQEAEAYRQKLEAMTRLQTNKEAV

SEQ ID NO: 15026 - protein, 448 aa, Homo sapiens
MSLVDLGKRLLEAARKGQDDEVRTLMANGAPFTTDWLGTSPLHLAAQYGHYSTAEVLLRAGVSRDARTKVDRTPLHMAAADGHAHIVELLVRNGADVNAKDMLKMTALHWATERHHRDVVELLIKYGADVHAFSKFDKSAFDIALEKNNAEILVILQEAMQNQVNVNPERANPVTDPVSMAAPFIFTSGEVVNLASLISSTNTKTTSGDPHASTVQFSNSTTSVLATLAALAEASVPLSNSHRATANTEEIIEGNSVDSSIQQVMGSGGQRVITIVTDGVPLGNIQTSIPTGGIGQPFIVTVQDGQQVLTVPAGKVAEETVIKEEEEEKLPLTKKPRIGEKTNSVEESKEGNERELLQQQLQEANRRAQEYRHQLLKKEQEAEQYRLKLEAIARQQPNGVDFTMVEEVAEVDAVVVTEGELEERETKVTGSAGTTEPHTRVSMATVSS

SEQ ID NO: 15027 - protein, 413 aa, Homo sapiens
MEFPGLGSLGTSEPLPQFVDPALVSSTPESGVFFPSGPEGLDAAASSTAPSTATAAAAALAYYRDAEAYRHSPVFQVYPLLNCMEGIPGGSPYAGWAYGKTGLYPASTVCPTREDSPPQAVEDLDGKGSTSFLETLKTERLSPDLLTLGPALPSSLPVPNSAYGGPDFSSTFFSPTGSPLNSAAYSSPKLRGTLPLPPCEARECVNCGATATPLWRRDRTGHYLCNACGLYHKMNGQNRPLIRPKKRLIVSKRAGTQCTNCQTTTTTLWRRNASGDPVCNACGLYYKLHQVNRPLTMRKDGIQTRNRKASGKGKKKRGSSLGGTGAAEGPAGGFMVVAGGSGSGNCGEVASGLTLGPPGTAHLYQGLGPVVLSGPVSHLMPFPGPLLGSPTGSFPTGPMPPTTSTTVVAPLSS

SEQ ID NO: 15028 - protein, 480 aa, Homo sapiens
MEVAPEQPRWMAHPAVLNAQHPDSHHPGLAHNYMEPAQLLPPDEVDVFFNHLDSQGNPYYANPAHARARVSYSPAHARLTGGQMCRPHLLHSPGLPWLDGGKAALSAAAAHHHNPWTVSPFSKTPLHPSAAGGPGGPLSVYPGAGGGSGGGSGSSVASLTPTAAHSGSHLFGFPPTPPKEVSPDPSTTGAASPASSSAGGSAARGEDKDGVKYQVSLTESMKMESGSPLRPGLATMGTQPATHHPIPTYPSYVPAAAHDYSSGLFHPGGFLGGPASSFTPKQRSKARSCSEGRECVNCGATATPLWRRDGTGHYLCNACGLYHKMNGQNRPLIKPKRRLSAARRAGTCCANCQTTTTTLWRRNANGDPVCNACGLYYKLHNVNRPLTMKKEGIQTRNRKMSNKSKKSKKGAECFEELSKCMQEKSSPFSAAALAGHMAPVGHLPPFSHSGHILPTPTPIHPSSSLSFGHPHPSSMVTAMG

SEQ ID NO: 15029 - protein, 443 aa, Homo sapiens
MEVTADQPRWVSHHHPAVLNGQHPDTHHPGLSHSYMDAAQYPLPEEVDVLFNIDGQGNHVPPYYGNSVRATVQRYPPTHHGSQVCRPPLLHGSLPWLDGGKALGSHHTASPWNLSPFSKTSIHHGSPGPLSVYPPASSSSLSGGHASPHLFTFPPTPPKDVSPDPSLSTPGSAGSARQDEKECLKYQVPLPDSMKLESSHSRGSMTALGGASSSTHHPITTYPPYVPEYSSGLFPPSSLLGGSPTGFGCKSRPKARSSTGRECVNCGATSTPLWRRDGTGHYLCNACGLYHKMNGQNRPLIKPKRRLSAARRAGTSCANCQTTTTTLWRRNANGDPVCNACGLYYKLHNINRPLTMKKEGIQTRNRKMSSKSKKCKKVHDSLEDFPKNSSFNPAALSRHMSSLSHISPFSHSSHMLTTPTPMHPPSSLSFGPHHPSSMVTAMG

SEQ ID NO: 15030 - protein, 442 aa, Homo sapiens
MYQSLAMAANHGPPPGAYEAGGPGAFMHGAGAASSPVYVPTPRVPSSVLGLSYLQGGGAGSASGGASGGSSGGAASGAGPGTQQGSPGWSQAGADGAAYTPPPVSPRFSFPGTTGSLAAAAAAAAAREAAAYSSGGGAAGAGLAGREQYGRAGFAGSYSSPYPAYMADVGASWAAAAAASAGPFDSPVLHSLPGRANPAARHPNLDMFDDFSEGRECVNCGAMSTPLWRRDGTGHYLCNACGLYHKMNGINRPLIKPQRRLSASRRVGLSCANCQTTTTTLWRRNAEGEPVCNACGLYMKLHGVPRPLAMRKEGIQTRKRKPKNLNKSKTPAAPSGSESLPPASGASSNSSNATTSSSEEMRPIKTEPGLSSHYGHSSSVSQTFSVSAMSGHGPSIHPVLSALKLSPQGYASPVSQSPQTSSKQDSWNSLVLADSHGDIITA

SEQ ID NO: 15031 - protein, 397 aa, Homo sapiens
MYQSLALAASPRQAAYADSGSFLHAPGAGSPMFVPPARVPSMLSYLSGCEPSPQPPELAARPGWAQTATADSSAFGPGSPHPPAAHPPGATAFPFAHSPSGPGSGGSAGGRDGSAYQGALLPREQFAAPLGRPVGTSYSATYPAYVSPDVAQSWTAGPFDGSVLHGLPGRRPTFVSDFLEEFPGEGRECVNCGALSTPLWRRDGTGHYLCNACGLYHKMNGVNRPLVRPQKRLSSSRRAGLCCTNCHTTNTTLWRRNSEGEPVCNACGLYMKLHGVPRPLAMKKESIQTRKRKPKTIAKARGSSGSTRNASASPSAVASTDSSAATSKAKPSLASPVCPGPSMAPQASGQEDDSLAPGHLEFKFEPEDFAFPSTAPSPQAGLRGALRQEAWCALALA

SEQ ID NO: 15032 - protein, 595 aa, Homo sapiens
MALTDGGWCLPKRFGAAGADASDSRAFPAREPSTPPSPISSSSSSCSRGGERGPGGASNCGTPQLDTEAAAGPPARSLLLSSYASHPFGAPHGPSAPGVAGPGGNLSSWEDLLLFTDLDQAATASKLLWSSRGAKLSPFAPEQPEEMYQTLAALSSQGPAAYDGAPGGFVHSAAAAAAAAAAASSPVYVPTTRVGSMLPGLPYHLQGSGSGPANHAGGAGAHPGWPQASADSPPYGSGGGAAGGGAAGPGGAGSAAAHVSARFPYSPSPPMANGAAREPGGYAAAGSGGAGGVSGGGSSLAAMGGREPQYSSLSAARPLNGTYHHHHHHHHHHPSPYSPYVGAPLTPAWPAGPFETPVLHSLQSRAGAPLPVPRGPSADLLEDLSESRECVNCGSIQTPLWRRDGTGHYLCNACGLYSKMNGLSRPLIKPQKRVPSSRRLGLSCANCHTTTTTLWRRNAEGEPVCNACGLYMKLHGVPRPLAMKKEGIQTRKRKPKNINKSKTCSGNSNNSIPMTPTSTSSNSDDCSKNTSPTTQPTASGAGAPVMTGAGESTNPENSELKYSGQDGLYIGVSLASPAEVTSSVRPDSWCALALA

SEQ ID NO: 15033 - protein, 269 aa, Homo sapiens
MPLGLKPTCSVCKTTSSSMWKKGAQGEILCHHCTGRGGAGSGGAGSGAAGGTGGSGGGGFGAATFASTSATPPQSNGGGGGKQSKQEIHRRSARLRNTKYKSAPAAEKKVSTKGKGRRHIFKLKNPIKAPESVSTIITAESIFYKGVYYQIGDVVSVIDEQDGKPYYAQIRGFIQDQYCEKSAALTWLIPTLSSPRDQFDPASYIIGPEEDLPRKMEYLEFVCHAPSEYFKSRSSPFPTVPTRPEKGYIWTHVGPTPAITIKESVANHL

SEQ ID NO: 15034 - protein, 633 aa, Homo sapiens
MTEEACRTRSQKRALERDPTEDDVESKKIKMERGLLASDLNTDGDMRVTPEPGAGPTQGLLRATEATAMAMGRGEGLVGDGPVDMRTSHSDMKSERRPPSPDVIVLSDNEQPSSPRVNGLTTVALKETSTEALMKSSPEERERMIKQLKEELRLEEAKLVLLKKLRQSQIQKEATAQKPTGSVGSTVTTPPPLVRGTQNIPAGKPSLQTSSARMPGSVIPPPLVRGGQQASSKLGPQASSQVVMPPLVRGAQQIHSIRQHSSTGPPPLLLAPRASVPSVQIQGQRIIQQGLIRVANVPNTSLLVNIPQPTPASLKGTTATSAQANSTPTSVASVVTSAESPASRQAAAKLALRKQLEKTLLEIPPPKPPAPEMNFLPSAANNEFIYLVGLEEVVQNLLETQGRMSAATVLSREPYMCAQCKTDFTCRWREEKSGAIMCENCMTTNQKKALKVEHTSRLKAAFVKALQQEQEIEQRLLQQGTAPAQAKAEPTAAPHPVLKQVIKPRRKLAFRSGEARDWSNGAVLQASSQLSRGSATTPRGVLHTFSPSPKLQNSASATALVSRTGRHSERTVSAGKGSATSNWKKTPLSTGGTLAFVSPSLAVHKSSSAVDRQREYLLDMIPPRSIPQSATWK

SEQ ID NO: 15035 - protein, 593 aa, Homo sapiens
MDRMTEDALRLNLLKRSLDPADERDDVLAKRLKMEGHEAMERLKMLALLKRKDLANLEVPHELPTKQDGSGVKGYEEKLNGNLRPHGDNRTAGRPGKENINDEPVDMSARRSEPERGRLTPSPDIIVLSDNEASSPRSSSRMEERLKAANLEMFKGKGIEERQQLIKQLRDELRLEEARLVLLKKLRQSQLQKENVVQKTPVVQNAASIVQPSPAHVGQQGLSKLPSRPGAQGVEPQNLRTLQGHSVIRSATNTTLPHMLMSQRVIAPNPAQLQGQRGPPKPGLVRTTTPNMNPAINYQPQSSSSVPCQRTTSSAIYMNLASHIQPGTVNRVSSPLPSPSAMTDAANSQAAAKLALRKQLEKTLLEIPPPKPPAPLLHFLPSAANSEFIYMVGLEEVVQSVIDSQGKSCASLLRVEPFVCAQCRTDFTPHWKQEKNGKILCEQCMTSNQKKALKAEHTNRLKNAFVKALQQEQEIEQRLQQQAALSPTTAPAVSSVSKQETIMRHHTLRQAPQPQSSLQRGIPTSARSMLSNFAQAPQLSVPGGLLGMPGVNIAYLNTGIGGHKGPSLADRQREYLLDMIPPRSISQSISGQK

SEQ ID NO: 15036 - protein, 363 aa, Homo sapiens
MQRAGGGSAPGGNGGGGGGGPGTAFSIDSLIGPPPPRSGHLLYTGYPMFMPYRPLVLPQALAPAPLPAGLPPLAPLASFAGRLTNTFCAGLGQAVPSMVALTTALPSFAEPPDAFYGPQELAAAAAAAAATAARNNPEPGGRRPEGGLEADELLPAREKVAEPPPPPPPHFSETFPSLPAEGKVYSSDEEKLEASAGDPAGSEQEEEGSGGDSEDDGFLDSSAGGPGALLGPKPKLKGSLGTGAEEGAPVTAGVTAPGGKSRRRRTAFTSEQLLELEKEFHCKKYLSLTERSQIAHALKLSEVQVKIWFQNRRAKWKRIKAGNVSSRSGEPVRNPKIVVPIPVHVNRFAVRSQHQQMEQGARP

SEQ ID NO: 15037 - protein, 348 aa, Homo sapiens
MSAAFPPSLMMMQRPLGSSTAFSIDSLIGSPPQPSPGHFVYTGYPMFMPYRPVVLPPPPPPPPALPQAALQPALPPAHPHHQIPSLPTGFCSSLAQGMALTSTLMATLPGGFSASPQHQEAAAARKFAPQPLPGGGNFDKAEALQADAEDGKGFLAKEGSLLAFSAAETVQASLVGAVRGQGKDESKVEDDPKGKEESFSLESDVDYSSDDNLTGQAAHKEEDPGHALEETPPSSGAAGSTTSTGKNRRRRTAFTSEQLLELEKEFHCKKYLSLTERSQIAHALKLSEVQVKIWFQNRRAKWKRVKAGNANSKTGEPSRNPKIVVPIPVHVSRFAIRSQHQQLEQARP

SEQ ID NO: 15038 - protein, 781 aa, Homo sapiens
MAHRPKRTFRQRAADSSDSDGAEESPAEPGAPRELPVPGSAEEEPPSGGGRAQVAGLPHRVRGPRGRGRVWASSRRATKAAPRADEGSESRTLDVSTDEEDKIHHSSESKDDQGLSSDSSSSLGEKELSSTVKIPDAAFIQAARRKRELARAQDDYISLDVQHTSSISGMKRESEDDPESEPDDHEKRIPFTLRPQTLRQRMAEESISRNEETSEESQEDEKQDTWEQQQMRKAVKIIEERDIDLSCGNGSSKVKKFDTSISFPPVNLEIIKKQLNTRLTLLQETHRSHLREYEKYVQDVKSSKSTIQNLESSSNQALNCKFYKSMKIYVENLIDCLNEKIINIQEIESSMHALLLKQAMTFMKRRQDELKHESTYLQQLSRKDETSTSGNFSVDEKTQWILEEIESRRTKRRQARVLSGNCNHQEGTSSDDELPSAEMIDFQKSQGDILQKQKKVFEEVQDDFCNIQNILLKFQQWREKFPDSYYEAFISLCIPKLLNPLIRVQLIDWNPLKLESTGLKEMPWFKSVEEFMDSSVEDSKKESSSDKKVLSAIINKTIIPRLTDFVEFLWDPLSTSQTTSLITHCRVILEEHSTCENEVSKSRQDLLKSIVSRMKKAVEDDVFIPLYPKSAVENKTSPHSKFQERQFWSGLKLFRNILLWNGLLTDDTLQELGLGKLLNRYLIIALLNATPGPDVVKKCNQVAACLPEKWFENSAMRTSIPQLENFIQFLLQSAHKLSRSEFRDEVEEIILILVKIKALNQAESFIGEHHLDHLKSLIKED

SEQ ID NO: 15039 - protein, 436 aa, Homo sapiens
MEPDDFDSEDKEILSWDINDVKLPQNVKKTDWFQEWPDSYAKHIYSSEDKNAQRHLSSWAMRNTNNHNSRILKKSCLGVVVCGRDCLAEEGRKIYLRPAICDKARQKQQRKRCPNCDGPLKLIPCRGHGGFPVTNFWRHDGRFIFFQSKGEHDHPKPETKLEAEARRAMKKVNTAPSSVSLSLKGSTETRSLPGETQSQGSLPLTWSFQEGVQLPGSYSGHLIANTPQQNSLNDCFSFSKSYGLGGITDLTDQTSTVDPMKLYEKRKLSSSRTYSSGDLLPPSASGVYSDHGDLQAWSKNAALGRNHLADNCYSNYPFPLTSWPCSFSPSQNSSEPFYQQLPLEPPAAKTGCPPLWPNPAGNLYEEKVHVDFNSYVQSPAYHSPQEDPFLFTYASHPHQQYSLPSKSSKWDFEEEMTYLGLDHCNNDMLLNLCPLR

SEQ ID NO: 15040 - protein, 506 aa, Homo sapiens
MPAAAVQEAVGVCSYGMQLSWDINDPQMPQELALFDQFREWPDGYVRFIYSSDEKKAQRHLSGWAMRNTNNHNGHILKKSCLGVVVCTQACTLPDGSRLQLRPAICDKARLKQQKKACPNCHSALELIPCRGHSGYPVTNFWRLDGNAIFFQAKGVHDHPRPESKSETEARRSAIKRQMASFYQPQKKRIRESEAEENQDSSGHFSNIPPLENPEDFDIVTETSFPIPGQPCPSFPKSDVYKATCDLATFQGDKMPPFQKYSSPRIYLPRPPCSYELANPGYTNSSPYPTLYKDSTSIPNDTDWVHLNTLQCNVNSYSSYERSFDFTNKQHGWKPALGKPSLVERTNHGQFQAMATRPYYNPELPCRYLTTPPPGAPALQTVITTTTKVSYQAYQPPAMKYSDSVREVKSLSSCNYAPEDTGMSVYPEPWGPPVTVTRAASPSGPPPMKIAGDCRAIRPTVAIPHEPVSSRTDEAETWDVCLSGLGSAVSYSDRVGPFFTYNNEDF

SEQ ID NO: 15041 - protein, 422 aa, Homo sapiens
MPRSFLVKSKKAHSYHQPRSPGPDYSLRLENVPAPSRADSTSNAGGAKAEPRDRLSPESQLTEAPDRASASPDSCEGSVCERSSEFEDFWRPPSPSASPASEKSMCPSLDEAQPFPLPFKPYSWSGLAGSDLRHLVQSYRPCGALERGAGLGLFCEPAPEPGHPAALYGPKRAAGGAGAGAPGSCSAGAGATAGPGLGLYGDFGSAAAGLYERPTAAAGLLYPERGHGLHADKGAGVKVESELLCTRLLLGGGSYKCIKCSKVFSTPHGLEVHVRRSHSGTRPFACEMCGKTFGHAVSLEQHKAVHSQERSFDCKICGKSFKRSSTLSTHLLIHSDTRPYPCQYCGKRFHQKSDMKKHTFIHTGEKPHKCQVCGKAFSQSSNLITHSRKHTGFKPFGCDLCGKGFQRKVDLRRHRETQHGLK

SEQ ID NO: 15042 - protein, 330 aa, Homo sapiens
MPRSFLVKSKKAHTYHQPRVQEDEPLWPPALTPVPRDQAPSNSPVLSTLFPNQCLDWTNLKREPELEQDQNLARMAPAPEGPIVLSRPQDGDSPLSDSPPFYKPSFSWDTLATTYGHSYRQAPSTMQSAFLEHSVSLYGSPLVPSTEPALDFSLRYSPGMDAYHCVKCNKVFSTPHGLEVHVRRSHSGTRPFACDICGKTFGHAVSLEQHTHVHSQERSFECRMCGKAFKRSSTLSTHLLIHSDTRPYPCQFCGKRFHQKSDMKKHTYIHTGEKPHKCQVCGKAFSQSSNLITHSRKHTGFKPFSCELCTKGFQRKVDLRRHRESQHNLK

SEQ ID NO: 15043 - protein, 1106 aa, Homo sapiens
MFNSMTPPPISSYGEPCCLRPLPSQGAPSVGTEGLSGPPFCHQANLMSGPHSYGPARETNSCTEGPLFSSPRSAVKLTKKRALSISPLSDASLDLQTVIRTSPSSLVAFINSRCTSPGGSYGHLSIGTMSPSLGFPAQMNHQKGPSPSFGVQPCGPHDSARGGMIPHPQSRGPFPTCQLKSELDMLVGKCREEPLEGDMSSPNSTGIQDPLLGMLDGREDLEREEKREPESVYETDCRWDGCSQEFDSQEQLVHHINSEHIHGERKEFVCHWGGCSRELRPFKAQYMLVVHMRRHTGEKPHKCTFEGCRKSYSRLENLKTHLRSHTGEKPYMCEHEGCSKAFSNASDRAKHQNRTHSNEKPYVCKLPGCTKRYTDPSSLRKHVKTVHGPDAHVTKRHRGDGPLPRAPSISTVEPKREREGGPIREESRLTVPEGAMKPQPSPGAQSSCSSDHSPAGSAANTDSGVEMTGNAGGSTEDLSSLDEGPCIAGTGLSTLRRLENLRLDQLHQLRPIGTRGLKLPSLSHTGTTVSRRVGPPVSLERRSSSSSSISSAYTVSRRSSLASPFPPGSPPENGASSLPGLMPAQHYLLRARYASARGGGTSPTAASSLDRIGGLPMPPWRSRAEYPGYNPNAGVTRRASDPAQAADRPAPARVQRFKSLGCVHTPPTVAGGGQNFDPYLPTSVYSPQPPSITENAAMDARGLQEEPEVGTSMVGSGLNPYMDFPPTDTLGYGGPEGAAAEPYGARGPGSLPLGPGPPTNYGPNPCPQQASYPDPTQETWGEFPSHSGLYPGPKALGGTYSQCPRLEHYGQVQVKPEQGCPVGSDSTGLAPCLNAHPSEGPPHPQPLFSHYPQPSPPQYLQSGPYTQPPPDYLPSEPRPCLDFDSPTHSTGQLKAQLVCNYVQSQQELLWEGGGREDAPAQEPSYQSPKFLGGSQVSPSRAKAPVNTYGPGFGPNLPNHKSGSYPTPSPCHENFVVGANRASHRAAAPPRLLPPLPTCYGPLKVGGTNPSCGHPEVGRLGGGPALYPPPEGQVCNPLDSLDLDNTQLDFVAILDEPQGLSPPPSHDQRGSSGHTPPPSGPPNMAVGNMSVLLRSLPGETEFLNSSA

SEQ ID NO: 15044 - protein, 1586 aa, Homo sapiens
METSASATASEKQEAKSGILEAAGFPDPGKKASPLVVAAAAAAAVAAQGVPQHLLPPFHAPLPIDMRHQEGRYHYEPHSVHGVHGPPALSGSPVISDISLIRLSPHPAGPGESPFNAPHPYVNPHMEHYLRSVHSSPTLSMISAARGLSPADVAQEHLKERGLFGLPAPGTTPSDYYHQMTLVAGHPAPYGDLLMQSGGAASAPHLHDYLNPVDVSRFSSPRVTPRLSRKRALSISPLSDASLDLQRMIRTSPNSLVAYINNSRSSSAASGSYGHLSAGALSPAFTFPHPINPVAYQQILSQQRGLGSAFGHTPPLIQPSPTFLAQQPMALTSINATPTQLSSSSNCLSDTNQNKQSSESAVSSTVNPVAIHKRSKVKTEPEGLRPASPLALTQGQVSGHGSCGCALPLSQEQLADLKEDLDRDDCKQEAEVVIYETNCHWEDCTKEYDTQEQLVHHINNEHIHGEKKEFVCRWQACTREQKPFKAQYMLVVHMRRHTGEKPHKCTFEGCSKAYSRLENLKTHLRSHTGEKPYVCEHEGCNKAFSNASDRAKHQNRTHSNEKPYICKIPGCTKRYTDPSSLRKHVKTVHGPDAHVTKKQRNDVHLRTPLLKENGDSEAGTEPGGPESTEASSTSQAVEDCLHVRAIKTESSGLCQSSPGAQSSCSSEPSPLGSAPNNDSGVEMPGTGPGSLGDLTALDDTPPGADTSALAAPSAGGLQLRKHMTTMHRFEQLKKEKLKSLKDSCSWAGPTPHTRNTKLPPLPGSGSILENFSGSGGGGPAGLLPNPRLSELSASEVTMLSQLQERRDSSTSTVSSAYTVSRRSSGISPYFSSRRSSEASPLGAGRPHNASSADSYDPISTDASRRSSEASQCSGGSGLLNLTPAQQYSLRAKYAAATGGPPPTPLPGLERMSLRTRLALLDAPERTLPAGCPRPLGPRRGSDGPTYGHGHAGAAPAFPHEAPGGGARRASDPVRRPDALSLPRVQRFHSTHNVNPGPLPPCADRRGLRLQSHPSTDGGLARGAYSPRPPSISENVAMEAVAAGVDGAGPEADLGLPEDDLVLPDDVVQYIKAHASGALDEGTGQVYPTESTGFSDNPRLPSPGLHGQRRMVAADSNVGPSAPMLGGCQLGFGAPSSLNKNNMPVQWNEVSSGTVDALASQVKPPPFPQGNLAVVQQKPAFGQYPGYSPQGLQASPGGLDSTQPHLQPRSGAPSQGIPRVNYMQQLRQPVAGSQCPGMTTTMSPHACYGQVHPQLSPSTISGALNQFPQSCSNMPAKPGHLGHPQQTEVAPDPTTMGNRHRELGVPDSALAGVPPPHPVQSYPQQSHHLAASMSQEGYHQVPSLLPARQPGFMEPQTGPMGVATAGFGLVQPRPPLEPSPTGRHRGVRAVQQQLAYARATGHAMAAMPSSQETAEAVPKGAMGNMGSVPPQPPPQDAGGAPDHSMLYYYGQIHMYEQDGGLENLGSCQVMRSQPPQPQACQDSIQPQPLPSPGVNQVSSTVDSQLLEAPQIDFDAIMDDGDHSSLFSGALSPSLLHSLSQNSSRLTTPRNSLTLPSIPAGISNMAVGDMSSMLTSLAEESKFLNMMT

SEQ ID NO: 15045 - protein, 1580 aa, Homo sapiens
MEAQSHSSTTTEKKKVENSIVKCSTRTDVSEKAVASSTTSNEDESPGQTYHRERRNAITMQPQNVQGLSKVSEEPSTSSDERASLIKKEIHGSLPHVAEPSVPYRGTVFAMDPRNGYMEPHYHPPHLFPAFHPPVPIDARHHEGRYHYDPSPIPPLHMTSALSSSPTYPDLPFIRISPHRNPTAASESPFSPPHPYINPYMDYIRSLHSSPSLSMISATRGLSPTDAPHAGVSPAEYYHQMALLTGQRSPYADIIPSAATAGTGAIHMEYLHAMDSTRFSSPRLSARPSRKRTLSISPLSDHSFDLQTMIRTSPNSLVTILNNSRSSSSASGSYGHLSASAISPALSFTYSSAPVSLHMHQQILSRQQSLGSAFGHSPPLIHPAPTFPTQRPIPGIPTVLNPVQVSSGPSESSQNKPTSESAVSSTGDPMHNKRSKIKPDEDLPSPGARGQQEQPEGTTLVKEEGDKDESKQEPEVIYETNCHWEGCAREFDTQEQLVHHINNDHIHGEKKEFVCRWLDCSREQKPFKAQYMLVVHMRRHTGEKPHKCTFEGCTKAYSRLENLKTHLRSHTGEKPYVCEHEGCNKAFSNASDRAKHQNRTHSNEKPYVCKIPGCTKRYTDPSSLRKHVKTVHGPEAHVTKKQRGDIHPRPPPPRDSGSHSQSRSPGRPTQGALGEQQDLSNTTSKREECLQVKTVKAEKPMTSQPSPGGQSSCSSQQSPISNYSNSGLELPLTDGGSIGDLSAIDETPIMDSTISTATTALALQARRNPAGTKWMEHVKLERLKQVNGMFPRLNPILPPKAPAVSPLIGNGTQSNNTCSLGGPMTLLPGRSDLSGVDVTMLNMLNRRDSSASTISSAYLSSRRSSGISPCFSSRRSSEASQAEGRPQNVSVADSYDPISTDASRRSSEASQSDGLPSLLSLTPAQQYRLKAKYAAATGGPPPTPLPNMERMSLKTRLALLGDALEPGVALPPVHAPRRCSDGGAHGYGRRHLQPHDAPGHGVRRASDPVRTGSEGLALPRVPRFSSLSSCNPPAMATSAEKRSLVLQNYTRPEGGQSRNFHSSPCPPSITENVTLESLTMDADANLNDEDFLPDDVVQYLNSQNQAGYEQHFPSALPDDSKVPHGPGDFDAPGLPDSHAGQQFHALEQPCPEGSKTDLPIQWNEVSSGSADLSSSKLKCGPRPAVPQTRAFGFCNGMVVHPQNPLRSGPAGGYQTLGENSNPYGGPEHLMLHNSPGSGTSGNAFHEQPCKAPQYGNCLNRQPVAPGALDGACGAGIQASKLKSTPMQGSGGQLNFGLPVAPNESAGSMVNGMQNQDPVGQGYLAHQLLGDSMQHPGAGRPGQQMLGQISATSHINIYQGPESCLPGAHGMGSQPSSLAVVRGYQPCASFGGSRRQAMPRDSLALQSGQLSDTSQTCRVNGIKMEMKGQPHPLCSNLQNYSGQFYDQTVGFSQQDTKAGSFSISDASCLLQGTSAKNSELLSPGANQVTSTVDSLDSHDLEGVQIDFDAIIDDGDHSSLMSGALSPSIIQNLSHSSSRLTTPRASLPFPALSMSTTNMAIGDMSSLLTSLAEESKFLAVMQ

SEQ ID NO: 15046 - protein, 376 aa, Homo sapiens
MAALGDIQESPSVPSPVSLSSPGTPGTQHHEPQLHLHGHQHGSPGSSPKVLSQPSDLDLQDVEEVEIGRDTFWPDSEPKPEQAPRSPGSQAPDEGAGGALRSLLRSLPRRARCSAGFGPESSAERPAGQPPGAVPCAQPRGAWRVTLVQQAAAGPEGAPERAAELGVNFGRSRQGSARGAKPHRCEACGKSFKYNSLLLKHQRIHTGEKPYACHECGKRFRGWSGFIQHHRIHTGEKPYECGQCGRAFSHSSHFTQHLRIHNGEKPYKCGECGQAFSQSSNLVRHQRLHTGEKPYACSQCGKAFIWSSVLIEHQRIHTGEKPYECSDCGKAFRGRSHFFRHLRTHTGEKPFACGACGKAFGQSSQLIQHQRVHYRE

SEQ ID NO: 15047 - protein, 620 aa, Homo sapiens
MAEARTSLSAHCRGPLATGLHPDLDLPGRSLATPAPSCYLLGSEPSSGLGLQPETHLPEGSLKRCCVLGLPPTSPASSSPCASSDVTSIIRSSQTSLVTCVNGLRSPPLTGDLGGPSKRARPGPASTDSHEGSLQLEACRKASFLKQEPADEFSELFGPHQQGLPPPYPLSQLPPGPSLGGLGLGLAGRVVAGRQACRWVDCCAAYEQQEELVRHIEKSHIDQRKGEDFTCFWAGCVRRYKPFNARYKLLIHMRVHSGEKPNKCMFEGCSKAFSRLENLKIHLRSHTGEKPYLCQHPGCQKAFSNSSDRAKHQRTHLDTKPYACQIPGCSKRYTDPSSLRKHVKAHSAKEQQVRKKLHAGPDTEADVLTECLVLQQLHTSTQLAASDGKGGCGLGQELLPGVYPGSITPHNGLASGLLPPAHDVPSRHHPLDATTSSHHHLSPLPMAESTRDGLGPGLLSPIVSPLKGLGPPPLPPSSQSHSPGGQPFPTLPSKPSYPPFQSPPPPPLPSPQGYQGSFHSIQSCFPYGDCYRMAEPAAGGDGLVGETHGFNPLRPNGYHSLSTPLPATGYEALAEASCPTALPQQPSEDVVSSGPEDCGFFPNGAFDHCLGHIPSIYTDT

SEQ ID NO: 15048 - protein, 524 aa, Homo sapiens
MHSLDEPLDLKLSITKLRAAREKRERTLGVVRPRALHRELGLVDDSPTPGSPGSPPSGFLLNSKFPEKVEGRFSAAPLVDLSLSPPSGLDSPNGSSSLSPERQGNGDLPPVPSASDFQPLRYLDGVPSSFQFFLPLGSGGALHLPASSFLTPPKDKCLSPDLPLPKQLVCRWAKCNQLFELLQDLVDHVNDYHVKPEKDAGYCCHWEGCARHGRGFNARYKMLIHIRTHTNEKPHRCPTCSKSFSRLENLKIHNRSHTGEKPYVCPYEGCNKRYSNSSDRFKHTRTHYVDKPYYCKMPGCHKRYTDPSSLRKHIKAHGHFVSHEQQELLQLRPPPKPPLPAPDGGPYVSGAQIIIPNPAALFGGPGLPGLPLPLAPGPLDLSALACGNGGGSGGGGGMGPGLPGPVLPLNLAKNPLLPSPFGAGGLGLPVVSLLAGAAGGKAEGEKGRGSVPTRALGMEGHKTPLERTESSCSRPSPDGLPLLPGTVLDLSTGVNSAASSPEALAPGWVVIPPGSVLLKPAVVN

SEQ ID NO: 15049 - protein, 775 aa, Homo sapiens; identical to SEQ ID NO: 6020

SEQ ID NO: 15050 - protein, 573 aa, Homo sapiens
MANAEVSVPVGDVVVVPTEGNEGENPEDTKTQVILQLQPVQQGLFIDGHFYNRIYEAGSENNTAVVAVETHTIHKIEEGIDTGTIEANEDMEIAYPITCGESKAILLWKKFVCPGINVKCVKFNDQLISPKHFVHLAGKSTLKDWKRAIRLGGIMLRKMMDSGQIDFYQHDKVCSNTCRSTKFDLLISSARAPVPGQQTSVVQTPTSADGSITQIAISEESMEEAGLEWNSALTAAVTMATEEGVKKDSEEISEDTLMFWKGIADVGLMEEVVCNIQKEIEELLRGVQQRLIQAPFQVTDAAVLNNVAHTFGLMDTVKKVLDNRRNQVEQGEEQFLYTLTDLERQLEEQKKQGQDHRLKSQTVQNVVLMPVSTPKPPKRPRLQRPASTTVLSPSPPVQQPQFTVISPITITPVGQSFSMGNIPVATLSQGSSPVTVHTLPSGPQLFRYATVVSSAKSSSPDTVTIHPSSSLALLSSTAMQDGSTLGNMTTMVSPVELVAMESGLTSAIQAVESTSEDGQTIIEIDPAPDPEAEDTEGKAVILETELRTEEKVVAEMEEHQHQVHNVEIVVLED

SEQ ID NO: 15051 - protein, 530 aa, Homo sapiens
MATPDVSVHMEEVVVVTTPDTAVDGSGVEGVKTVLVTTNLAPHGGDLTEDNMETENAAAAAAAAFTASSQLKEAVLVKMAEEGENLEAEIVYPITCGDSRANLIWRKFVCPGINVKCVQYDEHVISPKEFVHLAGKSTLKDWKRAIRMNGIMLRKIMDSGELDFYQHDKVCSNTCRSTKIDLSGARVSLSSPTSAEYIPLTPAAADVNGSPATITIETCEDPGDWTAAIGDDTFTFWRGLKDAGLLDEVIQEFHQELVETMRGLQQRVQDPPLQLRDAVLLNNIVQNFGMLDLVKKVLASHKCQMDRSREQYARDLAALEQQCDEHRRRAKELKHKSQHLSNVLMTLTPVSLPPPVKRPRLARATSGPAAMASQVLTQSAQLALGPGVPVPQLTSVPLGKVVSTLPSTVLGKGSLQAPPASSPASPLLGGYTVLASSGSTYPSTVEIHPDASSLTVLSTAAVQDGSTVFKVVSPLQLLTLPGLGPTLQNVAQASPGSSTIVTVPAGAAPGPEEHTATIEVAAMAEDHERK

SEQ ID NO: 15052 - protein, 2241 aa, Homo sapiens
MLPCKKRRTTVTESLQHKGNQEENNVDLESAVKPESDQVKDLSSVSLSWDPSHGRVAGFEVQSLQDAGNQLGMEDTSLSSGMLTQNTNVPILEGVDVAISQGITLPSLESFHPLNIHIGKGKLHATGSKRGKKMTLRPGPVTQEDRCDHLTLKEPFSGEPSEEVKEEGGKPQMNSEGEIPSLPSGSQSAKPVSQPRKSTQPDVCASPQEKPLRTLFHQPEEEIEDGGLFIPMEEQDNEESEKRRKKKKGTKRKRDGRGQEGTLAYDLKLDDMLDRTLEDGAKQHNLTAVNVRNILHEVITNEHVVAMMKAAISETEDMPMFEPKMTRSKLKEVVEKGVVIPTWNISPIKKANEIKPPQFVDIHLEEDDSSDEEYQPDDEEEDETAEESLLESDVESTASSPRGAKKSRLRQSSEMTETDEESGILSEAEKVTTPAIRHISAEVVPMGPPPPPKPKQTRDSTFMEKLHAVDEELASSPVCMDSFQPMDDSLIAFRTRSKMPLKDVPLGQLEAELQAPDITPDMYDPNTADDEDWKMWLGGLMNDDVGNEDEADDDDDPEYNFLEDLDEPDTEDFRTDRAVRITKKEVNELMEELFETFQDEMGFSNMEDDGPEEEECVAEPRPNFNTPQALRFEEPLANLLNEQHRTVKELFEQLKMKKSSAKQLQEVEKVKPQSEKVHQTLILDPAQRKRLQQQMQQHVQLLTQIHLLATCNPNLNPEATTTRIFLKELGTFAQSSIALHHQYNPKFQTLFQPCNLMGAMQLIEDFSTHVSIDCSPHKTVKKTANEFPCLPKQVAWILATSKVFMYPELLPVCSLKAKNPQDKIVFTKAEDNLLALGLKHFEGTEFPNPLISKYLLTCKTAHQLTVRIKNLNMNRAPDNIIKFYKKTKQLPVLGKCCEEIQPHQWKPPIEREEHRLPFWLKASLPSIQEELRHMADGAREVGNMTGTTEINSDRSLEKDNLELGSESRYPLLLPKGVVLKLKPVATRFPRKAWRQKRSSVLKPLLIQPSPSLQPSFNPGKTPARSTHSEAPPSKMVLRIPHPIQPATVLQTVPGVPPLGVSGGESFESPAALPAVPPEARTSFPLSESQTLLSSAPVPKVMLPSLAPSKFRKPYVRRRPSKRRGVKASPCMKPAPVIHHPASVIFTVPATTVKIVSLGGGCNMIQPVNAAVAQSPQTIPITTLLVNPTSFPCPLNQSLVASSVSPLIVSGNSVNLPIPSTPEDKAHVNVDIACAVADGENAFQGLEPKLEPQELSPLSATVFPKVEHSPGPPLADAECQEGLSENSACRWTVVKTEEGRQALEPLPQGIQESLNNPTPGDLEEIVKMEPEEAREEISGSPERDICDDIKVEHAVELDTGAPSEELSSAGEVTKQTVLQKEEERSQPTKTPSSSQEPPDEGTSGTDVNKGSSKNALSSMDPEVRLSSPPGKPEDSSSVDGQSVGTPVGPETGGEKNGPEEEEEEDFDDLTQDEEDEMSSASEESVLSVPELQETMEKLTWLASERRMSQEGESEEENSQEENSEPEEEEEEEAEGMESLQKEDEMTDEAVGDSAEKPPTFASPETAPEVETSRTPPGESIKAAGKGRNNHRARNKRGSRARASKDTSKLLLLYDEDILERDPLREQKDLAFAQAYLTRVREALQHIPGKYEDFLQVIYEFESSTQRRTAVDLYKSLQILLQDWPQLLKDFAAFLLPEQALACGLFEEQQAFEKSRKFLRQLEICFAENPSHHQKIIKVLQGCADCLPQEITELKTQMWQLLKGHDHLQDEFSIFFDHLRPAASRMGDFEEINWTEEKEYEFDGFEEVALPDVEEEEEPPKIPTASKNKRKKEIGVQNHDKETEWPDGAKDCACSCHEGGPDSKLKKSKRRSCSHCSSKVCDSKSYKSKEPHELVGSSPHREASPMPGAKEAGQGKDMMEEEAPEERESTEATQSRTVRTTRKGEMPVSAGLAVGSTLPSPREVTVTERLLLDGPPPHSPETPQFPPTTGAVLYTVKRNQVGPEVRSCPKASPRLQKEREGQKAVSESEALMLVWDASETEKLPGTVEPPASFLSPVSSKTRDAGRRHVSGKPDTQERWLPSSRARVKTRDRTCPVHESPSGIDTSETSPKAPRGGLAKDSGTQAKGPEGEQQPKAAEATVCANNSKVSSTGEKVVLWTREADRVILTMCQEQGAQPQTFNIISQQLGNKTPAEVSHRFRELMQLFHTACEASSEDEDDATSTSNADQLSDHGDLLSEEELDE

SEQ ID NO: 15053 - protein, 618 aa, Homo sapiens
MTQEYDNKRPVLVLQNEALYPQRRSYTSEDEAWKSFLENPLTAATKAMMSINGDEDSAAALGLLYDYYKVPRERRSSTAKPEVEHPEPDHSKRNSIPIVTEQPLISAGENRVQVLKNVPFNIVLPHGNQLGIDKRGHLTAPDTTVTVSIATMPTHSIKTETQPHGFAVGIPPAVYHPEPTERVVVFDRNLNTDQFSSGAQAPNAQRRTPDSTFSETFKEGVQEVFFPSDLSLRMPGMNSEDYVFDSVSGNNFEYTLEASKSLRQKPGDSTMTYLNKGQFYPITLKEVSSSEGIHHPISKVRSVIMVVFAEDKSREDQLRHWKYWHSRQHTAKQRCIDIADYKESFNTISNIEEIAYNAISFTWDINDEAKVFISVNCLSTDFSSQKGVKGLPLNIQVDTYSYNNRSNKPVHRAYCQIKVFCDKGAERKIRDEERKQSKRKVSDVKVPLLPSHKRMDITVFKPFIDLDTQPVLFIPDVHFANLQRGTHVLPIASEELEGEGSVLKRGPYGTEDDFAVPPSTKLARIEEPKRVLLYVRKESEEVFDALMLKTPSLKGLMEAISDKYDVPHDKIGKIFKKCKKGILVNMDDNIVKHYSNEDTFQLQIEEAGGSYKLTLTEI

SEQ ID NO: 15054 - protein, 625 aa, Homo sapiens
MSQESDNNKRLVALVPMPSDPPFNTRRAYTSEDEAWKSYLENPLTAATKAMMSINGDEDSAAALGLLYDYYKVPRDKRLLSVSKASDSQEDQEKRNCLGTSEAQSNLSGGENRVQVLKTVPVNLSLNQDHLENSKREQYSISFPESSAIIPVSGITVVKAEDFTPVFMAPPVHYPRGDGEEQRVVIFEQTQYDVPSLATHSAYLKDDQRSTPDSTYSESFKDAATEKFRSASVGAEEYMYDQTSSGTFQYTLEATKSLRQKQGEGPMTYLNKGQFYAITLSETGDNKCFRHPISKVRSVVMVVFSEDKNRDEQLKYWKYWHSRQHTAKQRVLDIADYKESFNTIGNIEEIAYNAVSFTWDVNEEAKIFITVNCLSTDFSSQKGVKGLPLMIQIDTYSYNNRSNKPIHRAYCQIKVFCDKGAERKIRDEERKQNRKKGKGQASQTQCNSSSDGKLAAIPLQKKSDITYFKTMPDLHSQPVLFIPDVHFANLQRTGQVYYNTDDEREGGSVLVKRMFRPMEEEFGPVPSKQMKEEGTKRVLLYVRKETDDVFDALMLKSPTVKGLMEAISEKYGLPVEKIAKLYKKSKKGILVNMDDNIIEHYSNEDTFILNMESMVEGFKVTLMEI

SEQ ID NO: 15055 - protein, 626 aa, Homo sapiens; identical to SEQ ID NO: 6192

SEQ ID NO: 15056 - protein, 257 aa, Homo sapiens
MPASMFSIDNILAARPRCKDSVLPVAHSAAAPVVFPALHGDSLYGASGGASSDYGAFYPRPVAPGGAGLPAAVSGSRLGYNNYFYGQLHVQAAPVGPACCGAVPPLGAQQCSCVPTPPGYEGPGSVLVSPVPHQMLPYMNVGTLSRTELQLLNQLHCRRKRRHRTIFTDEQLEALENLFQETKYPDVGTREQLARKVHLREEKVEVWFKNRRAKWRRQKRSSSEESENAEKWNKTSSSKASPEKREEEGKSDLDSDS

SEQ ID NO: 15057 - protein, 205 aa, Homo sapiens
MAAAAGGAASRRGAGRPCPFSIEHILSSLPERSLPARAACPPQPAGRQSPAKPEEPGAPEAAPCACCCCCGPRAAPCGPPEAAAGLGARLAWPLRLGPAVPLSLGAPAGGSGALPGAVGPGSQRRTRRHRTIFSEEQLQALEALFVQNQYPDVSTRERLAGRIRLREERVEVWFKNRRAKWRHQKRASASARLLPGVKKSPKGSC

SEQ ID NO: 15058 - protein, 264 aa, Homo sapiens
MPRSFLVDSLVLREAGEKKAPEGSPPPLFPYAVPPPHALHGLSPGACHARKAGLLCVCPLCVTASQLHGPPGPPALPLLKASFPPFGSQYCHAPLGRQHSAVSPGVAHGPAAAAAAAALYQTSYPLPDPRQFHCISVDSSSNQLPSSKRMRTAFTSTQLLELEREFASNMYLSRLRRIEIATYLNLSEKQVKIWFQNRRVKHKKEGKGSNHRGGGGGGAGGGGSAPQGCKCASLSSAKCSEDDDELPMSPSSSGKDDRDLTVTP

SEQ ID NO: 15059 - protein, 304 aa, Homo sapiens
MSRSFYVDSLIIKDTSRPAPSLPEPHPGPDFFIPLGMPPPLVMSVSGPGCPSRKSGAFCVCPLCVTSHLHSSRGSVGAGSGGAGAGVTGAGGSGVAGAAGALPLLKGQFSSAPGDAQFCPRVNHAHHHHHPPQHHHHHHQPQQPGSAAAAAAAAAAAAAAAALGHPQHHAPVCTATTYNVADPRRFHCLTMGGSDASQVPNGKRMRTAFTSTQLLELEREFSSNMYLSRLRRIEIATYLNLSEKQVKIWFQNRRVKHKKEGKGTQRNSHAGCKCVGSQVHYARSEDEDSLSPASANDDKEISPL

SEQ ID NO: 15060 - protein, 998 aa, Homo sapiens
MAQVAMSTLPVEDEESSESRMVVTFLMSALESMCKELAKSKAEVACIAVYETDVFVVGTERGRAFVNTRKDFQKDFVKYCVEEEEKAAEMHKMKSTTQANRMSVDAVEIETLRKTVEDYFCFCYGKALGKSTVVPVPYEKMLRDQSAVVVQGLPEGVAFKHPENYDLATLKWILENKAGISFIIKRPFLEPKKHVGGRVMVTDADRSILSPGGSCGPIKVKTEPTEDSGISLEMAAVTVKEESEDPDYYQYNIQAGPSETDDVDEKQPLSKPLQGSHHSSEGNEGTEMEVPAEDSTQHVPSETSEDPEVEVTIEDDDYSPPSKRPKANELPQPPVPEPANAGKRKVREFNFEKWNARITDLRKQVEELFERKYAQAIKAKGPVTIPYPLFQSHVEDLYVEGLPEGIPFRRPSTYGIPRLERILLAKERIRFVIKKHELLNSTREDLQLDKPASGVKEEWYARITKLRKMVDQLFCKKFAEALGSTEAKAVPYQKFEAHPNDLYVEGLPENIPFRSPSWYGIPRLEKIIQVGNRIKFVIKRPELLTHSTTEVTQPRTNTPVKEDWNVRITKLRKQVEEIFNLKFAQALGLTEAVKVPYPVFESNPEFLYVEGLPEGIPFRSPTWFGIPRLERIVRGSNKIKFVVKKPELVISYLPPGMASKINTKALQSPKRPRSPGSNSKVPEIEVTVEGPNNNNPQTSAVRTPTQTNGSNVPFKPRGREFSFEAWNAKITDLKQKVENLFNEKCGEALGLKQAVKVPFALFESFPEDFYVEGLPEGVPFRRPSTFGIPRLEKILRNKAKIKFIIKKPEMFETAIKESTSSKSPPRKINSSPNVNTTASGVEDLNIIQVTIPDDDNERLSKVEKARQLREQVNDLFSRKFGEAIGMGFPVKVPYRKITINPGCVVVDGMPPGVSFKAPSYLEISSMRRILDSAEFIKFTVIRPFPGLVINNQLVDQSESEGPVIQESAEPSQLEVPATEEIKETDGSSQIKQEPDPTW

SEQ ID NO: 15061 - protein, 365 aa, Homo sapiens
MDPPAVVAESVSSLTIADAFIAAGESSAPTPPRPALPRRFICSFPDCSANYSKAWKLDAHLCKHTGERPFVCDYEGCGKAFIRDYHLSRHILTHTGEKPFVCAANGCDQKFNTKSNLKKHFERKHENQQKQYICSFEDCKKTFKKHQQLKIHQCQHTNEPLFKCTQEGCGKHFASPSKLKRHAKAHEGYVCQKGCSFVAKTWTELLKHVRETHKEEILCEVCRKTFKRKDYLKQHMKTHAPERDVCRCPREGCGRTYTTVFNLQSHILSFHEESRPFVCEHAGCGKTFAMKQSLTRHAVVHDPDKKKMKLKVKKSREKRSLASHLSGYIPPKRKQGQGLSLCQNGESPNCVEDKMLSTVAVLTLG

SEQ ID NO: 15062 - protein, 711 aa, Homo sapiens
MESGAVLLESKSSPFNLLHEMHELRLLGHLCDVTVSVEYQGVRKDFMAHKAVLAATSKFFKEVFLNEKSVDGTRTNVYLNEVQVADFASFLEFVYTAKVQVEEDRVQRMLEVAEKLKCLDLSETCFQLKKQMLESVLLELQNFSESQEVEVSSGSQVSAAPAPRASVATDGPHPSGLTDSLDYPGERASNGMSSDLPPKKSKDKLDKKKEVVKPPYPKIRRASGRLAGRKVFVEIPKKKYTRRLREQQKTAEGDVGDYRCPQDQSPDRVGTEMEQVSKNEGCQAGAELEELSKKAGPEEEEEEEEEDEEGEKKKSNFKCSICEKAFLYEKSFLKHSKHRHGVATEVVYRCDTCGQTFANRCNLKSHQRHVHSSERHFPCELCGKKFKRKKDVKRHVLQVHEGGGERHRCGQCGKGLSSKTALRLHERTHTGDRPYGCTECGARFSQPSALKTHMRIHTGEKPFVCDECGARFTQNHMLIYHKRCHTGERPFMCETCGKSFASKEYLKHHNRIHTGSKPFKCEVCFRTFAQRNSLYQHIKVHTGERPYCCDQCGKQFTQLNALQRHRRIHTGERPFMCNACGRTFTDKSTLRRHTSIHDKNTPWKSFLVIVDGSPKNDDGHKTEQPDEEYVSSKLSDKLLSFAENGHFHNLAAVQDTVPTMQENSSADTACKADDSVVSQDTLLATTISELSELTPQTDSMPTQLHSLSNME

SEQ ID NO: 15063 - protein, 215 aa, Homo sapiens
MNLVGSYAHHHHHHHPHPAHPMLHEPFLFGPASRCHQERPYFQSWLLSPADAAPDFPAGGPPPAAAAAATAYGPDARPGQSPGRLEALGGRLGRRKGSGPKKERRRTESINSAFAELRECIPNVPADTKLSKIKTLRLATSYIAYLMDVLAKDAQSGDPEAFKAELKKADGGRESKRKRELQQHEGFPPALGPVEKRIKGRTGWPQQVWALELNQ

SEQ ID NO: 15064 - protein, 217 aa, Homo sapiens
MSLVGGFPHHPVVHHEGYPFAAAAAAAAAAAASRCSHEENPYFHGWLIGHPEMSPPDYSMALSYSPEYASGAAGLDHSHYGGVPPGAGPPGLGGPRPVKRRGTANRKERRRTQSINSAFAELRECIPNVPADTKLSKIKTLRLATSYIAYLMDLLAKDDQNGEAEAFKAEIKKTDVKEEKRKKELNEILKSTVSSNDKKTKGRTGWPQHVWALELKQ

SEQ ID NO: 15065 - protein, 514 aa, Homo sapiens
MVWEVKTNQMPNAVQKLLLVMDKRASGMNDSLELLQCNENLPSSPGYNSCDEHMELDDLPELQAVQSDPTQSGMYQLSSDVSHQEYPRSSWNQNTSDIPETTYRENEVDWLTELANIATSPQSPLMQCSFYNRSSPVHIIATSKSLHSYARPPPVSSSSKSEPAFPHHHWKEETPVRHERANSESESGIFCMSSLSDDDDLGWCNSWPSTVWHCFLKGTRLCFHKGSNKEWQDVEDFARAEGCDNEEDLQMGIHKGYGSDGLKLLSHEESVSFGESVLKLTFDPGTVEDGLLTVECKLDHPFYVKNKGWSSFYPSLTVVQHGIPCCEVHIGDVCLPPGHPDAINFDDSGVFDTFKSYDFTPMDSSAVYVLSSMARQRRASLSCGGPGGQDFARSGFSKNCGSPGSSQLSSNSLYAKAVKNHSSGTVSATSPNKCKRPMNAFMLFAKKYRVEYTQMYPGKDNRAISVILGDRWKKMKNEERRMYTLEAKALAEEQKRLNPDCWKRKRTNSGSQQH

SEQ ID NO: 15066 - protein, 184 aa, Homo sapiens
MKALGAVLLALLLCGRPGRGQTQQEEEEEDEDHGPDDYDEEDEDEVEEEETNRLPGGRSRVLLRCYTCKSLPRDERCNLTQNCSHGQTCTTLIAHGNTESGLLTTHSTWCTDSCQPITKTVEGTQVTMTCCQSSLCNVPPWQSSRVQDPTGKGAGGPRGSSETVGAALLLNLLAGLGAMGARRP

SEQ ID NO: 15067 - protein, 690 aa, Homo sapiens
MNLRSVFTVEQQRILQRYYENGMTNQSKNCFQLILQCAQETKLDFSVVRTWVGNKRRKMSSKNSESGTATTGTSLSAPDITVRNVVNIARPSSQQSSWTSANNDVIVTGIYSPASSSSRQGTNKHTDTQITEAHKIPIQKTATKNDTEFQLHIPVQRQVAHCKNASLLLGEKTIILSRQTSVLNAGNSVFNHAKKNYGNSSVQASEMTVPQKPSVCHRPCKIEPVGIQRSYKPEHTGPALHNLCGQKPTIRDPYCRTQNLEIREVFSLAVSDYPQRILGGNAPQKPSSAEGNCLSIAMETGDAEDEYAREEELASMRAQIPSYSRFYESGSSLRAENQSTTLPGPGRNMPNSQMVNIRDMSDNVLYQNRNYHLTPRTSLHTASSTMYSNTNPLRSNFSPHFASSNQLRLSQNQNNYQISGNLTVPWITGCSRKRALQDRTQFSDRDLATLKKYWDNGMTSLGSVCREKIEAVATELNVDCEIVRTWIGNRRRKYRLMGIEVPPPRGGPADFSEQPESGSLSALTPGEEAGPEVGEDNDRNDEVSICLSEGSSQEEPNEVVPNDARAHKEEDHHAVTTDNVKIEIIDDEESDMISNSEVEQVNSFLDYKNEEVKFIENELEIQKQKYFKLQTFVRSLILAMKADDKEQQQALLSDLPPELEEMDFNHASLEPDDTSFSVSSLSEKNVSESL

SEQ ID NO: 15068 - protein, 242 aa, Homo sapiens
MSDKLKERKRTPVSHKVIEKRRRDRINRCLNELGKTVPMALAKQSSGKLEKAEILEMTVQYLRALHSADFPRGREKAELLAEFANYFHYGYHECMKNLVHYLTTVERMETKDTKYARILAFLQSKARLGAEPAFPPLGSLPEPDFSYQLHPAGPEFAGHSPGEAAVFPQGSGAGPFPWPPGAARSPALPYLPSAPVPLASPAQQHSPFLTPVQGLDRHYLNLIGHAHPNALNLHTPQHPPVL

SEQ ID NO: 15069 - protein, 268 aa, Homo sapiens; identical to SEQ ID NO: 5537

SEQ ID NO: 15070 - protein, 280 aa, Homo sapiens
MPADIMEKNSSSPVAATPASVNTTPDKPKTASEHRKSSKPIMEKRRRARINESLSQLKTLILDALKKDSSRHSKLEKADILEMTVKHLRNLQRAQMTAALSTDPSVLGKYRAGFSECMNEVTRFLSTCEGVNTEVRTRLLGHLANCMTQINAMTYPGQPHPALQAPPPPPPGPGGPQHAPFAPPPPLVPIPGGAAPPPGGAPCKLGSQAGEAAKVFGGFQVVPAPDGQFAFLIPNGAFAHSGPVIPVYTSNSGTSVGPNAVSPSSGPSLTADSMWRPWRN

SEQ ID NO: 15071 - protein, 173 aa, Homo sapiens
MGLPRRAGDAAELRKSLKPLLEKRRRARINQSLSQLKGLILPLLGRENSNCSKLEKADVLEMTVRFLQELPASSWPTAAPLPCDSYREGYSACVARLARVLPACRVLEPAVSARLLEHLWRRAASATLDGGRAGDSSGPSAPAPAPASAPEPASAPVPSPPSPPCGPGLWRPW

SEQ ID NO: 15072 - protein, 186 aa, Homo sapiens
MEKKRRARINVSLEQLKSLLEKHYSHQIRKRKLEKADILELSVKYMRSLQNSLQGLWPVPRGAEQPSGFRSCLPGVSQLLRRGDEVGSGLRCPLVPESAAGSTMDSAGLGQEAPALFRPCTPAVWAPAPAAGGPRSPPPLLLLPESLPGSSASVPPPQPASSRCAESPGLGLRVWRPWGSPGDDLN

SEQ ID NO: 15073 - protein, 221 aa, Homo sapiens
MAADTPGKPSASPMAGAPASASRTPDKPRSAAEHRKSSKPVMEKRRRARINESLAQLKTLILDALRKESSRHSKLEKADILEMTVRHLRSLRRVQVTAALSADPAVLGKYRAGFHECLAEVNRFLAGCEGVPADVRSRLLGHLAACLRQLGPSRRPASLSPAAPAEAPAPEVYAGRPLLPSLGGPFPLLAPPLLPGLTRALPAAPRAGPQGPGGPWRPWLR

SEQ ID NO: 15074 - protein, 166 aa, Homo sapiens
MAPSTVAVELLSPKEKNRLRKPVVEKMRRDRINSSIEQLKLLLEQEFARHQPNSKLEKADILEMAVSYLKHSKAFVAAAGPKSLHQDYSEGYSWCLQEAVQFLTLHAASDTQMKLLYHFQRPPAAPAAPAKEPKAPGAAPPPALSAKATAAAAAAHQPACGLWRPW

SEQ ID NO: 15075 - protein, 224 aa, Homo sapiens
MAPPAAPGRDRVGREDEDGWETRGDRKARKPLVEKKRRARINESLQELRLLLAGAEVQAKLENAEVLELTVRRVQGVLRGRAREREQLQAEASERFAAGYIQCMHEVHTFVSTCQAIDATVAAELLNHLLESMPLREGSSFQDLLGDALAGPPRAPGRSGWPAGGAPGSPIPSPPGPGDDLCSDLEEAPEAELSQAPAEGPDLVPAALGSLTTAQIARSVWRPW

SEQ ID NO: 15076 - protein, 225 aa, Homo sapiens
MVTRDRAENRDGPKMLKPLVEKRRRDRINRSLEELRLLLLERTRDQNLRNPKLEKAEILEFAVGYLRERSRVEPPGVPRSPVQDAEALASCYLSGFRECLLRLAAFAHDASPAARAQLFSALHGYLRPKPPRPKPVDPRPPAPRPSLDPAAPALGPALHQRPPVHQGHPSPRCAWSPSLCSPRAGDSGAPAPLTGLLPPPPPPHRQDGAPKAPLPPPPAFWRPWP

SEQ ID NO: 15077 - protein, 185 aa, Homo sapiens
MSPSLQEGAQLGENKPSTCSFSIERILGLDQKKDCVPLMKPHRPWADTCSSSGKDGNLCLHVPNPPSGISFPSVVDHPMPEERASKYENYFSASERLSLKRELSWYRGRRPRTAFTQNQIEVLENVFRVNCYPGIDIREDLAQKLNLEEDRIQIWFQNRRAKLKRSHRESQFLMAKKNFNTNLLE

SEQ ID NO: 15078 - protein, 304 aa, Homo sapiens
MKRAHPEYSSSDSELDETIEVEKESADENGNLSSALGSMSPTTSSQILARKRRRGIIEKRRRDRINNSLSELRRLVPSAFEKQGSAKLEKAEILQMTVDHLKMLHTAGGKGYFDAHALAMDYRSLGFRECLAEVARYLSIIEGLDASDPLRVRLVSHLNNYASQREAASGAHAGLGHIPWGTVFGHHPHIAHPLLLPQNGHGNAGTTASPTEPHHQGRLGSAHPEAPALRAPPSGSLGPVLPVVTSASKLSPPLLSSVASLSAFPFSFGSFHLLSPNALSPSAPTQAANLGKPYRPWGTEIGAF

SEQ ID NO: 15079 - protein, 337 aa, Homo sapiens
MKRPCEETTSESDMDETIDVGSENNYSGQSTSSVIRLNSPTTTSQIMARKKRRGIIEKRRRDRINNSLSELRRLVPTAFEKQGSAKLEKAEILQMTVDHLKMLQATGGKGYFDAHALAMDFMSIGFRECLTEVARYLSSVEGLDSSDPLRVRLVSHLSTCATQREAAAMTSSMAHHHHPLHPHHWAAAFHHLPAALLQPNGLHASESTPCRLSTTSEVPPAHGSALLTATFAHADSALRMPSTGSVAPCVPPLSTSLLSLSATVHAAAAAATAAAHSFPLSFAGAFPMLPPNAAAAVAAATAISPPLSVSATSSPQQTSSGTNNKPYRPWGTEVGAF

SEQ ID NO: 15080 - protein, 328 aa, Homo sapiens
MKRPKEPSGSDGESDGPIDVGQEGQLSQMARPLSTPSSSQMQARKKHRGIIEKRRRDRINSSLSELRRLVPTAFEKQGSSKLEKAEVLQMTVDHLKMLHATGGTGFFDARALAVDFRSIGFRECLTEVIRYLGVLEGPSSRADPVRIRLLSHLNSYAAEMEPSPTPTGPLAFPAWPWSFFHSCPGLPALSNQLAILGRVPSPVLPGVSSPAYPIPALRTAPLRRATGIILPARRNVLPSRGASSTRRARPLERPATPVPVAPSSRAARSSHIAPLLQSSSPTPPGPTGSAAYVAVPTPNSSSPGPAGRPAGAMLYHSWVSEITEIGAF

SEQ ID NO: 15081 - protein, 270 aa, Homo sapiens
MQYPHPGPAAGAVGVPLYAPTPLLQPAHPTPFYIEDILGRGPAAPTPAPTLPSPNSSFTSLVSPYRTPVYEPTPIHPAFSHHSAAALAAAYGPGGFGGPLYPFPRTVNDYTHALLRHDPLGKPLLWSPFLQRPLHKRKGGQVRFSNDQTIELEKKFETQKYLSPPERKRLAKMLQLSERQVKTWFQNRRAKWRRLKQENPQSNKKEELESLDSSCDQRQDLPSEQNKGASLDSSQCSPSPASQEDLESEISEDSDQEVDIEGDKSYFNAG

SEQ ID NO: 15082 - protein, 733 aa, Homo sapiens
MTFPEADILLKSGECAGQTMLDTMEAPGHSRQLLLQLNNQRTKGFLCDVIIVVQNALFRAHKNVLAASSAYLKSLVVHDNLLNLDHDMVSPAVFRLVLDFIYTGRLADGAEAAAAAAVAPGAEPSLGAVLAAASYLQIPDLVALCKKRLKRHGKYCHLRGGGGGGGGYAPYGRPGRGLRAATPVIQACYPSPVGPPPPPAAEPPSGPEAAVNTHCAELYASGPGPAAALCASERRCSPLCGLDLSKKSPPGSAAPERPLAERELPPRPDSPPSAGPAAYKEPPLALPSLPPLPFQKLEEAAPPSDPFRGGSGSPGPEPPGRPDGPSLLYRWMKHEPGLGSYGDELGRERGSPSERCEERGGDAAVSPGGPPLGLAPPPRYPGSLDGPGAGGDGDDYKSSSEETGSSEDPSPPGGHLEGYPCPHLAYGEPESFGDNLYVCIPCGKGFPSSEQLNAHVEAHVEEEEALYGRAEAAEVAAGAAGLGPPFGGGGDKVAGAPGGLGELLRPYRCASCDKSYKDPATLRQHEKTHWLTRPYPCTICGKKFTQRGTMTRHMRSHLGLKPFACDACGMRFTRQYRLTEHMRIHSGEKPYECQVCGGKFAQQRNLISHMKMHAVGGAAGAAGALAGLGGLPGVPGPDGKGKLDFPEGVFAVARLTAEQLSLKQQDKAAAAELLAQTTHFLHDPKVALESLYPLAKFTAELGLSPDKAAEVLSQGAHLAAGPDGRTIDRFSPT

SEQ ID NO: 15083 - protein, 615 aa, Homo sapiens
MVSGPLALRWCAWAGRGDMGPDMELPSHSKQLLLQLNQQRTKGFLCDVIIMVENSIFRAHKNVLAASSIYFKSLVLHDNLINLDTDMVSSTVFQQILDFIYTGKLLPSDQPAEPNFSTLLTAASYLQLPELAALCRRKLKRAGKPFGSGRAGSTGMGRPPRSQRLSTASVIQARYQGLVDGRKGAHAPQELPQAKGSDDELFLGGSNQDSVQGLGRAVCPAGGEAGLGGCSSSTNGSSGGCEQELGLDLSKKSPPLPPATPGPHLTPDDAAQLSDSQHGSPPAASAPPVANSASYSELGGTPDEPMDLEGAEDNHLSLLEAPGGQPRKSLRHSTRKKEWGKKEPVAGSPFERREAGPKGPCPGEEGEGVGDRVPNGILASGAGPSGPYGEPPYPCKEEEENGKDASEDSAQSGSEGGSGHASAHYMYRQEGYETVSYGDNLYVCIPCAKGFPSSEQLNAHVETHTEEELFIKEEGAYETGSGGAEEEAEDLSAPSAAYTAEPRPFKCSVCEKTYKDPATLRQHEKTHWLTRPFPCNICGKMFTQRGTMTRHMRSHLGLKPFACDECGMRFTRQYRLTEHMRVHSGEKPYECQLCGGKFTQQRNLISHLRMHTSPS

SEQ ID NO: 15084 - protein, 826 aa, Homo sapiens
MEGAGGANDKKKISSERRKEKSRDAARSRRSKESEVFYELAHQLPLPHNVSSHLDKASVMRLTISYLRVRKLLDAGDLDIEDDMKAQMNCFYLKALDGFVMVLTDDGDMIYISDNVNKYMGLTQFELTGHSVFDFTHPCDHEEMREMLTHRNGLVKKGKEQNTQRSFFLRMKCTLTSRGRTMNIKSATWKVLHCTGHIHVYDTNSNQPQCGYKKPPMTCLVLICEPIPHPSNIEIPLDSKTFLSRHSLDMKFSYCDERITELMGYEPEELLGRSIYEYYHALDSDHLTKTHHDMFTKGQVTTGQYRMLAKRGGYVWVETQATVIYNTKNSQPQCIVCVNYVVSGIIQHDLIFSLQQTECVLKPVESSDMKMTQLFTKVESEDTSSLFDKLKKEPDALTLLAPAAGDTIISLDFGSNDTETDDQQLEEVPLYNDVMLPSPNEKLQNINLAMSPLPTAETPKPLRSSADPALNQEVALKLEPNPESLELSFTMPQIQDQTPSPSDGSTRQSSPEPNSPSEYCFYVDSDMVNEFKLELVEKLFAEDTEAKNPFSTQDTDLDLEMLAPYIPMDDDFQLRSFDQLSPLESSSASPESASPQSTVTVFQQTQIQEPTANATTTTATTDELKTVTKDRMEDIKILIASPSPTHIHKETTSATSSPYRDTQSRTASPNRAGKGVIEQTEKSHPRSPNVLSVALSQRTTVPEEELNPKILALQNAQRKRKMEHDGSLFQAVGIGTLLQQPDDHAATTSLSWKRVKGCKSSEQNGMEQKTIILIPSDLACRLLGQSMDESGLPQLTSYDCEVNAPIQGSRNLLQGEELLRALDQVN

SEQ ID NO: 15085 - protein, 669 aa, Homo sapiens
MALGLQRARSTTELRKEKSRDAARSRRSQETEVLYQLAHTLPFARGVSAHLDKASIMRLTISYLRMHRLCAAGEWNQVGAGGEPLDACYLKALEGFVMVLTAEGDMAYLSENVSKHLGLSQLELIGHSIFDFIHPCDQEELQDALTPQQTLSRRKVEAPTERCFSLRMKSTLTSRGRTLNLKAATWKVLNCSGHMRAYKPPAQTSPAGSPDSEPPLQCLVLICEAIPHPGSLEPPLGRGAFLSRHSLDMKFTYCDDRIAEVAGYSPDDLIGCSAYEYIHALDSDAVSKSIHTLLSKGQAVTGQYRFLARSGGYLWTQTQATVVSGGRGPQSESIVCVHFLISQVEETGVVLSLEQTEQHSRRPIQRGAPSQKDTPNPGDSLDTPGPRILAFLHPPSLSEAALAADPRRFCSPDLRRLLGPILDGASVAATPSTPLATRHPQSPLSADLPDELPVGTENVHRLFTSGKDTEAVETDLDIAQDADALDLEMLAPYISMDDDFQLNASEQLPRAYHRPLGAVPRPRARSFHGLSPPALEPSLLPRWGSDPRLSCSSPSRGDPSASSPMAGARKRTLAQSSEDEDEGVELLGVRPPKRSPSPEHENFLLFPLSLSFLLTGGPAPGSLQDPSTPLLNLNEPLGLGPSLLSPYSDEDTTQPGGPFQPRAGSAQAD

SEQ ID NO: 15086 - protein, 517 aa, Homo sapiens
MPPPGKVPRKENLWLQCEWGSCSFVCSTMEKFFEHVTQHLQQHLHGSGEEEEEEEEDDPLEEEFSCLWQECGFCSLDSSADLIRHVYFHCYHTKLKQWGLQALQSQADLGPCILDFQSRNVIPDIPDHFLCLWEHCENSFDNPEWFYRHVEAHSLCCEYEAVGKDNPVVLCGWKGCTCTFKDRSKLREHLRSHTQEKVVACPTCGGMFANNTKFLDHIRRQTSLDQQHFQCSHCSKRFATERLLRDHMRNHVNHYKCPLCDMTCPLPSSLRNHMRFRHSEDRPFKCDCCDYSCKNLIDLQKHLDTHSEEPAYRCDFENCTFSARSLCSIKSHYRKVHEGDSEPRYKCHVCDKCFTRGNNLTVHLRKKHQFKWPSGHPRFRYKEHEDGYMRLQLVRYESVELTQQLLRQPQEGSGLGTSLNESSLQGIILETVPGEPGRKEEEEEGKGSEGTALSASQDNPSSVIHVVNQTNAQGQQEIVYYVLSEAPGEPPPAPEPPSGGIMEKLQGIAEEPEIQMV

SEQ ID NO: 15087 - protein, 2718 aa, Homo sapiens
MPRTKQIHPRNLRDKIEEAQKELNGAEVSKKEILQAGVKGTSESLKGVKRKKIVAENHLKKIPKSPLRNPLQAKHKQNTEESSFAVLHSASESHKKQNYIPVKNGKQFTKQNGETPGIIAEASKSEESVSPKKPLFLQQPSELRRWRSEGADPAKFSDLDEQCDSSSLSSKTRTDNSECISSHCGTTSPSYTNTAFDVLLKAMEPELSTLSQKGSPCAIKTEKLRPNKTARSPPKLKNSSMDAPNQTSQELVAESQSSCTSYTVHMSAAQKNEQGAMQSASHLYHQHEHFVPKSNQHNQQLPGCSGFTGSLTNLQNQENAKLEQVYNIAVTSSVGLTSPSSRSQVTPQNQQMDSASPLSISPANSTQSPPMPIYNSTHVASVVNQSVEQMCNLLLKDQKPKKQGKYICEYCNRACAKPSVLLKHIRSHTGERPYPCVTCGFSFKTKSNLYKHKKSHAHTIKLGLVLQPDAGGLFLSHESPKALSIHSDVEDSGESEEEGATDERQHDLGAMELQPVHIIKRMSNAETLLKSSFTPSSPENVIGDFLLQDRSAESQAVTELPKVVVHHVTVSPLRTDSPKAMDPKPELSSAQKQKDLQVTNVQPLSANMSQGGVSRLETNENSHQKGDMNPLEGKQDSHVGTVHAQLQRQQATDYSQEQQGKLLSPRSLGSTDSGYFSRSESADQTVSPPTPFARRLPSTEQDSGRSNGPSAALVTTSTPSALPTGEKALLLPGQMRPPLATKTLEERISKLISDNEALVDDKQLDSVKPRRTSLSRRGSIDSPKSYIFKDSFQFDLKPVGRRTSSSSDIPKSPFTPTEKSKQVFLLSVPSLDCLPITRSNSMPTTGYSAVPANIIPPPHPLRGSQSFDDKIGTFYDDVFVSGPNAPVPQSGHPRTLVRQAAIEDSSANESHVLGTGQSLDESHQGCHAAGEAMSVRSKALAQGPHIEKKKSHQGRGTMFECETCRNRYRKLENFENHKKFYCSELHGPKTKVAMREPEHSPVPGGLQPQILHYRVAGSSGIWEQTPQIRKRRKMKSVGDDEELQQNESGTSPKSSEGLQFQNALGCNPSLPKHNVTIRSDQQHKNIQLQNSHIHLVARGPEQTMDPKLSTIMEQQISSAAQDKIELQRHGTGISVIQHTNSLSRPNSFDKPEPFERASPVSFQELNRTGKSGSLKVIGISQEESHPSRDGSHPHQLALSDALRGELQESSRKSPSERHVLGQPSRLVRQHNIQVPEILVTEEPDRDLEAQCHDQEKSEKFSWPQRSETLSKLPTEKLPPKKKRLRLAEIEHSSTESSFDSTLSRSLSRESSLSHTSSFSASLDIEDVSKTEASPKIDFLNKAEFLMIPAGLNTLNVPGCHREMRRTASEQINCTQTSMEVSDLRSKSFDCGSITPPQTTPLTELQPPSSPSRVGVTGHVPLLERRRGPLVRQISLNIAPDSHLSPVHPTSFQNTALPSVNAVPYQGPQLTSTSLAEFSANTLHSQTQVKDLQAETSNSSSTNVFPVQQLCDINLLNQIHAPPSHQSTQLSLQVSTQGSKPDKNSVLSGSSKSEDCFAPKYQLHCQVFTSGPSCSSNPVHSLPNQVISDPVGTDHCVTSATLPTKLIDSMSNSHPLLPPELRPLGSQVQKVPSSFMLPIRLQSSVPAYCFATLTSLPQILVTQDLPNQPICQTNHSVVPISEEQNSVPTLQKGHQNALPNPEKEFLCENVFSEMSQNSSLSESLPITQKISVGRLSPQQESSASSKRMLSPANSLDIAMEKHQKRAKDENGAVCATDVRPLEALSSRVNEASKQKKPILVRQVCTTEPLDGVMLEKDVFSQPEISNEAVNLTNVLPADNSSTGCSKFVVIEPISELQEFENIKSSTSLTLTVRSSPAPSENTHISPLKCTDNNQERKSPGVKNQGDKVNIQEQSQQPVTSLSLFNIKDTQQLAFPSLKTTTNFTWCYLLRQKSLHLPQKDQKTSAYTDWTVSASNPNPLGLPTKVALALLNSKQNTGKSLYCQAITTHSKSDLLVYSSKWKSSLSKRALGNQKSTVVEFSNKDASEINSEQDKENSLIKSEPRRIKIFDGGYKSNEEYVYVRGRGRGKYICEECGIRCKKPSMLKKHIRTHTDVRPYHCTYCNFSFKTKGNLTKHMKSKAHSKKCVDLGVSVGLIDEQDTEESDEKQRFSYERSGYDLEESDGPDEDDNENEDDDEDSQAESVLSATPSVTASPQHLPSRSSLQDPVSTDEDVRITDCFSGVHTDPMDVLPRALLTRMTVLSTAQSDYNRKTLSPGKARQRAARDENDTIPSVDTSRSPCHQMSVDYPESEEILRSSMAGKAVAITQSPSSVRLPPAAAEHSPQTAAGMPSVASPHPDPQEQKQQITLQPTPGLPSPHTHLFSHLPLHSQQQSRTPYNMVPVGGIHVVPAGLTYSTFVPLQAGPVQLTIPAVSVVHRTLGTHRNTVTEVSGTTNPAGVAELSSVVPCIPIGQIRVPGLQNLSTPGLQSLPSLSMETVNIVGLANTNMAPQVHPPGLALNAVGLQVLTANPSSQSSPAPQAHIPGLQILNIALPTLIPSVSQVAVDAQGAPEMPASQSKACETQPKQTSVASANQVSRTESPQGLPTVQRENAKKVLNPPAPAGDHARLDGLSKMDTEKAASANHVKPKPELTSIQGQPASTSQPLLKAHSEVFTKPSGQQTLSPDRQVPRPTALPRRQPTVHFSDVSSDDDEDRLVIAT

SEQ ID NO: 15088 - protein, 2446 aa, Homo sapiens
MDTGDTALGQKATSRSGETDKASGRWRQEQSAVIKMSTFGSHEGQRQPQIEPEQIGNTASAQLFGSGKLASPSEVVQQVAEKQYPPHRPSPYSCQHSLSFPQHSLPQGVMHSTKPHQSLEGPPWLFPGPLPSVASEDLFPFPIHGHSGGYPRKKISSLNPAYSQYSQKSIEQAEEAHKKEHKPKKPGKYICPYCSRACAKPSVLKKHIRSHTGERPYPCIPCGFSFKTKSNLYKHRKSHAHAIKAGLVPFTESAVSKLDLEAGFIDVEAEIHSDGEQSTDTDEESSLFAEASDKMSPGPPIPLDIASRGGYHGSLEESLGGPMKVPILIIPKSGIPLPNESSQYIGPDMLPNPSLNTKADDSHTVKQKLALRLSEKKGQDSEPSLNLLSPHSKGSTDSGYFSRSESAEQQISPPNTNAKSYEEIIFGKYCRLSPRNALSVTTTSQERAAMGRKGIMEPLPHVNTRLDVKMFEDPVSQLIPSKGDVDPSQTSMLKSTKFNSESRQPQIIPSSIRNEGKLYPANFQGSNPVLLEAPVDSSPLIRSNSVPTSSATNLTIPPSLRGSHSFDERMTGSDDVFYPGTVGIPPQRMLRRQAAFELPSVQEGHVEVEHHGRMLKGISSSSLKEKKLSPGDRVGYDYDVCRKPYKKWEDSETPKQNYRDISCLSSLKHGGEYFMDPVVPLQGVPSMFGTTCENRKRRKEKSVGDEEDTPMICSSIVSTPVGIMASDYDPKLQMQEGVRSGFAMAGHENLSHGHTERFDPCRPQLQPGSPSLVSEESPSAIDSDKMSDLGGRKPPGNVISVIQHTNSLSRPNSFERSESAELVACTQDKAPSPSETCDSEISEAPVSPEWAPPGDGAESGGKPSPSQQVQQQSYHTQPRLVRQHNIQVPEIRVTEEPDKPEKEKEAQSKEPEKPVEEFQWPQRSETLSQLPAEKLPPKKKRLRLADMEHSSGESSFESTGTGLSRSPSQESNLSHSSSFSMSFEREETSKLSALPKQDEFGKHSEFLTVPAGSYSLSVPGHHHQKEMRRCSSEQMPCPHPAEVPEVRSKSFDYGNLSHAPVSGAAASTVSPSRERKKCFLVRQASFSGSPEISQGEVGMDQSVKQEQLEHLHAGLRSGWHHGPPAVLPPLQQEDPGKQVAGPCPPLSSGPLHLAQPQIMHMDSQESLRNPLIQPTSYMTSKHLPEQPHLFPHQETIPFSPIQNALFQFQYPTVCMVHLPAQQPPWWQAHFPHPFAQHPQKSYGKPSFQTEIHSSYPLEHVAEHTGKKPAEYAHTKEQTYPCYSGASGLHPKNLLPKFPSDQSSKSTETPSEQVLQEDFASANAGSLQSLPGTVVPVRIQTHVPSYGSVMYTSISQILGQNSPAIVICKVDENMTQRTLVTNAAMQGIGFNIAQVLGQHAGLEKYPIWKAPQTLPLGLESSIPLCLPSTSDSVATLGGSKRMLSPASSLELFMETKQQKRVKEEKMYGQIVEELSAVELTNSDIKKDLSRPQKPQLVRQGCASEPKDGLQSGSSSFSSLSPSSSQDYPSVSPSSREPFLPSKEMLSGSRAPLPGQKSSGPSESKESSDELDIDETASDMSMSPQSSSLPAGDGQLEEEGKGHKRPVGMLVRMASAPSGNVADSTLLLTDMADFQQILQFPSLRTTTTVSWCFLNYTKPNYVQQATFKSSVYASWCISSCNPNPSGLNTKTTLALLRSKQKITAEIYTLAAMHRPGTGKLTSSSAWKQFTQMKPDASFLFGSKLERKLVGNILKERGKGDIHGDKDIGSKQTEPIRIKIFEGGYKSNEDYVYVRGRGRGKYICEECGIRCKKPSMLKKHIRTHTDVRPYVCKLCNFAFKTKGNLTKHMKSKAHMKKCLELGVSMTSVDDTETEEAENLEDLHKAAEKHSMSSISTDHQFSDAEESDGEDGDDNDDDDEDEDDFDDQGDLTPKTRSRSTSPQPPRFSSLPVNVGAVPHGVPSDSSLGHSSLISYLVTLPSIRVTQLMTPSDSCEDTQMTEYQRLFQSKSTDSEPDKDRLDIPSCMDEECMLPSEPSSSPRDFSPSSHHSSPGYDSSPCRDNSPKRYLIPKGDLSPRRHLSPRRDLSPMRHLSPRKEAALRREMSQRDVSPRRHLSPRRPVSPGKDITARRDLSPRRERRYMTTIRAPSPRRALYHNPPLSMGQYLQAEPIVLGPPNLRRGLPQVPYFSLYGDQEGAYEHPGSSLFPEGPNDYVFSHLPLHSQQQVRAPIPMVPVGGIQMVHSMPPALSSLHPSPTLPLPMEGFEEKKGASGESFSKDPYVLSKQHEKRGPHALQSSGPPSTPSSPRLLMKQSTSEDSLNATEREQEENIQTCTKAIASLRIATEEAALLGPDQPARVQEPHQNPLGSAHVSIRHFSRPEPGQPCTSATHPDLHDGEKDNFGTSQTPLAHSTFYSKSCVDDKQLDFHSSKELSSSTEESKDPSSEKSQLH

SEQ ID NO: 15089 - protein, 2406 aa, Homo sapiens
MDPEQSVKGTKKAEGSPRKRLTKGEAIQTSVSSSVPYPGSGTAATQESPAQELLAPQPFPGPSSVLREGSQEKTGQQQKPPKRPPIEASVHISQLPQHPLTPAFMSPGKPEHLLEGSTWQLVDPMRPGPSGSFVAPGLHPQSQLLPSHASIIPPEDLPGVPKVFVPRPSQVSLKPTEEAHKKERKPQKPGKYICQYCSRPCAKPSVLQKHIRSHTGERPYPCGPCGFSFKTKSNLYKHRKSHAHRIKAGLASGMGGEMYPHGLEMERIPGEEFEEPTEGESTDSEEETSATSGHPAELSPRPKQPLLSSGLYSSGSHSSSHERCSLSQSSTAQSLEDPPPFVEPSSEHPLSHKPEDTHTIKQKLALRLSERKKVIDEQAFLSPGSKGSTESGYFSRSESAEQQVSPPNTNAKSYAEIIFGKCGRIGQRTAMLTATSTQPLLPLSTEDKPSLVPLSVPRTQVIEHITKLITINEAVVDTSEIDSVKPRRSSLSRRSSMESPKSSLYREPLSSHSEKTKPEQSLLSLQHPPSTAPPVPLLRSHSMPSAACTISTPHHPFRGSYSFDDHITDSEALSHSSHVFTSHPRMLKRQPAIELPLGGEYSSEEPGPSSKDTASKPSDEVEPKESELTKKTKKGLKTKGVIYECNICGARYKKRDNYEAHKKYYCSELQIAKPISAGTHTSPEAEKSQIEHEPWSQMMHYKLGTTLELTPLRKRRKEKSLGDEEEPPAFESTKSQFGSPGPSDAARNLPLESTKSPAEPSKSVPSLEGPTGFQPRTPKPGSGSESGKERRTTSKEISVIQHTSSFEKSDSLEQPSGLEGEDKPLAQFPSPPPAPHGRSAHSLQPKLVRQPNIQVPEILVTEEPDRPDTEPEPPPKEPEKTEEFQWPQRSQTLAQLPAEKLPPKKKRLRLAEMAQSSGESSFESSVPLSRSPSQESNVSLSGSSRSASFERDDHGKAEAPSPSSDMRPKPLGTHMLTVPSHHPHAREMRRSASEQSPNVSHSAHMTETRSKSFDYGSLSLTGPSAPAPVAPPARVAPPERRKCFLVRQASLSRPPESELEVAPKGRQESEEPQPSSSKPSAKSSLSQISSAATSHGGPPGGKGPGQDRPPLGPTVPYTEALQVFHHPVAQTPLHEKPYLPPPVSLFSFQHLVQHEPGQSPEFFSTQAMSSLLSSPYSMPPLPPSLFQAPPLPLQPTVLHPGQLHLPQLMPHPANIPFRQPPSFLPMPYPTSSALSSGFFLPLQSQFALQLPGDVESHLPQIKTSLAPLATGSAGLSPSTEYSSDIRLPPVAPPASSSAPTSAPPLALPACPDTMVSLVVPVRVQTNMPSYGSAMYTTLSQILVTQSQGSSATVALPKFEEPPSKGTTVCGADVHEVGPGPSGLSEEQSRAFPTPYLRVPVTLPERKGTSLSSESILSLEGSSSTAGGSKRVLSPAGSLELTMETQQQKRVKEEEASKADEKLELVKPCSVVLTSTEDGKRPEKSHLGNQGQGRRELEMLSSLSSDPSDTKEIPPLPHPALSHGTAPGSEALKEYPQPSGKPHRRGLTPLSVKKEDSKEQPDLPSLAPPSSLPLSETSSRPAKSQEGTDSKKVLQFPSLHTTTNVSWCYLNYIKPNHIQHADRRSSVYAGWCISLYNPNLPGVSTKAALSLLRSKQKVSKETYTMATAPHPEAGRLVPSSSRKPRMTEVHLPSLVSPEGQKDLARVEKEEERRGEPEEDAPASQRGEPARIKIFEGGYKSNEEYVYVRGRGRGKYVCEECGIRCKKPSMLKKHIRTHTDVRPYVCKHCHFAFKTKGNLTKHMKSKAHSKKCQETGVLEELEAEEGTSDDLFQDSEGREGSEAVEEHQFSDLEDSDSDSDLDEDEDEDEEESQDELSRPSSEAPPPGPPHALRADSSPILGPQPPDAPASGTEATRGSSVSEAERLTASSCSMSSQSMPGLPWLGPAPLGSVEKDTGSALSYKPVSPRRPWSPSKEAGSRPPLARKHSLTKNDSSPQRCSPAREPQASAPSPPGLHVDPGRGMGALPCGSPRLQLSPLTLCPLGRELAPRAHVLSKLEGTTDPGLPRYSPTRRWSPGQAESPPRSAPPGKWALAGPGSPSAGEHGPGLGLDPRVLFPPAPLPHKLLSRSPETCASPWQKAESRSPSCSPGPAHPLSSRPFSALHDFHGHILARTEENIFSHLPLHSQHLTRAPCPLIPIGGIQMVQARPGAHPTLLPGPTAAWVSGFSGGGSDLTGAREAQERGRWSPTESSSASVSPVAKVSKFTLSSELEGGDYPKERERTGGGPGRPPDWTPHGTGAPAEPTPTHSPCTPPDTLPRPPQGRRAAQSWSPRLESPRAPTNPEPSATPPLDRSSSVGCLAEASARFPARTRNLSGEPRTRQDSPKPSGSGEPRAHPHQPEDRVPPNA

SEQ ID NO: 15090 - protein, 659 aa, Homo sapiens
MRVNHTVSTMLPTCMVHRQTMSCSGAGGITAFVAFRDVAVYFTQEEWRLLSPAQRTLHREVMLETYNHLVSLEIPSSKPKLIAQLERGEAPWREERKCPLDLCPESKPEIQLSPSCPLIFSSQQALSQHVWLSHLSQLFSSLWAGNPLHLGKHYPEDQKQQQDPFCFSGKAEWIQEGEDSRLLFGRVSKNGTSKALSSPPEEQQPAQSKEDNTVVDIGSSPERRADLEETDKVLHGLEVSGFGEIKYEEFGPGFIKESNLLSLQKTQTGETPYMYTEWGDSFGSMSVLIKNPRTHSGGKPYVCRECGRGFTWKSNLITHQRTHSGEKPYVCKDCGRGFTWKSNLFTHQRTHSGLKPYVCKECGQSFSLKSNLITHQRAHTGEKPYVCRECGRGFRQHSHLVRHKRTHSGEKPYICRECEQGFSQKSHLIRHLRTHTGEKPYVCTECGRHFSWKSNLKTHQRTHSGVKPYVCLECGQCFSLKSNLNKHQRSHTGEKPFVCTECGRGFTRKSTLSTHQRTHSGEKPFVCAECGRGFNDKSTLISHQRTHSGEKPFMCRECGRRFRQKPNLFRHKRAHSGAFVCRECGQGFCAKLTLIKHQRAHAGGKPHVCRECGQGFSRQSHLIRHQRTHSGEKPYICRKCGRGFSRKSNLIRHQRTHSG

SEQ ID NO: 15091 - protein, 295 aa, Homo sapiens
MEKMSRPLPLNPTFIPPPYGVLRSLLENPLKLPLHHEDAFSKDKDKEKKLDDESNSPTVPQSAFLGPTLWDKTLPYDGDTFQLEYMDLEEFLSENGIPPSPSQHDHSPHPPGLQPASSAAPSVMDLSSRASAPLHPGIPSPNCMQSPIRPGQLLPANRNTPSPIDPDTIQVPVGYEPDPADLALSSIPGQEMFDPRKRKFSEEELKPQPMIKKARKVFIPDDLKDDKYWARRRKNNMAAKRSRDARRLKENQIAIRASFLEKENSALRQEVADLRKELGKCKNILAKYEARHGPL

SEQ ID NO: 15092 - protein, 1009 aa, Homo sapiens
MSWMFKRDPVWKYLQTVQYGVHGNFPRLSYPTFFPRFEFQDVIPPDDFLTSDEEVDSVLFGSLRGHVVGLRYYTGVVNNNEMVALQRDPNNPYDKNAIKVNNVNGNQVGHLKKELAGALAYIMDNKLAQIEGVVPFGANNAFTMPLHMTFWGKEENRKAVSDQLKKHGFKLGPAPKTLGFNLESGWGSGRAGPSYSMPVHAAVQMTTEQLKTEFDKLFEDLKEDDKTHEMEPAEAIETPLLPHQKQALAWMVSRENSKELPPFWEQRNDLYYNTITNFSEKDRPENVHGGILADDMGLGKTLTAIAVILTNFHDGRPLPIERVKKNLLKKEYNVNDDSMKLGGNNTSEKADGLSKDASRCSEQPSISDIKEKSKFRMSELSSSRPKRRKTAVQYIESSDSEEIETSELPQKMKGKLKNVQSETKGRAKAGSSKVIEDVAFACALTSSVPTTKKKMLKKGACAVEGSKKTDVEERPRTTLIICPLSVLSNWIDQFGQHIKSDVHLNFYVYYGPDRIREPALLSKQDIVLTTYNILTHDYGTKGDSPLHSIRWLRVILDEGHAIRNPNAQQTKAVLDLESERRWVLTGTPIQNSLKDLWSLLSFLKLKPFIDREWWHRTIQRPVTMGDEGGLRRLQSLIKNITLRRTKTSKIKGKPVLELPERKVFIQHITLSDEERKIYQSVKNEGRATIGRYFNEGTVLAHYADVLGLLLRLRQICCHTYLLTNAVSSNGPSGNDTPEELRKKLIRKMKLILSSGSDEECAICLDSLTVPVITHCAHVFCKPCICQVIQNEQPHAKCPLCRNDIHEDNLLECPPEELARDSEKKSDMEWTSSSKINALMHALTDLRKKNPNIKSLVVSQFTTFLSLIEIPLKASGFVFTRLDGSMAQKKRVESIQCFQNTEAGSPTIMLLSLKAGGVGLNLSAASRVFLMDPAWNPAAEDQCFDRCHRLGQKQEVIITKFIVKDSVEENMLKIQNKKRELAAGAFGTKKPNADEMKQAKINEIRTLIDL

SEQ ID NO: 15093 - protein, 488 aa, Homo sapiens
MFAAGLAPFYASNFSLWSAAYCSSAGPGGCSFPLDPAAVKKPSFCIADILHAGVGDLGAAPEGLAGASAAALTAHLGSVHPHASFQAAARSPLRPTPVVAPSEVPAGFPQRLSPLSAAYHHHHPQQQQQQQQPQQQQPPPPPRAGALQPPASGTRVVPNPHHSGSAPAPSSKDLKFGIDRILSAEFDPKVKEGNTLRDLTSLLTGGRPAGVHLSGLQPSAGQFFASLDPINEASAILSPLNSNPRNSVQHQFQDTFPGPYAVLTKDTMPQTYKRKRSWSRAVFSNLQRKGLEKRFEIQKYVTKPDRKQLAAMLGLTDAQVKVWFQNRRMKWRHSKEAQAQKDKDKEAGEKPSGGAPAADGEQDERSPSRSEGEAESESSDSESLDMAPSDTERTEGSERSLHQTTVIKAPVTGALITASSAGSGGSSGGGGNSFSFSSASSLSSSSTSAGCASSLGGGGASELLPATQPTASSAPKSPEPAQGALGCL

SEQ ID NO: 15094 - protein, 420 aa, Homo sapiens
MLSSFPVVLLETMSHYTDEPRFTIEQIDLLQRLRRTGMTKHEILHALETLDRLDQEHSDKFGRRSSYGGSSYGNSTNNVPASSSTATASTQTQHSGMSPSPSNSYDTSPQPCTTNQNGRENNERLSTSNGKMSPTRYHANSMGQRSYSFEASEEDLDVDDKVEELMRRDSSVIKEEIKAFLANRRISQAVVAQVTGISQSRISHWLLQQGSDLSEQKKRAFYRWYQLEKTNPGATLSMRPAPIPIEDPEWRQTPPPVSATSGTFRLRRGSRFTWRKECLAVMESYFNENQYPDEAKREEIANACNAVIQKPGKKLSDLERVTSLKVYNWFANRRKEIKRRANIEAAILESHGIDVQSPGGHSNSDDVDGNDYSEQDDSTSHSDHQDPISLAVEMAAVNHTILALARQGANEIKTEALDDD

SEQ ID NO: 15095 - protein, 347 aa, Homo sapiens
MENLMTSSTLPPLFADEDGSKESNDLATTGLNHPEVPYSSGATSSTNNPEFVEDLSQGQLLQSESSNAAEGNEQRHEDEQRSKRGGWSKGRKRKKPLRDSNAPKSPLTGYVRFMNERREQLRAKRPEVPFPEITRMLGNEWSKLPPEEKQRYLDEADRDKERYMKELEQYQKTEAYKVFSRKTQDRQKGKSHRQDAARQATHDHEKETEVKERSVFDIPIFTEEFLNHSKAREAELRQLRKSNMEFEERNAALQKHVESMRTAVEKLEVDVIQERSRNTVLQQHLETLRQVLTSSFASMPLPGSGETPTVDTIDSYMNRLHSIILANPQDNENFIATVREVVNRLDR

SEQ ID NO: 15096 - protein, 317 aa, Homo sapiens
MSHGPKQPGAAAAPAGGKAPGQHGGFVVTVKQERGEGPRAGEKGSHEEEPVKKRGWPKGKKRKKILPNGPKAPVTGYVRFLNERREQIRTRHPDLPFPEITKMLGAEWSKLQPTEKQRYLDEAEREKQQYMKELRAYQQSEAYKMCTEKIQEKKIKKEDSSSGLMNTLLNGHKGGDCDGFSTFDVPIFTEEFLDQNKAREAELRRLRKMNVAFEEQNAVLQRHTQSMSSARERLEQELALEERRTLALQQQLQAVRQALTASFASLPVPGTGETPTLGTLDFYMARLHGAIERDPAQHEKLIVRIKEILAQVASEHL

SEQ ID NO: 15097 - protein, 107 aa, Homo sapiens
MSESSSKSSQPLASKQEKDGTEKRGRGRPRKQPPVSPGTALVGSQKEPSEVPTPKRPRGRPKGSKNKGAAKTRKTTTTPGRKPRGRPKKLEKEEEEGISQESSEEEQ

SEQ ID NO: 15098 - protein, 109 aa, Homo sapiens
MSARGEGAGQPSTSAQGQPAAPAPQKRGRGRPRKQQQEPTGEPSPKRPRGRPKGSKNKSPSKAAQKKAEATGEKRPRGRPRKWPQQVVQKKPAQEETEETSSQESAEED

SEQ ID NO: 15099 - protein, 1538 aa, Homo sapiens
MQRTQPRPCYLNAPQQCPGAERPGRPTAGSHSFLLRPGPLAGSSPFALLDPLQAFEQFVWVRSQARAGLLRLRQGSHAVTRCRPLPVRREGRRDGSPWRSVVCRYCRCSRQTGASVTTVSLPSSSSSPGLDPRGPRQASVRSLRSEPVLLFLPFRTPYRDSEEGKREGLSRLRAVCRRAGPRGRGSFSPRDARASPRLHFLVAAVTTGAASRRQRGARVRQPSPSSSRRAKRLRECERRSLHAPPAMDASYDGTEVTVVMEEIEEAYCYTSPGPPKKKKKYKIHGEKTKKPRSAYLLYYYDIYLKVQQELPHLPQSEINKKISESWRLLSVAERSYYLEKAKLEKEGLDPNSKLSALTAVVPDIPGFRKILPRSDYIIIPKSSLQEDRSCPQLELCVAQNQMSPKGPPLVSNTAPETVPSHAGMAEQCLAVEALAEEVGALTQSGAVQEIATSEILSQDVLLEDASLEVGESHQPYQTSLVIEETLVNGSPDLPTGSLAVPHPQVGESVSVVTVMRDSSESSSSAPATQFIMLPLPAYSVVENPTSIKLTTTYTRRGHGTCTSPGCSFTYVTRHKPPKCPTCGNFLGGKWIPKEKPAKVKVELASGVSSKGSVVKRNQQPVTTEQNSSKENASKLTLENSEAVSQLLNVAPPREVGEESEWEEVIISDAHVLVKEAPGNCGTAVTKTPVVKSGVQPEVTLGTTDNDSPGADVPTPSEGTSTSSPLPAPKKPTGADLLTPGSRAPELKGRARGKPSLLAAARPMRAILPAPVNVGRGSSMGLPRARQAFSLSDKTPSVRTCGLKPSTLKQLGQPIQQPSGPGEVKLPSGPSNRTSQVKVVEVKPDMFPPYKYSCTVTLDLGLATSRGRGKCKNPSCSYVYTNRHKPRICPSCGVNLAKDRTEKTTKAIEVSSPLPDVLNATEPLSTAQREIQRQSTLQLLRKVLQIPENESELAEVFALIHELNSSRLILSNVSEETVTIEQTSWSNYYESPSTQCLLCSSPLFKGGQNSLAGPQECWLLTASRLQTVTAQVKMCLNPHCLALHSFIDIYTGLFNVGNKLLVSLDLLFAIRNQIKLGEDPRVSINVVLKSVQEQTEKTLTSEELSQLQELLCNGYWAFECLTVRDYNDMICGICGVAPKVEMAQRSEENVLALKSVEFTWPEFLGSNEVNVEDFWATMETEVIEQVAFPASIPITKFDASVIAPFFPPLMRGAVVVNTEKDKNLDVQPVPGSGSALVRLLQEGTCKLDEIGSYSEEKLQHLLRQCGIPFGAEDSKDQLCFSLLALYESVQNGARAIRPPRHFTGGKIYKVCPHQVVCGSKYLVRGESARDHVDLLASSRHWPPVYVVDMATSVALCADLCYPELTNQMWGRNQGCFSSPTEPPVSVSCPELLDQHYTVDMTETEHSIQHPVTKTATRRIVHAGLQPNPGDPSAGHHSLALCPELAPYATILASIVDSKPNGVRQRPIAFDNATHYYLYNRLMDFLTSREIVNRQIHDIVQSCQPGEVVIRDTLYRLGVAQIKTETEEEGEEEEVAAVAE

SEQ ID NO: 15100 - protein, 601 aa, Homo sapiens
MAYDDSVKKEDCFDGDHTFEDIGLAAGRSQREKKRSYKDFLREEEEIAAQVRNSSKKKLKDSELYFLGTDTHKKKRKHSSDDYYYGDISSLESSQKKKKKSSPQSTDTAMDLLKAITSPLAAGSKPSKKTGEKSSGSSSHSESKKEHHRKKVSGSSGELPLEDGGSHKSKKMKPLYVNTETLTLREPDGLKMKLILSPKEKGSSSVDEESFQYPSQQATVKKSSKKSARDEQGALLLGHELQSFLKTARKKHKSSSDAHSSPGPEGCGSDASQFAESHSANLDLSGLEPILVESDSSSGGELEAGELVIDDSYREIKKKKKSKKSKKKKDKEKHKEKRHSKSKRSLGLSAVPVGEVTVTSGPPPSIPYAGAAAPPLPLPGLHTDGHSEKKKKKEEKDKERERGEKPKKKNMSAYQVFCKEYRVTIVADHPGIDFGELSKKLAEVWKQLPEKDKLIWKQKAQYLQHKQNKAEATTVKRKASSSEGSMKVKASSVGVLSPQKKSPPTTMLLPASPAKAPETEPIDVAAHLQLLGESLSLIGHRLQETEGMVAVSGSLSVLLDSIICALGPLACLTTQLPELNGCPKQVLSNTLDNIAYIMPGL

SEQ ID NO: 15101 - protein, 348 aa, Homo sapiens
MPDELTEPGRATPARASSFLIENLLAAEAKGAGRATQGDGSREDEEEDDDDPEDEDAEQARRRRLQRRRQLLAGTGPGGEARARALLGPGALGLGPRPPPGPGPPFALGCGGAARWYPRAHGGYGGGLSPDTSDRDSPETGEEMGRAEGAWPRGPGPGAVQREAAELAARGPAAGTEEASELAEVPAAAGETRGGVGVGGGRKKKTRTVFSRSQVFQLESTFDLKRYLSSAERAGLAASLQLTETQVKIWFQNRRNKWKRQLAAELEAASLSPPGAQRLVRVPVLYHESPPAAAAAGPPATLPFPLAPAAPAPPPPLLGFSGALAYPLAAFPAAASVPFLRAQMPGLV

SEQ ID NO: 15102 - protein, 273 aa, Homo sapiens
MGSKEDAGKGCPAAGGVSSFTIQSILGGGPSEAPREPVGWPARKRSLSVSSEEEEPDDGWKAPACFCPDQHGPKEQGPKHHPPIPFPCLGTPKGSGGSGPGGLERTPFLSPSHSDFKEEKERLLPAGSPSPGSERPRDGGAERQAGAAKKKTRTVFSRSQVYQLESTFDMKRYLSSSERACLASSLQLTETQVKTWFQNRRNKWKRQLSAELEAANMAHASAQTLVSMPLVFRDSSLLRVPVPRSLAFPAPLYYPGSNLSALPLYNLYNKLDY

SEQ ID NO: 15103 - protein, 357 aa, Homo sapiens
MPEPGPDAAGTASAQPQPPPPPPPAPKESPFSIKNLLNGDHHRPPPKPQPPPRTLFAPASAAAAAAAAAAAAAKGALEGAAGFALSQVGDLAFPRFEIPAQRFALPAHYLERSPAWWYPYTLTPAGGHLPRPEASEKALLRDSSPASGTDRDSPEPLLKADPDHKELDSKSPDEIILEESDSEESKKEGEAAPGAAGASVGAAAATPGAEDWKKGAESPEKKPACRKKKTRTVFSRSQVFQLESTFDMKRYLSSSERAGLAASLHLTETQVKIWFQNRRNKWKRQLAAELEAANLSHAAAQRIVRVPILYHENSAAEGAAAAAAGAPVPVSQPLLTFPHPVYYSHPVVSSVPLLRPV

SEQ ID NO: 15104 - protein, 1130 aa, Homo sapiens
MAAAVLSGPSAGSAAGVPGGTGGLSAVSSGPRLRLLLLESVSGLLQPRTGSAVAPVHPPNRSAPHLPGLMCLLRLHGSVGGAQNLSALGALVSLSNARLSSIKTRFEGLCLLSLLVGESPTELFQQHCVSWLRSIQQVLQTQDPPATMELAVAVLRDLLRYAAQLPALFRDISMNHLPGLLTSLLGLRPECEQSALEGMKACMTYFPRACGSLKGKLASFFLSRVDALSPQLQQLACECYSRLPSLGAGFSQGLKHTESWEQELHSLLASLHTLLGALYEGAETAPVQNEGPGVEMLLSSEDGDAHVLLQLRQRFSGLARCLGLMLSSEFGAPVSVPVQEILDFICRTLSVSSKNISLHGDGPLRLLLLPSIHLEALDLLSALILACGSRLLRFGILIGRLLPQVLNSWSIGRDSLSPGQERPYSTVRTKVYAILELWVQVCGASAGMLQGGASGEALLTHLLSDISPPADALKLRSPRGSPDGSLQTGKPSAPKKLKLDVGEAMAPPSHRKGDSNANSDVCAAALRGLSRTILMCGPLIKEETHRRLHDLVLPLVMGVQQGEVLGSSPYTSSRCRRELYCLLLALLLAPSPRCPPPLACALQAFSLGQREDSLEVSSFCSEALVTCAALTHPRVPPLQPMGPTCPTPAPVPPPEAPSPFRAPPFHPPGPMPSVGSMPSAGPMPSAGPMPSAGPVPSARPGPPTTANHLGLSVPGLVSVPPRLLPGPENHRAGSNEDPILAPSGTPPPTIPPDETFGGRVPRPAFVHYDKEEASDVEISLESDSDDSVVIVPEGLPPLPPPPPSGATPPPIAPTGPPTASPPVPAKEEPEELPAAPGPLPPPPPPPPPVPGPVTLPPPQLVPEGTPGGGGPPALEEDLTVININSSDEEEEEEEEEEEEEEEEEEEEEDFEEEEEDEEEYFEEEEEEEEEFEEEFEEEEGELEEEEEEEDEEEEEELEEVEDLEFGTAGGEVEEGAPPPPTLPPALPPPESPPKVQPEPEPEPGLLLEVEEPGTEEERGADTAPTLAPEALPSQGEVEREGESPAAGPPPQELVEEEPSAPPTLLEEETEDGSDKVQPPPETPAEEEMETETEAEALQEKEQDDTAAMLADFIDCPPDDEKPPPPTEPDS

SEQ ID NO: 15105 - protein, 631 aa, Homo sapiens
MVSKLSQLQTELLAALLESGLSKEALIQALGEPGPYLLAGEGPLDKGESCGGGRGELAELPNGLGETRGSEDETDDDGEDFTPPILKELENLSPEEAAHQKAVVETLLQEDPWRVAKMVKSYLQQHNIPQREVVDTTGLNQSHLSQHLNKGTPMKTQKRAALYTWYVRKQREVAQQFTHAGQGGLIEEPTGDELPTKKGRRNRFKWGPASQQILFQAYERQKNPSKEERETLVEECNRAECIQRGVSPSQAQGLGSNLVTEVRVYNWFANRRKEEAFRHKLAMDTYSGPPPGPGPGPALPAHSSPGLPPPALSPSKVHGVRYGQPATSETAEVPSSSGGPLVTVSTPLHQVSPTGLEPSHSLLSTEAKLVSAAGGPLPPVSTLTALHSLEQTSPGLNQQPQNLIMASLPGVMTIGPGEPASLGPTFTNTGASTLVIGLASTQAQSVPVINSMGSSLTTLQPVQFSQPLHPSYQQPLMPPVQSHVTQSPFMATMAQLQSPHALYSHKPEVAQYTHTGLLPQTMLITDTTNLSALASLTPTKQVFTSDTEASSESGLHTPASQATTLHVPSQDPAGIQHLQPAHRLSASPTVSSSSLVLYQSSDSSNGQSHLLPSNHSVIETFISTQMASSSQ

SEQ ID NO: 15106 - protein, 557 aa, Homo sapiens
MVSKLTSLQQELLSALLSSGVTKEVLVQALEELLPSPNFGVKLETLPLSPGSGAEPDTKPVFHTLTNGHAKGRLSGDEGSEDGDDYDTPPILKELQALNTEEAAEQRAEVDRMLSEDPWRAAKMIKGYMQQHNIPQREVVDVTGLNQSHLSQHLNKGTPMKTQKRAALYTWYVRKQREILRQFNQTVQSSGNMTDKSSQDQLLFLFPEFSQQSHGPGQSDDACSEPTNKKMRRNRFKWGPASQQILYQAYDRQKNPSKEEREALVEECNRAECLQRGVSPSKAHGLGSNLVTEVRVYNWFANRRKEEAFRQKLAMDAYSSNQTHSLNPLLSHGSPHHQPSSSPPNKLSGVRYSQQGNNEITSSSTISHHGNSAMVTSQSVLQQVSPASLDPGHNLLSPDGKMISVSGGGLPPVSTLTNIHSLSHHNPQQSQNLIMTPLSGVMAIAQSLNTSQAQSVPVINSVAGSLAALQPVQFSQQLHSPHQQPLMQQSPGSHMAQQPFMAAVTQLQNSHMYAHKQEPPQYSHTSRFPSAMVVTDTSSISTLTNMSSSKQCPLQAW

SEQ ID NO: 15107 - protein, 474 aa, Homo sapiens
MRLSKTLVDMDMADYSAALDPAYTTLEFENVQVLTMGNDTSPSEGTNLNAPNSLGVSALCAICGDRATGKHYGASSCDGCKGFFRRSVRKNHMYSCRFSRQCVVDKDKRNQCRYCRLKKCFRAGMKKEAVQNERDRISTRRSSYEDSSLPSINALLQAEVLSRQITSPVSGINGDIRAKKIASIADVCESMKEQLLVLVEWAKYIPAFCELPLDDQVALLRAHAGEHLLLGATKRSMVFKDVLLLGNDYIVPRHCPELAEMSRVSIRILDELVLPFQELQIDDNEYAYLKAIIFFDPDAKGLSDPGKIKRLRSQVQVSLEDYINDRQYDSRGRFGELLLLLPTLQSITWQMIEQIQFIKLFGMAKIDNLLQEMLLGGSPSDAPHAHHPLHPHLMQEHMGTNVIVANTMPTHLSNGQMCEWPRPRGQAATPETPQPSPPGGSGSEPYKLLPGAVATIVKPLSAIPQPTITKQEVI

SEQ ID NO: 15108 - protein, 408 aa, Homo sapiens
MNTTDNGVNCLCAICGDRATGKHYGASSCDGCKGFFRRSIRKSHVYSCRFSRQCVVDKDKRNQCRYCRLRKCFRAGMKKEAVQNERDRISTRRSTFDGSNIPSINTLAQAEVRSRQISVSSPGSSTDINVKKIASIGDVCESMKQQLLVLVEWAKYIPAFCELPLDDQVALLRAHAGEHLLLGATKRSMMYKDILLLGNNYVIHRNSCEVEISRVANRVLDELVRPFQEIQIDDNEYACLKAIVFFDPDAKGLSDPVKIKNMRFQVQIGLEDYINDRQYDSRGRFGELLLLLPTLQSITWQMIEQIQFVKLFGMVKIDNLLQEMLLGGASNDGSHLHHPMHPHLSQDPLTGQTILLGPMSTLVHADQISTPETPLPSPPQGSGQEQYKIAANQASVISHQHLSKQKQL

SEQ ID NO: 15109 - protein, 463 aa, Homo sapiens
METEQPEETFPNTETNGEFGKRPAEDMEEEQAFKRSRNTDEMVELRILLQSKNAGAVIGKGGKNIKALRTDYNASVSVPDSSGPERILSISADIETIGEILKKIIPTLEEGLQLPSPTATSQLPLESDAVECLNYQHYKGSDFDCELRLLIHQSLAGGIIGVKGAKIKELRENTQTTIKLFQECCPHSTDRVVLIGGKPDRVVECIKIILDLISESPIKGRAQPYDPNFYDETYDYGGFTMMFDDRRGRPVGFPMRGRGGFDRMPPGRGGRPMPPSRRDYDDMSPRRGPPPPPPGRGGRGGSRARNLPLPPPPPPRGGDLMAYDRRGRPGDRYDGMVGFSADETWDSAIDTWSPSEWQMAYEPQGGSGYDYSYAGGRGSYGDLGGPIITTQVTIPKDLAGSIIGKGGQRIKQIRHESGASIKIDEPLEGSEDRIITITGTQDQIQNAQYLLQNSVKQYSGKFF

SEQ ID NO: 15110 - protein, 550 aa, Homo sapiens
MVRGWEPPPGLDCAISEGHKSEGTMPPNKEASGLSSSPAGLICLPPISEELQLVWTQAAQTSELDSNEHLLKTFSYFPYPSLADIALLCLRYGLQMEKVKTWFMAQRLRCGISWSSEEIEETRARVVYRRDQLHFKSLLSFTHHAGRPPEEVPPPPVPAPEQVGIGIGPPTLSKPTQTKGLKVEPEEPSQMPPLPQSHQKLKESLMTPGSGAFPYQSDFWQHLQSSGLSKEQAGRGPNQSHGIGTASWNHSTTVPQPQARDKPPPIALIASSCKEESASSVTPSSSSTSSSFQVLANGATAASKPLQPLGCVPQSVSPSEQALPPHLEPAWPQGLRHNSVPGRVGPTEYLSPDMQRQRKTKRKTKEQLAILKSFFLQCQWARREDYQKLEQITGLPRPEIIQWFGDTRYALKHGQLKWFRDNAVPGAPSFQDPAIPTPPPSTRSLNERAETPPLPIPPPPPDIQPLERYWAAHQQLRETDIPQLSQASRLSTQQVLDWFDSRLPQPAEVVVCLDEEEEEEEEELPEDDEEEEEEEEEDDDDDDDDVIIQD

SEQ ID NO: 15111 - protein, 73 aa, Homo sapiens
MSAETASGPTEDQVEILEYNFNKVDKHPDSTTLCLIAAEAGLSEEETQKWFKQRLAKWRRSEGLPSECRSVTD

SEQ ID NO: 15112 - protein, 335 aa, Homo sapiens
MDNARMNSFLEYPILSSGDSGTCSARAYPSDHRITTFQSCAVSANSCGGDDRFLVGRGVQIGSPHHHHHHHHHHPQPATYQTSGNLGVSYSHSSCGPSYGSQNFSAPYSPYALNQEADVSGGYPQCAPAVYSGNLSSPMVQHHHHHQGYAGGAVGSPQYIHHSYGQEHQSLALATYNNSLSPLHASHQEACRSPASETSSPAQTFDWMKVKRNPPKTGKVGEYGYLGQPNAVRTNFTTKQLTELEKEFHFNKYLTRARRVEIAASLQLNETQVKIWFQNRRMKQKKREKEGLLPISPATPPGNDEKAEESSEKSSSSPCVPSPGSSTSDTLTTSH

SEQ ID NO: 15113 - protein, 410 aa, Homo sapiens
MSARKGYLLPSPNYPTTMSCSESPAANSFLVDSLISSGRGEAGGGGGGAGGGGGGGYYAHGGVYLPPAADLPYGLQSCGLFPTLGGKRNEAASPGSGGGGGGLGPGAHGYGPSPIDLWLDAPRSCRMEPPDGPPPPPQQQPPPPPQPPQPAPQATSCSFAQNIKEESSYCLYDSADKCPKVSATAAELAPFPRGPPPDGCALGTSSGVPVPGYFRLSQAYGTAKGYGSGGGGAQQLGAGPFPAQPPGRGFDLPPALASGSADAARKERALDSPPPPTLACGSGGGSQGDEEAHASSSAAEELSPAPSESSKASPEKDSLGNSKGENAANWLTAKSGRKKRCPYTKHQTLELEKEFLFNMYLTRERRLEISRSVHLTDRQVKIWFQNRRMKLKKMNRENRIRELTANFNFS

SEQ ID NO: 15114 - protein, 313 aa, Homo sapiens
MDFDERGPCSSNMYLPSCTYYVSGPDFSSLPSFLPQTPSSRPMTYSYSSNLPQVQPVREVTFREYAIEPATKWHPRGNLAHCYSAEELVHRDCLQAPSAAGVPGDVLAKSSANVYHHPTPAVSSNFYSTVGRNGVLPQAFDQFFETAYGTPENLASSDYPGDKSAEKGPPAATATSAAAAAAATGAPATSSSDSGGGGGCRETAAAAEEKERRRRPESSSSPESSSGHTEDKAGGSSGQRTRKKRCPYTKYQIRELEREFFFSVYINKEKRLQLSRMLNLTDRQVKIWFQNRRMKEKKINRDRLQYYSANPLL

SEQ ID NO: 15115 - protein, 388 aa, Homo sapiens
MTASVLLHPRWIEPTVMFLYDNGGGLVADELNKNMEGAAAAAAAAAAAAAAGAGGGGFPHPAAAAAGGNFSVAAAAAAAAAAAANQCRNLMAHPAPLAPGAASAYSSAPGEAPPSAAAAAAAAAAAAAAAAAASSSGGPGPAGPAGAEAAKQCSPCSAAAQSSSGPAALPYGYFGSGYYPCARMGPHPNAIKSCAQPASAAAAAAFADKYMDTAGPAAEEFSSRAKEFAFYHQGYAAGPYHHHQPMPGYLDMPVVPGLGGPGESRHEPLGLPMESYQPWALPNGWNGQMYCPKEQAQPPHLWKSTLPDVVSHPSDASSYRRGRKKRVPYTKVQLKELEREYATNKFITKDKRRRISATTNLSERQVTIWFQNRRVKEKKVINKLKTTS

SEQ ID NO: 15116 - protein, 376 aa, Homo sapiens
MNYEFEREIGFINSQPSLAECLTSFPPVADTFQSSSIKTSTLSHSTLIPPPFEQTIPSLNPGSHPRHGAGGRPKPSPAGSRGSPVPAGALQPPEYPWMKEKKAAKKTALLPAAAAAATAAATGPACLSHKESLEIADGSGGGSRRLRTAYTNTQLLELEKEFHFNKYLCRPRRVEIAALLDLTERQVKVWFQNRRMKHKRQTQCKENQNSEGKCKSLEDSEKVEEDEEEKTLFEQALSVSGALLEREGYTFQQNALSQQQAPNGHNGDSQSFPVSPLTSNEKNLKHFQHQSPTVPNCLSTMGQNCGAGLNNDSPEALEVPSLQDFSVFSTDSCLQLSDAVSPSLPGSLDSPVDISADSLDFFTDTLTTIDLQHLNY

SEQ ID NO: 15117 - protein, 443 aa, Homo sapiens
MQKATYYDSSAIYGGYPYQAANGFAYNANQQPYPASAALGADGEYHRPACSLQSPSSAGGHPKAHELSEACLRTLSAPPSQPPSLGEPPLHPPPPQAAPPAPQPPQPAPQPPAPTPAAPPPPSSASPPQNASNNPTPANAAKSPLLNSPTVAKQIFPWMKESRQNTKQKTSSSSSGESCAGDKSPPGQASSKRARTAYTSAQLVELEKEFHFNRYLCRPRRVEMANLLNLTERQIKIWFQNRRMKYKKDQKGKGMLTSSGGQSPSRSPVPPGAGGYLNSMHSLVNSVPYEPQSPPPFSKPPQGTYGLPPASYPASLPSCAPPPPPQKRYTAAGAGAGGTPDYDPHAHGLQGNGSYGTPHIQGSPVFVGGSYVEPMSNSGPALFGLTHLPHAASGAMDYGGAGPLGSGHHHGPGPGEPHPTYTDLTGHHPSQGRIQEAPKLTHL

SEQ ID NO: 15118 - protein, 320 aa, Homo sapiens
MTMSSFLINSNYIEPKFPPFEEYAQHSGSGGADGGPGGGPGYQQPPAPPTQHLPLQQPQLPHAGGGREPTASYYAPRTAREPAYPAAALYPAHGAADTAYPYGYRGGASPGRPPQPEQPPAQAKGPAHGLHASHVLQPQLPPPLQPRAVPPAAPRRCEAAPATPGVPAGGSAPACPLLLADKSPLGLKGKEPVVYPWMKKIHVSAVNPSYNGGEPKRSRTAYTRQQVLELEKEFHFNRYLTRRRRIEIAHTLCLSERQVKIWFQNRRMKWKKDHKLPNTKMRSSNSASASAGPPGKAQTQSPHLHPHPHPSTSTPVPSSI

SEQ ID NO: 15119 - protein, 270 aa, Homo sapiens
MSSYFVNSFCGRYPNGPDYQLHNYGDHSSVSEQFRDSASMHSGRYGYGYNGMDLSVGRSGSGHFGSGERARSYAASASAAPAEPRYSQPATSTHSPQPDPLPCSAVAPSPGSDSHHGGKNSLSNSSGASADAGSTHISSREGVGTASGAEEDAPASSEQASAQSEPSPAPPAQPQIYPWMRKLHISHDNIGGPEGKRARTAYTRYQTLELEKEFHFNRYLTRRRRIEIAHALCLSERQIKIWFQNRRMKWKKDNKLKSMSMAAAGGAFRP

SEQ ID NO: 15120 - protein, 233 aa, Homo sapiens
MSSYFVNPTFPGSLPSGQDSFLGQLPLYQAGYDALRPFPASYGASSLPDKTYTSPCFYQQSNSVLACNRASYEYGASCFYSDKDLSGASPSGSGKQRGPGDYLHFSPEQQYKPDSSSGQGKALHDEGADRKYTSPVYPWMQRMNSCAGAVYGSHGRRGRQTYTRYQTLELEKEFHFNRYLTRRRRIEIANALCLTERQIKIWFQNRRMKWKKENKLINSTQPSGEDSEAKAGE

SEQ ID NO: 15121 - protein, 230 aa, Homo sapiens
MSSSYYVNALFSKYTAGASLFQNAEPTSCSFAPNSQRSGYGAGAGAFASTVPGLYNVNSPLYQSPFASGYGLGADAYGNLPCASYDQNIPGLCSDLAKGACDKTDEGALHGAAEANFRIYPWMRSSGPDRKRGRQTYTRYQTLELEKEFHFNRYLTRRRRIEIAHALCLTERQIKIWFQNRRMKWKKEHKDEGPTAAAAPEGAVPSAAATAAADKADEEDDDEEEEDEEE

SEQ ID NO: 15122 - protein, 272 aa, Homo sapiens
MATTGALGNYYVDSFLLGADAADELSVGRYAPGTLGQPPRQAATLAEHPDFSPCSFQSKATVFGASWNPVHAAGANAVPAAVYHHHHHHPYVHPQAPVAAAAPDGRYMRSWLEPTPGALSFAGLPSSRPYGIKPEPLSARRGDCPTLDTHTLSLTDYACGSPPVDREKQPSEGAFSENNAENESGGDKPPIDPNNPAANWLHARSTRKKRCPYTKHQTLELEKEFLFNMYLTRDRRYEVARLLNLTERQVKIWFQNRRMKMKKINKDRAKDE

SEQ ID NO: 15123 - protein, 301 aa, Homo sapiens
MDYNRMNSFLEYPLCNRGPSAYSAHSAPTSFPPSSAQAVDSYASEGRYGGGLSSPAFQQNSGYPAQQPPSTLGVPFPSSAPSGYAPAACSPSYGPSQYYPLGQSEGDGGYFHPSSYGAQLGGLSDGYGAGGAGPGPYPPQHPPYGNEQTASFAPAYADLLSEDKETPCPSEPNTPTARTFDWMKVKRNPPKTAKVSEPGLGSPSGLRTNFTTRQLTELEKEFHFNKYLSRARRVEIAATLELNETQVKIWFQNRRMKQKKREREEGRVPPAPPGCPKEAAGDASDQSTCTSPEASPSSVTS

SEQ ID NO: 15124 - protein, 284 aa, Homo sapiens
MEPGNYATLDGAKDIEGLLGAGGGRNLVAHSPLTSHPAAPTLMPAVNYAPLDLPGSAEPPKQCHPCPGVPQGTSPAPVPYGYFGGGYYSCRVSRSSLKPCAQAATLAAYPAETPTAGEEYPSRPTEFAFYPGYPGTYQPMASYLDVSVVQTLGAPGEPRHDSLLPVDSYQSWALAGGWNSQMCCQGEQNPPGPFWKAAFADSSGQHPPDACAFRRGRKKRIPYSKGQLRELEREYAANKFITKDKRRKISAATSLSERQITIWFQNRRVKEKKVLAKVKNSATP

SEQ ID NO: 15125 - protein, 356 aa, Homo sapiens
MNFEFEREIGFINSQPSLAECLTSFPAVLETFQTSSIKESTLIPPPPPFEQTFPSLQPGASTLQRPRSQKRAEDGPALPPPPPPPLPAAPPAPEFPWMKEKKSAKKPSQSATSPSPAASAVPASGVGSPADGLGLPEAGGGGARRLRTAYTNTQLLELEKEFHFNKYLCRPRRVEIAALLDLTERQVKVWFQNRRMKHKRQTQHREPPDGEPACPGALEDICDPAEEPAASPGGPSASRAAWEACCHPPEVVPGALSADPRPLAVRLEGAGASSPGCALRGAGGLEPGPLPEDVFSGRQDSPFLPDLNFFAADSCLQLSGGLSPSLQGSLDSPVPFSEEELDFFTSTLCAIDLQFP

SEQ ID NO: 15126 - protein, 431 aa, Homo sapiens
MQKATYYDNAAAALFGGYSSYPGSNGFGFDVPPQPPFQAATHLEGDYQRSACSLQSLGNAAPHAKSKELNGSCMRPGLAPEPLSAPPGSPPPSAAPTSATSNSSNGGGPSKSGPPKCGPGTNSTLTKQIFPWMKESRQTSKLKNNSPGTAEGCGGGGGGGGGGGSGGSGGGGGGGGGGDKSPPGSAASKRARTAYTSAQLVELEKEFHFNRYLCRPRRVEMANLLNLSERQIKIWFQNRRMKYKKDQKAKGLASSSGGPSPAGSPPQPMQSTAGFMNALHSMTPSYESPSPPAFGKAHQNAYALPSNYQPPLKGCGAPQKYPPTPAPEYEPHVLQANGGAYGTPTMQGSPVYVGGGGYADPLPPPAGPSLYGLNHLSHHPSGNLDYNGAPPMAPSQHHGPCEPHPTYTDLSSHHAPPPQGRIQEAPKLTHL

SEQ ID NO: 15127 - protein, 251 aa, Homo sapiens
MAMSSFLINSNYVDPKFPPCEEYSQSDYLPSDHSPGYYAGGQRRESSFQPEAGFGRRAACTVQRYAACRDPGPPPPPPPPPPPPPPPGLSPRAPAPPPAGALLPEPGQRCEAVSSSPPPPPCAQNPLHPSPSHSACKEPVVYPWMRKVHVSTVNPNYAGGEPKRSRTAYTRQQVLELEKEFHYNRYLTRRRRVEIAHALCLSERQIKIWFQNRRMKWKKDHKLPNTKIRSGGAAGSAGGPPGRPNGGPRAL

SEQ ID NO: 15128 - protein, 269 aa, Homo sapiens
MSSYFVNSFSGRYPNGPDYQLLNYGSGSSLSGSYRDPAAMHTGSYGYNYNGMDLSVNRSSASSSHFGAVGESSRAFPAPAQEPRFRQAASSCSLSSPESLPCTNGDSHGAKPSASSPSDQATSASSSANFTEIDEASASSEPEEAASQLSSPSLARAQPEPMATSTAAPEGQTPQIFPWMRKLHISHDMTGPDGKRARTAYTRYQTLELEKEFHFNRYLTRRRRIEIAHALCLSERQIKIWFQNRRMKWKKDNKLKSMSLATAGSAFQP

SEQ ID NO: 15129 - protein, 224 aa, Homo sapiens
MSSYFVNSTFPVTLASGQESFLGQLPLYSSGYADPLRHYPAPYGPGPGQDKGFATSSYYPPAGGGYGRAAPCDYGPAPAFYREKESACALSGADEQPPFHPEPRKSDCAQDKSVFGETEEQKCSTPVYPWMQRMNSCNSSSFGPSGRRGRQTYTRYQTLELEKEFHYNRYLTRRRRIEIAHALCLTERQIKIWFQNRRMKWKKESKLLSASQLSAEEEEEKQAE

SEQ ID NO: 15130 - protein, 217 aa, Homo sapiens
MSSLYYANTLFSKYPASSSVFATGAFPEQTSCAFASNPQRPGYGAGSGASFAASMQGLYPGGGGMAGQSAAGVYAAGYGLEPSSFNMHCAPFEQNLSGVCPGDSAKAAGAKEQRDSDLAAESNFRIYPWMRSSGTDRKRGRQTYTRYQTLELEKEFHYNRYLTRRRRIEIAHTLCLTERQIKIWFQNRRMKWKKENKTAGPGTTGQDRAEAEEEEEE

SEQ ID NO: 15131 - protein, 243 aa, Homo sapiens
MSSYFVNSLFSKYKTGESLRPNYYDCGFAQDLGGRPTVVYGPSSGGSFQHPSQIQEFYHGPSSLSTAPYQQNPCAVACHGDPGNFYGYDPLQRQSLFGAQDPDLVQYADCKLAAASGLGEEAEGSEQSPSPTQLFPWMRPQAAAGRRRGRQTYSRYQTLELEKEFLFNPYLTRKRRIEVSHALGLTERQVKIWFQNRRMKWKKENNKDKFPSSKCEQEELEKQKLERAPEAADEGDAQKGDKK

SEQ ID NO: 15132 - protein, 250 aa, Homo sapiens
MSISGTLSSYYVDSIISHESEDAPPAKFPSGQYASSRQPGHAEHLEFPSCSFQPKAPVFGASWAPLSPHASGSLPSVYHPYIQPQGVPPAESRYLRTWLEPAPRGEAAPGQGQAAVKAEPLLGAPGELLKQGTPEYSLETSAGREAVLSNQRPGYGDNKICEGSEDKERPDQTNPSANWLHARSSRKKRCPYTKYQTLELEKEFLFNMYLTRDRRHEVARLLNLSERQVKIWFQNRRMKMKKMNKEQGKE

SEQ ID NO: 15133 - protein, 342 aa, Homo sapiens
MTCPRNVTPNSYAEPLAAPGGGERYSRSAGMYMQSGSDFNCGVMRGCGLAPSLSKRDEGSSPSLALNTYPSYLSQLDSWGDPKAAYRLEQPVGRPLSSCSYPPSVKEENVCCMYSAEKRAKSGPEAALYSHPLPESCLGEHEVPVPSYYRASPSYSALDKTPHCSGANDFEAPFEQRASLNPRAEHLESPQLGGKVSFPETPKSDSQTPSPNEIKTEQSLAGPKGSPSESEKERAKAADSSPDTSDNEAKEEIKAENTTGNWLTAKSGRKKRCPYTKHQTLELEKEFLFNMYLTRERRLEISKTINLTDRQVKIWFQNRRMKLKKMNRENRIRELTSNFNFT

SEQ ID NO: 15134 - protein, 304 aa, Homo sapiens
MFNSVNLGNFCSPSRKERGADFGERGSCASNLYLPSCTYYMPEFSTVSSFLPQAPSRQISYPYSAQVPPVREVSYGLEPSGKWHHRNSYSSCYAAADELMHRECLPPSTVTEILMKNEGSYGGHHHPSAPHATPAGFYSSVNKNSVLPQAFDRFFDNAYCGGGDPPAEPPCSGKGEAKGEPEAPPASGLASRAEAGAEAEAEEENTNPSSSGSAHSVAKEPAKGAAPNAPRTRKKRCPYSKFQIRELEREFFFNVYINKEKRLQLSRMLNLTDRQVKIWFQNRRMKEKKLSRDRLQYFSGNPLL

SEQ ID NO: 15135 - protein, 282 aa, Homo sapiens
MGEHNLLNPGFVGPLVNIHTGDTFYFPNFRASGAQLPGLPSLSYPRRDNVCSLSWPSAEPCNGYPQPYLGSPVSLNPPFGRTCELARVEDGKGYYREPCAEGGGGGLKREERGRDPGAGPGAALLPLEPSGPPALGFKYDYAAGGGGGDGGGGAGPPHDPPSCQSLESDSSSSLLNEGNKGAGAGDPGSLVSPLNPGGGLSASGAPWYPINSRSRKKRKPYSKLQLAELEGEFLVNEFITRQRRRELSDRLNLSDQQVKIWFQNRRMKKKRLLLREQALSFF

SEQ ID NO: 15136 - protein, 330 aa, Homo sapiens
MTTSLLLHPRWPESLMYVYEDSAAESGIGGGGGGGGGGTGGAGGGCSGASPGKAPSMDGLGSSCPASHCRDLLPHPVLGRPPAPLGAPQGAVYTDIPAPEAARQCAPPPAPPTSSSATLGYGYPFGGSYYGCRLSHNVNLQQKPCAYHPGDKYPEPSGALPGDDLSSRAKEFAFYPSFASSYQAMPGYLDVSVVPGISGHPEPRHDALIPVEGYQHWALSNGWDSQVYCSKEQSQSAHLWKSPFPDVVPLQPEVSSYRRGRKKRVPYTKVQLKELEKEYAASKFITKEKRRRISATTNLSERQVTIWFQNRRVKEKKVVSKSKAPHLHST

SEQ ID NO: 15137 - protein, 264 aa, Homo sapiens
MIMSSYLMDSNYIDPKFPPCEEYSQNSYIPEHSPEYYGRTRESGFQHHHQELYPPPPPRPSYPERQYSCTSLQGPGNSRGHGPAQAGHHHPEKSQSLCEPAPLSGASASPSPAPPACSQPAPDHPSSAASKQPIVYPWMKKIHVSTVNPNYNGGEPKRSRTAYTRQQVLELEKEFHYNRYLTRRRRIEIAHSLCLSERQIKIWFQNRRMKWKKDHRLPNTKVRSAPPAGAAPSTLSAATPGTSEDHSQSATPPEQQRAEDITRL

SEQ ID NO: 15138 - protein, 222 aa, Homo sapiens
MSSYVANSFYKQSPNIPAYNMQTCGNYGSASEVQASRYCYGGLDLSITFPPPAPSNSLHGVDMAANPRAHPDRPACSAAAAPGHAPGRDEAAPLNPGMYSQKAARPALEERAKSSGEIKEEQAQTGQPAGLSQPPAPPQIYPWMTKLHMSHETDGKRSRTSYTRYQTLELEKEFHFNRYLTRRRRIEIANNLCLNERQIKIWFQNRRMKWKKDSKMKSKEAL

SEQ ID NO: 15139 - protein, 235 aa, Homo sapiens
MNSYFTNPSLSCHLAGGQDVLPNVALNSTAYDPVRHFSTYGAAVAQNRIYSTPFYSPQENVVFSSSRGPYDYGSNSFYQEKDMLSNCRQNTLGHNTQTSIAQDFSSEQGRTAPQDQKASIQIYPWMQRMNSHSGVGYGADRRRGRQIYSRYQTLELEKEFHFNRYLTRRRRIEIANALCLTERQIKIWFQNRRMKWKKESNLTSTLSGGGGGATADSLGGKEEKREETEEEKQKE

SEQ ID NO: 15140 - protein, 242 aa, Homo sapiens
MSSYFVNPLFSKYKAGESLEPAYYDCRFPQSVGRSHALVYGPGGSAPGFQHASHHVQDFFHHGTSGISNSGYQQNPCSLSCHGDASKFYGYEALPRQSLYGAQQEASVVQYPDCKSSANTNSSEGQGHLNQNSSPSLMFPWMRPHAPGRRSGRQTYSRYQTLELEKEFLFNPYLTRKRRIEVSHALGLTERQVKIWFQNRRMKWKKENNKDKLPGARDEEKVEEEGNEEEEKEEEEKEENKD

SEQ ID NO: 15141 - protein, 260 aa, Homo sapiens
MSATGPISNYYVDSLISHDNEDLLASRFPATGAHPAAARPSGLVPDCSDFPSCSFAPKPAVFSTSWAPVPSQSSVVYHPYGPQPHLGADTRYMRTWLEPLSGAVSFPSFPAGGRHYALKPDAYPGRRADCGPGEGRSYPDYMYGSPGELRDRAPQTLPSPEADALAGSKHKEEKADLDPSNPVANWIHARSTRKKRCPYTKYQTLELEKEFLFNMYLTRDRRYEVARVLNLTERQVKIWFQNRRMKMKKMNKEKTDKEQS

SEQ ID NO: 15142 - protein, 328 aa, Homo sapiens
MSSYLEYVSCSSSGGVGGDVLSLAPKFCRSDARPVALQPAFPLGNGDGAFVSCLPLAAARPSPSPPAAPARPSVPPPAAPQYAQCTLEGAYEPGAAPAAAAGGADYGFLGSGPAYDFPGVLGRAADDGGSHVHYATSAVFSGGGSFLLSGQVDYAAFGEPGPFPACLKASADGHPGAFQTASPAPGTYPKSVSPASGLPAAFSTFEWMKVKRNASKKGKLAEYGAASPSSAIRTNFSTKQLTELEKEFHFNKYLTRARRIEIANCLHLNDTQVKIWFQNRRMKQKKREREGLLATAIPVAPLQLPLSGTTPTKFIKNPGSPSQSQEPS

SEQ ID NO: 15143 - protein, 340 aa, Homo sapiens
MSFPNSSPAANTFLVDSLISACRSDSFYSSSASMYMPPPSADMGTYGMQTCGLLPSLAKREVNHQNMGMNVHPYIPQVDSWTDPNRSCRIEQPVTQQVPTCSFTTNIKEESNCCMYSDKRNKLISAEVPSYQRLVPESCPVENPEVPVPGYFRLSQTYATGKTQEYNNSPEGSSTVMLQLNPRGAAKPQLSAAQLQMEKKMNEPVSGQEPTKVSQVESPEAKGGLPEERSCLAEVSVSSPEVQEKESKEEIKSDTPTSNWLTAKSGRKKRCPYTKHQTLELEKEFLFNMYLTRERRLEISKSVNLTDRQVKIWFQNRRMKLKKMSRENRIRELTANLTFS

SEQ ID NO: 15144 - protein, 338 aa, Homo sapiens
MNDFDECGQSAASMYLPGCAYYVAPSDFASKPSFLSQPSSCQMTFPYSSNLAPHVQPVREVAFRDYGLERAKWPYRGGGGGGSAGGGSSGGGPGGGGGGAGGYAPYYAAAAAAAAAAAAAEEAAMQRELLPPAGRRPDVLFKAPEPVCAAPGPPHGPAGAASNFYSAVGRNGILPQGFDQFYEAAPGPPFAGPQPPPPPAPPQPEGAADKGDPRTGAGGGGGSPCTKATPGSEPKGAAEGSGGDGEGPPGEAGAEKSSSAVAPQRSRKKRCPYTKYQIRELEREFFFNVYINKEKRLQLSRMLNLTDRQVKIWFQNRRMKEKKLNRDRLQYFTGNPLF

SEQ ID NO: 15145 - protein, 270 aa, Homo sapiens
MCERSLYRAGYVGSLLNLQSPDSFYFSNLRPNGGQLAALPPISYPRGALPWAATPASCAPAQPAGATAFGGFSQPYLAGSGPLGLQPPTAKDGPEEQAKFYAPEAAAGPEERGRTRPSFAPESSLAPAVAALKAAKYDYAGVGRATPGSTTLLQGAPCAPGFKDDTKGPLNLNMTVQAAGVASCLRPSLPDGLPWGAAPGRARKKRKPYTKQQIAELENEFLVNEFINRQKRKELSNRLNLSDQQVKIWFQNRRMKKKRVVLREQALALY

SEQ ID NO: 15146 - protein, 343 aa, Homo sapiens
MSRAGSWDMDGLRADGGGAGGAPASSSSSSVAAAAASGQCRGFLSAPVFAGTHSGRAAAAAAAAAAAAAAASGFAYPGTSERTGSSSSSSSSAVVAARPEAPPAKECPAPTPAAAAAAPPSAPALGYGYHFGNGYYSCRMSHGVGLQQNALKSSPHASLGGFPVEKYMDVSGLASSSVPANEVPARAKEVSFYQGYTSPYQHVPGYIDMVSTFGSGEPRHEAYISMEGYQSWTLANGWNSQVYCTKDQPQGSHFWKSSFPGDVALNQPDMCVYRRGRKKRVPYTKLQLKELENEYAINKFINKDKRRRISAATNLSERQVTIWFQNRRVKDKKIVSKLKDTVS

SEQ ID NO: 15147 - protein, 432 aa, Homo sapiens
MLFEQGQQALELPECTMQKAAYYENPGLFGGYGYSKTTDTYGYSTPHQPYPPPAAASSLDTDYPGSACSIQSSAPLRAPAHKGAELNGSCMRPGTGNSQGGGGGSQPPGLNSEQQPPQPPPPPPTLPPSSPTNPGGGVPAKKPKGGPNASSSSATISKQIFPWMKESRQNSKQKNSCATAGESCEDKSPPGPASKRVRTAYTSAQLVELEKEFHFNRYLCRPRRVEMANLLNLTERQIKIWFQNRRMKYKKDQKAKGILHSPASQSPERSPPLGGAAGHVAYSGQLPPVPGLAYDAPSPPAFAKSQPNMYGLAAYTAPLSSCLPQQKRYAAPEFEPHPMASNGGGFASANLQGSPVYVGGNFVESMAPASGPVFNLGHLSHPSSASVDYSCAAQIPGNHHHGPCDPHPTYTDLSAHHSSQGRLPEAPKLTHL

SEQ ID NO: 15148 - protein, 255 aa, Homo sapiens
MVMSSYMVNSKYVDPKFPPCEEYLQGGYLGEQGADYYGGGAQGADFQPPGLYPRPDFGEQPFGGSGPGPGSALPARGHGQEPGGPGGHYAAPGEPCPAPPAPPPAPLPGARAYSQSDPKQPPSGTALKQPAVVYPWMKKVHVNSVNPNYTGGEPKRSRTAYTRQQVLELEKEFHFNRYLTRRRRIEIAHTLCLSERQIKIWFQNRRMKWKKDHKLPNTKGRSSSSSSSSSCSSSVAPSQHLQPMAKDHHTDLTTL

SEQ ID NO: 15149 - protein, 290 aa, Homo sapiens
MSSYFVNPLYSKYKAAAAAAAAAGEAINPTYYDCHFAPEVGGRHAAAAAALQLYGNSAAGFPHAPPQAHAHPHPSPPPSGTGCGGREGRGQEYFHPGGGSPAAAYQAAPPPPPHPPPPPPPPPCGGIACHGEPAKFYGYDNLQRQPIFTTQQEAELVQYPDCKSSSGNIGEDPDHLNQSSSPSQMFPWMRPQAAPGRRRGRQTYSRFQTLELEKEFLFNPYLTRKRRIEVSHALALTERQVKIWFQNRRMKWKKENNKDKFPVSRQEVKDGETKKEAQELEEDRAEGLTN

SEQ ID NO: 15150 - protein, 352 aa, Homo sapiens
MLGGSAGRLKMSSSGTLSNYYVDSLIGHEGDEVFAARFGPPGPGAQGRPAGVADGPAATAAEFASCSFAPRSAVFSASWSAVPSQPPAAAAMSGLYHPYVPPPPLAASASEPGRYVRSWMEPLPGFPGGAGGGGGGGGGGPGRGPSPGPSGPANGRHYGIKPETRAAPAPATAASTTSSSSTSLSSSSKRTECSVARESQGSSGPEFSCNSFLQEKAAAATGGTGPGAGIGAATGTGGSSEPSACSDHPIPGCSLKEEEKQHSQPQQQQLDPNNPAANWIHARSTRKKRCPYTKYQTLELEKEFLFNMYLTRDRRYEVARILNLTERQVKIWFQNRRMKMKKMSKEKCPKGD

SEQ ID NO: 15151 - protein, 529 aa, Homo sapiens
MDLPVGPGAAGPSNVPAFLTKLWTLVSDPDTDALICWSPSGNSFHVFDQGQFAKEVLPKYFKHNNMASFVRQLNMYGFRKVVHIEQGGLVKPERDDTEFQHPCFLRGQEQLLENIKRKVTSVSTLKSEDIKIRQDSVTKLLTDVQLMKGKQECMDSKLLAMKHENEALWREVASLRQKHAQQQKVVNKLIQFLISLVQSNRILGVKRKIPLMLNDSGSAHSMPKYSRQFSLEHVHGSGPYSAPSPAYSSSSLYAPDAVASSGPIISDITELAPASPMASPGGSIDERPLSSSPLVRVKEEPPSPPQSPRVEEASPGRPSSVDTLLSPTALIDSILRESEPAPASVTALTDARGHTDTEGRPPSPPPTSTPEKCLSVACLDKNELSDHLDAMDSNLDNLQTMLSSHGFSVDTSALLDLFSPSVTVPDMSLPDLDSSLASIQELLSPQEPPRPPEAENSSPDSGKQLVHYTAQPLFLLDPGSVDTGSNDLPVLFELGEGSYFSEGDGFAEDPTISLLTGSEPPKAKDPTVS

SEQ ID NO: 15152 - protein, 536 aa, Homo sapiens
MKQSSNVPAFLSKLWTLVEETHTNEFITWSQNGQSFLVLDEQRFAKEILPKYFKHNNMASFVRQLNMYGFRKVVHIDSGIVKQERDGPVEFQHPYFKQGQDDLLENIKRKVSSSKPEENKIRQEDLTKIISSAQKVQIKQETIESRLSELKSENESLWKEVSELRAKHAQQQQVIRKIVQFIVTLVQNNQLVSLKRKRPLLLNTNGAQKKNLFQHIVKEPTDNHHHKVPHSRTEGLKPRERISDDIIIYDVTDDNADEENIPVIPETNEDVISDPSNCSQYPDIVIVEDDNEDEYAPVIQSGEQNEPARESLSSGSDGSSPLMSSAVQLNGSSSLTSEDPVTMMDSILNDNINLLGKVELLDYLDSIDCSLEDFQAMLSGRQFSIDPDLLVDLFTSSVQMNPTDYINNTKSENKGLETTKNNVVQPVSEEGRKSKSKPDKQLIQYTAFPLLAFLDGNPASSVEQASTTASSEVLSSVDKPIEVDELLDSSLDPEPTQSKLVRLEPLTEAEASEATLFYLCELAPAPLDSDMPLLDS

SEQ ID NO: 15153 - protein, 492 aa, Homo sapiens
MQEAPAALPTEPGPSPVPAFLGKLWALVGDPGTDHLIRWSPSGTSFLVSDQSRFAKEVLPQYFKHSNMASFVRQLNMYGFRKVVSIEQGGLLRPERDHVEFQHPSFVRGREQLLERVRRKVPALRGDDGRWRPEDLGRLLGEVQALRGVQESTEARLRELRQQNEILWREVVTLRQSHGQQHRVIGKLIQCLFGPLQAGPSNAGGKRKLSLMLDEGSSCPTPAKFNTCPLPGALLQDPYFIQSPLPETNLGLSPHRARGPIISDIPEDSPSPEGTRLSPSSDGRREKGLALLKEEPASPGGDGEAGLALAPNECDFCVTAPPPLPVAVVQAILEGKGSFSPEGPRNAQQPEPGDPREIPDRGPLGLESGDRSPESLLPPMLLQPPQESVEPAGPLDVLGPSLQGREWTLMDLDMELSLMQPLVPERGEPELAVKGLNSPSPGKDPTLGAPLLLDVQAALGGPALGLPGALTIYSTPESRTASYLGPEASPSP

SEQ ID NO: 15154 - protein, 596 aa, Homo sapiens
MEALLSTPINPNNFPAKLWRLVNSPRYRSIRWDGRGEGLLIDQPLFEAELLSPPGPGGGGGTAGAGAEPELFKTTSFTSFIRQLNLYGFRKVVLGGPGGGKPAGNGPLHHFHNPHFRRDQPQLLVHLKRLTSANKAKLAAGLEVPCRPPNRFQRLLITSASAATAPLQHQQPPPPAGPRPEPHGPVAVGQFHRSFRRDSLSPYSCVSTPSHDHSTYPLKGLDRTPVPHRIWQNSLGMHPGQVETSPTFSDKGVPFPVLQRFPTEVTYTLQPSTTSVHVQQGPQTMVSSSQKYSNYTPSAQYSQAYYPTAVLQCCSPTHMDALSSCVTPNASSYAHCNYFQNPSMQSSYPVEFLPSNWPCSTTDENTKTEVNLEAVFQIVDELHSSPKLEMVKVEPVENQCPTSPSYRGQHILANSNNSNPCSASQASQLEPLTPVGSDIMSFVVGTEQAVACSLPQSPEYIYTIHTAQPVENSTIQESAAIQQAHVKLKEHLNHNPSPSSVVFVQEGPPFSTHQVDANIKCQTSSRENILPSEQMGFLISEMGPASKPSEDTGLATPARYREHRSNSQQGKSPDLHLLVDVACKQERFPKEEELKE

SEQ ID NO: 15155 - protein, 423 aa, Homo sapiens
MEDKRSLSMARCEERNSRGQDHGLERVPFPPQLQSETYLHPADPSPAWDDPGSTGSPNLRLLTEEIAFQPLAEEASFRRPHPDGDVPPQGEDNLLSLPFPQKLWRLVSSNQFSSIWWDDSGACRVINQKLFEKEILKRDVAHKVFATTSIKSFFRQLNLYGFRKRRQCTFRTFTRIFSAKRLVSILNKLEFYCHPYFQRDSPHLLVRMKRRVGVKSAPRHQEEDKPEAAGSCLAPADTEQQDHTSPNENDQVTPQHREPAGPNTQIRSGSAPPATPVMVPDSAVASDNSPVTQPAGEWSEGSQAHVTPVAAVPGPAALPFLYVPGSPTQMNSYGPVVALPTASRSTLAMDTTGLPAPGMLPFCHLWVPVTLVAAGAAQPAASMVMFPHLPALHHHCPHSHRTSQYMPASDGPQAYPDYADQST

SEQ ID NO: 15156 - protein, 401 aa, Homo sapiens
MAHVSSETQDVSPKDELTASEASTRSPLCEHTFPGDSDLRSMIEEHAFQVLSQGSLLESPSYTVCVSEPDKDDDFLSLNFPRKLWKIVESDQFKSISWDENGTCIVINEELFKKEILETKAPYRIFQTDAIKSFVRQLNLYGFSKIQQNFQRSAFLATFLSEEKESSVLSKLKFYYNPNFKRGYPQLLVRVKRRIGVKNASPISTLFNEDFNKKHFRAGANMENHNSALAAEASEESLFSASKNLNMPLTRESSVRQIIANSSVPIRSGFPPPSPSTSVGPSEQIATDQHAILNQLTTIHMHSHSTYMQARGHIVNFITTTTSQYHIISPLQNGYFGLTVEPSAVPTRYPLVSVNEAPYRNMLPAGNPWLQMPTIADRSAAPHSRLALQPSPLDKYHPNYN

SEQ ID NO: 15157 - protein, 155 aa, Homo sapiens; identical to SEQ ID NO: 6700

SEQ ID NO: 15158 - protein, 134 aa, Homo sapiens
MKAFSPVRSVRKNSLSDHSLGISRSKTPVDDPMSLLYNMNDCYSKLKELVPSIPQNKKVSKMEILQHVIDYILDLQIALDSHPTIVSLHHQRPGQNQASRTPLTTLNTDISILSLQASEFPSELMSNDSKALCG

SEQ ID NO: 15159 - protein, 119 aa, Homo sapiens
MKALSPVRGCYEAVCCLSERSLAIARGRGKGPAAEEPLSLLDDMNHCYSRLRELVPGVPRGTQLSQVEILQRVIDYILDLQVVLAEPAPGPPDGPHLPIQTAELTPELVISNDKRSFCH

SEQ ID NO: 15160 - protein, 161 aa, Homo sapiens
MKAVSPVRPSGRKAPSGCGGGELALRCLAEHGHSLGGSAAAAAAAAAARCKAAEAAADEPALCLQCDMNDCYSRLRRLVPTIPPNKKVSKVEILQHVIDYILDLQLALETHPALLRQPPPPAPPHHPAGTCPAAPPRTPLTALNTDPAGAVNKQGDSILCR

SEQ ID NO: 15161 - protein, 785 aa, Homo sapiens
MGKKYKNIVLLKGLEVINDYHFRMVKSLLSNDLKLNLKMREEYDKIQIADLMEEKFRGDAGLGKLIKIFEDIPTLEDLAETLKKEKLKVKGPALSRKRKKEVDATSPAPSTSSTVKTEGAEATPGAQKRKKSTKEKAGPKGSKVSEEQTQPPSPAGAGMSTAMGRSPSPKTSLSAPPNSSSTENPKTVAKCQVTPRRNVLQKRPVIVKVLSTTKPFEYETPEMEKKIMFHATVATQTQFFHVKVLNTSLKEKFNGKKIIIISDYLEYDSLLEVNEESTVSEAGPNQTFEVPNKIINRAKETLKIDILHKQASGNIVYGVFMLHKKTVNQKTTIYEIQDDRGKMDVVGTGQCHNIPCEEGDKLQLFCFRLRKKNQMSKLISEMHSFIQIKKKTNPRNNDPKSMKLPQEQRQLPYPSEASTTFPESHLRTPQMPPTTPSSSFFTKKSEDTISKMNDFMRMQILKEGSHFPGPFMTSIGPAESHPHTPQMPPSTPSSSFLTTKSEDTISKMNDFMRMQILKEGSHFPGPFMTSIGPAESHPHTPQMPPSTPSSSFLTTLKPRLKTEPEEVSIEDSAQSDLKEVMVLNATESFVYEPKEQKKMFHATVATENEVFRVKVFNIDLKEKFTPKKIIAIANYVCRNGFLEVYPFTLVADVNADRNMEIPKGLIRSASVTPKINQLCSQTKGSFVNGVFEVHKKNVRGEFTYYEIQDNTGKMEVVVHGRLTTINCEEGDKLKLTCFELAPKSGNTGELRSVIHSHIKVIKTRKNKKDILNPDSSMETSPDFFF

SEQ ID NO: 15162 - protein, 519 aa, Homo sapiens
MDADEGQDMSQVSGKESPPVSDTPDEGDEPMPIPEDLSTTSGGQQSSKSDRVVASNVKVETQSDEENGRACEMNGEECAEDLRMLDASGEKMNGSHRDQGSSALSGVGGIRLPNGKLKCDICGIICIGPNVLMVHKRSHTGERPFQCNQCGASFTQKGNLLRHIKLHSGEKPFKCHLCNYACRRRDALTGHLRTHSVGKPHKCGYCGRSYKQRSSLEEHKERCHNYLESMGLPGTLYPVIKEETNHSEMAEDLCKIGSERSLVLDRLASNVAKRKSSMPQKFLGDKGLSDTPYDSSASYEKENEMMKSHVMDQAINNAINYLGAESLRPLVQTPPGGSEVVPVISPMYQLHKPLAEGTPRSNHSAQDSAVENLLLLSKAKLVPSEREASPSNSCQDSTDTESNNEEQRSGLIYLTNHIAPHARNGLSLKEEHRAYDLLRAASENSQDALRVVSTSGEQMKVYKCEHCRVLFLDHVMYTIHMGCHGFRDPFECNMCGYHSQDRYEFSSHITRGEHRFHMS

SEQ ID NO: 15163 - protein, 526 aa, Homo sapiens [sequence omitted]

SEQ ID NO: 15164 - protein, 509 aa, Homo sapiens
MEDIQTNAELKSTQEQSVPAESAAVLNDYSLTKSHEMENVDSGEGPANEDEDIGDDSMKVKDEYSERDENVLKSEPMGNAEEPEIPYSYSREYNEYENIKLERHVVSFDSSRPTSGKMNCDVCGLSCISFNVLMVHKRSHTGERPFQCNQCGASFTQKGNLLRHIKLHTGEKPFKCHLCNYACQRRDALTGHLRTHSVEKPYKCEFCGRSYKQRSSLEEHKERCRTFLQSTDPGDTASAEARHIKAEMGSERALVLDRLASNVAKRKSSMPQKFIGEKRHCFDVNYNSSYMYEKESELIQTRMMDQAINNAISYLGAEALRPLVQTPPAPTSEMVPVISSMYPIALTRAEMSNGAPQELEKKSIHLPEKSVPSERGLSPNNSGHDSTDTDSNHEERQNHIYQQNHMVLSRARNGMPLLKEVPRSYELLKPPPICPRDSVKVINKEGEVMDVYRCDHCRVLFLDYVMFTIHMGCHGFRDPFECNMCGYRSHDRYEFSSHIARGEHRALLK

SEQ ID NO: 15165 - protein, 585 aa, Homo sapiens
MHTPPALPRRFQGGGRVRTPGSHRQGKDNLERDPSGGCVPDFLPQAQDSNHFIMESLFCESSGDSSLEKEFLGAPVGPSVSTPNSQHSSPSRSLSANSIKVEMYSDEESSRLLGPDERLLEKDDSVIVEDSLSEPLGYCDGSGPEPHSPGGIRLPNGKLKCDVCGMVCIGPNVLMVHKRSHTGERPFHCNQCGASFTQKGNLLRHIKLHSGEKPFKCPFCNYACRRRDALTGHLRTHSVSSPTVGKPYKCNYCGRSYKQQSTLEEHKERCHNYLQSLSTEAQALAGQPGDEIRDLEMVPDSMLHSSSERPTFIDRLANSLTKRKRSTPQKFVGEKQMRFSLSDLPYDVNSGGYEKDVELVAHHSLEPGFGSSLAFVGAEHLRPLRLPPTNCISELTPVISSVYTQMQPLPGRLELPGSREAGEGPEDLADGGPLLYRPRGPLTDPGASPSNGCQDSTDTESNHEDRVAGVVSLPQGPPPQPPPTIVVGRHSPAYAKEDPKPQEGLLRGTPGPSKEVLRVVGESGEPVKAFKCEHCRILFLDHVMFTIHMGCHGFRDPFECNICGYHSQDRYEFSSHIVRGEHKVG

SEQ ID NO: 15166 - protein, 419 aa, Homo sapiens
MGEKKPEPLDFVKDFQEYLTQQTHHVNMISGSVSGDKEAEALQGAGTDGDQNGLDHPSVEVSLDENSGMLVDGFERTFDGKLKCRYCNYASKGTARLIEHIRIHTGEKPHRCHLCPFASAYERHLEAHMRSHTGEKPYKCELCSFRCSDRSNLSHHRRRKHKMVPIKGTRSSLSSKKMWGVLQKKTSNLGYSRRALINLSPPSMVVQKPDYLNDFTHEIPNIQTDSYESMAKTTPTGGLPRDPQELMVDNPLNQLSTLAGQLSSLPPENQNPASPDVVPCPDEKPFMIQQPSTQAVVSAVSASIPQSSSPTSPEPRPSHSQRNYSPVAGPSSEPSAHTSTPSIGNSQPSTPAPALPVQDPQLLHHCQHCDMYFADNILYTIHMGCHGYENPFQCNICGCKCKNKYDFACHFARGQHNQH

SEQ ID NO: 15167 - protein, 510 aa, Homo sapiens
MPRGFLVKRSKKSTPVSYRVRGGEDGDRALLLSPSCGGARAEPPAPSPVPGPLPPPPPAERAHAALAAALACAPGPQPPPQGPRAAHFGNPEAAHPAPLYSPTRPVSREHEKHKYFERSFNLGSPVSAESFPTPAALLGGGGGGGASGAGGGGTCGGDPLLFAPAELKMGTAFSAGAEAARGPGPGPPLPPAAALRPPGKRPPPPTAAEPPAKAVKAPGAKKPKAIRKLHFEDEVTTSPVLGLKIKEGPVEAPRGRAGGAARPLGEFICQLCKEEYADPFALAQHKCSRIVRVEYRCPECAKVFSCPANLASHRRWHKPRPAPAAARAPEPEAAARAEAREAPGGGSDRDTPSPGGVSESGSEDGLYECHHCAKKFRRQAYLRKHLLAHHQALQAKGAPLAPPAEDLLALYPGPDEKAPQEAAGDGEGAGVLGLSASAECHLCPVCGESFASKGAQERHLRLLHAAQVFPCKYCPATFYSSPGLTRHINKCHPSENRQVILLQVPVRPAC

SEQ ID NO: 15168 - protein, 566 aa, Homo sapiens
MPRGFLVKRTKRTGGLYRVRLAERVFPLLGPQGAPPFLEEAPSASLPGAERATPPTREEPGKGLTAEAAREQSGSPCRAAGVSPGTGGREGAEWRAGGREGPGPSPSPSPSPAKPAGAELRRAFLERCLSSPVSAESFPGGAAAVAAFSCSVAPAAAPTPGEQFLLPLRAPFPEPALQPDPAPLSAALQSLKRAAGGERRGKAPTDCASGPAAAGIKKPKAMRKLSFADEVTTSPVLGLKIKEEEPGAPSRGLGGSRTPLGEFICQLCKEQYADPFALAQHRCSRIVRVEYRCPECDKVFSCPANLASHRRWHKPRPAAANAATVSSADGKPPSSSSSSSRDSGAIASFLAEGKENSRIERTADQHPQARDSSGADQHPDSAPRQGLQVLTHPEPPLPQGPYTEGVLGRRVPVPGSTSGGRGSEIFVCPYCHKKFRRQAYLRKHLSTHEAGSARALAPGFGSERGAPLAFACPLCGAHFPTADIREKHRLWHAVREELLLPALAGAPPETSGPSGPSDGSAQQIFSCKHCPSTFFSSPGLTRHINKCHPSESRQVLLLQMPLRPGC

SEQ ID NO: 15169 - protein, 325 aa, Homo sapiens
MPITRMRMRPWLEMQINSNQIPGLIWINKEEMIFQIPWKHAAKHGWDINKDACLFRSWAIHTGRYKAGEKEPDPKTWKANFRCAMNSLPDIEEVKDQSRNKGSSAVRVYRMLPPLTKNQRKERKSKSSRDAKSKAKRKSCGDSSPDTFSDGLSSSTLPDDHSSYTVPGYMQDLEVEQALTPALSPCAVSSTLPDWHIPVEVVPDSTSDLYNFQVSPMPSTSEATTDEDEEGKLPEDIMKLLEQSEWQPTNVDGKGYLLNEPGVQPTSVYGDFSCKEEPEIDSPGGDIGLSLQRVFTDLKNMDATWLDSLLTPVRLPSIQAIPCAP

SEQ ID NO: 15170 - protein, 349 aa, Homo sapiens
MPVERMRMRPWLEEQINSNTIPGLKWLNKEKKIFQIPWMHAARHGWDVEKDAPLFRNWAIHTGKHQPGVDKPDPKTWKANFRCAMNSLPDIEEVKDKSIKKGNNAFRVYRMLPLSERPSKKGKKPKTEKEDKVKHIKQEPVESSLGLSNGVSDLSPEYAVLTSTIKNEVDSTVNIIVVGQSHLDSNIENQEIVTNPPDICQVVEVTTESDEQPVSMSELYPLQISPVSSYAESETTDSVPSDEESAEGRPHWRKRNIEGKQYLSNMGTRGSYLLPGMASFVTSNKPDLQVTIKEESNPVPYNSSWPPFQDLPLSSSMTPASSSSRPDRETRASVIKKTSDITQARVKSC

SEQ ID NO: 15171 - protein, 427 aa, Homo sapiens
MGTPKPRILPWLVSQLDLGQLEGVAWVNKSRTRFRIPWKHGLRQDAQQEDFGIFQAWAEATGAYVPGRDKPDLPTWKRNFRSALNRKEGLRLAEDRSKDPHDPHKIYEFVNSGVGDFSQPDTSPDTNGGGSTSDTQEDILDELLGNMVLAPLPDPGPPSLAVAPEPCPQPLRSPSLDNPTPFPNLGPSENPLKRLLVPGEEWEFEVTAFYRGRQVFQQTISCPEGLRLVGSEVGDRTLPGWPVTLPDPGMSLTDRGVMSYVRHVLSCLGGGLALWRAGQWLWAQRLGHCHTYWAVSEELLPNSGHGPDGEVPKDKEGGVFDLGPFIVDLITFTEGSGRSPRYALWFCVGESWPQDQPWTKRLVMVKVVPTCLRALVEMARVGGASSLENTVDLHISNSHPLSLTSDQYKAYLQDLVEGMDFQGPGES

SEQ ID NO: 15172 - protein, 451 aa, Homo sapiens
MNLEGGGRGGEFGMSAVSCGNGKLRQWLIDQIDSGKYPGLVWENEEKSIFRIPWKHAGKQDYNREEDAALFKAWALFKGKFREGIDKPDPPTWKTRLRCALNKSNDFEELVERSQLDISDPYKVYRIVPEGAKKGAKQLTLEDPQMSMSHPYTMTTPYPSLPAQQVHNYMMPPLDRSWRDYVPDQPHPEIPYQCPMTFGPRGHHWQGPACENGCQVTGTFYACAPPESQAPGVPTEPSIRSAEALAFSDCRLHICLYYREILVKELTTSSPEGCRISHGHTYDASNLDQVLFPYPEDNGQRKNIEKLLSHLERGVVLWMAPDGLYAKRLCQSRIYWDGPLALCNDRPNKLERDQTCKLFDTQQFLSELQAFAHHGRSLPRFQVTLCFGEEFPDPQRQRKLITAHVEPLLARQLYYFAQQNSGHFLRGYDLPEHISNPEDYHRSIRHSSIQE

SEQ ID NO: 15173 - protein, 498 aa, Homo sapiens
MNQSIPVAPTPPRRVRLKPWLVAQVNSCQYPGLQWVNGEKKLFCIPWRHATRHGPSQDGDNTIFKAWAKETGKYTEGVDEADPAKWKANLRCALNKSRDFRLIYDGPRDMPPQPYKIYEVCSNGPAPTDSQPPEDYSFGAGEEEEEEEELQRMLPSLSLTEDVKWPPTLQPPTLRPPTLQPPTLQPPVVLGPPAPDPSPLAPPPGNPAGFRELLSEVLEPGPLPASLPPAGEQLLPDLLISPHMLPLTDLEIKFQYRGRPPRALTISNPHGCRLFYSQLEATQEQVELFGPISLEQVRFPSPEDIPSDKQRFYTNQLLDVLDRGLILQLQGQDLYAIRLCQCKVFWSGPCASAHDSCPNPIQREVKTKLFSLEHFLNELILFQKGQTNTPPPFEIFFCFGEEWPDRKPREKKLITVQVVPVAARLLLEMFSGELSWSADSIRLQISNPDLKDRMVEQFKELHHIWQSQQRLQPVAQAPPGAGLGVGQGPWPMHPAGMQ

SEQ ID NO: 15174 - protein, 467 aa, Homo sapiens
MALHPRRVRLKPWLVAQVDSGLYPGLIWLHRDSKRFQIPWKHATRHSPQQEEENTIFKAWAVETGKYQEGVDDPDPAKWKAQLRCALNKSREFNLMYDGTKEVPMNPVKIYQVCDIPQPQGSIINPGSTGSAPWDEKDNDVDEEDEEDELDQSQHHVPIQDTFPFLNINGSPMAPASVGNCSVGNCSPEAVWPKTEPLEMEVPQAPIQPFYSSPELWISSLPMTDLDIKFQYRGKEYGQTMTVSNPQGCRLFYGDLGPMPDQEELFGPVSLEQVKFPGPEHITNEKQKLFTSKLLDVMDRGLILEVSGHAIYAIRLCQCKVYWSGPCAPSLVAPNLIERQKKVKLFCLETFLSDLIAHQKGQIEKQPPFEIYLCFGEEWPDGKPLERKLILVQVIPVVARMIYEMFSGDFTRSFDSGSVRLQISTPDIKDNIVAQLKQLYRILQTQESWQPMQPTPSMQLPPALPPQ

SEQ ID NO: 15175 - protein, 503 aa, Homo sapiens
MALAPERAAPRVLFGEWLLGEISSGCYEGLQWLDEARTCFRVPWKHFARKDLSEADARIFKAWAVARGRWPPSSRGGGPPPEAETAERAGWKTNFRCALRSTRRFVMLRDNSGDPADPHKVYALSRELCWREGPGTDQTEAEAPAAVPPPQGGPPGPFLAHTHAGLQAPGPLPAPAGDKGDLLLQAVQQSCLADHLLTASWGADPVPTKAPGEGQEGLPLTGACAGGPGLPAGELYGWAVETTPSPGPQPAALTTGEAAAPESPHQAEPYLSPSPSACTAVQEPSPGALDVTIMYKGRTVLQKVVGHPSCTFLYGPPDPAVRATDPQQVAFPSPAELPDQKQLRYTEELLRHVAPGLHLELRGPQLWARRMGKCKVYWEVGGPPGSASPSTPACLLPRNCDTPIFDFRVFFQELVEFRARQRRGSPRYTIYLGFGQDLSAGRPKEKSLVLVKLEPWLCRVHLEGTQREGVSSLDSSSLSLCLSSANSLYDDIECFLMELEQPA

SEQ ID NO: 15176 - protein, 426 aa, Homo sapiens
MCDRNGGRRLRQWLIEQIDSSMYPGLIWENEEKSMFRIPWKHAGKQDYNQEVDASIFKAWAVFKGKFKEGDKAEPATWKTRLRCALNKSPDFEEVTDRSQLDISEPYKVYRIVPEEEQKCKLGVATAGCVNEVTEMECGRSEIDELIKEPSVDDYMGMIKRSPSPPEACRSQLLPDWWAQQPSTGVPLVTGYTTYDAHHSAFSQMVISFYYGGKLVGQATTTCPEGCRLSLSQPGLPGTKLYGPEGLELVRFPPADAIPSERQRQVTRKLFGHLERGVLLHSSRQGVFVKRLCQGRVFCSGNAVVCKGRPNKLERDEVVQVFDTSQFFRELQQFYNSQGRLPDGRVVLCFGEEFPDMAPLRSKLILVQIEQLYVRQLAEEAGKSCGAGSVMQAPEEPPPDQVFRMFPDICASHQRSFFRENQQITV

SEQ ID NO: 15177 - protein, 393 aa, Homo sapiens
MASGRARCTRKLRNWVVEQVESGQFPGVCWDDTAKTMFRIPWKHAGKQDFREDQDAAFFKAWAIFKGKYKEGDTGGPAVWKTRLRCALNKSSEFKEVPERGRMDVAEPYKVYQLLPPGIVSGQPGTQKVPSKRQHSSVSSERKEEEDAMQNCTLSPSVLQDSLNNEEEGASGGAVHSDIGSSSSSSSPEPQEVTDTTEAPFQGDQRSLEFLLPPEPDYSLLLTFIYNGRVVGEAQVQSLDCRLVAEPSGSESSMEQVLFPKPGPLEPTQRLLSQLERGILVASNPRGLFVQRLCPIPISWNAPQAPPGPGPHLLPSNECVELFRTAYFCRDLVRYFQGLGPPPKFQVTLNFWEESHGSSHTPQNLITVKMEQAFARYLLEQTPEQQAAILSLV

SEQ ID NO: 15178 - protein, 480 aa, Homo sapiens
MSFPQLGYPQYLSAAGPGAYGGERPGVLAAAAAAAAAASSGRPGAAELGGGAGAAAVTSVLGMYAAAGPYAGAPNYSAFLPYAADLSLFSQMGSQYELKDNPGVHPATFAAHTAPAYYPYGQFQYGDPGRPKNATRESTSTLKAWLNEHRKNPYPTKGEKIMLAIITKMTLTQVSTWFANARRRLKKENKVTWGARSKDQEDGALFGSDTEGDPEKAEDDEEIDLESIDIDKIDEHDGDQSNEDDEDKAEAPHAPAAPSALARDQGSPLAAADVLKPQDSPLGLAKEAPEPGSTRLLSPGAAAGGLQGAPHGKPKIWSLAETATSPDGAPKASPPPPAGHPGAHGPSAGAPLQHPAFLPSHGLYTCHIGKFSNWTNSAFLAQGSLLNMRSFLGVGAPHAAPHGPHLPAPPPPQPPVAIAPGALNGDKASVRSSPTLPERDLVPRPDSPAQQLKSPFQPVRDNSLAPQEGTPRILAALPSA

SEQ ID NO: 15179 - protein, 471 aa, Homo sapiens
MSYPQGYLYQAPGSLALYSCPAYGASALAAPRSEELARSASGSAFSPYPGSAAFTAQAATGFGSPLQYSADAAAAAAGFPSYMGAPYDAHTTGMTGAISYHPYGSAAYPYQLNDPAYRKNATRDATATLKAWLNEHRKNPYPTKGEKIMLAIITKMTLTQVSTWFANARRRLKKENKMTWAPRNKSEDEDEDEGDATRSKDESPDKAQEGTETSAEDEGISLHVDSLTDHSCSAESDGEKLPCRAGDPLCESGSECKDKYDDLEDDEDDDEEGERGLAPPKPVTSSPLTGLEAPLLSPPPEAAPRGGRKTPQGSRTSPGAPPPASKPKLWSLAEIATSDLKQPSLGPGCGPPGLPAAAAPASTGAPPGGSPYPASPLLGRPLYYTSPFYGNYTNYGNLNAALQGQGLLRYNSAAAAPGEALHTAPKAASDAGKAGAHPLESHYRSPGGGYEPKKDASEGCTVVGGGVQPYL

SEQ ID NO: 15180 - protein, 501 aa, Homo sapiens
MSFPQLGYQYIRPLYPSERPGAAGGSGGSAGARGGLGAGASELNASGSLSNVLSSVYGAPYAAAAAAAAAQGYGAFLPYAAELPIFPQLGAQYELKDSPGVQHPAAAAAFPHPHPAFYPYGQYQFGDPSRPKNATRESTSTLKAWLNEHRKNPYPTKGEKIMLAIITKMTLTQVSTWFANARRRLKKENKMTWAPRSRTDEEGNAYGSEREEEDEEEDEEDGKRELELEEEELGGEEEDTGGEGLADDDEDEEIDLENLDGAATEPELSLAGAARRDGDLGLGPISDSKNSDSEDSSEGLEDRPLPVLSLAPAPPPVAVASPSLPSPPVSLDPCAPAPAPASALQKPKIWSLAETATSPDNPRRSPPGAGGSPPGAAVAPSALQLSPAAAAAAAHRLVSAPLGKFPAWTNRPFPGPPPGPRLHPLSLLGSAPPHLLGLPGAAGHPAAAAAFARPAEPEGGTDRCSALEVEKKLLKTAFQPVPRRPQNHLDAALVLSALSSS

SEQ ID NO: 15181 - protein, 519 aa, Homo sapiens
MSYPQFGYPYSSAPQFLMATNSLSTCCESGGRTLADSGPAASAQAPVYCPVYESRLLATARHELNSAAALGVYGGPYGGSQGYGNYVTYGSEASAFYSLNSFDSKDGSGSAHGGLAPAAAAYYPYEPALGQYPYDRYGTMDSGTRRKNATRETTSTLKAWLQEHRKNPYPTKGEKIMLAIITKMTLTQVSTWFANARRRLKKENKMTWPPRNKCADEKRPYAEGEEEEGGEEEAREEPLKSSKNAEPVGKEEKELELSDLDDFDPLEAEPPACELKPPFHSLDGGLERVPAAPDGPVKEASGALRMSLAAGGGAALDEDLERARSCLRSAAAGPEPLPGAEGGPQVCEAKLGFVPAGASAGLEAKPRIWSLAHTATAAAAAATSLSQTEFPSCMLKRQGPAAPAAVSSAPATSPSVALPHSGALDRHQDSPVTSLRNWVDGVFHDPILRHSTLNQAWATAKGALLDPGPLGRSLGAGANVLTAPLARAFPPAVPQDAPAAGAARELLALPKAGGKPFCA

SEQ ID NO: 15182 - protein, 483 aa, Homo sapiens
MSYPQGYLYQPSASLALYSCPAYSTSVISGPRTDELGRSSSGSAFSPYAGSTAFTAPSPGYNSHLQYGADPAAAAAAAFSSYVGSPYDHTPGMAGSLGYHPYAAPLGSYPYGDPAYRKNATRDATATLKAWLNEHRKNPYPTKGEKIMLAIITKMTLTQVSTWFANARRRLKKENKMTWTPRNRSEDEEEEENIDLEKNDEDEPQKPEDKGDPEGPEAGGAEQKAASGCERLQGPPTPAGKETEGSLSDSDFKEPPSEGRLDALQGPPRTGGPSPAGPAAARLAEDPAPHYPAGAPAPGPHPAAGEVPPGPGGPSVIHSPPPPPPPAVLAKPKLWSLAEIATSSDKVKDGGGGNEGSPCPPCPGPIAGQALGGSRASPAPAPSRSPSAQCPFPGGTVLSRPLYYTAPFYPGYTNYGSFGHLHGHPGPGPGPTTGPGSHFNGLNQTVLNRADALAKDPKMLRSQSQLDLCKDSPYELKKGMSDI

SEQ ID NO: 15183 - protein, 446 aa, Homo sapiens
MSFPHFGHPYRGASQFLASASSSTTCCESTQRSVSDVASGSTPAPALCCAPYDSRLLGSARPELGAALGIYGAPYAAAAAAQSYPGYLPYSPEPPSLYGALNPQYEFKEAAGSFTSSLAQPGAYYPYERTLGQYQYERYGAVELSGAGRRKNATRETTSTLKAWLNEHRKNPYPTKGEKIMLAIITKMTLTQVSTWFANARRRLKKENKMTWAPKNKGGEERKAEGGEEDSLGCLTADTKEVTASQEARGLRLSDLEDLEEEEEEEEEAEDEEVVATAGDRLTEFRKGAQSLPGPCAAAREGRLERRECGLAAPRFSFNDPSGSEEADFLSAETGSPRLTMHYPCLEKPRIWSLAHTATASAVEGAPPARPRPRSPECRMIPGQPPASARRLSVPRDSACDESSCIPKAFGNPKFALQGLPLNCAPCPRRSEPVVQCQYPSGAEAG

SEQ ID NO: 15184 - protein, 349 aa, Homo sapiens
MGDMGDPPKKKRLISLCVGCGNQIHDQYILRVSPDLEWHAACLKCAECNQYLDESCTCFVRDGKTYCKRDYIRLYGIKCAKCSIGFSKNDFVMRARSKVYHIECFRCVACSRQLIPGDEFALREDGLFCRADHDVVERASLGAGDPLSPLHPARPLQMAAEPISARQPALRPHVHKQPEKTTRVRTVLNEKQLHTLRTCYAANPRPDALMKEQLVEMTGLSPRVIRVWFQNKRCKDKKRSIMMKQLQQQQPNDKTNIQGMTGTPMVAASPERHDGGLQANPVEVQSYQPPWKVLSDFALQSDIDQPAFQQLVNFSEGGPGSNSTGSEVASMSSQLPDTPNSMVASPIEA

SEQ ID NO: 15185 - protein, 359 aa, Homo sapiens
MVDIIFHYPFLGAMGDHSKKKPGTAMCVGCGSQIHDQFILRVSPDLEWHAACLKCAECSQYLDETCTCFVRDGKTYCKRDYVRLFGIKCAKCQVGFSSSDLVMRARDSVYHIECFRCSVCSRQLLPGDEFSLREHELLCRADHGLLLERAAAGSPRSPGPLPGARGLHLPDAGSGRQPALRPHVHKQTEKTTRVRTVLNEKQLHTLRTCYAANPRPDALMKEQLVEMTGLSPRVIRVWFQNKRCKDKKKSILMKQLQQQQHSDKTSLQGLTGTPLVAGSPIRHENAVQGSAVEVQTYQPPWKALSEFALQSDLDQPAFQQLVSFSESGSLGNSSGSDVTSLSSQLPDTPNSMVPSPVET

SEQ ID NO: 15186 - protein, 245 aa, Homo sapiens
MCAEVGPALCRGMERNSLGCCEAPKKLSLSFSIEAILKRPARRSDMDRPEGPGEEGPGEAAASGSGLEKPPKDQPQEGRKSKRRVRTTFTTEQLHELEKIFHFTHYPDVHIRSQLAARINLPEARVQIWFQNQRAKWRKQEKIGNLGAPQQLSEASVALPTNLDVAGPTWTSTALRRLAPPTSCCPSAQDQLASAWFPAWITLLPAHPWETQPVPGLPIHQTCIPVLCILPPPHPKWGSICATST

SEQ ID NO: 15187 - protein, 1246 aa, Homo sapiens [sequence omitted]

SEQ ID NO: 15188 - protein, 243 aa, Homo sapiens
MTGIAAASFFSNTCRFGGCGLHFPTLADLIEHIEDNHIDTDPRVLEKQELQQPTYVALSYINRFMTDAARREQESLKKKIQPKLSLTLSSSVSRGNVSTPPRHSSGSLTPPVTPPITPSSSFRSSTPTGSEYDEEEVDYEESDSDESWTTESAISSEAILSSMCMNGGEEKPFACPVPGCKKRYKNVNGIKYHAKNGHRTQIRVRKPFKCRCGKSYKTAQGLRHHTINFHPPVSAEIIRKMQQ

SEQ ID NO: 15189 - protein, 163 aa, Homo sapiens
MMPGQIPDPSVTTGSLPGLGPLTGLPSSALTVEELKYADIRNLGAMIAPLHFLEVKLGKRPQPVKSELDEEEERRKRRREKNKVAAARCRNKKKERTEFLQRESERLELMNAELKTQIEELKQERQQLILMLNRHRPTCIVRTDSVKTPESEGNPLLEQLEKK

SEQ ID NO: 15190 - protein, 331 aa, Homo sapiens
MTAKMETTFYDDALNASFLPSESGPYGYSNPKILKQSMTLNLADPVGSLKPHLRAKNSDLLTSPDVGLLKLASPELERLIIQSSNGHITTTPTPTQFLCPKNVTDEQEGFAEGFVRALAELHSQNTLPSVTSAAQPVNGAGMVAPAVASVAGGSGSGGFSASLHSEPPVYANLSNFNPGALSSGGGAPSYGAAGLAFPAQPQQQQQPPHHLPQQMPVQHPRLQALKEEPQTVPEMPGETPPLSPIDMESQERIKAERKRMRNRIAASKCRKRKLERIARLEEKVKTLKAQNSELASTANMLREQVAQLKQKVMNHVNSGCQLMLTQQLQTF

SEQ ID NO: 15191 - protein, 347 aa, Homo sapiens
MCTKMEQPFYHDDSYTATGYGRAPGGLSLHDYKLLKPSLAVNLADPYRSLKAPGARGPGPEGGGGGSYFSGQGSDTGASLKLASSELERLIVPNSNGVITTTPTPPGQYFYPRGGGSGGGAGGAGGGVTEEQEGFADGFVKALDDLHKMNHVTPPNVSLGATGGPPAGPGGVYAGPEPPPVYTNLSSYSPASASSGGAGAAVGTGSSYPTTTISYLPHAPPFAGGHPAQLGLGRGASTFKEEPQTVPEARSRDATPPVSPINMEDQERIKVERKRLRNRLAATKCRKRKLERIARLEDKVKTLKAENAGLSSTAGLLREQVAQLKQKVMTHVSNGCQLLLGVKGHAF

SEQ ID NO: 15192 - protein, 347 aa, Homo sapiens
METPFYGDEALSGLGGGASGSGGSFASPGRLFPGAPPTAAAGSMMKKDALTLSLSEQVAAALKPAAAPPPTPLRADGAPSAAPPDGLLASPDLGLLKLASPELERLIIQSNGLVTTTPTSSQFLYPKVAASEEQEFAEGFVKALEDLHKQNQLGAGAAAAAAAAAAGGPSGTATGSAPPGELAPAAAAPEAPVYANLSSYAGGAGGAGGAATVAFAAEPVPFPPPPPPGALGPPRLAALKDEPQTVPDVPSFGESPPLSPIDMDTQERIKAERKRLRNRIAASKCRKRKLERISRLEEKVKTLKSQNTELASTASLLREQVAQLKQKVLSHVNSGCQLLPQHQVPAY

SEQ ID NO: 15193 - protein, 513 aa, Homo sapiens
MAEVGEIIEGCRLPVLRRNQDNEDEWPLAEILSVKDISGRKLFYVHYIDFNKRLDEWVTHERLDLKKIQFPKKEAKTPTKNGLPGSRPGSPEREVPASAQASGKTLPIPVQITLRFNLPKEREAIPGGEPDQPLSSSSCLQPNHRSTKRKVEVVSPATPVPSETAPASVFPQNGAARRAVAAQPGRKRKSNCLGTDEDSQDSSDGIPSAPRMTGSLVSDRSHDDIVTRMKNIECIELGRHRLKPWYFSPYPQELTTLPVLYLCEFCLKYGRSLKCLQRHLTKCDLRHPPGNEIYRKGTISFFEIDGRKNKSYSQNLCLLAKCFLDHKTLYYDTDPFLFYVMTEYDCKGFHIVGYFSKEKESTEDYNVACILTLPPYQRRGYGKLLIEFSYELSKVEGKTGTPEKPLSDLGLLSYRSYWSQTILEILMGLKSESGERPQITINEISEITSIKKEDVISTLQYLNLINYYKGQYILTLSEDIVDGHERAMLKRLLRIDSKCLHFTPKDWSKRGKW

SEQ ID NO: 15194 - protein, 2004 aa, Homo sapiens
MVKLANPLYTEWILEAIKKVKKQKQRPSEERICNAVSSSHGLDRKTVLEQLELSVKDGTILKVSNKGLNSYKDPDNPGRIALPKPRNHGKLDNKQNVDWNKLIKRAVEGLAESGGSTLKSIERFLKGQKDVSALFGGSAASGFHQQLRLAIKRAIGHGRLLKDGPLYRLNTKATNVDGKESCESLSCLPPVSLLPHEKDKPVAEPIPICSFCLGTKEQNREKKPEELISCADCGNSGHPSCLKFSPELTVRVKALRWQCIECKTCSSCRDQGKNADNMLFCDSCDRGFHMECCDPPLTRMPKGMWICQICRPRKKGRKLLQKKAAQIKRRYTNPIGRPKNRLKKQNTVSKGPFSKVRTGPGRGRKRKITLSSQSASSSSEEGYLERIDGLDFCRDSNVSLKFNKKTKGLIDGLTKFFTPSPDGRKARGEVVDYSEQYRIRKRGNRKSSTSDWPTDNQDGWDGKQENEERLFGSQEIMTEKDMELFRDIQEQALQKVGVTGPPDPQVRCPSVIEFGKYEIHTWYSSPYPQEYSRLPKLYLCEFCLKYMKSRTILQQHMKKCGWFHPPANEIYRKNNISVFEVDGNVSTIYCQNLCLLAKLFLDHKTLYYDVEPFLFYVLTQNDVKGCHLVGYFSKEKHCQQKYNVSCIMILPQYQRKGYGRFLIDFSYLLSKREGQAGSPEKPLSDLGRLSYMAYWKSVILECLYHQNDKQISIKKLSKLTGICPQDITSTLHHLRMLDFRSDQFVIIRREKLIQDHMAKLQLNLRPVDVDPECLRWTPVIVSNSVVSEEEEEEAEEGENEEPQCQERELEISVGKSVSHENKEQDSYSVESEKKPEVMAPVSSTRLSKQVLPHDSLPANSQPSRRGRWGRKNRKTQERFGDKDSKLLLEETSSAPQEQYGECGEKSEATQEQYTESEEQLVASEEQPSQDGKPDLPKRRLSEGVEPWRGQLKKSPEALKCRLTEGSERLPRRYSEGDRAVLRGFSESSEEEEEPESPRSSSPPILTKPTLKRKKPFLHRRRRVRKRKHHNSSVVTETISETTEVLDEPFEDSDSERPMPRLEPTFEIDEEEEEEDENELFPREYFRRLSSQDVLRCQSSSKRKSKDEEEDEESDDADDTPILKPVSLLRKRDVKNSPLEPDTSTPLKKKKGWPKGKSRKPIHWKKRPGRKPGFKLSREIMPVSTQACVIEPIVSIPKAGRKPKIQESEETVEPKEDMPLPEERKEEEEMQAEAEEAEEGEEEDAASSEVPAASPADSSNSPETETKEPEVEEEEEKPRVSEEQRQSEEEQQELEEPEPEEEEDAAAETAQNDDHDADDEDDGHLESTKKKELEEQPTREDVKEEPGVQESFLDANMQKSREKIKDKEETELDSEEEQPSHDTSVVSEQMAGSEDDHEEDSHTKEELIELKEEEEIPHSELDLETVQAVQSLTQEESSEHEGAYQDCEETLAACQTLQSYTQADEDPQMSMVEDCHASEHNSPISSVQSHPSQSVRSVSSPNVPALESGYTQISPEQGSLSAPSMQNMETSPMMDVPSVSDHSQQVVDSGFSDLGSIESTTENYENPSSYDSTMGGSICGNSSSQSSCSYGGLSSSSSLTQSSCVVTQQMASMGSSCSMMQQSSVQPAANCSIKSPQSCVVERPPSNQQQQPPPPPPQQPQPPPPQPQPAPQPPPPQQQPQQQPQPQPQQPPPPPPPQQQPPLSQCSMNNSFTPAPMIMEIPESGSTGNISIYERIPGDFGAGSYSQPSATFSLAKLQQLTNTIMDPHAMPYSHSPAVTSYATSVSLSNTGLAQLAPSHPLAGTPQAQATMTPPPNLASTTMNLTSPLLQCNMSATNIGIPHTQRLQGQMPVKGHISIRSKSAPLPSAAAHQQQLYGRSPSAVAMQAGPRALAVQRGMNMGVNLMPTPAYNVNSMNMNTLNAMNSYRMTQPMMNSSYHSNPAYMNQTAQYPMQMQMGMMGSQAYTQQPMQPNPHGNMMYTGPSHHSYMNAAGVPKQSLNGPYMRR

SEQ ID NO: 15195 - protein, 2073 aa, Homo sapiens
MVKLANPLYTEWILEAIQKIKKQKQRPSEERICHAVSTSHGLDKKTVSEQLELSVQDGSVLKVTNKGLASYKDPDNPGRFSSVKPGTFPKSAKGSRGSCNDLRNVDWNKLLRRAIEGLEEPNGSSLKNIEKYLRSQSDLTSTTNNPAFQQRLRLGAKRAVNNGRLLKDGPQYRVNYGSLDGKGAPQYPSAFPSSLPPVSLLPHEKDQPRADPIPICSFCLGTKESNREKKPEELLSCADCGSSGHPSCLKFCPELTTNVKALRWQCIECKTCSACRVQGRNADNMLFCDSCDRGFHMECCDPPLSRMPKGMWICQVCRPKKKGRKLLHEKAAQIKRRYAKPIGRPKNKLKQRLLSVTSDEGSMNAFTGRGSPGRGQKTKVCTTPSSGHAASGKDSSSRLAVTDPTRPGATTKITTTSTYISASTLKVNKKTKGLIDGLTKFFTPSPDGRRSRGEIIDFSKHYRPRKKVSQKQSCTSHVLATGTTQKLKPPPSSLPPPTPISGQSPSSQKSSTATSSPSPQSSSSQCSVPSLSSLTTNSQLKALFDGLSHIYTTQGQSRKKGHPSYAPPKRMRRKTELSSTAKSKAHFFGKRDIRSRFISHSSSSSWGMARGSIFKAIAHFKRTTFLKKHRMLGRLKYKVTPQMGTPSPGKGSLTDGRIKPDQDDDTEIKINIKQESADVNVIGNKDVVTEEDLDVFKQAQELSWEKIECESGVEDCGRYPSVIEFGKYEIQTWYSSPYPQEYARLPKLYLCEFCLKYMKSKNILLRHSKKCGWFHPPANEIYRRKDLSVFEVDGNMSKIYCQNLCLLAKLFLDHKTLYYDVEPFLFYVLTKNDEKGCHLVGYFSKEKLCQQKYNVSCIMIMPQHQRQGFGRFLIDFSYLLSRREGQAGSPEKPLSDLGRLSYLAYWKSVILEYLYHHHERHISIKAISRATGMCPHDIATTLQHLHMIDKRDGRFVIIRREKLILSHMEKLKTCSRANELDPDSLRWTPILISNAAVSEEEREAEKEAERLMEQASCWEKEEQEILSTRANSRQSPAKVQSKNKYLHSPESRPVTGERGQLLELSKESSEEEEEEEDEEEEEEEEEEEEDEEEEEEEEEEEEEENIQSSPPRLTKPQSVAIKRKRPFVLKKKRGRKRRRINSSVTTETISETTEVLNEPFDNSDEERPMPQLEPTCEIEVEEDGRKPVLRKAFQHQPGKKRQTEEEEGKDNHCFKNADPCRNNMNDDSSNLKEGSKDNPEPLKCKQVWPKGTKRGLSKWRQNKERKTGFKLNLYTPPETPMEPDEQVTVEEQKETSEGKTSPSPIRIEEEVKETGEALLPQEENRREETCAPVSPNTSPGEKPEDDLIKPEEEEEEEEEEEEEEEEEEGEEEEGGGNVEKDPDGAKSQEKEEPEISTEKEDSARLDDHEEEEEEDEEPSHNEDHDADDEDDSHMESAEVEKEELPRESFKEVLENQETFLDLNVQPGHSNPEVLMDCGVDLTASCNSEPKELAGDPEAVPESDEEPPPGEQAQKQDQKNSKEVDTEFKEGNPATMEIDSETVQAVQSLTQESSEQDDTFQDCAETQEACRSLQNYTRADQSPQIATTLDDCQQSDHSSPVSSVHSHPGQSVRSVNSPSVPALENSYAQISPDQSAISVPSLQNMETSPMMDVPSVSDHSQQVVDSGFSDLGSIESTTENYENPSSYDSTMGGSICGNGSSQNSCSYSNLTSSSLTQSSCAVTQQMSNISGSCSMLQQTSISSPPTCSVKSPQGCVVERPPSSSQQLAQCSMAANFTPPMQLAEIPETSNANIGLYERMGQSDFGAGHYPQPSATFSLAKLQQLTNTLIDHSLPYSHSAAVTSYANSASLSTPLSNTGLVQLSQSPHSVPGGPQAQATMTPPPNLTPPPMNLPPPLLQRNMAASNIGISHSQRLQTQIASKGHISMRTKSASLSPAAATHQSQIYGRSQTVAMQGPARTLTMQRGMNMSVNLMPAPAYNVNSVNMNMNTLNAMNGYSMSQPMMNSGYHSNHGYMNQTPQYPMQMQMGMMGTQPYAQQPMQTPPHGNMMYTAPGHHGYMNTGMSKQSLNGSYMRR

SEQ ID NO: 15196 - protein, 611 aa, Homo sapiens
MPRRKRNAGSSSDGTEDSDFSTDLEHTDSSESDGTSRRSARVTRSSARLSQSSQDSSPVRNLQSFGTEEPAYSTRRVTRSQQQPTPVTPKKYPLRQTRSSGSETEQVVDFSDRETKNTADHDESPPRTPTGNAPSSESDIDISSPNVSHDESIAKDMSLKDSGSDLSHRPKRRRFHESYNFNMKCPTPGCNSLGHLTGKHERHFSISGCPLYHNLSADECKVRAQSRDKQIEERMLSHRQDDNNRHATRHQAPTERQLRYKEKVAELRKKRNSGLSKEQKEKYMEHRQTYGNTREPLLENLTSEYDLDLFRRAQARASEDLEKLRLQGQITEGSNMIKTIAFGRYELDTWYHSPYPEEYARLGRLYMCEFCLKYMKSQTILRRHMAKCVWKHPPGDEIYRKGSISVFEVDGKKNKIYCQNLCLLAKLFLDHKTLYYDVEPFLFYVMTEADNTGCHLIGYFSKEKNSFLNYNVSCILTMPQYMRQGYGKMLIDFSYLLSKVEEKVGSPERPLSDLGLISYRSYWKEVLLRYLHNFQGKEISIKEISQETAVNPVDIVSTLQALQMLKYWKGKHLVLKRQDLIDEWIAKEAKRSNSNKTMDPSCLKWTPPKGT

SEQ ID NO: 15197 - protein, 458 aa, Homo sapiens
MAAQGAAAAVAAGTSGVAGEGEPGPGENAAAEGTAPSPGRVSPPTPARGEPEVTVEIGETYLCRRPDSTWHSAEVIQSRVNDQEGREEFYVHYVGFNRRLDEWVDKNRLALTKTVKDAVQKNSEKYLSELAEQPERKITRNQKRKHDEINHVQKTYAEMDPTTAALEKEHEAITKVKYVDKIHIGNYEIDAWYFSPFPEDYGKQPKLWLCEYCLKYMKYEKSYRFHLGQCQWRQPPGKEIYRKSNISVYEVDGKDHKIYCQNLCLLAKLFLDHKTLYFDVEPFVFYILTEVDRQGAHIVGYFSKEKESPDGNNVACILTLPPYQRRGYGKFLIAFSYELSKLESTVGSPEKPLSDLGKLSYRSYWSWVLLEILRDFRGTLSIKDLSQMTSITQNDIISTLQSLNMVKYWKGQHVICVTPKLVEEHLKSAQYKKPPITVDSVCLKWAPPKHKQVKLSKK

SEQ ID NO: 15198 - protein, 381 aa, Homo sapiens
MSRHEGVSCDACLKGNFRGRRYKCLICYDYDLCASCYESGATTTRHTTDHPMQCILTRVDFDLYYGGEAFSVEQPQSFTCPYCGKMGYTETSLQEHVTSEHAETSTEVICPICAALPGGDPNHVTDDFAAHLTLEHRAPRDLDESSGVRHVRRMFHPGRGLGGPRARRSNMHFTSSSTGGLSSSQSSYSPSNREAMDPIAELLSQLSGVRRSAGGQLNSSGPSASQLQQLQMQLQLERQHAQAARQQLETARNATRRTNTSSVTTTITQSTATTNIANTESSQQTLQNSQFLLTRLNDPKMSETERQSMESERADRSLFVQELLLSTLVREESSSSDEDDRGEMADFGAMGCVDIMPLDVALENLNLKESNKGNEPPPPPL

SEQ ID NO: 15199 - protein, 256 aa, Homo sapiens; identical to SEQ ID NO: 7385

SEQ ID NO: 15200 - protein, 1162 aa, Homo sapiens
MEPEEERIRYSQRLRGTMRRRYEDDGISDDEIEGKRTFDLEEKLHTNKYNANFVTFMEGKDFNVEYIQRGGLRDPLIFKNSDGLGIKMPDPDFTVNDVKMCVGSRRMVDVMDVNTQKGIEMTMAQWTRYYETPEEEREKLYNVISLEFSHTRLENMVQRPSTVDFIDWVDNMWPRHLKESQTESTNAILEMQYPKVQKYCLMSVRGCYTDFHVDFGGTSVWYHIHQGGKVFWLIPPTAHNLELYENWLLSGKQGDIFLGDRVSDCQRIELKQGYTFVIPSGWIHAVYTPTDTLVFGGNFLHSFNIPMQLKIYNIEDRTRVPNKFRYPFYYEMCWYVLERYVYCITNRSHLTKEFQKESLSMDLELNGLESGNGDEEAVDREPRRLSSRRSVLTSPVANGVNLDYDGLGKTCRSLPSLKKTLAGDSSSDCSRGSHNGQVWDPQCAPRKDRQVHLTHFELEGLRCLVDKLESLPLHKKCVPTGIEDEDALIADVKILLEELANSDPKLALTGVPIVQWPKRDKLKFPTRPKVRVPTIPITKPHTMKPAPRLTPVRPAAASPIVSGARRRRVRCRKCKACVQGECGVCHYCRDMKKFGGPGRMKQSCVLRQCLAPRLPHSVTCSLCGEVDQNEETQDFEKKLMECCICNEIVHPGCLQMDGEGLLNEELPNCWECPKCYQEDSSEKAQKRKMEESDEEAVQAKVLRPLRSCDEPLTPPPHSPTSMLQLIHDPVSPRGMVTRSSPGAGPSDHHSASRDERFKRRQLLRLQATERTMVREKENNPSGKKELSEVEKAKIRGSYLTVTLQRPTKELHGTSIVPKLQAITASSANLRHSPRVLVQHCPARTPQRGDEEGLGGEEEEEEEEEEEDDSAEEGGAARLNGRGSWAQDGDESWMQREVWMSVFRYLSRRELCECMRVCKTWYKWCCDKRLWTKIDLSRCKAIVPQALSGIIKRQPVSLDLSWTNISKKQLTWLVNRLPGLKDLLLAGCSWSAVSALSTSSCPLLRTLDLRWAVGIKDPQIRDLLTPPADKPGQDNRSKLRNMTDFRLAGLDITDATLRLIIRHMPLLSRLDLSHCSHLTDQSSNLLTAVGSSTRYSLTELNMAGCNKLTDQTLIYLRRIANVTLIDLRGCKQITRKACEHFISDLSINSLYCLSDEKLIQKIS

SEQ ID NO: 15201 - protein, 1690 aa, Homo sapiens
MAGVGPGGYAAEFVPPPECPVFEPSWEEFTDPLSFIGRIRPLAEKTGICKIRPPKDWQPPFACEVKSFRFTPRVQRLNELEAMTRVRLDFLDQLAKFWELQGSTLKIPVVERKILDLYALSKIVASKGGFEMVTKEKKWSKVGSRLGYLPGKGTGSLLKSHYERILYPYELFQSGVSLMGVQMPNLDLKEKVEPEVLSTDTQTSPEPGTRMNILPKRTRRVKTQSESGDVSRNTELKKLQIFGAGPKVVGLAMGTKDKEDEVTRRRKVTNRSDAFNMQMRQRKGTLSVNFVDLYVCMFCGRGNNEDKLLLCDGCDDSYHTFCLIPPLPDVPKGDWRCPKCVAEECSKPREAFGFEQAVREYTLQSFGEMADNFKSDYFNMPVHMVPTELVEKEFWRLVSSIEEDVIVEYGADISSKDFGSGFPVKDGRRKILPEEEEYALSGWNLNNMPVLEQSVLAHINVDISGMKVPWLYVGMCFSSFCWHIEDHWSYSINYLHWGEPKTWYGVPSHAAEQLEEVMRELAPELFESQPDLLHQLVTIMNPNVLMEHGVPVYRTNQCAGEFVVTFPRAYHSGFNQGYNFAEAVNFCTADWLPIGRQCVNHYRRLRRHCVFSHEELIFKMAADPECLDVGLAAMVCKELTLMTEEETRLRESVVQMGVLMSEEEVFELVPDDERQCSACRTTCFLSALTCSCNPERLVCLYHPTDLCPCPMQKKCLRYRYPLEDLPSLLYGVKVRAQSYDTWVSRVTEALSANFNHKKDLIELRVMLEDAEDRKYPENDLFRKLRDAVKEAETCASVAQLLLSKKQKHRQSPDSGRTRTKLTVEELKAFVQQLFSLPCVISQARQVKNLLDDVEEFHERAQEAMMDETPDSSKLQMLIDMGSSLYVELPELPRLKQELQQARWLDEVRLTLSDPQQVTLDVMKKLIDSGVGLAPHHAVEKAMAELQELLTVSERWEEKAKVCLQARPRHSVASLESIVNEAKNIPAFLPNVLSLKEALQKAREWTAKVEAIQSGSNYAYLEQLESLSAKGRPIPVRLEALPQVESQVAAARAWRERTGRTFLKKNSSHTLLQVLSPRTDIGVYGSGKNRRKKVKELIEKEKEKDLDLEPLSDLEEGLEETRDTAMVVAVFKEREQKEIEAMHSLRAANLAKMTMVDRIEEVKFCICRKTASGFMLQCELCKDWFHNSCVPLPKSSSQKKGSSWQAKEVKFLCPLCMRSRRPRLETILSLLVSLQKLPVRLPEGEALQCLTERAMSWQDRARQALATDELSSALAKLSVLSQRMVEQAAREKTEKIISAELQKAAANPDLQGHLPSFQQSAFNRVVSSVSSSPRQTMDYDDEETDSDEDIRETYGYDMKDTASVKSSSSLEPNLFCDEEIPIKSEEVVTHMWTAPSFCAEHAYSSASKSCSQGSSTPRKQPRKSPLVPRSLEPPVLELSPGAKAQLEELMMVGDLLEVSLDETQHIWRILQATHPPSEDRFLHIMEDDSMEEKPLKVKGKDSSEKKRKRKLEKVEQLFGEGKQKSKELKKMDKPRKKKLKLGADKSKELNKLAKKLAKEEERKKKKEKAAAAKVELVKESTEKKREKKVLDIPSKYDWSGAEESDDENAVCAAQNCQRPCKDKVDWVQCDGGCDEWFHQVCVGVSPEMAENEDYICINCAKKQGPVSPGPAPPPSFIMSYKLPMEDLKETS

SEQ ID NO: 15202 - protein, 1544 aa, Homo sapiens
MEAATTLHPGPRPALPLGGPGPLGEFLPPPECPVFEPSWEEFADPFAFIHKIRPIAEQTGICKVRPPPDWQPPFACDVDKLHFTPRIQRLNELEAQTRVKLNFLDQIAKYWELQGSTLKIPHVERKILDLFQLNKLVAEEGGFAVVCKDRKWTKIATKMGFAPGKAVGSHIRGHYERILNPYNLFLSGDSLRCLQKPNLTTDTKDKEYKPHDIPQRQSVQPSETCPPARRAKRMRAEAMNIKIEPEETTEARTHNLRRRMGCPTPKCENEKEMKSSIKQEPIERKDYIVENEKEKPKSRSKKATNAVDLYVCLLCGSGNDEDRLLLCDGCDDSYHTFCLIPPLHDVPKGDWRCPKCLAQECSKPQEAFGFEQAARDYTLRTFGEMADAFKSDYFNMPVHMVPTELVEKEFWRLVSTIEEDVTVEYGADIASKEFGSGFPVRDGKIKLSPEEEEYLDSGWNLNNMPVMEQSVLAHITADICGMKLPWLYVGMCFSSFCWHIEDHWSYSINYLHWGEPKTWYGVPGYAAEQLENVMKKLAPELFVSQPDLLHQLVTIMNPNTLMTHEVPVYRTNQCAGEFVITFPRAYHSGFNQGFNFAEAVNFCTVDWLPLGRQCVEHYRLLHRYCVFSHDEMICKMASKADVLDVVVASTVQKDMAIMIEDEKALRETVRKLGVIDSERMDFELLPDDERQCVKCKTTCFMSAISCSCKPGLLVCLHHVKELCSCPPYKYKLRYRYTLDDLYPMMNALKLRAESYNEWALNVNEALEAKINKKKSLVSFKALIEESEMKKFPDNDLLRHLRLVTQDAEKCASVAQQLLNGKRQTRYRSGGGKSQNQLTVNELRQFVTQLYALPCVLSQTPLLKDLLNRVEDFQQHSQKLLSEETPSAAELQDLLDVSFEFDVELPQLAEMRIRLEQARWLEEVQQACLDPSSLTLDDMRRLIDLGVGLAPYSAVEKAMARLQELLTVSEHWDDKAKSLLKARPRHSLNSLATAVKEIEEIPAYLPNGAALKDSVQRARDWLQDVEGLQAGGRVPVLDTLIELVTRGRSIPVHLNSLPRLETLVAEVQAWKECAVNTFLTENSPYSLLEVLCPRCDIGLLGLKRKQRKLKEPLPNGKKKSTKLESLSDLERALTESKETASAMATLGEARLREMEALQSLRLANEGKLLSPLQDVDIKICLCQKAPAAPMIQCELCRDAFHTSCVAVPSISQGLRIWLCPHCRRSEKPPLEKILPLLASLQRIRVRLPEGDALRYMIERTVNWQHRAQQLLSSGNLKFVQDRVGSGLLYSRWQASAGQVSDTNKVSQPPGTTSFSLPDDWDNRTSYLHSPFSTGRSCIPLHGVSPEVNELLMEAQLLQVSLPEIQELYQTLLAKPSPAQQTDRSSPVRPSSEKNDCCRGKRDGINSLERKLKRRLEREGLSSERWERVKKMRTPKKKKIKLSHPKDMNNFKLERERSYELVRSAETHSLPSDTSYSEQEDSEDEDAICPAVSCLQPEGDEVDWVQCDGSCNQWFHQVCVGVSPEMAEKEDYICVRCTVKDAPSRK

SEQ ID NO: 15203 - protein, 1560 aa, Homo sapiens
MEPGSDDFLPPPECPVFEPSWAEFRDPLGYIAKIRPIAEKSGICKIRPPADWQPPFAVEVDNFRFTPRIQRLNELEAQTRVKLNYLDQIAKFWEIQGSSLKIPNVERRILDLYSLSKIVVEEGGYEAICKDRRWARVAQRLNYPPGKNIGSLLRSHYERIVYPYEMYQSGANLVQCNTRPFDNEEKDKEYKPHSIPLRQSVQPSKFNSYGRRAKRLQPDPEPTEEDIEKNPELKKLQIYGAGPKMMGLGLMAKDKTLRKKDKEGPECPPTVVVKEELGGDVKVESTSPKTFLESKEELSHSPEPCTKMTMRLRRNHSNAQFIESYVCRMCSRGDEDDKLLLCDGCDDNYHIFCLLPPLPEIPKGVWRCPKCVMAECKRPPEAFGFEQATREYTLQSFGEMADSFKADYFNMPVHMVPTELVEKEFWRLVNSIEEDVTVEYGADIHSKEFGSGFPVSDSKRHLTPEEEEYATSGWNLNVMPVLEQSVLCHINADISGMKVPWLYVGMVFSAFCWHIEDHWSYSINYLHWGEPKTWYGVPSLAAEHLEEVMKKLTPELFDSQPDLLHQLVTLMNPNTLMSHGVPVVRTNQCAGEFVITFPRAYHSGFNQGYNFAEAVNFCTADWLPAGRQCIEHYRRLRRYCVFSHEELICKMAACPEKLDLNLAAAVHKEMFIMVQEERRLRKALLEKGITEAEREAFELLPDDERQCIKCKTTCFLSALACYDCPDGLVCLSHINDLCKCSSSRQYLRYRYTLDELPAMLHKLKVRAESFDTWANKVRVALEVEDGRKRSLEELRALESEARERRFPNSELLQQLKNCLSEAEACVSRALGLVSGQEAGPHRVAGLQMTLTELRAFLDQMNNLPCAMHQIGDVKGVLEQVEAYQAEAREALASLPSSPGLLQSLLERGRQLGVEVPEAQQLQRQVEQARWLDEVKRTLAPSARRGTLAVMRGLLVAGASVAPSPAVDKAQAELQELLTIAERWEEKAHLCLEARQKHPPATLEAIIREAENIPVHLPNIQALKEALAKARAWIADVDEIQNGDHYPCLDDLEGLVAVGRDLPVGLEELRQLELQVLTAHSWREKASKTFLKKNSCYTLLEVLCPCADAGSDSTKRSRWMEKELGLYKSDTELLGLSAQDLRDPGSVIVAFKEGEQKEKEGILQLRRTNSAKPSPLASSSTASSTTSICVCGQVLAGAGALQCDLCQDWFHGRCVSVPRLLSSPRPNPTSSPLLAWWEWDTKFLCPLCMRSRRPRLETILALLVALQRLPVRLPEGEALQCLTERAISWQGRARQALASEDVTALLGRLAELRQRLQAEPRPEEPPNYPAAPASDPLREGSGKDMPKVQGLLENGDSVTSPEKVAPEEGSGKRDLELLSSLLPQLTGPVLELPEATRAPLEELMMEGDLLEVTLDENHSIWQLLQAGQPPDLERIRTLLELEKAERHGSRARGRALERRRRRKVDRGGEGDDPAREELEPKRVRSSGPEAEEVQEEEELEEETGGEGPPAPIPTTGSPSTQENQNGLEPAEGTTSGPSAPFSTLTPRLHLPCPQQPPQQQL

SEQ ID NO: 15204 - protein, 1539 aa, Homo sapiens
MEPGCDEFLPPPECPVFEPSWAEFQDPLGYIAKIRPIAEKSGICKIRPPADWQPPFAVEVDNFRFTPRVQRLNELEAQTRVKLNYLDQIAKFWEIQGSSLKIPNVERKILDLYSLSKIVIEEGGYEAICKDRRWARVAQRLHYPPGKNIGSLLRSHYERIIYPYEMFQSGANHVQCNTHPFDNEVKDKEYKPHSIPLRQSVQPSKFSSYSRRAKRLQPDPEPTEEDIEKHPELKKLQIYGPGPKMMGLGLMAKDKDKTVHKKVTCPPTVTVKDEQSGGGNVSSTLLKQHLSLEPCTKTTMQLRKNHSSAQFIDSYICQVCSRGDEDDKLLFCDGCDDNYHIFCLLPPLPEIPRGIWRCPKCILAECKQPPEAFGFEQATQEYSLQSFGEMADSFKSDYFNMPVHMVPTELVEKEFWRLVSSIEEDVTVEYGADIHSKEFGSGFPVSNSKQNLSPEEKEYATSGWNLNVMPVLDQSVLCHINADISGMKVPWLYVGMVFSAFCWHIEDHWSYSINYLHWGEPKTWYGVPSLAAEHLEEVMKMLTPELFDSQPDLLHQLVTLMNPNTLMSHGVPVVRTNQCAGEFVITFPRAYHSGFNQGYNFAEAVNFCTADWLPAGRQCIEHYRRLRRYCVFSHEELICKMAAFPETLDLNLAVAVHKEMFIMVQEERRLRKALLEKGVTEAEREAFELLPDDERQCIKCKTTCFLSALACYDCPDGLVCLSHINDLCKCSSSRQYLRYRYTLDELPTMLHKLKIRAESFDTWANKVRVALEVEDGRKRSFEELRALESEARERRFPNSELLQRLKNCLSEVEACIAQVLGLVSGQVARMDTPQLTLTELRVLLEQMGSLPCAMHQIGDVKDVLEQVEAYQAEAREALATLPSSPGLLRSLLERGQQLGVEVPEAHQLQQQVEQAQWLDEVKQALAPSAHRGSLVIMQGLLVMGAKIASSPSVDKARAELQELLTIAERWEEKAHFCLEARQKHPPATLEAIIRETENIPVHLPNIQALKEALTKAQAWIADVDEIQNGDHYPCLDDLEGLVAVGRDLPVGLEELRQLELQVLTAHSWREKASKTFLKKNSCYTLLEVLCPCADAGSDSTKRSRWMEKALGLYQCDTELLGLSAQDLRDPGSVIVAFKEGEQKEKEGILQLRRTNSAKPSPLAPSLMASSPTSICVCGQVPAGVGVLQCDLCQDWFHGQCVSVPHLLTSPKPSLTSSPLLAWWEWDTKFLCPLCMRSRRPRLETILALLVALQRLPVRLPEGEALQCLTERAIGWQDRARKALASEDVTALLRQLAELRQQLQAKPRPEEASVYTSATACDPIREGSGNNISKVQGLLENGDSVTSPENMAPGKGSDLELLSSLLPQLTGPVLELPEAIRAPLEELMMEGDLLEVTLDENHSIWQLLQAGQPPDLDRIRTLLELEKFEHQGSRTRSRALERRRRRQKVDQGRNVENLVQQELQSKRARSSGIMSQVGREEEHYQEKADRENMFLTPSTDHSPFLKGNQNSLQHKDSGSSAACPSLMPLLQLSYSDEQQL

SEQ ID NO: 15205 - protein, 711 aa, Homo sapiens
MSDYSTGGPPPGPPPPAGGGGGAGGAGGGPPPGPPGAGDRGGGGPGGGGPGGGSAGGPSQPPGGGGPGIRKDAFADAVQRARQIAAKIGGDAATTVNNSTPDFGFGGQKRQLEDGDQPESKKLASQGDSISSQLGPIHPPPRTSMTEEYRVPDGMVGLIIGRGGEQINKIQQDSGCKVQISPDSGGLPERSVSLTGAPESVQKAKMMLDDIVSRGRGGPPGQFHDNANGGQNGTVQEIMIPAGKAGLVIGKGGETIKQLQERAGVKMILIQDGSQNTNVDKPLRIIGDPYKVQQACEMVMDILRERDQGGFGDRNEYGSRIGGGIDVPVPRHSVGVVIGRSGEMIKKIQNDAGVRIQFKQDDGTGPEKIAHIMGPPDRCEHAARIINDLLQSLRSGPPGPPGGPGMPPGGRGRGRGQGNWGPPGGEMTFSIPTHKCGLVIGRGGENVKAINQQTGAFVEISRQLPPNGDPNFKLFIIRGSPQQIDHAKQLIEEKIEGPLCPVGPGPGGPGPAGPMGPFNPGPFNQGPPGAPPHAGGPPPHQYPPQGWGNTYPQWQPPAPHDPSKAAAAAADPNAAWAAYYSHYYQQPPGPVPGPAPAPAAPPAQGEPPQPPPTGQSDYTKAWEEYYKKIGQQPQQPGAPPQQDYTKAWEEYYKKQAQVATGGGPGAPPGSQPDYSAAWAEYYRQQAAYYGQTPGPGGPQPPPTQQGQQQAQ

SEQ ID NO: 15206 - protein, 1950 aa, Homo sapiens
MPGARRRRRGAAMEGKPRAGVALAPGPSGRRPSARCARRRRPGLLLPGLWLLLLARPASCAPDELSPEQHNLSLYSMELVLKKSTGHSAAQVALTETAPGSQHSSPLHVTAPPSATTFDTAFFNQGKQTKSTADPSIFVATYVSVTSKEVAVNDDEMDNFLPDTHWTTPRMVSPIQYITVSPPGLPREALEPMLTPSLPMVSLQDEEVTSGWQNTTRQPAAYAESASHFHTFRSAFRTSEGIVPTPGRNLVLYPTDAYSHLSSRTLPEIVASLTEGVETTLFLSSRSLMPQPLGDGITIPLPSLGEVSQPPEEVWATSADRYTDVTTVLSQSLEETISPRTYPTVTASHAALAFSRTHSPLLSTPLAFASSASPTDVSSNPFLPSDSSKTSELHSNSALPGPVDNTHILSPVSSFRPYTWCAACTVPSPQQVLATSLMEKDVGSGDGAETLCMTVLEESSISLMSSVVADFSEFEEDPQVFNTLFPSRPIVPLSSRSMEISETSVGISAEVDMSSVTTTQVPPAHGRLSVPASLDPTAGSLSVAETQVTPSSVTTAFFSVITSILLDSSFSVIANKNTPSLAVRDPSVFTPYSLVPSVESSLFSDQERSSFSEHKPRGALDFASSFFSTPPLELSGSISSPSEAPASLSLMPSDLSPFTSQSFSPLVETFTLFDSSDLQSSQLSLPSSTNLEFSQLQPSSELPLNTIMLLPSRSEVSPWSSFPSDSLEFVEASTVSLTDSEAHFTSAFIETTSYLESSLISHESAVTALVPPGSESFDILTAGIQATSPLTTVHTTPILTESSLFSTLTPPDDQISALDGHVSVLASFSKAIPTGTVLITDAYLPSGSSFVSEATPFPLPTELTVVGPSLTPTEVPLNTSTEVSTTSTGAATGGPLDSTLMGDAASQSPPESSAAPPLPSLRPVTAFTLEATVDTPTLATAKPPYVCDITVPDAYLITTVLARRAVQEYIITAIKEVLRIHFNRAVELKVYELFTDFTFLVTSGPFVYTAISVINVLINSKLVRDQTPLILSVKPSFLVPESRFQVQTVLQFVPPSVDTGFCNFTQRIEKGLMTALFEVRKHHQGTYNLTVQILNITISSSRVTPRRGPVNIIFAVKSTQGFLNGSEVSELLRNLSVVEFSFYLGYPVLQIAEPFQYPQLNLSQLLKSSWVRTVLLGVMEKQLQNEVFQAEMERKLAQLLSEVSTRRRMWRRATVAAGNSVVQVVNVSRLEGDDNPVQLIYFVEDQDGERLSAVKSSDLINKMDLQRAAIILGYRIQGVIAQPVDRVKRPSPESQSNNLWVIVGVVIPVLVVMVIVVILYWKLCRTDKLDFQPDTVANIQQRQKLQIPSVKGFDFAKQHLGQHNKDDILIIHEPAPLPGPLKDHTTPSENGDVPSPKSKIPSKNVRHRGRVSPSDADSTVSEESSERDAGDKTPGAVNDGRSHRAPQSGPPLPSSGNEQHSSASIFEHVDRISRPPEASRRVPSKIQLIAMQPIPAPPVQRPSPADRVAESNKINKEIQTALRHKSEIEHHRNKIRLRAKRRGHYEFPVVDDLSSGDTKERHRVYRRAQMQIDKILDPTASVPSVFIEPRKSSRIKRSPKPRRKHQVNGCPADAEKDRLITTDSDGTYRRPPGVHNSAYIGCPSDPDLPADVQTPSSVELGRYPALPFPASQYIPPQPSIEEARQTMHSLLDDAFALVAPSSQPASTAGVGPGVPPGLPANSTPSQEERRATQWGSFYSPAQTANNPCSRYEDYGMTPPTGPLPRPGFGPGLLQSTELVPPDPQQPQASAEAPFAARGIYSEEMPSVARPRPVGGTTGSQIQHLTQVGIASRIGAQPVEIPPSRGSQYGGPGWPSYGEDEAGRREATHMLGHQEYSSSPLFQVPRTSGREPSAPSGNLPHRGLQGPGLGYPTSSTEDLQPGHSSASLIKAIREELLRLSQKQSTVQNFHS

SEQ ID NO: 15207 - protein, 362 aa, Homo sapiens
MATAETALPSISTLTALGPFPDTQDDFLKWWRSEEAQDMGPGPPDPTEPPLHVKSEDQPGEEEDDERGADATWDLDLLLTNFSGPEPGGAPQTCALAPSEASGAQYPPPPETLGAYAGGPGLVAGLLGSEDHSGWVRPALRARAPDAFVGPALAPAPAPEPKALALQPVYPGPGAGSSGGYFPRTGLSVPAASGAPYGLLSGYPAMYPAPQYQGHFQLFRGLQGPAPGPATSPSFLSCLGPGTVGTGLGGTAEDPGVIAETAPSKRGRRSWARKRQAAHTCAHPGCGKSYTKSSHLKAHLRTHTGEKPYACTWEGCGWRFARSDELTRHYRKHTGQRPFRCQLCPRAFSRSDHLALHMKRHL

SEQ ID NO: 15208 - protein, 480 aa, Homo sapiens
MLNFGASLQQTAEERMEMISERPKESMYSWNKTAEKSDFEAVEALMSMSCSWKSDFKKYVENRPVTPVSDLSEEENLLPGTPDFHTIPAFCLTPPYSPSDFEPSQVSNLMAPAPSTVHFKSLSDTAKPHIAAPFKEEEKSPVSAPKLPKAQATSVIRHTADAQLCNHQTCPMKAASILNYQNNSFRRRTHLNVEAARKNIPCAAVSPNRSKCERNTVADVDEKASAALYDFSVPSSETVICRSQPAPVSPQQKSVLVSPPAVSAGGVPPMPVICQMVPLPANNPVVTTVVPSTPPSQPPAVCPPVVFMGTQVPKGAVMFVVPQPVVQSSKPPVVSPNGTRLSPIAPAPGFSPSAAKVTPQIDSSRIRSHICSHPGCGKTYFKSSHLKAHTRTHTGEKPFSCSWKGCERRFARSDELSRHRRTHTGEKKFACPMCDRRFMRSDHLTKHARRHLSAKKLPNWQMEVSKLNDIALPPTPAPTQ

SEQ ID NO: 15209 - protein, 512 aa, Homo sapiens
MHTPDFAGPDDARAVDIMDICESILERKRHDSERSTCSILEQTDMEAVEALVCMSSWGQRSQKGDLLRIRPLTPVSDSGDVTTTVHMDAATPELPKDFHSLSTLCITPPQSPDLVEPSTRTPVSPQVTDSKACTATDVLQSSAVVARALSGGAERGLLGLEPVPSSPCRAKGTSVIRHTGESPAACFPTIQTPDCRLSDSREGEEQLLGHFETLQDTHLTDSLLSTNLVSCQPCLHKSGGLLLTDKGQQAGWPGAVQTCSPKNYENDLPRKTTPLISVSVPAPPVLCQMIPVTGQSSMLPAFLKPPPQLSVGTVRPILAQAAPAPQPVFVGPAVPQGAVMLVLPQGALPPPAPCAANVMAAGNTKLLPLAPAPVFITSSQNCVPQVDFSRRRNYVCSFPGCRKTYFKSSHLKAHLRTHTGEKPFNCSWDGCDKKFARSDELSRHRRTHTGEKKFVCPVCDRRFMRSDHLTKHARRHMTTKKIPGWQAEVGKLNRIASAESPGSPLVSMPASA

SEQ ID NO: 15210 - protein, 402 aa, Homo sapiens
MNIHMKRKTIKNINTFENRMLMLDGMPAVRVKTELLESEQGSPNVHNYPDMEAVPLLLNNVKGEPPEDSLSVDHFQTQTEPVDLSINKARTSPTAVSSSPVSMTASASSPSSTSTSSSSSSRLASSPTVITSVSSASSSSTVLTPGPLVASASGVGGQQFLHIIHPVPPSSPMNLQSNKLSHVHRIPVVVQSVPVVYTAVRSPGNVNNTIVVPLLEDGRGHGKAQMDPRGLSPRQSKSDSDDDDLPNVTLDSVNETGSTALSIARAVQEVHPSPVSRVRGNRMNNQKFPCSISPFSIESTRRQRRSESPDSRKRRIHRCDFEGCNKVYTKSSHLKAHRRTHTGEKPYKCTWEGCTWKFARSDELTRHYRKHTGVKPFKCADCDRSFSRSDHLALHRRRHMLV

SEQ ID NO: 15211 - protein, 288 aa, Homo sapiens
MAAAAYVDHFAAECLVSMSSRAVVHGPREGPESRPEGAAVAATPTLPRVEERRDGKDSASLFVVARILADLNQQAPAPAPAERREGAAARKARTPCRLPPPAPEPTSPGAEGAAAAPPSPAWSEPEPEAGLEPEREPGPAGSGEPGLRQRVRRGRSRADLESPQRKHKCHYAGCEKVYGKSSHLKAHLRTHTGERPFACSWQDCNKKFARSDELARHYRTHTGEKKFSCPICEKRFMRSDHLTKHARRHANFHPGMLQRRGGGSRTGSLSDYSRSDASSPTISPASSP

SEQ ID NO: 15212 - protein, 323 aa, Homo sapiens
MSAAVACLDYFAAECLVSMSAGAVVHRRPPDPEGAGGAAGSEVGAAPPESALPGPGPPGPASVPQLPQVPAPSPGAGGAAPHLLAASVWADLRGSSGEGSWENSGEAPRASSGFSDPIPCSVQTPCSELAPASGAAAVCAPESSSDAPAVPSAPAAPGAPAASGGFSGGALGAGPAPAADQAPRRRSVTPAAKRHQCPFPGCTKAYYKSSHLKSHQRTHTGERPFSCDWLDCDKKFTRSDELARHYRTHTGEKRFSCPLCPKQFSRSDHLTKHARRHPTYHPDMIEYRGRRRTPRIDPPLTSEVESSASGSGPGPAPSFTTCL

SEQ ID NO: 15213 - protein, 416 aa, Homo sapiens
MVDHLLPVDENFSSPKCPVGYLGDRLVGRRAYHMLPSPVSEDDSDASSPCSCSSPDSQALCSCYGGGLGTESQDSILDFLLSQATLGSGGGSGSSIGASSGPVAWGPWRRAAAPVKGEHFCLPEFPLGDPDDVPRPFQPTLEEIEEFLEENMEPGVKEVPEGNSKDLDACSQLSAGPHKSHLHPGSSGRERCSPPPGGASAGGAQGPGGGPTPDGPIPVLLQIQPVPVKQESGTGPASPGQAPENVKVAQLLVNIQGQTFALVPQVVPSSNLNLPSKFVRIAPVPIAAKPVGSGPLGPGPAGLLMGQKFPKNPAAELIKMHKCTFPGCSKMYTKSSHLKAHLRRHTGEKPFACTWPGCGWRFSRSDELSRHRRSHSGVKPYQCPVCEKKFARSDHLSKHIKVHRFPRSSRSVRSVN

SEQ ID NO: 15214 - protein, 252 aa, Homo sapiens
MSAAVACVDYFAADVLMAISSGAVVHRGRPGPEGAGPAAGLDVRAARREAASPGTPGPPPPPPAASGPGPGAAAAPHLLAASILADLRGGPGAAPGGASPASSSSAASSPSSGRAPGAAPSAAAKSHRCPFPDCAKAYYKSSHLKSHLRTHTGERPFACDWQGCDKKFARSDELARHHRTHTGEKRFSCPLCSKRFTRSDHLAKHARRHPGFHPDLLRRPGARSTSPSDSLPCSLAGSPAPSPAPSPAPAGL

SEQ ID NO: 15215 - protein, 389 aa, Homo sapiens
MYGRPQAEMEQEAGELSRWQAAHQAAQDNENSAPILNMSSSSGSSGVHTSWNQGLPSIQHFPHSAEMLGSPLVSVEAPGQNVNEGGPQFSMPLPERGMSYCPQATLTPSRMIYCQRMSPPQQEMTIFSGPQLMPVGEPNIPRVARPFGGNLRMPPNGLPVSASTGIPIMSHTGNPPVPYPGLSTVPSDETLLGPTVPSTEAQAVLPSMAQMLPPQDAHDLGMPPAESQSLLVLGSQDSLVSQPDSQEGPFLPEQPGPAPQTVEKNSRPQEGTGRRGSSEARPYCCNYENCGKAYTKRSHLVSHQRKHTGERPYSCNWESCSWSFFRSDELRRHMRVHTRYRPYKCDQCSREFMRSDHLKQHQKTHRPGPSDPQANNNNGEQDSPPAAGP

SEQ ID NO: 15216 - protein, 355 aa, Homo sapiens
MALSEPILPSFSTFASPCRERGLQERWPRAEPESGGTDDDLNSVLDFILSMGLDGLGAEAAPEPPPPPPPPAFYYPEPGAPPPYSAPAGGLVSELLRPELDAPLGPALHGRFLLAPPGRLVKAEPPEADGGGGYGCAPGLTRGPRGLKREGAPGPAASCMRGPGGRPPPPPDTPPLSPDGPARLPAPGPRASFPPPFGGPGFGAPGPGLHYAPPAPPAFGLFDDAAAAAAALGLAPPAARGLLTPPASPLELLEAKPKRGRRSWPRKRTATHTCSYAGCGKTYTKSSHLKAHLRTHTGEKPYHCNWDGCGWKFARSDELTRHYRKHTGHRPFQCHLCDRAFSRSDHLALHMKRHM

SEQ ID NO: 15217 - protein, 345 aa, Homo sapiens
MLMFDPVPVKQEAMDPVSVSYPSNYMESMKPNKYGVIYSTPLPEKFFQTPEGLSHGIQMEPVDLTVNKRSSPPSAGNSPSSLKFPSSHRRASPGLSMPSSSPPIKKYSPPSPGVQPFGVPLSMPPVMAAALSRHGIRSPGILPVIQPVVVQPVPFMYTSHLQQPLMVSLSEEMENSSSSMQVPVIESYEKPISQKKIKIEPGIEPQRTDYYPEEMSPPLMNSVSPPQALLQENHPSVIVQPGKRPLPVESPDTQRKRRIHRCDYDGCNKVYTKSSHLKAHRRTHTGEKPYKCTWEGCTWKFARSDELTRHFRKHTGIKPFQCPDCDRSFSRSDHLALHRKRHMLV

SEQ ID NO: 15218 - protein, 513 aa, Homo sapiens
MRQPPGESDMAVSDALLPSFSTFASGPAGREKTLRQAGAPNNRWREELSHMKRLPPVLPGRPYDLAAATVATDLESGGAGAACGGSNLAPLPRRETEEFNDLLDLDFILSNSLTHPPESVAATVSSSASASSSSSPSSSGPASAPSTCSFTYPIRAGNDPGVAPGGTGGGLLYGRESAPPPTAPFNLADINDVSPSGGFVAELLRPELDPVYIPPQQPQPPGGGLMGKFVLKASLSAPGSEYGSPSVISVSKGSPDGSHPVVVAPYNGGPPRTCPKIKQEAVSSCTHLGAGPPLSNGHRPAAHDFPLGRQLPSRTTPTLGLEEVLSSRDCHPALPLPPGFHPHPGPNYPSFLPDQMQPQVPPLHYQGQSRGFVARAGEPCVCWPHFGTHGMMLTPPSSPLELMPPGSCMPEEPKPKRGRRSWPRKRTATHTCDYAGCGKTYTKSSHLKAHLRTHTGEKPYHCDWDGCGWKFARSDELTRHYRKHTGHRPFQCQKCDRAFSRSDHLALHMKRHF

SEQ ID NO: 15219 - protein, 457 aa, Homo sapiens
MATRVLSMSARLGPVPQPPAPQDEPVFAQLKPVLGAANPARDAALFPGEELKHAHHRPQAQPAPAQAPQPAQPPATGPRLPPEDLVQTRCEMEKYLTPQLPPVPIIPEHKKYRRDSASVVDQFFTDTEGLPYSINMNVFLPDITHLRTGLYKSQRPCVTHIKTEPVAIFSHQSETTAPPPAPTQALPEFTSIFSSHQTAAPEVNNIFIKQELPTPDLHLSVPTQQGHLYQLLNTPDLDMPSSTNQTAAMDTLNVSMSAAMAGLNTHTSAVPQTAVKQFQGMPPCTYTMPSQFLPQQATYFPPSPPSSEPGSPDRQAEMLQNLTPPPSYAATIASKLAIHNPNLPTTLPVNSQNIQPVRYNRRSNPDLEKRRIHYCDYPGCTKVYTKSSHLKAHLRTHTGEKPYKCTWEGCDWRFARSDELTRHYRKHTGAKPFQCGVCNRSFSRSDHLALHMKRHQN

SEQ ID NO: 15220 - protein, 283 aa, Homo sapiens
MDVLPMCSIFQELQIVHETGYFSALPSLEEYWQQTCLELERYLQSEPCYVSASEIKFDSQEDLWTKIILAREKKEESELKISSSPPEDTLISPSFCYNLETNSLNSDVSSESSDSSEELSPTAKFTSDPIGEVLVSSGKLSSSVTSTPPSSPELSREPSQLWGCVPGELPSPGKVRSGTSGKPGDKGNGDASPDGRRRVHRCHFNGCRKVYTKSSHLKAHQRTHTGEKPYRCSWEGCEWRFARSDELTRHFRKHTGAKPFKCSHCDRCFSRSDHLALHMKRHL

SEQ ID NO: 15221 - protein, 302 aa, Homo sapiens
MDVLASYSIFQELQLVHDTGYFSALPSLEETWQQTCLELERYLQTEPRRISETFGEDLDCFLHASPPPCIEESFRRLDPLLLPVEAAICEKSSAVDILLSRDKLLSETCLSLQPASSSLDSYTAVNQAQLNAVTSLTPPSSPELSRHLVKTSQTLSAVDGTVTLKLVAKKAALSSVKVGGVATAAAAVTAAGAVKSGQSDSDQGGLGAEACPENKKRVHRCQFNGCRKVYTKSSHLKAHQRTHTGEKPYKCSWEGCEWRFARSDELTRHYRKHTGAKPFKCNHCDRCFSRSDHLALHMKRHI

SEQ ID NO: 15222 - protein, 359 aa, Homo sapiens
MVDMDKLINNLEVQLNSEGGSMQVFKQVTASVRNRDPPEIEYRSNMTSPTLLDANPMENPALFNDIKIEPPEELLASDFSLPQVEPVDLSFHKPKAPLQPASMLQAPIRPPKPQSSPQTLVVSTSTSDMSTSANIPTVLTPGSVLTSSQSTGSQQILHVIHTIPSVSLPNKMGGLKTIPVVVQSLPMVYTTLPADGGPAAITVPLIGGDGKNAGSVKVDPTSMSPLEIPSDSEESTIESGSSALQSLQGLQQEPAAMAQMQGEESLDLKRRRIHQCDFAGCSKVYTKSSHLKAHRRIHTGEKPYKCTWDGCSWKFARSDELTRHFRKHTGIKPFRCTDCNRSFSRSDHLSLHRRRHDTM

SEQ ID NO: 15223 - protein, 244 aa, Homo sapiens
MSAAAYMDFVAAQCLVSISNRAAVPEHGVAPDAERLRLPEREVTKEHGDPGDTWKDYCTLVTIAKSLLDLNKYRPIQTPSVCSDSLESPDEDMGSDSDVTTESGSSPSHSPEERQDPGSAPSPLSLLHPGVAAKGKHASEKRHKCPYSGCGKVYGKSSHLKAHYRVHTGERPFPCTWPDCLKKFSRSDELTRHYRTHTGEKQFRCPLCEKRFMRSDHLTKHARRHTEFHPSMIKRSKKALANAL

SEQ ID NO: 15224 - protein, 3969 aa, Homo sapiens
MAHSCRWRFPARPGTTGGGGGGGRRGLGGAPRQRVPALLLPPGPPVGGGGPGAPPSPPAVAAAAAAAGSSGAGVPGGAAAASAASSSSASSSSSSSSSASSGPALLRVGPGFDAALQVSAAIGTNLRRFRAVFGESGGGGGSGEDEQFLGFGSDEEVRVRSPTRSPSVKTSPRKPRGRPRSGSDRNSAILSDPSVFSPLNKSETKSGDKIKKKDSKSIEKKRGRPPTFPGVKIKITHGKDISELPKGNKEDSLKKIKRTPSATFQQATKIKKLRAGKLSPLKSKFKTGKLQIGRKGVQIVRRRGRPPSTERIKTPSGLLINSELEKPQKVRKDKEGTPPLTKEDKTVVRQSPRRIKPVRIIPSSKRTDATIAKQLLQRAKKGAQKKIEKEAAQLQGRKVKTQVKNIRQFIMPVVSAISSRIIKTPRRFIEDEDYDPPIKIARLESTPNSRFSAPSCGSSEKSSAASQHSSQMSSDSSRSSSPSVDTSTDSQASEEIQVLPEERSDTPEVHPPLPISQSPENESNDRRSRRYSVSERSFGSRTTKKLSTLQSAPQQQTSSSPPPPLLTPPPPLQPASSISDHTPWLMPPTIPLASPFLPASTAPMQGKRKSILREPTFRWTSLKHSRSEPQYFSSAKYAKEGLIRKPIFDNFRPPPLTPEDVGFASGFSASGTAASARLFSPLHSGTRFDMHKRSPLLRAPRFTPSEAHSRIFESVTLPSNRTSAGTSSSGVSNRKRKRKVFSPIRSEPRSPSHSMRTRSGRLSSSELSPLTPPSSVSSSLSISVSPLATSALNPTFTFPSHSLTQSGESAEKNQRPRKQTSAPAEPFSSSSPTPLFPWFTPGSQTERGRNKDKAPEELSKDRDADKSVEKDKSRERDREREKENKRESRKEKRKKGSEIQSSSALYPVGRVSKEKVVGEDVATSSSAKKATGRKKSSSHDSGTDITSVTLGDTTAVKTKILIKKGRGNLEKTNLDLGPTAPSLEKEKTLCLSTPSSSTVKHSTSSIGSMLAQADKLPMTDKRVASLLKKAKAQLCKIEKSKSLKQTDQPKAQGQESDSSETSVRGPRIKHVCRRAAVALGRKRAVFPDDMPTLSALPWEEREKILSSMGNDDKSSIAGSEDAEPLAPPIKPIKPVTRNKAPQEPPVKKGRRSRRCGQCPGCQVPEDCGVCTNCLDKPKFGGRNIKKQCCKMRKCQNLQWMPSKAYLQKQAKAVKKKEKKSKTSEKKDSKESSVVKNVVDSSQKPTPSAREDPAPKKSSSEPPPRKPVEEKSEEGNVSAPGPESKQATTPASRKSSKQVSQPALVIPPQPPTTGPPRKEVPKTTPSEPKKKQPPPPESGPEQSKQKKVAPRPSIPVKQKPKEKEKPPPVNKQENAGTLNILSTLSNGNSSKQKIPADGVHRIRVDFKEDCEAENVWEMGGLGILTSVPITPRVVCFLCASSGHVEFVYCQVCCEPFHKFCLEENERPLEDQLENWCCRRCKFCHVCGRQHQATKQLLECNKCRNSYHPECLGPNYPTKPTKKKKVWICTKCVRCKSCGSTTPGKGWDAQWSHDFSLCHDCAKLFAKGNFCPLCDKCYDDDDYESKMMQCGKCDRWVHSKCENLSDEMYEILSNLPESVAYTCVNCTERHPAEWRLALEKELQISLKQVLTALLNSRTTSHLLRYRQAAKPPDLNPETEESIPSRSSPEGPDPPVLTEVSKQDDQQPLDLEGVKRKMDQGNYTSVLEFSDDIVKIIQAAINSDGGQPEIKKANSMVKSFFIRQMERVFPWFSVKKSRFWEPNKVSSNSGMLPNAVLPPSLDHNYAQWQEREENSHTEQPPLMKKIIPAPKPKGPGEPDSPTPLHPPTPPILSTDRSREDSPELNPPPGIEDNRQCALCLTYGDDSANDAGRLLYIGQNEWTHVNCALWSAEVFEDDDGSLKNVHMAVIRGKQLRCEFCQKPGATVGCCLTSCTSNYHFMCSRAKNCVFLDDKKVYCQRHRDLIKGEVVPENGFEVFRRVFVDFEGISLRRKFLNGLEPENIHMMIGSMTIDCLGILNDLSDCEDKLFPIGYQCSRVYWSTTDARKRCVYTCKIVECRPPVVEPDINSTVEHDENRTIAHSPTSFTESSSKESQNTAEIISPPSPDRPPHSQTSGSCYYHVISKVPRIRTPSYSPTQRSPGCRPLPSAGSPTPTTHEIVTVGDPLLSSGLRSIGSRRHSTSSLSPQRSKLRIMSPMRTGNTYSRNNVSSVSTTGTATDLESSAKVVDHVLGPLNSSTSLGQNTSTSSNLQRTVVTVGNKNSHLDGSSSSEMKQSSASDLVSKSSSLKGEKTKVLSSKSSEGSAHNVAYPGIPKLAPQVHNTTSRELNVSKIGSFAEPSSVSFSSKEALSFPHLHLRGQRNDRDQHTDSTQSANSSPDEDTEVKTLKLSGMSNRSSIINEHMGSSSRDRRQKGKKSCKETFKEKHSSKSFLEPGQVTTGEEGNLKPEFMDEVLTPEYMGQRPCNNVSSDKIGDKGLSMPGVPKAPPMQVEGSAKELQAPRKRTVKVTLTPLKMENESQSKNALKESSPASPLQIESTSPTEPISASENPGDGPVAQPSPNNTSCQDSQSNNYQNLPVQDRNLMLPDGPKPQEDGSFKRRYPRRSARARSNMFFGLTPLYGVRSYGEEDIPFYSSSTGKKRGKRSAEGQVDGADDLSTSDEDDLYYYNFTRTVISSGGEERLASHNLFREEEQCDLPKISQLDGVDDGTESDTSVTATTRKSSQIPKRNGKENGTENLKIDRPEDAGEKEHVTKSSVGHKNEPKMDNCHSVSRVKTQGQDSLEAQLSSLESSRRVHTSTPSDKNLLDTYNTELLKSDSDNNNSDDCGNILPSDIMDFVLKNTPSMQALGESPESSSSELLNLGEGLGLDSNREKDMGLFEVFSQQLPTTEPVDSSVSSSISAEEQFELPLELPSDLSVLTTRSPTVPSQNPSRLAVISDSGEKRVTITEKSVASSESDPALLSPGVDPTPEGHMTPDHFIQGHMDADHISSPPCGSVEQGHGNNQDLTRNSSTPGLQVPVSPTVPIQNQKYVPNSTDSPGPSQISNAAVQTTPPHLKPATEKLIVVNQNMQPLYVLQTLPNGVTQKIQLTSSVSSTPSVMETNTSVLGPMGGGLTLTTGLNPSLPTSQSLFPSASKGLLPMSHHQHLHSFPAATQSSFPPNISNPPSGLLIGVQPPPDPQLLVSESSQRTDLSTTVATPSSGLKKRPISRLQTRKNKKLAPSSTPSNIAPSDVVSNMTLINFTPSQLPNHPSLLDLGSLNTSSHRTVPNIIKRSKSSIMYFEPAPLLPQSVGGTAATAAGTSTISQDTSHLTSGSVSGLASSSSVLNVVSMQTTTTPTSSASVPGHVTLTNPRLLGTPDIGSISNLLIKASQQSLGIQDQPVALPPSSGMFPQLGTSQTPSTAAITAASSICVLPSTQTTGITAASPSGEADEHYQLQHVNQLLASKTGIHSSQRDLDSASGPQVSNFTQTVDAPNSMGLEQNKALSSAVQASPTSPGGSPSSPSSGQRSASPSVPGPTKPKPKTKRFQLPLDKGNGKKHKVSHLRTSSSEAHIPDQETTSLTSGTGTPGAEAEQQDTASVEQSSQKECGQPAGQVAVLPEVQVTQNPANEQESAEPKTVEEEESNFSSPLMLWLQQEQKRKESITEKKPKKGLVFEISSDDGFQICAESIEDAWKSLTDKVQEARSNARLKQLSFAGVNGLRMLGILHDAVVFLIEQLSGAKHCRNYKFRFHKPEEANEPPLNPHGSARAEVHLRKSAFDMFNFLASKHRQPPEYNPNDEEEEEVQLKSARRATSMDLPMPMRFRHLKKTSKEAVGVYRSPIHGRGLFCKRNIDAGEMVIEYAGNVIRSIQTDKREKYYDSKGIGCYMFRIDDSEVVDATMHGNAARFINHSCEPNCYSRVINIDGQKHIVIFAMRKIYRGEELTYDYKFPIEDASNKLPCNCGAKKCRKFLN

SEQ ID NO: 15225 - protein, 2715 aa, Homo sapiens
MAAAAGGGSCPGPGSARGRFPGRPRGAGGGGGRGGRGNGAERVRVALRRGGGATGPGGAEPGEDTALLRLLGLRRGLRRLRRLWAGPRVQRGRGRGRGRGWGPSRGCVPEEESSDGESDEEEFQGFHSDEDVAPSSLRSALRSQRGRAPRGRGRKHKTTPLPPPRLADVAPTPPKTPARKRGEEGTERMVQALTELLRRAQAPQAPRSRACEPSTPRRSRGRPPGRPAGPCRRKQQAVVVAEAAVTIPKPEPPPPVVPVKHQTGSWKCKEGPGPGPGTPRRGGQSSRGGRGGRGRGRGGGLPFVIKFVSRAKKVKMGQLSLGLESGQGQGQHEESWQDVPQRRVGSGQGGSPCWKKQEQKLDDEEEEKKEEEEKDKEGEEKEERAVAEEMMPAAEKEEAKLPPPPLTPPAPSPPPPLPPPSTSPPPPLCPPPPPPVSPPPLPSPPPPPAQEEQEESPPPVVPATCSRKRGRPPLTPSQRAEREAARAGPEGTSPPTPTPSTATGGPPEDSPTVAPKSTTFLKNIRQFIMPVVSARSSRVIKTPRRFMDEDPPKPPKVEVSPVLRPPITTSPPVPQEPAPVPSPPRAPTPPSTPVPLPEKRRSILREPTFRWTSLTRELPPPPPAPPPPPAPSPPPAPATSSRRPLLLRAPQFTPSEAHLKIYESVLTPPPLGAPEAPEPEPPPADDSPAEPEPRAVGRTNHLSLPRFAPVVTTPVKAEVSPHGAPALSNGPQTQAQLLQPLQALQTQLLPQALPPPQPQLQPPPSPQQMPPLEKARIAGVGSLPLSGVEEKMFSLLKRAKVQLFKIDQQQQQKVAASMPLSPGGQMEEVAGAVKQISDRGPVRSEDESVEAKRERPSGPESPVQGPRIKHVCRHAAVALGQARAMVPEDVPRLSALPLRDRQDLATEDTSSASETESVPSRSRRGKVEAAGPGGESEPTGSGGTLAHTPRRSLPSHHGKKMRMARCGHCRGCLRVQDCGSCVNCLDKPKFGGPNTKKQCCVYRKCDKIEARKMERLAKKGRTIVKTLLPWDSDESPEASPGPPGPRRGAGAGGPREEVVAHPGPEEQDSLLQRKSARRCVKQRPSYDIFEDSDDSEPGGPPAPRRRTPRENELPLPEPEEQSRPRKPTLQPVLQLKARRRLDKDALAPGPFASFPNGWTGKQKSPDGVHRVRVDFKEDCDLENVWLMGGLSVLTSVPGGPPMVCLLCASKGLHELVFCQVCCDPFHPFCLEEAERPLPQHHDTWCCRRCKFCHVCGRKGRGSKHLLECERCRHAYHPACLGPSYPTRATRKRRHWICSACVRCKSCGATPGKNWDVEWSGDYSLCPRCTQLYEKGNYCPICTRCYEDNDYESKMMQCAQCDHWVHAKCEGLSDEDYEILSGLPDSVLYTCGPCAGAAQPRWREALSGALQGGLRQVLQGLLSSKVVGPLLLCTQCGPDGKQLHPGPCGLQAVSQRFEDGHYKSVHSFMEDMVGILMRHSEEGETPDRRAGGQMKGLLLKLLESAFGWFDAHDPKYWRRSTRLPNGVLPNAVLPPSLDHVYAQWRQQEPETPESGQPPGDPSAAFQGKDPAAFSHLEDPRQCALCLKYGDADSKEAGRLLYIGQNEWTHVNCAIWSAEVFEENDGSLKNVHAAVARGRQMRCELCLKPGATVGCCLSSCLSNFHFMCARASYCIFQDDKKVFCQKHTDLLDGKEIVNPDGFDVLRRVYVDFEGINFKRKFLTGLEPDAINVLIGSIRIDSLGTLSDLSDCEGRLFPIGYQCSRLYWSTVDARRRCWYRCRILEYRPWGPREEPAHLEAAEENQTIVHSPAPSSEPPGGEDPPLDTDVLVPGAPERHSPIQNLDPPLRPDSGSAPPPAPRSFSGARIKVPNYSPSRRPLGGVSFGPLPSPGSPSSLTHHIPTVGDPDFPAPPRRSRRPSPLAPRPPPSRWASPPLKTSPQLRVPPPTSVVTALTPTSGELAPPGPAPSPPPPEDLGPDFEDMEVVSGLSAADLDFAASLLGTEPFQEEIVAAGAMGSSHGGPGDSSEEESSPTSRYIHFPVTVVSAPGLAPSATPGAPRIEQLDGVDDGTDSEAEAVQQPRGQGTPPSGPGVVRAGVLGAAGDRARPPEDLPSEIVDFVLKNLGGPGDGGAGPREESLPPAPPLANGSQPSQGLTASPADPTRTFAWLPGAPGVRVLSLGPAPEPPKPATSKIILVNKLGQVFVKMAGEGEPVPPPVKQPPLPPTISPTAPTSWTLPPGPLLGVLPVVGVVRPAPPPPPPPLTLVLSSGPASPPRQAIRVKRVSTFSGRSPPAPPPYKAPRLDEDGEASEDTPQVPGLGSGGFSRVRMKTPTVRGVLDLDRPGEPAGEESPGPLQERSPLLPLPEDGPPQVPDGPPDLLLESQWHHYSGEASSSEEEPPSPDDKENQAPKRTGPHLRFEISSEDGFSVEAESLEGAWRTLIEKVQEARGHARLRHLSFSGMSGARLLGIHHDAVIFLAEQLPGAQRCQHYKFRYHQQGEGQEEPPLNPHGAARAEVYLRKCTFDMFNFLASQHRVLPEGATCDEEEDEVQLRSTRRATSLELPMAMRFRHLKKTSKEAVGVYRSAIHGRGLFCKRNIDAGEMVIEYSGIVIRSVLTDKREKFYDGKGIGCYMFRMDDFDVVDATMHGNAARFINHSCEPNCFSRVIHVEGQKHIVIFALRRILRGEELTYDYKFPIEDASNKLPCNCGAKRCRRFLN

SEQ ID NO: 15226 - protein, 4911 aa, Homo sapiens
MSSEEDKSVEQPQPPPPPPEEPGAPAPSPAAADKRPRGRPRKDGASPFQRARKKPRSRGKTAVEDEDSMDGLETTETETIVETEIKEQSAEEDAEAEVDNSKQLIPTLQRSVSEESANSLVSVGVEAKISEQLCAFCYCGEKSSLGQGDLKQFRITPGFILPWRNQPSNKKDIDDNSNGTYEKMQNSAPRKQRGQRKERSPQQNIVSCVSVSTQTASDDQAGKLWDELSLVGLPDAIDIQALFDSTGTCWAHHRCVEWSLGVCQMEEPLLVNVDKAVVSGSTERCAFCKHLGATIKCCEEKCTQMYHYPCAAGAGTFQDFSHIFLLCPEHIDQAPERSKEDANCAVCDSPGDLLDQFFCTTCGQHYHGMCLDIAVTPLKRAGWQCPECKVCQNCKQSGEDSKMLVCDTCDKGYHTFCLQPVMKSVPTNGWKCKNCRICIECGTRSSSQWHHNCLICDNCYQQQDNLCPFCGKCYHPELQKDMLHCNMCKRWVHLECDKPTDHELDTQLKEEYICMYCKHLGAEMDRLQPGEEVEIAELTTDYNNEMEVEGPEDQMVFSEQAANKDVNGQESTPGIVPDAVQVHTEEQQKSHPSESLDTDSLLIAVSSQHTVNTELEKQISNEVDSEDLKMSSEVKHICGEDQIEDKMEVTENIEVVTHQITVQQEQLQLLEEPETVVSREESRPPKLVMESVTLPLETLVSPHEESISLCPEEQLVIERLQGEKEQKENSELSTGLMDSEMTPTIEGCVKDVSYQGGKSIKLSSETESSFSSSADISKADVSSSPTPSSDLPSHDMLHNYPSALSSSAGNIMPTTYISVTPKIGMGKPAITKRKFSPGRPRSKQGAWSTHNTVSPPSWSPDISEGREIFKPRQLPGSAIWSIKVGRGSGFPGKRRPRGAGLSGRGGRGRSKLKSGIGAVVLPGVSTADISSNKDDEENSMHNTVVLFSSSDKFTLNQDMCVVCGSFGQGAEGRLLACSQCGQCYHPYCVSIKITKVVLSKGWRCLECTVCEACGKATDPGRLLLCDDCDISYHTYCLDPPLQTVPKGGWKCKWCVWCRHCGATSAGLRCEWQNNYTQCAPCASLSSCPVCYRNYREEDLILQCRQCDRWMHAVCQNLNTEEEVENVADIGFDCSMCRPYMPASNVPSSDCCESSLVAQIVTKVKELDPPKTYTQDGVCLTESGMTQLQSLTVTVPRRKRSKPKLKLKIINQNSVAVLQTPPDIQSEHSRDGEMDDSREGELMDCDGKSESSPEREAVDDETKGVEGTDGVKKRKRKPYRPGIGGFMVRQRSRTGQGKTKRSVIRKDSSGSISEQLPCRDDGWSEQLPDTLVDESVSVTESTEKIKKRYRKRKNKLEETFPAYLQEAFFGKDLLDTSRQSKISLDNLSEDGAQLLYKTNMNTGFLDPSLDPLLSSSSAPTKSGTHGPADDPLADISEVLNTDDDILGIISDDLAKSVDHSDIGPVTDDPSSLPQPNVNQSSRPLSEEQLDGILSPELDKMVTDGAILGKLYKIPELGGKDVEDLFTAVLSPANTQPTPLPQPPPPTQLLPIHNQDAFSRMPLMNGLIGSSPHLPHNSLPPGSGLGTFSAIAQSSYPDARDKNSAFNPMASDPNNSWTSSAPTVEGENDTMSNAQRSTLKWEKEEALGEMATVAPVLYTNINFPNLKEEFPDWTTRVKQIAKLWRKASSQERAPYVQKARDNRAALRINKVQMSNDSMKRQQQQDSIDPSSRIDSELFKDPLKQRESEHEQEWKFRQQMRQKSKQQAKIEATQKLEQVKNEQQQQQQQQFGSQHLLVQSGSDTPSSGIQSPLTPQPGNGNMSPAQSFHKELFTKQPPSTPTSTSSDDVFVKPQAPPPPPAPSRIPIQDSLSQAQTSQPPSPQVFSPGSSNSRPPSPMDPYAKMVGTPRPPPVGHSFSRRNSAAPVENCTPLSSVSRPLQMNETTANRPSPVRDLCSSSTTNNDPYAKPPDTPRPVMTDQFPKSLGLSRSPVVSEQTAKGPIAAGTSDHFTKPSPRADVFQRQRIPDSYARPLLTPAPLDSGPGPFKTPMQPPPSSQDPYGSVSQASRRLSVDPYERPALTPRPIDNFSHNQSNDPYSQPPLTPHPAVNESFAHPSRAFSQPGTISRPTSQDPYSQPPGTPRPVVDSYSQSSGTARSNTDPYSQPPGTPRPTTVDPYSQQPQTPRPSTQTDLFVTPVTNQRHSDPYAHPPGTPRPGISVPYSQPPATPRPRISEGFTRSSMTRPVLMPNQDPFLQAAQNRGPALPGPLVRPPDTCSQTPRPPGPGLSDTFSRVSPSAARDPYDQSPMTPRSQSDSFGTSQTAHDVADQPRPGSEGSFCASSNSPMHSQGQQFSGVSQLPGPVPTSGVTDTQNTVNMAQADTEKLRQRQKLREIILQQQQQKKIAGRQEKGSQDSPAVPHPGPLQHWQPENVNQAFTRPPPPYPGNIRSPVAPPLGPRYAVFPKDQRGPYPPDVASMGMRPHGFRFGFPGGSHGTMPSQERFLVPPQQIQGSGVSPQLRRSVSVDMPRPLNNSQMNNPVGLPQHFSPQSLPVQQHNILGQAYIELRHRAPDGRQRLPFSAPPGSVVEASSNLRHGNFIPRPDFPGPRHTDPMRRPPQGLPNQLPVHPDLEQVPPSQQEQGHSVHSSSMVMRTLNHPLGGEFSEAPLSTSVPSETTSDNLQITTQPSDGLEEKLDSDDPSVKELDVKDLEGVEVKDLDDEDLENLNLDTEDGKVVELDTLDNLETNDPNLDDLLRSGEFDIIAYTDPELDMGDKKSMFNEELDLPIDDKLDNQCVSVEPKKKEQENKTLVLSDKHSPQKKSTVTNEVKTEVLSPNSKVESKCETEKNDENKDNVDTPCSQASAHSDLNDGEKTSLHPCDPDLFEKRTNRETAGPSANVIQASTQLPAQDVINSCGITGSTPVLSSLLANEKSDNSDIRPSGSPPPPTLPASPSNHVSSLPPFIAPPGRVLDNAMNSNVTVVSRVNHVFSQGVQVNPGLIPGQSTVNHSLGTGKPATQTGPQTSQSGTSSMSGPQQLMIPQTLAQQNRERPLLLEEQPLLLQDLLDQERQEQQQQRQMQAMIRQRSEPFFPNIDFDAITDPIMKAKMVALKGINKVMAQNNLGMPPMVMSRFPFMGQVVTGTQNSEGQNLGPQAIPQDGSITHQISRPNPPNFGPGFVNDSQRKQYEEWLQETQQLLQMQQKYLEEQIGAHRKSKKALSAKQRTAKKAGREFPEEDAEQLKHVTEQQSMVQKQLEQIRKQQKEHAELIEDYRIKQQQQCAMAPPTMMPSVQPQPPLIPGATPPTMSQPTFPMVPQQLQHQQHTTVISGHTSPVRMPSLPGWQPNSAPAHLPLNPPRIQPPIAQLPIKTCTPAPGTVSNANPQSGPPPRVEFDDNNPFSESFQERERKERLREQQERQRIQLMQEVDRQRALQQRMEMEQHGMVGSEISSSRTSVSQIPFYSSDLPCDFMQPLGPLQQSPQHQQQMGQVLQQQNIQQGSINSPSTQTFMQTNERRQVGPPSFVPDSPSIPVGSPNFSSVKQGHGNLSGTSFQQSPVRPSFTPALPAAPPVANSSLPCGQDSTITHGHSYPGSTQSLIQLYSDIIPEEKGKKKRTRKKKRDDDAESTKAPSTPHSDITAPPTPGISETTSTPAVSTPSELPQQADQESVEPVGPSTPNMAAGQLCTELENKLPNSDFSQATPNQQTYANSEVDKLSMETPAKTEEIKLEKAETESCPGQEEPKLEEQNGSKVEGNAVACPVSSAQSPPHSAGAPAAKGDSGNELLKHLLKNKKSSSLLNQKPEGSICSEDDCTKDNKLVEKQNPAEGLQTLGAQMQGGFGCGNQLPKTDGGSETKKQRSKRTQRTGEKAAPRSKKRKKDEEEKQAMYSSTDTFTHLKQQNNLSNPPTPPASLPPTPPPMACQKMANGFATTEELAGKAGVLVSHEVTKTLGPKPFQLPFRPQDDLLARALAQGPKTVDVPASLPTPPHNNQEELRIQDHCGDRDTPDSFVPSSSPESVVGVEVSRYPDLSLVKEEPPEPVPSPIIPILPSTAGKSSESRRNDIKTEPGTLYFASPFGPSPNGPRSGLISVAITLHPTAAENISSVVAAFSDLLHVRIPNSYEVSSAPDVPSMGLVSSHRINPGLEYRQHLLLRGPPPGSANPPRLVSSYRLKQPNVPFPPTSNGLSGYKDSSHGIAESAALRPQWCCHCKVVILGSGVRKSFKDLTLLNKDSRESTKRVEKDIVFCSNNCFILYSSTAQAKNSENKESIPSLPQSPMRETPSKAFHQYSNNISTLDVHCLPQLPEKASPPASPPIAFPPAFEAAQVEAKPDELKVTVKLKPRLRAVHGGFEDCRPLNKKWRGMKWKKWSIHIVIPKGTFKPPCEDEIDEFLKKLGTSLKPDPVPKDYRKCCFCHEEGDGLTDGPARLLNLDLDLWVHLNCALWSTEVYETQAGALINVELALRRGLQMKCVFCHKTGATSGCHRFRCTNIYHFTCAIKAQCMFFKDKTMLCPMHKPKGIHEQELSYFAVFRRVYVQRDEVRQIASIVQRGERDHTFRVGSLIFHTIGQLLPQQMQAFHSPKALFPVGYEASRLYWSTRYANRRCRYLCSIEEKDGRPVFVIRIVEQGHEDLVLSDISPKGVWDKILEPVACVRKKSEMLQLFPAYLKGEDLFGLTVSAVARIAESLPGVEACENYTFRYGRNPLMELPLAVNPTGCARSEPKMSAHVKRFVLRPHTLNSTSTSKSFQSTVTGELNAPYSKQFVHSKSSQYRKMKTEWKSNVYLARSRIQGLGLYAARDIEKHTMVIEYIGTIIRNEVANRKEKLYESQNRGVYMFRMDNDHVIDATLTGGPARYINHSCAPNCVAEVVTFERGHKIIISSSRRIQKGEELCYDYKFDFEDDQHKIPCHCGAVNCRKWMN

SEQ ID NO: 15227 - protein, 1858 aa, Homo sapiens
MSIVIPLGVDTAETSYLEMAAGSEPESVEASPVVVEKSNSYPHQLYTSSSHHSHSYIGLPYADHNYGARPPPTPPASPPPSVLISKNEVGIFTTPNFDETSSATTISTSEDGSYGTDVTRCICGFTHDDGYMICCDKCSVWQHIDCMGIDRQHIPDTYLCERCQPRNLDKERAVLLQRRKRENMSDGDTSATESGDEVPVELYTAFQHTPTSITLTASRVSKVNDKRRKKSGEKEQHISKCKKAFREGSRKSSRVKGSAPEIDPSSDGSNFGWETKIKAWMDRYEEANNNQYSEGVQREAQRIALRLGNGNDKKEMNKSDLNTNNLLFKPPVESHIQKNKKILKSAKDLPPDALIIEYRGKFMLREQFEANGYFFKRPYPFVLFYSKFHGLEMCVDARTFGNEARFIRRSCTPNAEVRHEIQDGTIHLYIYSIHSIPKGTEITIAFDFDYGNCKYKVDCACLKENPECPVLKRSSESMENINSGYETRRKKGKKDKDISKEKDTQNQNITLDCEGTTNKMKSPETKQRKLSPLRLSVSNNQEPDFIDDIEEKTPISNEVEMESEEQIAERKRKMTREERKMEAILQAFARLEKREKRREQALERISTAKTEVKTECKDTQIVSDAEVIQEQAKEENASKPTPAKVNRTKQRKSFSRSRTHIGQQRRRHRTVSMCSDIQPSSPDIEVTSQQNDIENTVLTIEPETETALAEIITETEVPALNKCPTKYPKTKKHLVNEWLSEKNEKTGKPSDGLSERPLRITTDPEVLATQLNSLPGLTYSPHVYSTPKHYIRFTSPFLSEKRRRKEPTENISGSCKKRWLKQALEEENSAILHRFNSPCQERSRSPAVNGENKSPLLLNDSCSLPDLTTPLKKRRFYQLLDSVYSETSTPTPSPYATPTHTDITPMDPSFATPPRIKSDDETCRNGYKPIYSPVTPVTPGTPGNTMHFENISSPESSPEIKRRTYSQEGYDRSSTMLTLGPFRNSNLTELGLQEIKTIGYTSPRSRTEVNRQCPGEKEPVSDLQLGLDAVEPTALHKTLETPAHDRAEPNSQLDSTHSGRGTMYSSWVKSPDRTGVNFSVNSNLRDLTPSHQLEVGGGFRISESKCLMQDDTRGMFMETTVFCTSEDGLVSGFGRTVNDNLIDGNCTPQNPPQKKKVSLLEYRKRQREARKSGSKTENFPLISVSPHASGSLSNNGDGCASSNDNGEQVDHTASLPLPTPATVYNATSEETSNNCPVKDATASEKNEPEVQWTASTSVEQVRERSYQRALLLSDHRKDKDSGGESPCVSCSPSHVQSSPSSHSNHIPQLQAKGPVPSFSELMEDPDPENPEPTTTNECPSPDTSQNTCKSPPKMSKPGSPGSVIPAQAHGKIFTKPDPQWDSTVSASEAENGVHLKTELQQKQLSNNNQALSKNHPPQTHVRNSSEQLSQKLPSVPTKLHCPPSPHLENPPKSSTPHTPVQHGYLSPKPPSQQLGSPYRPHHSQSPQVGTPQREPQRNFYPAAQNLPANTQQATSGTLFTQTPSGQSSATYSQFNQQSLNSTAPPPPPPPPPSSSYYQNQQPSANFQNYNQLKGSLSQQTVFTSGPNQALPGTTSQQTVPGHHVTPGHFLPSQNPTIHHQTAAAVVPPPPPPPPAPGPHLVQQPNSHQQHSVAHVVGPVHAVTPGSHIHSQTAGHHLPPPPPPPGPAPHHHPPPHPSTGLQGLQAQHQHVVNSAPPPPPPPPPSSVLASGHHTTSAQALHHPPHQGPPLFPSSAHPTVPPYPSQATHHTTLGPGPQHQPSGTGPHCPLPVTGPHLQPQGPNSIPTPTASGFCPHPGSVALPHGVQGPQQASPVPGQIPIHRAQVPPTFQNNYHGSGWH

SEQ ID NO: 15228 - protein, 840 aa, Homo sapiens
MHLVAGDSPGSGPHLPATAFIIPASSATLGLPSSALDVSCFPREPIHVGAPEQVAGCEPVSATVLPQLSAGPASSSTSTVRLLEWTEAAAPPPGGGLRFRISEYKPLNMAGVEQPPSPELRQEGVTEYEDGGAPAGDGEAGPQQAEDHPQNPPEDPNQDPPEDDSTCQCQACGPHQAAGPDLGSSNDGCPQLFQERSVIVENSSGSTSASELLKPMKKRKRREYQSPSEEESEPEAMEKQEEGKDPEGQPTASTPESEEWSSSQPATGEKKECWSWESYLEEQKAITAPVSLFQDSQAVTHNKNGFKLGMKLEGIDPQHPSMYFILTVAEVCGYRLRLHFDGYSECHDFWVNANSPDIHPAGWFEKTGHKLQPPKGYKEEEFSWSQYLRSTRAQAAPKHLFVSQSHSPPPLGFQVGMKLEAVDRMNPSLVCVASVTDVVDSRFLVHFDNWDDTYDYWCDPSSPYIHPVGWCQKQGKPLTPPQDYPDPDNFCWEKYLEETGASAVPTWAFKVRPPHSFLVNMKLEAVDRRNPALIRVASVEDVEDHRIKIHFDGWSHGYDFWIDADHPDIHPAGWCSKTGHPLQPPLGPREPSSASPGGCPPLSYRSLPHTRTSKYSFHHRKCPTPGCDGSGHVTGKFTAHHCLSGCPLAERNQSRLKAELSDSEASARKKNLSGFSPRKKPRHHGRIGRPPKYRKIPQEDFQTLTPDVVHQSLFMSALSAHPDRSLSVCWEQHCKLLPGVAGISASTVAKWTIDEVFGFVQTLTGCEDQARLFKDEARIVRVTHVSGKTLVWTVAQLGDLVCSDHLQEGKGILETGVHSLLCSLPTHLLAKLSFASDSQY

SEQ ID NO: 15229 - protein, 705 aa, Homo sapiens; identical to SEQ ID NO: 7626

SEQ ID NO: 15230 - protein, 780 aa, Homo sapiens
MTESASSTSGQEFDVFSVMDWKDGVGTLPGSDLKFRVNEFGALEVITDENEMENVKKATATTTWMVPTAQEAPTSPPSSRPVFPPAYWTSPPGCPTVFSEKTGMPFRLKDPVKVEGLQFCENCCQYGNVDECLSGGNYCSQNCARHIKDKDQKEERDVEEDNEEEDPKCSRKKKPKLSLKADTKEDGEERDDEMENKQDVRILRGSQRARRKRRGDSAVLKQGLPPKGKKAWCWASYLEEEKAVAVPAKLFKEHQSFPYNKNGFKVGMKLEGVDPEHQSVYCVLTVAEVCGYRIKLHFDGYSDCYDFWVNADALDIHPVGWCEKTGHKLHPPKGYKEEEFNWQTYLKTCKAQAAPKSLFENQNITVIPSGFRVGMKLEAVDKKNPSFICVATVTDMVDNRFLVHFDNWDESYDYWCEASSPHIHPVGWCKEHRRTLITPPGYPNVKHFSWDKYLEETNSLPAPARAFKVKPPHGFQKKMKLEVVDKRNPMFIRVATVADTDDHRVKVHFDGWNNCYDYWIDADSPDIHPVGWCSKTGHPLQPPLSPLELMEASEHGGCSTPGCKGIGHFKRARHLGPHSAANCPYSEINLNKDRIFPDRLSGEMPPASPSFPRNKRTDANESSSSPEIRDQHADDVKEDFEERTESEMRTSHEARGAREEPTVQQAQRRSAVFLSFKSPIPCLPLRWEQQSKLLPTVAGIPASKVSKWSTDEVSEFIQSLPGCEEHGKVFKDEQIDGEAFLLMTQTDIVKIMSIKLGPALKIFNSILMFKAAEKNSHNEL

SEQ ID NO: 15231 - protein, 623 aa, Homo sapiens
MKQPNRKRKLNMDSKERLDQDGRLEQAEEEKKPKDSTTPLSHVPSAAAQGAWSWEWYLKEQKAVAAPVELFSKDQSFPEHENGFQIGMRLEGIDPRHPSVFCVLSVAEVCGYRLRLHFDGYLSCYDFWTNAGSPDIHPVGWCEKTKHELHIPKGYRKDKFVWMDYLKACKLQNAPKKLFRNRSPNGPMSKEFQVGMKLEAVDRKNPSLVCVATIADIVEDRLLVHFDNWDDSYDYWCDVNSPYVQPVGWCQENGRTLIAPQGYPNPENFSWTEYLEATQTNAVPAKVFKMRLPHGFLPNMKLEVVDKRNPRLIRVATIVDVDDQRVKVHFDGWDHKYDYWVEADSPDIHPIGWCDVTGHPLEVPQRTNDLKILPGQAVCPTPGCRGIGHIRGPRYSGHHSAFGCPYSDMNLKKEATLHDRLREQTQANLESDSSHSKSKSLCSLNFNGKHEKVNSQPRLVQQAKCLKIKGKEDIDLDNLFRVLVLHPRGLEYSVEQAQQVLHQSVSMSTVSAHPFRDLPLGREQHCKLLPGVADIRASQVARWTVDEVAEFVQSLLGCEEHAKCFKKEQIDGKAFLLLTQTDIVKVMKIKLGPALKIYNSILMFRHSQELPEEDIASGQEVRG

SEQ ID NO: 15232 - protein, 281 aa, Homo sapiens
MTSKEDGKAAPGEERRRSPLDHLPPPANSNKPLTPFSIEDILNKPSVRRSYSLCGAAHLLAAADKHAQGGLPLAGRALLSQTSPLCALEELASKTFKGLEVSVLQAAEGRDGMTIFGQRQTPKKRRKSRTAFTNHQIYELEKRFLYQKYLSPADRDQIAQQLGLTNAQVITWFQNRRAKLKRDLEEMKADVESAKKLGPSGQMDIVALAELEQNSEATAGGGGGCGRAKSRPGSPVLPPGAPKAPGAGALQLSPASPLTDQPASSQDCSEDEEDEEIDVDD

SEQ ID NO: 15233 - protein, 198 aa, Homo sapiens
MNSGREPRTPRTLLSIADILAPRMVPRAPSAPQLPESGPGPTSPLCALEELTSKTFRGLDARALQPSEGRAGPDALGPGPFGRKRRKSRTAFTAQQVLELERRFVFQKYLAPSERDGLATRLGLANAQVVTWFQNRRAKLKRDVEEMRADVASLRALSPEVLCSLALPEGAPDPGLCLGPAGPDSRPHLSDEEIQVDD

SEQ ID NO: 15234 - protein, 433 aa, Homo sapiens
MQRMIQQFAAEYTSKNSSTQDPSQPNSTKNQSLPKASPVTTSPTAATTQNPVLSKLLMADQDSPLDLTVRKSQSEPSEQDGVLDLSTKKSPCAGSTSLSHSPGCSSTQGNGRPGRPSQYRPDGLRSGDGVPPRSLQDGTREGFGHSTSLKVPLARSLQISEELLSRNQLSTAASLGPSGLQNHGQHLILSREASWAKPHYEFNLSRMKFRGNGALSNISDLPFLAENSAFPKMALQAKQDGKKDVSHSSPVDLKIPQVRGMDLSWESRTGDQYSYSSLVMGSQTESALSKKLRAILPKQSRKSMLDAGPDSWGSDAEQSTSGQPYPTSDQEGDPGSKQPRKKRGRYRQYNSEILEEAISVVMSGKMSVSKAQSIYGIPHSTLEYKVKERLGTLKNPPKKKMKLMRSEGPDVSVKIELDPQGEAAQSANESKNE

SEQ ID NO: 15235 - protein, 602 aa, Homo sapiens; identical to SEQ ID NO: 7761

SEQ ID NO: 15236 - protein, 399 aa, Homo sapiens
MPQLSGGGGGGGGDPELCATDEMIPFKDEGDPQKEKIFAEISHPEEEGDLADIKSSLVNESEIIPASNGHEVARQAQTSQEPYHDKAREHPDDGKHPDGGLYNKGPSYSSYSGYIMMPNMNNDPYMSNGSLSPPIPRTSNKVPVVQPSHAVHPLTPLITYSDEHFSPGSHPSHIPSDVNSKQGMSRHPPAPDIPTFYPLSPGGVGQITPPLGWQGQPVYPITGGFRQPYPSSLSVDTSMSRFSHHMIPGPPGPHTTGIPHPAIVTPQVKQEHPHTDSDLMHVKPQHEQRKEQEPKRPHIKKPLNAFMLYMKEMRANVVAECTLKESAAINQILGRRWHALSREEQAKYYELARKERQLHMQLYPGWSARDNYGKKKKRKREKLQESASGTGPRMTAAYI

SEQ ID NO: 15237 - protein, 168 aa, Homo sapiens
MHPSLATMGKLASKLQLDLSVVKIWFKNQRAKWKRQQRQQMQTRPSLGPANQTTSVKKEETPSAITTANIRPVSPGISDANDHDLREPSGIKNPGGASASARVSSWDSQSYDIEQICLGASNPPWASTLFEIDEFVKIYDLPGEDDTSSLNQYLFPVCLEYDQLQSSV

SEQ ID NO: 15238 - protein, 406 aa, Homo sapiens
MVHCAGCKRPILDRFLLNVLDRAWHVKCVQCCECKCNLTEKCFSREGKLYCKNDFFRCFGTKCAGCAQGISPSDLVRRARSKVFHLNCFTCMMCNKQLSTGEELYIIDENKFVCKEDYLSNSSVAKENSLHSATTGSDPSLSPDSQDPSQDDAKDSESANVSDKEAGSNENDDQNLGAKRRGPRTTIKAKQLETLKAAFAATPKPTRHIREQLAQETGLNMRVIQVWFQNRRSKERRMKQLSALGARRHAFFRSPRRMRPLVDRLEPGELIPNGPFSFYGDYQSEYYGPGGNYDFFPQGPPSSQAQTPVDLPFVPSSGPSGTPLGGLEHPLPGHHPSSEAQRFTDILAHPPGDSPSPEPSLPGPLHSMSAEVFGPSPPFSSLSVNGGASYGNHLSHPPEMNEAAVW

SEQ ID NO: 15239 - protein, 406 aa, Homo sapiens
MLFHSLSGPEVHGVIDEMDRRAKSEAPAISSAIDRGDTETTMPSISSDRAALCAGCGGKISDRYYLLAVDKQWHMRCLKCCECKLNLESELTCFSKDGSIYCKEDYYRRFSVQRCARCHLGISASEMVMRARDLVYHLNCFTCTTCNKMLTTGDHFGMKDSLVYCRLHFEALLQGEYPAHFNHADVAAAAAAAAAAKSAGLGAAGANPLGLPYYNGVGTVQKGRPRKRKSPGPGADLAAYNAALSCNENDAEHLDRDQPYPSSQKTKRMRTSFKHHQLRTMKSYFAINHNPDAKDLKQLAQKTGLTKRVLQVWFQNARAKFRRNLLRQENTGVDKSTDAALQTGTPSGPASELSNASLSPSSTPTTLTDLTSPTLPTVTSVLTSVPGNLEGHEPHSPSQTTLTNLF

SEQ ID NO: 15240 - protein, 397 aa, Homo sapiens
MLLETGLERDRARPGAAAVCTLGGTREIPLCAGCDQHILDRFILKALDRHWHSKCLKCSDCHTPLAERCFSRGESVYCKDDFFKRFGTKCAACQLGIPPTQVVRRAQDFVYHLHCFACVVCKRQLATGDEFYLMEDSRLVCKADYETAKQREAEATAKRPRTTITAKQLETLKSAYNTSPKPARHVREQLSSETGLDMRVVQVWFQNRRAKEKRLKKDAGRQRWGQYFRNMKRSRGGSKSDKDSVQEGQDSDAEVSFPDEPSLAEMGPANGLYGSLGEPTQALGRPSGALGNFSLEHGGLAGPEQYRELRPGSPYGVPPSPAAPQSLPGPQPLLSSLVYPDTSLGLVPSGAPGGPPPMRVLAGNGPSSDLSTGSSGGYPDFPASPASWLDEVDHAQF

SEQ ID NO: 15241 - protein, 390 aa, Homo sapiens
MMQSATVPAEGAVKGLPEMLGVPMQQIPQCAGCNQHILDKFILKVLDRHWHSSCLKCADCQMQLADRCFSRAGSVYCKEDFFKRFGTKCTACQQGIPPTQVVRKAQDFVYHLHCFACIICNRQLATGDEFYLMEDGRLVCKEDYETAKQNDDSEAGAKRPRTTITAKQLETLKNAYKNSPKPARHVREQLSSETGLDMRVVQVWFQNRRAKEKRLKKDAGRHRWGQFYKSVKRSRGSSKQEKESSAEDCGVSDSELSFREDQILSELGHTNRIYGNVGDVTGGQLMNGSFSMDGTGQSYQDLRDGSPYGIPQSPSSISSLPSHAPLLNGLDYTVDSNLGIIAHAGQGVSQTLRAMAGGPTSDISTGSSVGYPDFPTSPGSWLDEMDHPPF

SEQ ID NO: 15242 - protein, 402 aa, Homo sapiens
MMVHCAGCERPILDRFLLNVLDRAWHIKCVQCCECKTNLSEKCFSREGKLYCKNDFFRRFGTKCAGCAQGISPSDLVRKARSKVFHLNCFTCMVCNKQLSTGEELYVIDENKFVCKDDYLSSSSLKEGSLNSVSSCTDRSLSPDLQDALQDDPKETDNSTSSDKETANNENEEQNSGTKRRGPRTTIKAKQLETLKAAFAATPKPTRHIREQLAQETGLNMRVIQVWFQNRRSKERRMKQLSALGARRHAFFRSPRRMRPLGGRLDESEMLGSTPYTYYGDYQGDYYAPGSNYDFFAHGPPSQAQSPADSSFLAASGPGSTPLGALEPPLAGPHAADNPRFTDMISHPDTPSPEPGLPGTLHPMPGEVFSGGPSPPFPMSGTSGYSGPLSHPNPELNEAAVW

SEQ ID NO: 15243 - protein, 363 aa, Homo sapiens
MAQPGSGCKATTRCLEGTAPPAMAQSDAEALAGALDKDEGQASPCTPSTPSVCSPPSAASSVPSAGKNICSSCGLEILDRYLLKVNNLIWHVRCLECSVCRTSLRQQNSCYIKNKEIFCKMDYFSRFGTKCARCGRQIYASDWVRRARGNAYHLACFACFSCKRQLSTGEEFGLVEEKVLCRIHYDTMIENLKRAAENGNGLTLEGAVPSEQDSQPKPAKRARTSFTAEQLQVMQAQFAQDNNPDAQTLQKLADMTGLSRRVIQVWFQNCRARHKKHTPQHPVPPSGAPPSRLPSALSDDIHYTPFSSPERARMVTLHGYIESQVQCGQVHCRLPYTAPPVHLKADMDGPLSNRGEKVILFQY

SEQ ID NO: 15244 - protein, 356 aa, Homo sapiens
MQILSRCQGLMSEECGRTTALAAGRTRKGAGEEGLVSPEGAGDEDSCSSSAPLSPSSSPRSMASGSGCPPGKCVCNSCGLEIVDKYLLKVNDLCWHVRCLSCSVCRTSLGRHTSCYIKDKDIFCKLDYFRRYGTRCSRCGRHIHSTDWVRRAKGNVYHLACFACFSCKRQLSTGEEFALVEEKVLCRVHYDCMLDNLKREVENGNGISVEGALLTEQDVNHPKPAKRARTSFTADQLQVMQAQFAQDNNPDAQTLQKLAERTGLSRRVIQVWFQNCRARHKKHVSPNHSSSTPVTAVPPSRLSPPMLEEMAYSAYVPQDGTMLTALHSYMDAHSPTTLGLQPLLPHSMTQLPISHT

SEQ ID NO: 15245 - protein, 397 aa, Homo sapiens
MEIVGCRAEDNSCPFRPPAMLFHGISGGHIQGIMEEMERRSKTEARLAKGAQLNGRDAGMPPLSPEKPALCAGCGGKISDRYYLLAVDKQWHLRCLKCCECKLALESELTCFAKDGSIYCKEDYYRRFSVQRCARCHLGISASEMVMRARDSVYHLSCFTCSTCNKTLTTGDHFGMKDSLVYCRAHFETLLQGEYPPQLSYTELAAKSGGLALPYFNGTGTVQKGRPRKRKSPALGVDIVNYNSGCNENEADHLDRDQQPYPPSQKTKRMRTSFKHHQLRTMKSYFAINHNPDAKDLKQLAQKTGLTKRVLQVWFQNARAKFRRNLLRQENGGVDKADGTSLPAPPSADSGALTPPGTATTLTDLTNPTITVVTSVTSNMDSHESGSPSQTTLTNLF

SEQ ID NO: 15246 - protein, 382 aa, Homo sapiens
MLDGLKMEENFQSAIDTSASFSSLLGRAVSPKSVCEGCQRVILDRFLLRLNDSFWHEQCVQCASCKEPLETTCFYRDKKLYCKYDYEKLFAVKCGGCFEAIAPNEFVMRAQKSVYHLSCFCCCVCERQLQKGDEFVLKEGQLLCKGDYEKERELLSLVSPAASDSGKSDDEESLCKSAHGAGKGTAEEGKDHKRPKRPRTILTTQQRRAFKASFEVSSKPCRKVRETLAAETGLSVRVVQVWFQNQRAKMKKLARRQQQQQQDQQNTQRLSSAQTNGGGSAGMEGIMNPYTALPTPQQLLAIEQSVYSSDPFRQGLTPPQMPGDHMHPYGAEPLFHDLDSDDTSLSNLGDCFLATSEAGPLQSRVGNPIDHLYSMQNSYFTS

SEQ ID NO: 15247 - protein, 402 aa, Homo sapiens
MDIATGPESLERCFPRGQTDCAKMLDGIKMEEHALRPGPATLGVLLGSDCPHPAVCEGCQRPISDRFLMRVNESSWHEECLQCAACQQALTTSCYFRDRKLYCKQDYQQLFAAKCSGCMEKIAPTEFVMRALECVYHLGCFCCCVCERQLRKGDEFVLKEGQLLCKGDYEKEKDLLSSVSPDESDSVKSEDEDGDMKPAKGQGSQSKGSGDDGKDPRRPKRPRTILTTQQRRAFKASFEVSSKPCRKVRETLAAETGLSVRVVQVWFQNQRAKMKKLARRHQQQQEQQNSQRLGQEVLSSRMEGMMASYTPLAPPQQQIVAMEQSPYGSSDPFQQGLTPPQMPGDHMNPYGNDSIFHDIDSDTSLTSLSDCFLGSSDVGSLQARVGNPIDRLYSMQSSYFAS

SEQ ID NO: 15248 - protein, 808 aa, Homo sapiens
MTSPAAAQSREIDCLSPEAQKLAEARLAAKRAARAEAREIRMKELERQQKEEDSERYSRRSRRNTSASDEDERMSVGSRGSLRVEERPEKDFTEKGSRNMPGLSAATLASLGGTSSRRGSGDTSISIDTEASIREIKELNELKDQIQDVEGKYMQGLKEMKDSLAEVEEKYKKAMVSNAQLDNEKTNFMYQVDTLKDMLLELEEQLAESRRQYEEKNKEFEREKHAHSILQFQFAEVKEALKQREEMLEKHGIILNSEIATNGETSDTLNNVGYQGPTKMTKEELNALKSTGDGTLGRASEVEVKNEIVANVGKREILHNTEKEQHTEDTVKDCVDIEVFPAGENTEDQKSSEDTAPFLGTLAGATYEEQVQSQILESSSLPENTVQVESNEVMGAPDDRTRTPLEPSNCWSDLDGGNHTENVGEAAVTQVEEQAGTVASCPLGHSDDTVYHDDKCMVEVPQELETSTGHSLEKEFTNQEAAEPKEVPAHSTEVGRDHNEEEGEETGLRDEKPIKTEVPGSPAGTEGNCQEATGPSTVDTQNEPLDMKEPDEEKSDQQGEALDSSQKKTKNKKKKNKKKKSPVPVETLKDVKKELTYQNTDLSEIKEEEQVKSTDRKSAVEAQNEVTENPKQKIAAESSENVDCPENPKIKLDGKLDQEGDDVQTAAEEVLADGDTLDFEDDTVQSSGPRAGGEELDEGVAKDNAKIDGATQSSPAEPKSEDADRCTLPEHESPSQDISDACEAESTERCEMSEHPSQTVRKALDSNSLENDDLSAPGREPGHFNPESREDTRGGNEKGKSKEDCTMS

SEQ ID NO: 15249 - protein, 721 aa, Homo sapiens
MGTPASGRKRTPVKDRFSAEDEALSNIAREAEARLAAKRAARAEARDIRMRELERQQKEYSLHSFDRKWGQIQKWLEDSERARYSHRSSHHRPYLGVEDALSIRSVGSHRYDMFKDRSSRLSSLNHSYSHSHGMKKRSSDSHKDLLSGLYFDQRNYSSLRHSKPTSAYYTRQSSSLYSDPLATYKSDRASPTANSGLLRSASLASLYNGGLYNPYGPRTPSECSYYSSRISSARSSPGFTNDDTASIVSSDRASRGRRESVVSAADYFSRSNRRGSVVSEVDDISIPDLSSLDEKSDKQYAENYTRPSSRNSASATTPLSGNSSRRGSGDTSSLIDPDTSLSELRDIYDLKDQIQDVEGRYMQGLKELKESLSEVEEKYKKAMVSNAQLDNEKNNLIYQVDTLKDVIEEQEEQMAEFYRENEEKSKELERQKHMCSVLQHKMEELKEGLRQRDELIEEKQRMQQKIDTMTKEVFDLQETLLWKDKKIGALEKQKEYIACLRNERDMLREELADLQETVKTGEKHGLVIIPDGTPNGDVSHEPVAGAITVVSQEAAQVLESAGEGPLDVRLRKLAGEKEELLSQIRKLKLQLEEERQKCSRNDGTVGDLAGLQNGSDLQFIEMQRDANRQISEYKFKLSKAEQDITTLEQSISRLEGQVLRYKTAAENAEKVEDELKAEKRKLQRELRTALDKIEEMEMTNSHLAKRLEKMKANRTALLAQQ

SEQ ID NO: 15250 - protein, 379 aa, Homo sapiens
MVFFTCNACGESVKKIQVEKHVSVCRNCECLSCIDCGKDFWGDDYKNHVKCISEDQKYGGKGYEGKTHKGDIKQQAWIQKISELIKRPNVSPKVRELLEQISAFDNVPRKKAKFQNWMKNSLKVHNESILDQVWNIFSEASNSEPVNKEQDQRPLHPVANPHAEISTKVPASKVKDAVEQQGEVKKNKRERKEERQKKRKREKKELKLENHQENSRNQKPKKRKKGQEADLEAGGEEVPEANGSAGKRSKKKKQRKDSASEEEAHVGAGKRKRRHSEVETDSKKKKMKLPEHPEGGEPEDDEAPAKGKFNWKGTIKAILKQAPDNEITIKKLRKKVLAQYYTVTDEHHRSEEELLVIFNKKISKNPTFKLLKDKVKLVK

SEQ ID NO: 15251 - protein, 280 aa, Homo sapiens
MCPPQAQAEVGPTMTEKAEMVCAPSPAPAPPPKPASPGPPQVEEVGHRGGSSPPRLPPGVPVISLGHSRPPGVAMPTTELGTLRPPLLQLSTLGTAPPTLALHYHPHPFLNSVYIGPAGPFSIFPSSRLKRRPSHCELDLAEGHQPQKVARRVFTNSRERWRQQNVNGAFAELRKLLPTHPPDRKLSKNEVLRLAMKYIGFLVRLLRDQAAALAAGPTPPGPRKRPVHRVPDDGARRGSGRRAEAAARSQPAPPADPDGSPGGAARPIKMEQTALSPEVR

SEQ ID NO: 15252 - protein, 434 aa, Homo sapiens
MPNRKASRNAYYFFVQEKIPELRRRGLPVARVADAIPYCSSDWALLREEEKEKYAEMAREWRAAQGKDPGPSEKQKPVFTPLRRPGMLVPKQNVSPPDMSALSLKGDQALLGGIFYFLNIFSHGELPPHCEQRFLPCEIGCVKYSLQEGIMADFHSFINPGEIPRGFRFHCQAASDSSHKIPISNFERGHNQATVLQNLYRFIHPNPGNWPPIYCKSDDRTRVNWCLKHMAKASEIRQDLQLLTVEDLVVGIYQQKFLKEPSKTWIRSLLDVAMWDYSSNTRCKWHEENDILFCALAVCKKIAYCISNSLATLFGIQLTEAHVPLQDYEASNSVTPKMVVLDAGRYQKLRVGSSGFSHFNSSNEEQRSNTPIGDYPSRAKISGQNSSVRGRGITRLLESISNSSSNIHKFSNCDTSLSPYMSQKDGYKSFSSLS

SEQ ID NO: 15253 - protein, 373 aa, Homo sapiens
MASELAMSNSDLPTSPLAMEYVNDFDLMKFEVKKEPVETDRIISQCGRLIAGGSLSSTPMSTPCSSVPPSPSFSAPSPGSGSEQKAHLEDYYWMTGYPQQLNPEALGFSPEDAVEALISNSHQLQGGFDGYARGAQQLAAAAGAGAGASLGGSGEEMGPAAAVVSAVIAAAAAQSGAGPHYHHHHHHAAGHHHHPTAGAPGAAGSAAASAGGAGGAGGGGPASAGGGGGGGGGGGGGGAAGAGGALHPHHAAGGLHFDDRFSDEQLVTMSVRELNRQLRGVSKEEVIRLKQKRRTLKNRGYAQSCRFKRVQQRHVLESEKNQLLQQVDHLKQEISRLVRERDAYKEKYEKLVSSGFRENGSSSDNPSSPEFFM

SEQ ID NO: 15254 - protein, 256 aa, Homo sapiens
MKLLENSSFEAINSQLTVETGDAHIIGRIESYSCKMAGDDKHMFKQFCQEGQPHVLEALSPPQTSGLSPSRLSKSQGGEEEGPLSDKCSRKTLFYLIATLNESFRPDYDFSTARSHEFSREPSLSWVVNAVNCSLFSAVREDFKDLKPQLWNAVDEEICLAECDIYSYNPDLDSDPFGEDGSLWSFNYFFYNKRLKRIVFFSCRSISGSTYTPSEAGNELDMELGEEEVEEESRSGGSGAEETSTMEEDRVPVICI

SEQ ID NO: 15255 - protein, 353 aa, Homo sapiens
MAAELAMGAELPSSPLAIEYVNDFDLMKFEVKKEPPEAERFCHRLPPGSLSSTPLSTPCSSVPSSPSFCAPSPGTGGGGGAGGGGGSSQAGGAPGPPSGGPGAVGGTSGKPALEDLYWMSGYQHHLNPEALNLTPEDAVEALIGSGHHGAHHGAHHPAAAAAYEAFRGPGFAGGGGADDMGAGHHHGAHHAAHHHHAAHHHHHHHHHHGGAGHGGGAGHHVRLEERFSDDQLVSMSVRELNRQLRGFSKEEVIRLKQKRRTLKNRGYAQSCRFKRVQQRHILESEKCQLQSQVEQLKLEVGRLAKERDLYKEKYEKLAGRGGPGSAGGAGFPREPSPPQAGPGGAKGTADFFL

SEQ ID NO: 15256 - protein, 195 aa, Homo sapiens
MTDSVIYSMLELPTATQAQNDYGPQQKSSSSRPSCSCLVAIALGLLTAVLLSVLLYQWILCQGSNYSTCASCPSCPDRWMKYGNHCYYFSVEEKDWNSSLEFCLARDSHLLVITDNQEMSLLQVFLSEAFCWIGLRNNSGWRWEDGSPLNFSRISSNSFVQTCGAINKNGLQASSCEVPLHWVCKKCPFADQALF

SEQ ID NO: 15257 - protein, 323 aa, Homo sapiens
MAAELSMGPELPTSPLAMEYVNDFDLLKFDVKKEPLGRAERPGRPCTRLQPAGSVSSTPLSTPCSSVPSSPSFSPTEQKTHLEDLYWMASNYQQMNPEALNLTPEDAVEALIGSHPVPQPLQSFDSFRGAHHHHHHHHPHPHHAYPGAGVAHDELGPHAHPHHHHHHQASPPPSSAASPAQQLPTSHPGPGPHATASATAAGGNGSVEDRFSDDQLVSMSVRELNRHLRGFTKDEVIRLKQKRRTLKNRGYAQSCRYKRVQQKHHLENEKTQLIQQVEQLKQEVSRLARERDAYKVKCEKLANSGFREAGSTSDSPSSPEFFL

SEQ ID NO: 15258 - protein, 164 aa, Homo sapiens
MSVDPLSSKALKIKRELSENTPHLSDEALMGLSVRELNRHLRGLSAEEVTRLKQRRRTLKNRGYAASCRVKRVCQKEELQKQKSELEREVDKLARENAAMRLELDALRGKCEALQGFARSVAAARGPATLVAPASVITIVKSTPGSGSGPAHGPDPAHGPASCS

SEQ ID NO: 15259 - protein, 162 aa, Homo sapiens
MTTPNKGNKALKVKREPGENGTSLTDEELVTMSVRELNQHLRGLSKEEIVQLKQRRRTLKNRGYAASCRVKRVTQKEELEKQKAELQQEVEKLASENASMKLELDALRSKYEALQTFARTVARSPVAPARGPLAAGLGPLVPGKVAATSVITIVKSKTDARS

SEQ ID NO: 15260 - protein, 156 aa, Homo sapiens
MTTNPKPNKALKVKKEAGENAPVLSDDELVSMSVRELNQHLRGLTKEEVTRLKQRRRTLKNRGYAASCRIKRVTQKEELERQRVELQQEVEKLARENSSMRLELDALRSKYEALQTFARTVARGPVAPSKVATTSVITIVKSTELSSTSVPFSAAS

SEQ ID NO: 15261 - protein, 847 aa, Homo sapiens; identical to SEQ ID NO: 8370

SEQ ID NO: 15262 - protein, 160 aa, Homo sapiens
MSDNDDIEVESDEEQPRFQSAADKRAHHNALERKRRDHIKDSFHSLRDSVPSLQGEKASRAQILDKATEYIQYMRRKNHTHQQDIDDLKRQNALLEQQVRALEKARSSAQLQTNYPSSDNSLYTNAKGSTISAFDGGSDSSSESEPEEPQSRKKLRMEAS

SEQ ID NO: 15263 - protein, 477 aa, Homo sapiens; identical to SEQ ID NO: 8387

SEQ ID NO: 15264 - protein, 605 aa, Homo sapiens
MAEDWLDCPALGPGWKRREVFRKSGATCGRSDTYYQSPTGDRIRSKVELTRYLGPACDLTLFDFKQGILCYPAPKAHPVAVASKKRKKPSRPAKTRKRQVGPQSGEVRKEAPRDETKADTDTAPASFPAPGCCENCGISFSGDGTQRQRLKTLCKDCRAQRIAFNREQRMFKRVGCGECAACQVTEDCGACSTCLLQLPHDVASGLFCKCERRRCLRIVERSRGCGVCRGCQTQEDCGHCPICLRPPRPGLRRQWKCVQRRCLRGKHARRKGGCDSKMAARRRPGAQPLPPPPPSQSPEPTEPHPRALAPSPPAEFIYYCVDEDELQPYTNRRQNRKCGACAACLRRMDCGRCDFCCDKPKFGGSNQKRQKCRWRQCLQFAMKRLLPSVWSESEDGAGSPPPYRRRKRPSSARRHHLGPTLKPTLATRTAQPDHTQAPTKQEAGGGFVLPPPGTDLVFLREGASSPVQVPGPVAASTEALLQEAQCSGLSWVVALPQVKQEKADTQDEWTPGTAVLTSPVLVPGCPSKAVDPGLPSVKQEPPDPEEDKEENKDDSASKLAPEEEAGGAGTPVITEIFSLGGTRFRDTAVWLPRSKDLKKPGARKQ

SEQ ID NO: 15265 - protein, 411 aa, Homo sapiens
MRAHPGGGRCCPEQEEGESAAGGSGAGGDSAIEQGGQGSALAPSPVSGVRREGARGGGRGRGRWKQAGRGGGVCGRGRGRGRGRGRGRGRGRGRGRPPSGGSGLGGDGGGCGGGGSGGGGAPRREPVPFPSGSAGPGPRGPRATESGKRMDCPALPPGWKKEEVIRKSGLSAGKSDVYYFSPSGKKFRSKPQLARYLGNTVDLSSFDFRTGKMMPSKLQKNKQRLRNDPLNQNKGKPDLNTTLPIRQTASIFKQPVTKVTNHPSNKVKSDPQRMNEQPRQLFWEKRLQGLSASDVTEQIIKTMELPKGLQGVGPGSNDETLLSAVASALHTSSAPITGQVSAAVEKNPAVWLNTSQPLCKAFIVTDEDIRKQEERVQQVRKKLEEALMADILSRAADTEEMDIEMDSGDEA

SEQ ID NO: 15266 - protein, 291 aa, Homo sapiens
MERKRWECPALPQGWEREEVPRRSGLSAGHRDVFYYSPSGKKFRSKPQLARYLGGSMDLSTFDFRTGKMLMSKMNKSRQRVRYDSSNQVKGKPDLNTALPVRQTASIFKQPVTKITNHPSNKVKSDPQKAVDQPRQLFWEKKLSGLNAFDIAEELVKTMDLPKGLQGVGPGCTDETLLSAIASALHTSTMPITGQLSAAVEKNPGVWLNTTQPLCKAFMVTDEDIRKQEELVQQVRKRLEEALMADMLAHVEELARDGEAPLDKACAEDDDEEDEEEEEEEPDPDPEMEHV

SEQ ID NO: 15267 - protein, 194 aa, Homo sapiens
MAKSSQRKQRDCVNQCKSKPGLSTSIPLRMSSYTFKRPVTRITPHPGNEVRYHQWEESLEKPQQVCWQRRLQGLQAYSSAGELSSTLDLANTLQKLVPSYTGGSLLEDLASGLEHSCPMPHLACSSDAVEIIPAEGVGISQLLCKQFLVTEEDIRKQEGKVKTVRERLAIALIADGLANEAEKVRDQEGRPEKR

SEQ ID NO: 15268 - protein, 208 aa, Homo sapiens
MGEPAFTSFPSLPVLGKLKRNMMPWALQKKREIHMAKAHRRRAARSALPMRLTSCIFRRPVTRIRSHPDNQVRRRKGDEHLEKPQQLCAYRRLQALQPCSSQGEGSSPLHLESVLSILAPGTAGESLDRAGAERVRSPLEPTPGRFPAVAGGPTPGMGCQLPPPLSGQLVTPADIRRQARRVKKARERLAKALQADRLARRAEMLTGG

SEQ ID NO: 15269 - protein, 580 aa, Homo sapiens
MGTTGLESLSLGDRGAAPTVTSSERLVPDPPNDLRKEDVAMELERVGEDEEQMMIKRSSECNPLLQEPIASAQFGATAGTECRKSVPCGWERVVKQRLFGKTAGRFDVYFISPQGLKFRSKSSLANYLHKNGETSLKPEDFDFTVLSKRGIKSRYKDCSMAALTSHLQNQSNNSNWNLRTRSKCKKDVFMPPSSSSELQESRGLSNFTSTHLLLKEDEGVDDVNFRKVRKPKGKVTILKGIPIKKTKKGCRKSCSGFVQSDSKRESVCNKADAESEPVAQKSQLDRTVCISDAGACGETLSVTSEENSLVKKKERSLSSGSNFCSEQKTSGIINKFCSAKDSEHNEKYEDTFLESEEIGTKVEVVERKEHLHTDILKRGSEMDNNCSPTRKDFTGEKIFQEDTIPRTQIERRKTSLYFSSKYNKEALSPPRRKAFKKWTPPRSPFNLVQETLFHDPWKLLIATIFLNRTSGKMAIPVLWKFLEKYPSAEVARTADWRDVSELLKPLGLYDLRAKTIVKFSDEYLTKQWKYPIELHGIGKYGNDSYRIFCVNEWKQVHPEDHKLNKYHDWLWENHEKLSLS

SEQ ID NO: 15270 - protein, 1494 aa, Homo sapiens
MNGGKECDGGDKEGGLPAIQVPVGWQRRVDQNGVLYVSPSGSLLSCLEQVKTYLLTDGTCKCGLECPLILPKVFNFDPGAAVKQRTAEDVKADEDVTKLCIHKRKIIAVATLHKSMEAPHPSLVLTSPGGGTNATPVVPSRAATPRSVRNKSHEGITNSVMPECKNPFKLMIGSSNAMGRLYVQELPGSQQQELHPVYPRQRLGSSEHGQKSPFRGSHGGLPSPASSGSQIYGDGSISPRTDPLGSPDVFTRSNPGFHGAPNSSPIHLNRTPLSPPSVMLHGSPVQSSCAMAGRTNIPLSPTLTTKSPVMKKPMCNFSTNMEIPRAMFHHKPPQGPPPPPPPSCALQKKPLTSEKDPLGILDPIPSKPVNQNPVIINPTSFHSNVHSQVPMMNVSMPPAVVPLPSNLPLPTVKPGHMNHGSHVQRVQHSASTSLSPSPVTSPVHMMGTGIGRIEASPQRSRSSSTSSDHGNFMMPPVGPQATSSGIKVPPRSPRSTIGSPRPSMPSSPSTKSDGHHQYKDIPNPLIAGISNVLNTPSSAAFPTASAGSSSVKSQPGLLGMPLNQILNQHNAASFPASSLLSAAAKAQLANQNKLAGNNSSSSSNSGAVAGSGNTEGHSTLNTMFPPTANMLLPTGEGQSGRAALRDKLMSQQKDALRKRKQPPTTVLSLLRQSQMDSSAVPKPGPDLLRKQGQGSFPISSMSQLLQSMSCQSSHLSSNSTPGCGASNTALPCSANQLHFTDPSMNSSVLQNIPLRGEAVHCHNANTNFVHSNSPVPNHHLAGLINQIQASGNCGMLSQSGMALGNSLHPNPPQSRISTSSTPVIPNSIVSSYNQTSSEAGGSGPSSSIAIAGTNHPAITKTTSVLQDGVIVTTAAGNPLQSQLPIGSDFPFVGQEHALHFPSNSTSNNHLPHPLNPSLLSSLPISLPVNQQHLLNQNLLNILQPSAGEGDMSSINNTLSNHQLTHLQSLLNNNQMFPPNQQQQQLLQGYQNLQAFQGQSTIPCPANNNPMACLFQNFQVRMQEDAALLNKRISTQPGLTALPENPNTTLPPFQDTPCELQPRIDPSLGQQVKDGLVVGGPGDASVDAIYKAVVDAASKGMQVVITTAVNSTTQISPIPALSAMSAFTASIGDPLNLSSAVSAVIHGRNMGGVDHDGRLRNSRGARLPKNLDHGKNVNEGDGFEYFKSASCHTSKKQWDGEQSPRGERNRWKYEEFLDHPGHIHSSPCHERPNNVSTLPFLPGEQHPILLPPRNCPGDKILEENFRYNNYKRTMMSFKERLENTVERCAHINGNRPRQSRGFGELLSTAKQDLVLEEQSPSSSNSLENSLVKDYIHYNGDFNAKSVNGCVPSPSDAKSISSEDDLRNPDSPSSNELIHYRPRTFNVGDLVWGQIKGLTSWPGKLVREDDVHNSCQQSPEEGKVEPEKLKTLTEGLEAYSRVRKRNRKSGKLNNHLEAAIHEAMSELDKMSGTVHQIPQGDRQMRPPKPKRRKISR

SEQ ID NO: 15271 - protein, 1003 aa, Homo sapiens; identical to SEQ ID NO: 8405

SEQ ID NO: 15272 - protein, 354 aa, Homo sapiens
MTAVNVALIRDTKWLTLEVCREFQRGTCSRADADCKFAHPPRVCHVENGRVVACFDSLKGRCTRENCKYLHPPPHLKTQLEINGRNNLIQQKTAAAMFAQQMQLMLQNAQMSSLGSFPMTPSIPANPPMAFNPYIPHPGMGLVPAELVPNTPVLIPGNPPLAMPGAVGPKLMRSDKLEVCREFQRGNCTRGENDCRYAHPTDASMIEASDNTVTICMDYIKGRCSREKCKYFHPPAHLQARLKAAHHQMNHSAASAMALQPGTLQLIPKRSALEKPNGATPVFNPTVFHCQQALTNLQLPQPAFIPAGPILCMAPASNIVPMMHGATPTTVSAATTPATSVPFAAPTTGNQLKF

SEQ ID NO: 15273 - protein, 1230 aa, Homo sapiens
MRSKGRARKLATNNECVYGNYPEIPLEEMPDADGVASTPSLNIQEPCSPATSSEAFTPKEGSPYKAPIYIPDDIPIPAEFELRESNMPGAGLGIWTKRKIEVGEKFGPYVGEQRSNLKDPSYGWEILDEFYNVKFCIDASQPDVGSWLKYIRFAGCYDQHNLVACQINDQIFYRVVADIAPGEELLLFMKSEDYPHETMAPDIHEERQYRCEDCDQLFESKAELADHQKFPCSTPHSAFSMVEEDFQQKLESENDLQEIHTIQECKECDQVFPDLQSLEKHMLSHTEEREYKCDQCPKAFNWKSNLIRHQMSHDSGKHYECENCAKVFTDPSNLQRHIRSQHVGARAHACPECGKTFATSSGLKQHKHIHSSVKPFICEVCHKSYTQFSNLCRHKRMHADCRTQIKCKDCGQMFSTTSSLNKHRRFCEGKNHFAAGGFFGQGISLPGTPAMDKTSMVNMSHANPGLADYFGANRHPAGLTFPTAPGFSFSFPGLFPSGLYHRPPLIPASSPVKGLSSTEQTNKSQSPLMTHPQILPATQDILKALSKHPSVGDNKPVELQPERSSEERPFEKISDQSESSDLDDVSTPSGSDLETTSGSDLESDIESDKEKFKENGKMFKDKVSPLQNLASINNKKEYSNHSIFSPSLEEQTAVSGAVNDSIKAIASIAEKYFGSTGLVGLQDKKVGALPYPSMFPLPFFPAFSQSMYPFPDRDLRSLPLKMEPQSPGEVKKLQKGSSESPFDLTTKRKDEKPLTPVPSKPPVTPATSQDQPLDLSMGSRSRASGTKLTEPRKNHVFGGKKGSNVESRPASDGSLQHARPTPFFMDPIYRVEKRKLTDPLEALKEKYLRPSPGFLFHPQMSAIENMAEKLESFSALKPEASELLQSVPSMFNFRAPPNALPENLLRKGKERYTCRYCGKIFPRSANLTRHLRTHTGEQPYRCKYCDRSFSISSNLQRHVRNIHNKEKPFKCHLCDRCFGQQTNLDRHLKKHENGNMSGTATSSPHSELESTGAILDDKEDAYFTEIRNFIGNSNHGSQSPRNVEERMNGSHFKDEKALVTSQNSDLLDDEEVEDEVLLDEEDEDNDITGKTGKEPVTSNLHEGNPEDDYEETSALEMSCKTSPVRYKEEEYKSGLSALDHIRHFTDSLKMRKMEDNQYSEAELSSFSTSHVPEELKQPLHRKSKSQAYAMMLSLSDKESLHSTSHSSSNVWHSMARAAAESSAIQSISHV

SEQ ID NO: 15274 - protein, 486 aa, Homo sapiens
MVAGMLGLREEKSEDQDLQGLKDKPLKFKKVKKDKKEEKEGKHEPVQPSAHHSAEPAEAGKAETSEGSGSAPAVPEASASPKQRRSIIRDRGPMYDDPTLPEGWTRKLKQRKSGRSAGKYDVYLINPQGKAFRSKVELIAYFEKVGDTSLDPNDFDFTVTGRGSPSRREQKPPKKPKSPKAPGTGRGRGRPKGSGTTRPKAATSEGVQVKRVLEKSPGKLLVKMPFQTSPGGKAEGGGATTSTQVMVIKRPGRKRKAEADPQAIPKKRGRKPGSVVAAAAAEAKKKAVKESSIRSVQETVLPIKKRKTRETVSIEVKEVVKPLLVSTLGEKSGKGLKTCKSPGRKSKESSPKGRSSSASSPPKKEHHHHHHHSESPKAPVPLLPPLPPPPPEPESSEDPTSPPEPQDLSSSVCKEEKMPRGGSLESDGCPKEPAKTQPAVATAATAAEKYKHRGEGERKDIVSSSMPRPNREEPVDSRTPVTERVS

SEQ ID NO: 15275 - protein, 507 aa, Homo sapiens
MGRKKIQITRIMDERNRQVTFTKRKFGLMKKAYELSVLCDCEIALIIFNSSNKLFQYASTDMDKVLLKYTEYNEPHESRTNSDIVEALNKKEHRGCDSPDPDTSYVLTPHTEEKYKKINEEFDNMMRNHKIAPGLPPQNFSMSVTVPVTSPNALSYTNPGSSLVSPSLAASSTLTDSSMLSPPQTTLHRNVSPGAPQRPPSTGNAGGMLSTTDLTVPNGAGSSPVGNGFVNSRASPNLIGATGANSLGKVMPTKSPPPPGGGNLGMNSRKPDLRVVIPPSSKGMMPPLSEEEELELNTQRISSSQATQPLATPVVSVTTPSLPPQGLVYSAMPTAYNTDYSLTSADLSALQGFNSPGMLSLGQVSAWQQHHLGQAALSSLVAGGQLSQGSNLSINTNQNISIKSEPISPPRDRMTPSGFQQQQQQQQQQQPPPPPQPQPQPPQPQPRQEMGRSPVDSLSSSSSSYDGSDREDPRGDFHSPIVLGRPPNTEDRESPSVKRMRMDAWVT

SEQ ID NO: 15276 - protein, 365 aa, Homo sapiens
MGRKKIQISRILDQRNRQVTFTKRKFGLMKKAYELSVLCDCEIALIIFNSANRLFQYASTDMDRVLLKYTEYSEPHESRTNTDILETLKRRGIGLDGPELEPDEGPEEPGEKFRRLAGEGGDPALPRPRLYPAAPAMPSPDVVYGALPPPGCDPSGLGEALPAQSRPSPFRPAAPKAGPPGLVHPLFSPSHLTSKTPPPLYLPTEGRRSDLPGGLAGPRGGLNTSRSLYSGLQNPCSTATPGPPLGSFPFLPGGPPVGAEAWARRVPQPAAPPRRPPQSASSLSASLRPPGAPATFLRPSPIPCSSPGPWQSLCGLGPPCAGCPWPTAGPGRRSPGGTSPERSPGTARARGDPTSLQASSEKTQQ

SEQ ID NO: 15277 - protein, 473 aa, Homo sapiens
MGRKKIQITRIMDERNRQVTFTKRKFGLMKKAYELSVLCDCEIALIIFNSTNKLFQYASTDMDKVLLKYTEYNEPHESRTNSDIVETLRKKGLNGCDSPDPDADDSVGHSPESEDKYRKINEDIDLMISRQRLCAVPPPNFEMPVSIPVSSHNSLVYSNPVSSLGNPNLLPLAHPSLQRNSMSPGVTHRPPSAGNTGGLMGGDLTSGAGTSAGNGYGNPRNSPGLLVSPGNLNKNMQAKSPPPMNLGMNNRKPDLRVLIPPGSKNTMPSVSEDVDLLLNQRINNSQSAQSLATPVVSVATPTLPGQGMGGYPSAISTTYGTEYSLSSADLSSLSGFNTASALHLGSVTGWQQQHLHNMPPSALSQLGACTSTHLSQSSNLSLPSTQSLNIKSEPVSPPRDRTTTPSRYPQHTRHEAGRSPVDSLSSCSSSYDGSDREDHRNEFHSPIGLTRPSPDERESPSVKRMRLSEGWAT

SEQ ID NO: 15278 - protein, 521 aa, Homo sapiens
MGRKKIQIQRITDERNRQVTFTKRKFGLMKKAYELSVLCDCEIALIIFNHSNKLFQYASTDMDKVLLKYTEYNEPHESRTNADIIETLRKKGFNGCDSPEPDGEDSLEQSPLLEDKYRRASEELDGLFRRYGSTVPAPNFAMPVTVPVSNQSSLQFSNPSGSLVTPSLVTSSLTDPRLLSPQQPALQRNSVSPGLPQRPASAGAMLGGDLNSANGACPSPVGNGYVSARASPGLLPVANGNSLNKVIPAKSPPPPTHSTQLGAPSRKPDLRVITSQAGKGLMHHLTEDHLDLNNAQRLGVSQSTHSLTTPVVSVATPSLLSQGLPFSSMPTAYNTDYQLTSAELSSLPAFSSPGGLSLGNVTAWQQPQQPQQPQQPQPPQQQPPQPQQPQPQQPQQPQQPPQQQSHLVPVSLSNLIPGSPLPHVGAALTVTTHPHISIKSEPVSPSRERSPAPPPPAVFPAARPEPGDGLSSPAGGSYETGDRDDGRGDFGPTLGLLRPAPEPEAEGSAVKRMRLDTWTLK

SEQ ID NO: 15279 - protein, 390 aa, Homo sapiens; identical to SEQ ID NO: 8523

SEQ ID NO: 15280 - protein, 477 aa, Homo sapiens
MAQRYDELPHYGGMDGVGVPASMYGDPHAPRPIPPVHHLNHGPPLHATQHYGAHAPHPNVMPASMGSAVNDALKRDKDAIYGHPLFPLLALVFEKCELATCTPREPGVAGGDVCSSDSFNEDIAVFAKQVRAEKPLFSSNPELDNLMIQAIQVLRFHLLELEKVHELCDNFCHRYISCLKGKMPIDLVIDERDGSSKSDHEELSGSSTNLADHNPSSWRDHDDATSTHSAGTPGPSSGGHASQSGDNSSEQGDGLDNSVASPGTGDDDDPDKDKKRQKKRGIFPKVATNIMRAWLFQHLTHPYPSEEQKKQLAQDTGLTILQVNNWFINARRRIVQPMIDQSNRAGFLLDPSVSQGAAYSPEGQPMGSFVLDGQQHMGIRPAGLQSMPGDYVSQGGPMGMSMAQPSYTPPQMTPHPTQLRHGPPMHSYLPSHPHHPAMMMHGGPPTHPGMTMSAQSPTMLNSVDPNVGGQVMDIHAQ

SEQ ID NO: 15281 - protein, 375 aa, Homo sapiens; identical to SEQ ID NO: 8531

SEQ ID NO: 15282 - protein, 274 aa, Homo sapiens
MGPELGWGHPRGGDVCSSDSFNEDNTAFAKQVRSERPFFSSNPELDNLMIQAIQVLRFHLLELEKGKMPIDLVIEDRDGGCREDFEDYPASCPSLPDQNNIWIRDHEDSGSVHLGTPGPSSGGLASQSGDNSSDQGVGLDTSVASPSSGGEDEDLDQEPRRNKKRGIFPKVATNIMRAWLFQHLSHPYPSEEQKKQLAQDTGLTILQVNNWFINARRRIVQPMIDQSNRTGQGAAFSPEGQPIGGYTETEPHVAFRAPASVGMSLNSEGEWHYL

SEQ ID NO: 15283 - protein, 358 aa, Homo sapiens
MARRYDELPHYPSIADGPAALAGFPEAVPAAPGPYGPHRPPQPLPPGLDSDGLKRDKDEIYGHPLFPLLALVFEKCELATCSPRDGAGAGLGTPRGGDVCSSDSFNEDNTAFAKQVRSERPFFSSNPELDNLMIQAIQVLRFHLLELEKGKMPIDLVIEDRDGGCREDFEDYPASCLSLPDQNNIWIRDHEDSGSVHLGTPGPSSGGLASQSGDNSSDQGVGLDTSVASPSSGGEDEDLDQEPRRNKKRGIFPKVATNIMRAWLFQHLWHPYPSEEQKKQLVQDTGLTILQVNNWFINARRRMVQPMIDQSNRIGQGAAFSPEGQPIGGYTETEPHVAFRPPASVGMSLNLEGEWHYL

SEQ ID NO: 15284 - protein, 254 aa, Homo sapiens
MDPAASSCMRSLQPPAPVWGCLRNPHSEGNGASGLPHYPPTPFSFHQKPDFLATATAAYPDFSASCLAATPHSLPQEEHIFTEQHPAFPQSPNWHFPVSDARRRPNSGPAGGSKEMGTSSLGLVDTTGGPGDDYGVLGSTANETEKKSSRRRKESSDNQENRGKPEGSSKARKERTAFTKEQLRELEAEFAHHNYLTRLRRYEIAVNLDLSERQVKVWFQNRRMKWKRVKGGQPISPNGQDPEDGDSTASPSSE

SEQ ID NO: 15285 - protein, 304 aa, Homo sapiens
MEHPLFGCLRSPHATAQGLHPFSQSSLALHGRSDHMSYPELSTSSSSCIIAGYPNEEGMFASQHHRGHHHHHHHHHHHHHQQQQHQALQTNWHLPQMSSPPSAARHSLCLQPDSGGPPELGSSPPVLCSNSSSLGSSTPTGAACAPGDYGRQALSPAEAEKRSGGKRKSDSSDSQEGNYKSEVNSKPRKERTAFTKEQIRELEAEFAHHNYLTRLRRYEIAVNLDLTERQVKVWFQNRRMKWKRVKGGQQGAAAREKELVNVKKGTLLPSELSGIGAATLQQTGDSIANEDSHDSDHSSEHAHL

SEQ ID NO: 15286 - protein, 268 aa, Homo sapiens
MAQPLCPPLSESWMLSAAWGPTRRPPPSDKDCGRSLVSSPDSWGSTPADSPVASPARPGTLRDPRAPSVGRRGARSSRLGSGQRQSASEREKLRMRTLARALHELRRFLPPSVAPAGQSLTKIETLRLAIRYIGHLSAVLGLSEESLQRRCRQRGDAGSPRGCPLCPDDCPAQMQTRTQAEGQGQGRGLGLVSAVRAGASWGSPPACPGARAAPEPRDPPALFAEAACPEGQAMEPSPPSPLLPGDVLALLETWMPLSPLEWLPEEPK

SEQ ID NO: 15287 - protein, 397 aa, Homo sapiens
MAQSPPPQSLLGHDHWIFAQGWGWAGHWDSTSPASSSDSSGSCPCDGARGLPQPQPPSCSSRAAEAAATTPRRARTGPAGGQRQSASEREKLRMRTLARALHELRRFLPPSLAPAGQSLTKIETLRLAIRYIGHLSAVLGLSEESLQCRRRQRGDAGSPWGCPLCPDRGPAEAQTQAEGQGQGQGQGQGQGQGQGQGQGQGQGQGRRPGLVSAVLAEASWGSPSACPGAQAAPERLGRGVHDTDPWATPPYCPKIQSPPYSSQGTTSDASLWTPPQGCPWTQSSPEPRNPPVPWTAAPATLELAAVYQGLSVSPEPCLSLGAPSLLPHPSCQRLQPQTPGRCWSHSAEVVPNSEDQGPGAAFQLSEASPPQSSGLRFSGCPELWQEDLEGARLGIFY

SEQ ID NO: 15288 - protein, 1857 aa, Homo sapiens
MARKKLKKFTTLEIVLSVLLLVLFIISIVLIVLLAKESLKSTAPDPGTTGTPDPGTTGTPDPGTTGTTHARTTGPPDPGTTGTTPVSAECPVVNELERINCIPDQPPTKATCDQRGCCWNPQGAVSVPWCYYSKNHSYHVEGNLVNTNAGFTARLKNLPSSPVFGSNVDNVLLTAEYQTSNRFHFKLTDQTNNRFEVPHEHVQSFSGNAAASLTYQVEISRQPFSIKVTRRSNNRVLFDSSIGPLLFADQFLQLSTRLPSTNVYGLGEHVHQQYRHDMNWKTWPIFNRDTTPNGNGTNLYGAQTFFLCLEDASGLSFGVFLMNSNAMEVVLQPAPAITYRTIGGILDFYVFLGNTPEQVVQEYLELIGRPALPSYWALGFHLSRYEYGTLDNMREVVERNRAAQLPYDVQHADIDYMDERRDFTYDSVDFKGFPEFVNELHNNGQKLVIIVDPAISNNSSSSKPYGPYDRGSDMKIWVNSSDGVTPLIGEVWPGQTVFPDYTNPNCAVWWTKEFELFHNQVEFDGIWIDMNEVSNFVDGSVSGCSTNNLNNPPFTPRILDGYLFCKTLCMDAVQHWGKQYDIHNLYGYSMAVATAEAAKTVFPNKRSFILTRSTFAGSGKFAAHWLGDNTATWDDLRWSIPGVLEFNLFGIPMVGPDICGFALDTPEELCRRWMQLGAFYPFSRNHNGQGYKDQDPASFGADSLLLNSSRHYLNIRYTLLPYLYTLFFRAHSRGDTVARPLLHEFYEDNSTWDVHQQFLWGPGLLITPVLDEGAEKVMAYVPDAVWYDYETGSQVRWRKQKVEMELPGDKIGLHLRGGYIFPTQQPNTTTLASRKNPLGLIIALDENKEAKGELFWDNGETKDTVANKVYLLCEFSVTQNRLEVNISQSTYKDPNNLAFNEIKILGTEEPSNVTVKHNGVPSQTSPTVTYDSNLKVAIITDIDLLLGEAYTVEWSIKIRDEEKIDCYPDENGASAENCTARGCIWEASNSSGVPFCYFVNDLYSVSDVQYNSHGATADISLKSSVYANAFPSTPVNPLRLDVTYHKNEMLQFKIYDPNKNRYEVPVPLNIPSMPSSTPEGQLYDVLIKKNPFGIEIRRKSTGTIIWDSQLLGFTFSDMFIRISTRLPSKYLYGFGETEHRSYRRDLEWHTWGMFSRDQPPGYKKNSYGVHPYYMGLEEDGSAHGVLLLNSNAMDVTFQPLPALTYRTTGGVLDFYVFLGPTPELVTQQYTELIGRPVMVPYWSLGFQLCRYGYQNDSEIASLYDEMVAAQIPYDVQYSDIDYMERQLDFTLSPKFAGFPALINRMKADGMRVILILDPAISGNETQPYPAFTRGVEDDVFIKYPNDGDIVWGKVWPDFPDVVVNGSLDWDSQVELYRAYVAFPDFFRNSTAKWWKREIEELYNNPQNPERSLKFDGMWIDMNEPSSFVNGAVSPGCRDASLNHPPYMPHLESRDRGLSSKTLCMESQQILPDGSLVQHYNVHNLYGWSQTRPTYEAVQEVTGQRGVVITRSTFPSSGRWAGHWLGDNTAAWDQLKKSIIGMMEFSLFGISYTGADICGFFQDAEYEMCVRWMQLGAFYPFSRNHNTIGTRRQDPVSWDVAFVNISRTVLQTRYTLLPYLYTLMHKAHTEGVTVVRPLLHEFVSDQVTWDIDSQFLLGPAFLVSPVLERNARNVTAYFPRARWYDYYTGVDINARGEWKTLPAPLDHINLHVRGGYILPWQEPALNTHLSRQKFMGFKIALDDEGTAGGWLFWDDGQSIDTYGKGLYYLASFSASQNTMQSHIIFNNYITGTNPLKLGYIEIWGVGSVPVTSVSISVSGMVITPSFNNDPTTQVLSIDVTDRNISLHNFTSLTWISTL

SEQ ID NO: 15289 - protein, 3026 aa, Homo sapiens
MEEKQQIILANQDGGTVAGAAPTFFVILKQPGNGKTDQGILVTNQDACALASSVSSPVKSKGKICLPADCTVGGITVTLDNNSMWNEFYHRSTEMILTKQGRRMFPYCRYWITGLDSNLKYILVMDISPVDNHRYKWNGRWWEPSGKAEPHVLGRVFIHPESPSTGHYWMHQPVSFYKLKLTNNTLDQEGHIILHSMHRYLPRLHLVPAEKAVEVIQLNGPGVHTFTFPQTEFFAVTAYQNIQITQLKIDYNPFAKGFRDDGLNNKPQRDGKQKNSSDQEGNNISSSSGHRVRLTEGQGSEIQPGDLDPLSRGHETSGKGLEKTSLNIKRDFLGFMDTDSALSEVPQLKQEISECLIASSFEDDSRVASPLDQNGSFNVVIKEEPLDDYDYELGECPEGVTVKQEETDEETDVYSNSDDDPILEKQLKRHNKVDNPEADHLSSKWLPSSPSGVAKAKMFKLDTGKMPVVYLEPCAVTRSTVKISELPDNMLSTSRKDKSSMLAELEYLPTYIENSNETAFCLGKESENGLRKHSPDLRVVQKYPLLKEPQWKYPDISDSISTERILDDSKDSVGDSLSGKEDLGRKRTTMLKIATAAKVVNANQNASPNVPGKRGRPRKLKLCKAGRPPKNTGKSLISTKNTPVSPGSTFPDVKPDLEDVDGVLFVSFESKEALDIHAVDGTTEESSSLQASTTNDSGYRARISQLEKELIEDLKTLRHKQVIHPGLQEVGLKLNSVDPTMSIDLKYLGVQLPLAPATSFPFWNLTGTNPASPDAGFPFVSRTGKTNDFTKIKGWRGKFHSASASRNEGGNSESSLKNRSAFCSDKLDEYLENEGKLMETSMGFSSNAPTSPVVYQLPTKSTSYVRTLDSVLKKQSTISPSTSYSLKPHSVPPVSRKAKSQNRQATFSGRTKSSYKSILPYPVSPKQKYSHVILGDKVTKNSSGIISENQANNFVVPTLDENIFPKQISLRQAQQQQQQQQGSRPPGLSKSQVKLMDLEDCALWEGKPRTYITEERADVSLTTLLTAQASLKTKPIHTIIRKRAPPCNNDFCRLGCVCSSLALEKRQPAHCRRPDCMFGCTCLKRKVVLVKGGSKTKHFQRKAAHRDPVFYDTLGEEAREEEEGIREEEEQLKEKKKRKKLEYTICETEPEQPVRHYPLWVKVEGEVDPEPVYIPTPSVIEPMKPLLLPQPEVLSPTVKGKLLTGIKSPRSYTPKPNPVIREEDKDPVYLYFESMMTCARVRVYERKKEDQRQPSSSSSPSPSFQQQTSCHSSPENHNNAKEPDSEQQPLKQLTCDLEDDSDKLQEKSWKSSCNEGESSSTSYMHQRSPGGPTKLIEIISDCNWEEDRNKILSILSQHINSNMPQSLKVGSFIIELASQRKSRGEKNPPVYSSRVKISMPSCQDQDDMAEKSGSETPDGPLSPGKMEDISPVQTDALDSVRERLHGGKGLPFYAGLSPAGKLVAYKRKPSSSTSGLIQVASNAKVAASRKPRTLLPSTSNSKMASSSGTATNRPGKNLKAFVPAKRPIAARPSPGGVFTQFVMSKVGALQQKIPGVSTPQTLAGTQKFSIRPSPVMVVTPVVSSEPVQVCSPVTAAVTTTTPQVFLENTTAVTPMTAISDVETKETTYSSGATTTGVVEVSETNTSTSVTSTQSTATVNLTKTTGITTPVASVAFPKSLVASPSTITLPVASTASTSLVVVTAAASSSMVTTPTSSLGSVPIILSGINGSPPVSQRPENAAQIPVATPQVSPNTVKRAGPRLLHPNGQIVQLLPLHQLRGSNTQPNLQPVMFRNPGSVMGIRLPAPSKPSETPPSSTSSSAFSVMNPVIQAVGSSSAVNVITQAPSLLSSGASFVSQAGTLTLRISPPEPQSFASKTGSETKITYSSGGQPVGTASLIPLQSGSFALLQLPGQKPVPSSILQHVASLQMKRESQNPDQKDETNSIKREQETKKVLQSEGEAVDPEANVIKQNSGAATSEETLNDSLEDRGDHLDEECLPEEGCATVKPSEHSCITGSHTDQDYKDVNEEYGARNRKSSKEKVAVLEVRTISEKASNKTVQNLSKVQHQKLGDVKVEQQKGFDNPEENSSEFPVTFKEESKFELSGSKVMEQQSNLQPEAKEKECGDSLEKDRERWRKHLKGPLTRKCVGASQECKKEADEQLIKETKTCQENSDVFQQEQGISDLLGKSGITEDARVLKTECDSWSRISNPSAFSIVPRRAAKSSRGNGHFQGHLLLPGEQIQPKQEKKGGRSSADFTVLDLEEDDEDDNEKTDDSIDEIVDVVSDYQSEEVDDVEKNNCVEYIEDDEEHVDIETVEELSEEINVAHLKTTAAHTQSFKQPSCTHISADEKAAERSRKAPPIPLKLKPDYWSDKLQKEAEAFAYYRRTHTANERRRRGEMRDLFEKLKITLGLLHSSKVSKSLILTRAFSEIQGLTDQADKLIGQKNLLTRKRNILIRKVSSLSGKTEEVVLKKLEYIYAKQQALEAQKRKKKMGSDEFDISPRISKQQEGSSASSVDLGQMFINNRRGKPLILSRKKDQATENTSPLNTPHTSANLVMTPQGQLLTLKGPLFSGPVVAVSPDLLESDLKPQVAGSAVALPENDDLFMMPRIVNVTSLATEGGLVDMGGSKYPHEVPDSKPSDHLKDTVRNEDNSLEDKGRISSRGNRDGRVTLGPTQVFLANKDSGYPQIVDVSNMQKAQEFLPKKISGDMRGIQYKWKESESRGERVKSKDSSFHKLKMKDLKDSSIEMELRKVTSAIEEAALDSSELLTNMEDEDDTDETLTSLLNEIAFLNQQLNDDSVGLAELPSSMDTEFPGDARRAFISKVPPGSRATFQVEHLGTGLKELPDVQGESDSISPLLLHLEDDDFSENEKQLAEPASEPDVLKIVIDSEIKDSLLSNKKAIDGGKNTSGLPAEPESVSSPPTLHMKTGLENSNSTDTLWRPMPKLAPLGLKVANPSSDADGQSLKVMPCLAPIAAKVGSVGHKMNLTGNDQEGRESKVMPTLAPVVAKLGNSGASPSSAGK

SEQ ID NO: 15290 - protein, 512 aa, Homo sapiens; identical to SEQ ID NO: 8728

SEQ ID NO: 15291 - protein, 545 aa, Homo sapiens
MAEASSLGRQSPRVVSCLEHSLCPGEPGLQTTAVVSMGSGDHQFNLAEILSQNYSVRGECEEASRCPDKPKEELEKDFISQSNDMPFDELLALYGYEASDPISDRESEGGDVAPNLPDMTLDKEQIAKDLLSGEEEEETQSSADDLTPSVTSHEASDLFPNRSGSRFLADEDREPGSSASSDTEEDSLPANKCKKEIMVGPQFQADLSNLHLNRHCEKIYENEDQLLWDPSVLPEREVEEFLYRAVKRRWHEMAGPQLPEGEAVKDSEQALYELVKCNFNVEEALRRLRFNVKVIRDGLCAWSEEECRNFEHGFRVHGKNFHLIQANKVRTRSVGECVEYYYLWKKSERYDYFAQQTRLGRRKYVPSGTTDADQDLDGSDPDGPGRPRPEQDTLTGMRTDPLSVDGTAGGLDEPGVASDGLPSSEPGPCSFQQLDESPAVPLSHRPPALADPASYQPAVTAPEPDASPRLAVDFALPKELPLISSHVDLSGDPEETVAPAQVALSVTEFGLIGIGDVNPFLAAHPTCPAPGLHSEPLSHCNVMTC

SEQ ID NO: 15292 - protein, 550 aa, Homo sapiens
MAEASFGSSSPVGSLSSEDHDFDPTAEMLVHDYDDERTLEEEEMMDEGKNFSSEIEDLEKEGTMPLEDLLAFYGYEPTIPAVANSSANSSPSELADELPDMTLDKEEIAKDLLSGDDEETQSSADDLTPSVTSHETSDFFPRPLRSNTACDGDKESEVEDVETDSGNSPEDLRKEIMIGLQYQAEIPPYLGEYDGNEKVYENEDQLLWCPDVVLESKVKEYLVETSLRTGSEKIMDRISAGTHTRDNEQALYELLKCNHNIKEAIERYCCNGKASQEGMTAWTEEECRSFEHALMLFGKDFHLIQKNKVRTRTVAECVAFYYMWKKSERYDYFAQQTRFGKKRYNHHPGVTDYMDRLVDETEALGGTVNASALTSNRPEPIPDQQLNILNSFTASDLTALTNSVATVCDPTDVNCLDDSFPPLGNTPRGQVNHVPVVTEELLTLPSNGESDCFNLFETGFYHSELNPMNMCSEESERPAKRLKMGIAVPESFMNEVSVNNLGVDFENHTHHITSAKMAVSVADFGSLSANETNGFISAHALHQHAALHSE

SEQ ID NO: 15293 - protein, 1132 aa, Homo sapiens
MIATPLKHSRIYLPPEASSQRRNLPMDAIFFDSIPSGTLTPVKDLVKYQNSSLKLNDHKKNQFLKMTTFNNKNIFQSTMLTEATTSNSSLDISAIKPNKDGLKNKANYESPGKIFLRMKEKVLRDKQEQPSRNSSLLEPQKSGNNETFTPNRVEKKKLQHTYLCEEKENNKSFQSDDSSLRASVQGVPLESSNNDIFLPVKQKIQCQQEKKAPLHNLTYELPTLNQEQENFLAVEARNKTLTRAQLAKQIFHSKESIVATTKSKKDTFVLESVDSADEQFQNTNAETLSTNCIPIKNGSLLMVSDSERTTEGTSQQKVKEGNGKTVPGETGLPGSMKDTCKIVLATPRLHITIPRRSKRNISKLSPPRIFQTVTNGLKKNQVVQLQEWMIKSINNNTAICVEGKLIDVTNIYWHSNVIIERIEHNKLRTISGNVYILKGMIDQISMKEAGYPNYLIRKFMFGFPENWKEHIDNFLEQLRAGEKNREKTKQKQKTGRSVRDIRKSMKNDARENQTDTAQRATTTYDFDCDNLELKSNKHSESPGATELNMCHSNCQNKPTLRFPDDQVNNTIQNGGGDDLSNQELIGKKEYKMSSKKLKIGERTNERIIKSQKQETTEELDVSIDILTSREQFFSDEERKYMAINQKKAYILVTPLKSRKVIEQRCMRYNLSAGTIKAVTDFVIPECQKKSPISKSMGTLENTFEGHKSKNKEDCDERDLLTVNRKIKISNLEKEQMLTSDFKKNTRLLPKLKKIENQVAMSFYKHQSSPDLSSEESETEKEIKRKAEVKKTKAGNTKEAVVHLRKSTRNTSNIPVILEPETEESENEFYIKQKKARPSVKETLQKSGVRKEFPITEAVGSDKTNRHPLECLPGLIQDKEWNEKELQKLHCAFASLPKHKPGFWSEVAAAVGSRSPEECQRKYMENPRGKGSQKHVTKKKPANSKGQNGKRGDADQKQTIKITAKVGTLKRKQQMREFLEQLPKDDHDDFFSTTPLQHQRILLPSFQDSEDDDDILPNMDKNPTTPSSVIFPLVKTPQCQHVSPGMLGSINRNDCDKYVFRMQKYHKSNGGIVWGNIKKKLVETDFSTPTPRRKTPFNTDLGENSGIGKLFTNAVESLDEEEKDYYFSNSDSA

SEQ ID NO: 15294 - protein, 526 aa, Homo sapiens
MQSESGIVPDFEVGEEFHEEPKTYYELKSQPLKSSSSAEHPGASKPPISSSSMTSRILLRQQLMREQMQEQERREQQQKLQAAQFMQQRVPVSQTPAINVSVPTTLPSATQVPMEVLKVQTHLENPTKYHIQQAQRQQVKQYLSTTLANKHANQVLSLPCPNQPGDHVMPPVPGSSAPNSPMAMLTLNSNCEKEGFYKFEEQNRAESECPGMNTHSRASCMQMDDVIDDIISLESSYNEEILGLMDPALQMANTLPVSGNLIDLYGNQGLPPPGLTISNSCPANLPNIKRELTACIFPTESEARALAKERQKKDNHNLIERRRRFNINDRIKELGTLIPKSNDPDMRWNKGTILKASVDYIRKLQREQQRAKELENRQKKLEHANRHLLLRIQELEMQARAHGLSLIPSTGLCSPDLVNRIIKQEPVLENCSQDLLQHHADLTCTTTLDLTDGTITFNNNLGTGTEANQAYSVPTKMGSKLEDILMDDTLSPVGVTDPLLSSVSPGASKTSSRRSSMSMEETEHTC

SEQ ID NO: 15295 - protein, 232 aa, Homo sapiens
MATAESRALQFAEGAAFPAYRAPHAGGALLPPPSPAAALLPAPPAGPGPATFAGFLGRDPGPAPPPPASLGSPAPPKGAAAPSASQRRKRTSFSAEQLQLLELVFRRTRYPDIHLRERLAALTLLPESRIQVWFQNRRAKSRRQSGKSFQPLARPEIILNHCAPGTETKCLKPQLPLEVDVNCLPEPNGVGGGISDSSSQGQNFETCSPLSEDIGSKLDSWEEHIFSAFGNF

SEQ ID NO: 15296 - protein, 352 aa, Homo sapiens
MNTIVFNKLSGAVLFEDGGASERERGGRPYSGVLDSPHARPEVGIPDGPPLKDNLGLRHRRTGARQNGGKVRHKRQALQDMARPLKQWLYKHRDNPYPTKTEKILLALGSQMTLVQVSNWFANARRRLKNTVRQPDLSWALRIKLYNKYVQGNAERLSVSSDDSCSEDGENPPRTHMNEGGYNTPVHHPVIKSENSVIKAGVRPESRASEDYVAPPKYKSSLLNRYLNDSLRHVMATNTTMMGKTRQRNHSGSFSSNEFEEELVSPSSSETEGNFVYRTDTLENGSNKGESAANRKGPSKDDTYWKEINAAMALTNLAQGKDKLQGTTSCIIQKSSHIAEVKTVKVPLVQQF

SEQ ID NO: 15297 - protein, 559 aa, Homo sapiens
MDNQCTVQVRLELGHRAQLRKKPTTEGFTHDWMVFVRGPEQCDIQHFVEKVVFWLHDSFPKPRRVCKEPPYKVEESGYAGFIMPIEVHFKNKEEPRKVCFTYDLFLNLEGNPPVNHLRCEKLTFNNPTTEFRYKLLRAGGVMVMPEGADTVSRPSPDYPMLPTIPLSAFSDPKKTKPSHGSKDANKESSKTSKPHKVTKEHRERPRKDSESKSSSKELEREQAKSSKDTSRKLGEGRLPKEEKAPPPKAAFKEPKMALKETKLESTSPKGGPPPPPPPPPRASSKRPATADSPKPSAKKQKKSSSKGSRSAPGTSPRTSSSSSFSDKKPAKDKSSTRGEKVKAESEPREAKKALEVEESNSEDEASFKSESAQSSPSNSSSSSDSSSDSDFEPSQNHSQGPLRSMVEDLQSEESDEDDSSSGEEAAGKTNPGRDSRLSFSDSESDNSADSSLPSREPPPPQKPPPPNSKVSGRRSPESCSKPEKILKKGTYDKAYTDELVELHRRLMALRERNVLQQIVNLIEETGHFNVTNTTFDFDLFSLDETTVRKLQSCLEAVAT

SEQ ID NO: 15298 - protein, 1068 aa, Homo sapiens
MVSSDRPVSLEDEVSHSMKEMIGGCCVCSDERGWAENPLVYCDGHGCSVAVHQACYGIVQVPTGPWFCRKCESQERAARVRCELCPHKDGALKRTDNGGWAHVVCALYIPEVQFANVSTMEPIVLQSVPHDRYNKTCYICDEQGRESKAATGACMTCNKHGCRQAFHVTCAQFAGLLCEEEGNGADNVQYCGYCKYHFSKLKKSKRGSNRSYDQSLSDSSSHSQDKHHEKEKKKYKEKDKHKQKHKKQPEPSPALVPSLTVTTEKTYTSTSNNSISGSLKRLEDTTARFTNANFQEVSAHTSSGKDVSETRGSEGKGKKSSAHSSGQRGRKPGGGRNPGTTVSAASPFPQGSFSGTPGSVKSSSGSSVQSPQDFLSFTDSDLRNDSYSHSQQSSATKDVHKGESGSQEGGVNSFSTLIGLPSTSAVTSQPKSFENSPGDLGNSSLPTAGYKRAQTSGIEEETVKEKKRKGNKQSKHGPGRPKGNKNQENVSHLSVSSASPTSSVASAAGSITSSSLQKSPTLLRNGSLQSLSVGSSPVGSEISMQYRHDGACPTTTFSELLNAIHNGIYNSNDVAVSFPNVVSGSGSSTPVSSSHLPQQSSGHLQQVGALSPSAVSSAAPAVATTQANTLSGSSLSQAPSHMYGNRSNSSMAALIAQSENNQTDQDLGDNSRNLVGRGSSPRGSLSPRSPVSSLQIRYDQPGNSSLENLPPVAASIEQLLERQWSEGQQFLLEQGTPSDILGMLKSLHQLQVENRRLEEQIKNLTAKKERLQLLNAQLSVPFPTITANPSPSHQIHTFSAQTAPTTDSLNSSKSPHIGNSFLPDNSLPVLNQDLTSSGQSTSSSSALSTPPPAGQSPAQQGSGVSGVQQVNGVTVGALASGMQPVTSTIPAVSAVGGIIGALPGNQLAINGIVGALNGVMQTPVTMSQNPTPLTHTTVPPNATHPMPATLTNSASGLGLLSDQQRQILIHQQQFQQLLNSQQLTPEQHQAFLYQLMQHHHQQHHQPELQQLQIPGPTQIPINNLLAGTQAPPLHTATTNPFLTIHGDNASQKVARLSDKTGPVAQEKS

SEQ ID NO: 15299 - protein, 90 aa, Homo sapiens
MRDPVSSQYSSFLFWRMPIPELDLSELEGLGLSDTATYKVKDSSVGKMIGQATAADQEKNPEGDGLLEYSTFNFWRAPIASIHSFELDLL

SEQ ID NO: 15300 - protein, 568 aa, Homo sapiens
MASSCAVQVKLELGHRAQVRKKPTVEGFTHDWMVFVRGPEHSNIQHFVEKVVFHLHESFPRPKRVCKDPPYKVEESGYAGFILPIEVYFKNKEEPRKVRFDYDLFLHLEGHPPVNHLRCEKLTFNNPTEDFRRKLLKAGGDPNRSIHTSSSSSSSSSSSSSSSSSSSSSSSSSSSSSSSSSSSSSSSSSSTSFSKPHKLMKEHKEKPSKDSREHKSAFKEPSRDHNKSSKESSKKPKENKPLKEEKIVPKMAFKEPKPMSKEPKPDSNLLTITSGQDKKAPSKRPPISDSEELSAKKRKKSSSEALFKSFSSAPPLILTCSADKKQIKDKSHVKMGKVKIESETSEKKKSTLPPFDDIVDPNDSDVEENISSKSDSEQPSPASSSSSSSSSFTPSQTRQQGPLRSIMKDLHSDDNEEESDEVEDNDNDSEMERPVNRGGSRSRRVSLSDGSDSESSSASSPLHHEPPPPLLKTNNNQILEVKSPIKQSKSDKQIKNGECDKAYLDELVELHRRLMTLRERHILQQIVNLIEETGHFHITNTTFDFDLCSLDKTTVRKLQSYLETSGTS

SEQ ID NO: 15301 - protein, 1824 aa, Homo sapiens
MSAGGRDEERRKLADIIHHWNANRLDLFEISQPTEDLEFHGVMRFYFQDKAAGNFATKCIRVSSTATTQDVIETLAEKFRPDMRMLSSPKYSLYEVHVSGERRLDIDEKPLVVQLNWNKDDREGRFVLKNENDAIPPKKAQSNGPEKQEKEGVIQNFKRTLSKKEKKEKKKREKEALRQASDKDDRPFQGEDVENSRLAAEVYKDMPETSFTRTISNPEVVMKRRRQQKLEKRMQEFRSSDGRPDSGGTLRIYADSLKPNIPYKTILLSTTDPADFAVAEALEKYGLEKENPKDYCIARVMLPPGAQHSDEKGAKEIILDDDECPLQIFREWPSDKGILVFQLKRRPPDHIPKKTKKHLEGKTPKGKERADGSGYGSTLPPEKLPYLVELSPGRRNHFAYYNYHTYEDGSDSRDKPKLYRLQLSVTEVGTEKLDDNSIQLFGPGIQPHHCDLTNMDGVVTVTPRSMDAETYVEGQRISETTMLQSGMKVQFGASHVFKFVDPSQDHALAKRSVDGGLMVKGPRHKPGIVQETTFDLGGDIHSGTALPTSKSTTRLDSDRVSSASSTAERGMVKPMIRVEQQPDYRRQESRTQDASGPELILPASIEFRESSEDSFLSAIINYTNSSTVHFKLSPTYVLYMACRYVLSNQYRPDISPTERTHKVIAVVNKMVSMMEGVIQKQKNIAGALAFWMANASELLNFIKQDRDLSRITLDAQDVLAHLVQMAFKYLVHCLQSELNNYMPAFLDDPEENSLQRPKIDDVLHTLTGAMSLLRRCRVNAALTIQLFSQLFHFINMWLFNRLVTDPDSGLCSHYWGAIIRQQLGHIEAWAEKQGLELAADCHLSRIVQATTLLTMDKYAPDDIPNINSTCFKLNSLQLQALLQNYHCAPDEPFIPTDLIENVVTVAENTADELARSDGREVQLEEDPDLQLPFLLPEDGYSCDVVRNIPNGLQEFLDPLCQRGFCRLIPHTRSPGTWTIYFEGADYESHLLRENTELAQPLRKEPEIITVTLKKQNGMGLSIVAAKGAGQDKLGIYVKSVVKGGAADVDGRLAAGDQLLSVDGRSLVGLSQERAAELMTRTSSVVTLEVAKQGAIYHGLATLLNQPSPMMQRISDRRGSGKPRPKSEGFELYNNSTQNGSPESPQLPWAEYSEPKKLPGDDRLMKNRADHRSSPNVANQPPSPGGKSAYASGTTAKITSVSTGNLCTEEQTPPPRPEAYPIPTQTYTREYFTFPASKSQDRMAPPQNQWPNYEEKPHMHTDSNHSSIAIQRVTRSQEELREDKAYQLERHRIEAAMDRKSDSDMWINQSSSLDSSTSSQEHLNHSSKSVTPASTLTKSGPGRWKTPAAIPATPVAVSQPIRTDLPPPPPPPPVHYAGDFDGMSMDLPLPPPPSANQIGLPSAQVAAAERRKREEHQRWYEKEKARLEEERERKRREQERKLGQMRTQSLNPAPFSPLTAQQMKPEKPSTLQRPQETVIRELQPQQQPRTIERRDLQYITVSKEELSSGDSLSPDPWKRDAKEKLEKQQQMHIVDMLSKEIQELQSKPDRSAEESDRLRKLMLEWQFQKRLQESKQKDEDDEEEEDDDVDTMLIMQRLEAERRARLQDEERRRQQQLEEMRKREAEDRARQEEERRRQEEERTKRDAEEKRRQEEGYYSRLEAERRRQHDEAARRLLEPEAPGLCRPPLPRDYEPPSPSPAPGAPPPPPQRNASYLKTQVLSPDSLFTAKFVAYNEEEEEEDCSLAGPNSYPGSTGAAVGAHDACRDAKEKRSKSQDADSPGSSGAPENLTFKERQRLFSQGQDVSNKVKASRKLTELENELNTK

SEQ ID NO: 15302 - protein, 1093 aa, Homo sapiens
MKEMVGGCCVCSDERGWAENPLVYCDGHACSVAVHQACYGIVQVPTGPWFCRKCESQERAARVRCELCPHKDGALKRTDNGGWAHVVCALYIPEVQFANVLTMEPIVLQYVPHDRFNKTCYICEEQGRESKAASGACMTCNRHGCRQAFHVTCAQMAGLLCEEEVLEVDNVKYCGYCKYHFSKMKTSRHSSGGGGGGAGGGGGSMGGGGSGFISGRRSRSASPSTQQEKHPTHHERGQKKSRKDKERLKQKHKKRPESPPSILTPPVVPTADKVSSSASSSSHHEASTQETSESSRESKGKKSSSHSLSHKGKKLSSGKGVSSFTSASSSSSSSSSSSGGPFQPAVSSLQSSPDFSAFPKLEQPEEDKYSKPTAPAPSAPPSPSAPEPPKADLFEQKVVFSGFGPIMRFSTTTSSSGRARAPSPGDYKSPHVTGSGASAGTHKRMPALSATPVPADETPETGLKEKKHKASKRSRHGPGRPKGSRNKEGTGGPAAPSLPSAQLAGFTATAASPFSGGSLVSSGLGGLSSRTFGPSGSLPSLSLESPLLGAGIYTSNKDPISHSGGMLRAVCSTPLSSSLLGPPGTSALPRLSRSPFTSTLPSSSASISTTQVFSLAGSTFSLPSTHIFGTPMGAVNPLLSQAESSHTEPDLEDCSFRCRGTSPQESLSSMSPISSLPALFDQTASAPCGGGQLDPAAPGTTNMEQLLEKQGDGEAGVNIVEMLKALHALQKENQRLQEQILSLTAKKERLQILNVQLSVPFPALPAALPAANGPVPGPYGLPPQAGSSDSLSTSKSPPGKSSLGLDNSLSTSSEDPHSGCPSRSSSSLSFHSTPPPLPLLQQSPATLPLALPGAPAPLPPQPQNGLGRAPGAAGLGAMPMAEGLLGGLAGSGGLPLNGLLGGLNGAAAPNPASLSQAGGAPTLQLPGCLNSLTEQQRHLLQQQEQQLQQLQQLLASPQLTPEHQTVVYQMIQQIQQKRELQRLQMAGGSQLPMASLLAGSSTPLLSAGTPGLLPTASAPPLLPAGALVAPSLGNNTSLMAAAAAAAAVAAAGGPPVLTAQTNPFLSLSGAEGSGGGPKGGTADKGASANQEKG

SEQ ID NO: 15303 - protein, 298 aa, Homo sapiens
MTEPGASPEDPWVKASPVGAHAGEGRAGRARARRGAGRRGASLLSPKSPTLSVPRGCREDSSHPACAKVEYAYSDNSLDPGLFVESTRKGSVVSRANSIGSTSASSVPNTDDEDSDYHQEAYKESYKDRRRRAHTQAEQKRRDAIKRGYDDLQTIVPTCQQQDFSIGSQKLSKAIVLQKTIDYIQFLHKEKKKQEEEVSTLRKDVTALKIMKVNYEQIVKAHQDNPHEGEDQVSDQVKFNVFQGIMDSLFQSFNASISVASFQELSACVFSWIEEHCKPQTLREIVIGVLHQLKNQLY

SEQ ID NO: 15304 - protein, 919 aa, Homo sapiens; identical to SEQ ID NO: 8750

SEQ ID NO: 15305 - protein, 852 aa, Homo sapiens; identical to SEQ ID NO: 8758

SEQ ID NO: 15306 - protein, 582 aa, Homo sapiens
MSIETLLEAARFLEWQAQQQQRAREEQERLRLEQEREQEQKKANSLARLAHTLPVEEPRMEAPPLPLSPPAPPPAPPPPLATPAPLTVIPIPVVTNSPQPLPPPPPLPAAAQPLPLAPRQPALVGAPGLSIKEPAPLPSRPQVPTPAPLLPDSKATIPPNGSPKPLQPLPTPVLTIAPHPGVQPQLAPQQPPPPTLGTLKLAPAEEVKSSEQKKRPGGIGTREVHNKLEKNRRAHLKECFETLKRNIPNVDDKKTSNLSVLRTALRYIQSLKRKEKEYEHEMERLAREKIATQQRLAELKHELSQWMDVLEIDRVLRQTGQPEDDQASTSTASEGEDNIDEDMEEDRAGLGPPKLSHRPQPELLKSTLPPPSTTPAPLPPHPHPHPHSVALPPAHLPVQQQQPQQKTPLPAPPPPPAAPAQTLVPAPAHLVATAGGGSTVIAHTATTHASVIQTVNHVLQGPGGKHIAHIAPSAPSPAVQLAPATPPIGHITVHPATLNHVAHLGSQLPLYPQPVAVSHIAHTLSHQQVNGTAGLGPPATVMAKPAVGAQVVHHPQLVGQTVLNPVTMVTMPSFPVSTLKLA

SEQ ID NO: 15307 - protein, 401 aa, Homo sapiens
MEKSKNFRIDALLAVDPPRAASAQSAPLALVTSLAAAASGTGGGGGGGGASGGTSGSCSPASSEPPAAPADRLRAESPSPPRLLAAHCALLPKPGFLGAGGGGGGTGGGHGGPHHHAHPGAAAAAAAAAAAAAAGGLALGLHPGGAQGGAGLPAQAALYGHPVYGYSAAAAAAALAGQHPALSYSYPQVQGAHPAHPADPIKLGAGTFQLDQWLRASTAGMILPKMPDFNSQAQSNLLGKCRRPRTAFTSQQLLELEHQFKLNKYLSRPKRFEVATSLMLTETQVKIWFQNRRMKWKRSKKAKEQAAQEAEKQKGGGGGAGKGGAEEPGAEELLGPPAPGDKGSGRRLRDLRDSDPEEDEDEDDEDHFPYSNGASVHAASSDCSSEDDSPPPRPSHQPAPQ

SEQ ID NO: 15308 - protein, 206 aa, Homo sapiens
MSTGSVSDPEEMELRGLQREYPVPASKRPPLRGVERSYASPSDNSSAEEEDPDGEEERCALGTAGSAEGCKRKRPRVAGGGGAGGSAGGGGKKPLPAKGSAAECKQSQRNAANARERARMRVLSKAFSRLKTSLPWVPPDTKLSKLDTLRLASSYIAHLRQLLQEDRYENGYVHPVNLTWPFVVSGRPDSDTKEVSAANRLCGTTA

SEQ ID NO: 15309 - protein, 193 aa, Homo sapiens
MDNLRETFLSLEDGLGSSDSPGLLSSWDWKDRAGPFELNQASPSQSLSPAPSLESYSSSPCPAVAGLPCEHGGASSGGSEGCSVGGASGLVEVDYNMLAFQPTHLQGGGGPKAQKGTKVRMSVQRRRKASEREKLRMRTLADALHTLRNYLPPVYSQRGQPLTKIQTLKYTIKYIGELTDLLNRGREPRAQSA

SEQ ID NO: 15310 - protein, 303 aa, Homo sapiens
MAPAADMTSLPLGVKVEDSAFGKPAGGGAGQAPSAAAATAAAMGADEEGAKPKVSPSLLPFSVEALMADHRKPGAKESALAPSEGVQAAGGSAQPLGVPPGSLGAPDAPSSPRPLGHFSVGGLLKLPEDALVKAESPEKPERTPWMQSPRFSPPPARRLSPPACTLRKHKTNRKPRTPFTTAQLLALERKFRQKQYLSIAERAEFSSSLSLTETQVKIWFQNRRAKAKRLQEAELEKLKMAAKPMLPPAAFGLSFPLGGPAAVAAAAGASLYGASGPFQRAALPVAPVGLYTAHVGYSMYHLT

SEQ ID NO: 15311 - protein, 267 aa, Homo sapiens
MASPSKGNDLFSPDEEGPAVVAGPGPGPGGAEGAAEERRVKVSSLPFSVEALMSDKKPPKEASPLPAESASAGATLRPLLLSGHGAREAHSPGPLVKPFETASVKSENSEDGAAWMQEPGRYSPPPRHMSPTTCTLRKHKTNRKPRTPFTTSQLLALERKFRQKQYLSIAERAEFSSSLNLTETQVKIWFQNRRAKAKRLQEAELEKLKMAAKPMLPSSFSLPFPISSPLQAASIYGASYPFHRPVLPIPPVGLYATPVGYGMYHLS

SEQ ID NO: 15312 - protein, 715 aa, Homo sapiens
MAANMYRVGDYVYFENSSSNPYLIRRIEELNKTANGNVEAKVVCFYRRRDISSTLIALADKHATLSVCYKAGPGADNGEEGEIEEEMENPEMVDLPEKLKHQLRHRELFLSRQLESLPATHIRGKCSVTLLNETESLKSYLEREDFFFYSLVYDPQQKTLLADKGEIRVGNRYQADITDLLKEGEEDGRDQSRLETQVWEAHNPLTDKQIDQFLVVARSVGTFARALDCSSSVRQPSLHMSAAAASRDITLFHAMDTLHKNIYDISKAISALVPQGGPVLCRDEMEEWSASEANLFEEALEKYGKDFTDIQQDFLPWKSLTSIIEYYYMWKTTDRYVQQKRLKAAEAESKLKQVYIPNYNKPNPNQISVNNVKAGVVNGTGAPGQSPGAGRACESCYTTQSYQWYSWGPPNMQCRLCASCWTYWKKYGGLKMPTRLDGERPGPNRSNMSPHGLPARSSGSPKFAMKTRQAFYLHTTKLTRIARRLCREILRPWHAARHPYLPINSAAIKAECTARLPEASQSPLVLKQAVRKPLEAVLRYLETHPRPPKPDPVKSVSSVLSSLTPAKVAPVINNGSPTILGKRSYEQHNGVDGNMKKRLLMPSRGLANHGQARHMGPSRNLLLNGKSYPTKVRLIRGGSLPPVKRRRMNWIDAPDDVFYMATEETRKIRKLLSSSETKRAARRPYKPIALRQSQALPPRPPPPAPVNDEPIVIED

SEQ ID NO: 15313 - protein, 668 aa, Homo sapiens
MAANMYRVGDYVYFENSSSNPYLVRRIEELNKTANGNVEAKVVCLFRRRDISSSLNSLADSNAREFEEESKQPGVSEQQRHQLKHRELFLSRQFESLPATHIRGKCSVTLLNETDILSQYLEKEDCFFYSLVFDPVQKTLLADQGEIRVGCKYQAEIPDRLVEGESDNRNQQKMEMKVWDPDNPLTDRQIDQFLVVARAVGTFARALDCSSSIRQPSLHMSAAAASRDITLFHAMDTLQRNGYDLAKAMSTLVPQGGPVLCRDEMEEWSASEAMLFEEALEKYGKDFNDIRQDFLPWKSLASIVQFYYMWKTTDRYIQQKRLKAAEADSKLKQVYIPTYTKPNPNQIISVGSKPGMNGAGFQKGLTCESCHTTQSAQWYAWGPPNMQCRLCASCWIYWKKYGGLKTPTQLEGATRGTTEPHSRGHLSRPEAQSLSPYTTSANRAKLLAKNRQTFLLQTTKLTRLARRMCRDLLQPRRAARRPYAPINANAIKAECSIRLPKAAKTPLKIHPLVRLPLATIVKDLVAQAPLKPKTPRGTKTPINRNQLSQNRGLGGIMVKRAYETMAGAGVPFSANGRPLASGIRSSSQPAAKRQKLNPADAPNPVVFVATKDTRALRKALTHLEMRRAARRPNLPLKVKPTLIAVRPPVPLPAPSHPASTNEPIVLED

SEQ ID NO: 15314 - protein, 594 aa, Homo sapiens
MAANMYRVGDYVYFENSSSNPYLIRRIEELNKTASGNVEAKVVCFYRRRDISNTLIMLADKHAKEIEEESETTVEADLTDKQKHQLKHRELFLSRQYESLPATHIRGKCSVALLNETESVLSYLDKEDTFFYSLVYDPSLKTLLADKGEIRVGPRYQADIPEMLLEGESDEREQSKLEVKVWDPNSPLTDRQIDQFLVVARAVGTFARALDCSSSVRQPSLHMSAAAASRDITLFHAMDTLYRHSYDLSSAISVLVPLGGPVLCRDEMEEWSASEASLFEEALEKYGKDFNDIRQDFLPWKSLTSIIEYYYMWKTTDRYVQQKRLKAAEAESKLKQVYIPTYSKPNPNQISTSNGKPGAVNGAVGTTFQPQNPLLGRACESCYATQSHQWYSWGPPNMQCRLCAICWLYWKKYGGLKMPTQSEEEKLSPSPTTEDPRVRSHVSRQAMQGMPVRNTGSPKSAVKTRQAFFLHTTYFTKFARQVCKNTLRLRQAARRPFVAINYAAIRAEYADRHAELSGSPLKSKSTRKPLACIIGYLEIHPAKKPNVIRSTPSLQTPTTKRMLTTPNHTSLSILGKRNYSHHNGLDELTCCVSD

SEQ ID NO: 15315 - protein, 753 aa, Homo sapiens
MGEHSPDNNIIYFEAEEDELTPDDKMLRFVDKNGLVPSSSGTVYDRTTVLIEQDPGTLEDEDDDGQCGEHLPFLVGGEEGFHLIDHEAMSQGYVQHIISPDQIHLTINPGSTPMPRNIEGATLTLQSECPETKRKEVKRYQCTFEGCPRTYSTAGNLRTHQKTHRGEYTFVCNQEGCGKAFLTSYSLRIHVRVHTKEKPFECDVQGCEKAFNTLYRLKAHQRLHTGKTFNCESEGCSKYFTTLSDLRKHIRTHTGEKPFRCDHDGCGKAFAASHHLKTHVRTHTGERPFFCPSNGCEKTFSTQYSLKSHMKGHDNKGHSYNALPQHNGSEDTNHSLCLSDLSLLSTDSELRENSSTTQGQDLSTISPAIIFESMFQNSDDTAIQEDPQQTASLTESFNGDAESVSDVPPSTGNSASLSLPLVLQPGLSEPPQPLLPASAPSAPPPAPSLGPGSQQAAFGNPPALLQPPEVPVPHSTQFAANHQEFLPHPQAPQPIVPGLSVVAGASASAAAVASAVAAPAPPQSTTEPLPAMVQTLPLGANSVLTNNPTITITPTPNTAILQSSLVMGEQNLQWILNGATSSPQNQEQIQQASKVEKVFFTTAVPVASSPGSSVQQIGLSVPVIIIKQEEACQCQCACRDSAKERASSRRKGCSSPPPPEPSPQAPDGPSLQLPAQTFSSAPVPGSSSSTLPSSCEQSRQAETPSDPQTETLSAMDVSEFLSLQSLDTPSNLIPIEALLQGEEEMGLTSSFSK

SEQ ID NO: 15316 - protein, 593 aa, Homo sapiens
MRDSTGAGNSLVHKRSPLRRNQKTPTSLTKLSLQDGHKAKKPACKFEEGQDVLARWSDGLFYLGTIKKINILKQSCFIIFEDSSKSWVLWKDIQTGATGSGEMVCTICQEEYSEAPNEMVICDKCGQGYHQLCHTPHIDSSVIDSDEKWLCRQCVFATTTKRGGALKKGPNAKALQVMKQTLPYSVADLEWDAGHKTNVQQCYCYCGGPGDWYLKMLQCCKCKQWFHEACVQCLQKPMLFGDRFYTFICSVCSSGPEYLKRLPLQWVDIAHLCLYNLSVIHKKKYFDSELELMTYINENWDRLHPGELADTPKSERYEHVLEALNDYKTMFMSGKEIKKKKHLFGLRIRVPPVPPNVAFKAEKEPEGTSHEFKIKGRKASKPISDSREVSNGIEKKGKKKSVGRPPGPYTRKMIQKTAEPLLDKESISENPTLDLPCSIGRTEGTAHSSNTSDVDFTGASSAKETTSSSISRHYGLSDSRKRTRTGRSWPAAIPHLRRRRGRLPRRALQTQNSEIVKDDEGKEDYQFDELNTEILNNLADQELQLNHLKNSITSYFGAAGRIACGEKYRVLARRVTLDGKVQYLVEWEGATAS

SEQ ID NO: 15317 - protein, 221 aa, Homo sapiens
MAAAVRMNIQMLLEAADYLERREREAEHGYASMLPYNNKDRDALKRRNKSKKNNSSSRSTHNEMEKNRRAHLRLCLEKLKGLVPLGPESSRHTTLSLLTKAKLHIKKLEDCDRKAVHQIDQLQREQRHLKRQLEKLGIERIRMDSIGSTVSSERSDSDREEIDVDVESTDYLTGDLDWSSSSVSDSDERGSMQSLGSDEGYSSTSIKRIKLQDSHKACLGL

SEQ ID NO: 15318 - protein, 206 aa, Homo sapiens
MEPLASNIQVLLQAAEFLERREREAEHGYASLCPHRSPGPIHRRKKRPPQAPGAQDSGRSVHNELEKRRRAQLKRCLERLKQQMPLGADCARYTTLSLLRRARMHIQKLEDQEQRARQLKERLRSKQQSLQRQLEQLRGLAGAAERERLRADSLDSSGLSSERSDSDQEELEVDVESLVFGGEAELLRGFVAGQEHSYSHGGGAWL

SEQ ID NO: 15319 - protein, 209 aa, Homo sapiens
MELNSLLILLEAAEYLERRDREAEHGYASVLPFDGDFAREKTKAAGLVRKAPNNRSSHNELEKHRRAKLRLYLEQLKQLVPLGPDSTRHTTLSLLKRAKVHIKKLEEQDRRALSIKEQLQQEHRFLKRRLEQLSVQSVERVRTDSTGSAVSTDDSEQEVDIEGMEFGPGELDSVGSSSDADDHYSLQSGTGGDSGFGPHCRRLGRPALS

SEQ ID NO: 15320 - protein, 228 aa, Homo sapiens
MERVKMINVQRLLEAAEFLERRERECEHGYASSFPSMPSPRLQHSKPPRRLSRAQKHSSGSSNTSTANRSTHNELEKNRRAHLRLCLERLKVLIPLGPDCTRHTTLGLLNKAKAHIKKLEEAERKSQHQLENLEREQRFLKWRLEQLQGPQEMERIRMDSIGSTISSDRSDSEREEIEVDVESTEFSHGEVDNISTTSISDIDDHSSLPSIGSDEGYSSASVKLSFTS

SEQ ID NO: 15321 - protein, 640 aa, Homo sapiens
MARRPRHSIYSSDEDDEDFEMCDHDYDGLLPKSGKRHLGKTRWTREEDEKLKKLVEQNGTDDWKVIANYLPNRTDVQCQHRWQKVLNPELIKGPWTKEEDQRVIELVQKYGPKRWSVIAKHLKGRIGKQCRERWHNHLNPEVKKTSWTEEEDRIIYQAHKRLGNRWAEIAKLLPGRTDNAIKNHWNSTMRRKVEQEGYLQESSKASQPAVATSFQKNSHLMGFAQAPPTAQLPATGQPTVNNDYSYYHISEAQNVSSHVPYPVALHVNIVNVPQPAAAAIQRHYNDEDPEKEKRIKELELLLMSTENELKGQQVLPTQNHTCSYPGWHSTTIADHTRPHGDSAPVSCLGEHHSTPSLPADPGSLPEESASPARCMIVHQGTILDNVKNLLEFAETLQFIDSFLNTSSNHENSDLEMPSLTSTPLIGHKLTVTTPFHRDQTVKTQKENTVFRTPAIKRSILESSPRTPTPFKHALAAQEIKYGPLKMLPQTPSHLVEDLQDVIKQESDESGIVAEFQENGPPLLKKIKQEVESPTDKSGNFFCSHHWEGDSLNTQLFTQTSPVADAPNILTSSVLMAPASEDEDNVLKAFTVPKNRSLASPLQPCSSTWEPASCGKMEEQMTSSSQARKYVNAFSARTLVM

SEQ ID NO: 15322 - protein, 752 aa, Homo sapiens
MAKRSRSEDEDDDLQYADHDYEVPQQKGLKKLWNRVKWTRDEDDKLKKLVEQHGTDDWTLIASHLQNRSDFQCQHRWQKVLNPELIKGPWTKEEDQRVIELVQKYGPKRWSLIAKHLKGRIGKQCRERWHNHLNPEVKKSSWTEEEDRIIYEAHKRLGNRWAEIAKLLPGRTDNSIKNHWNSTMRRKVEQEGYLQDGIKSERSSSKLQHKPCAAMDHMQTQNQFYIPVQIPGYQYVSPEGNCIEHVQPTSAFIQQPFIDEDPDKEKKIKELEMLLMSAENEVRRKRIPSQPGSFSSWSGSFLMDDNMSNTLNSLDEHTSEFYSMDENQPVSAQQNSPTKFLAVEANAVLSSLQTIPEFAETLELIESDPVAWSDVTSFDISDAAASPIKSTPVKLMRIQHNEGAMECQFNVSLVLEGKKNTCNGGNSEAVPLTSPNIAKFSTPPAILRKKRKMRVGHSPGSELRDGSLNDGGNMALKHTPLKTLPFSPSQFFNTCPGNEQLNIENPSFTSTPICGQKALITTPLHKETTPKDQKENVGFRTPTIRRSILGTTPRTPTPFKNALAAQEKKYGPLKIVSQPLAFLEEDIREVLKEETGTDLFLKEEDEPAYKSCKQENTASGKKVRKSLVLDNWEKEESGTQLLTEDISDMQSENRFTTSLLMIPLLEIHDNRCNLIPEKQDINSTNKTYTLTKKKPNPNTSKVVKLEKNLQSNCEWETVVYGKTEDQLIMTEQARRYLSTYTATSSTSRALIL

SEQ ID NO: 15323 - protein, 700 aa, Homo sapiens
MSRRTRCEDLDELHYQDTDSDVPEQRDSKCKVKWTHEEDEQLRALVRQFGQQDWKFLASHFPNRTDQQCQYRWLRVLNPDLVKGPWTKEEDQKVIELVKKYGTKQWTLIAKHLKGRLGKQCRERWHNHLNPEVKKSCWTEEEDRIICEAHKVLGNRWAEIAKMLPGRTDNAVKNHWNSTIKRKVDTGGFLSESKDCKPPVYLLLELEDKDGLQSAQPTEGQGSLLTNWPSVPPTIKEEENSEEELAAATTSKEQEPIGTDLDAVRTPEPLEEFPKREDQEGSPPETSLPYKWVVEAANLLIPAVGSSLSEALDLIESDPDAWCDLSKFDLPEEPSAEDSINNSLVQLQASHQQQVLPPRQPSALVPSVTEYRLDGHTISDLSRSSRGELIPISPSTEVGGSGIGTPPSVLKRQRKRRVALSPVTENSTSLSFLDSCNSLTPKSTPVKTLPFSPSQFLNFWNKQDTLELESPSLTSTPVCSQKVVVTTPLHRDKTPLHQKHAAFVTPDQKYSMDNTPHTPTPFKNALEKYGPLKPLPQTPHLEEDLKEVLRSEAGIELIIEDDIRPEKQKRKPGLRRSPIKKVRKSLALDIVDEDVKLMMSTLPKSLSLPTTAPSNSSSLTLSGIKEDNSLLNQGFLQAKPEKAAVAQKPRSHFTTPAPMSSAWKTVACGGTRDQLFMQEKARQLLGRLKPSHTSRTLILS

SEQ ID NO: 15324 - protein, 439 aa, Homo sapiens
MPLNVSFTNRNYDLDYDSVQPYFYCDEEENFYQQQQQSELQPPAPSEDIWKKFELLPTPPLSPSRRSGLCSPSYVAVTPFSLRGDNDGGGGSFSTADQLEMVTELLGGDMVNQSFICDPDDETFIKNIIIQDCMWSGFSAAAKLVSEKLASYQAARKDSGSPNPARGHSVCSTSSLYLQDLSAAASECIDPSVVFPYPLNDSSSPKSCASQDSSAFSPSSDSLLSSTESSPQGSPEPLVLHEETPPTTSSDSEEEQEDEEEIDVVSVEKRQAPGKRSESGSPSAGGHSKPPHSPLVLKRCHVSTHQHNYAAPPSTRKDYPAAKRVKLDSVRVLRQISNNRKCTSPRSSDTEENVKRRTHNVLERQRRNELKRSFFALRDQIPELENNEKAPKVVILKKATAYILSVQAEEQKLISEEDLLRKRREQLKHKLEQLRNSCA

SEQ ID NO: 15325 - protein, 364 aa, Homo sapiens
MDYDSYQHYFYDYDCGEDFYRSTAPSEDIWKKFELVPSPPTSPPWGLGPGAGDPAPGIGPPEPWPGGCTGDEAESRGHSKGWGRNYASIIRRDCMWSGFSARERLERAVSDRLAPGAPRGNPPKASAAPDCTPSLEAGNPAPAAPCPLGEPKTQACSGSESPSDSENEEIDVVTVEKRQSLGIRKPVTITVRADPLDPCMKHFHISIHQQQHNYAARFPPESCSQEEASERGPQEEVLERDAAGEKEDEEDEEIVSPPPVESEAAQSCHPKPVSSDTEDVTKRKNHNFLERKRRNDLRSRFLALRDQVPTLASCSKAPKVVILSKALEYLQALVGAEKRMATEKRQLRCRQQQLQKRIAYLTGY

SEQ ID NO: 15326 - protein, 358 aa, Homo sapiens
MDRDSYHHYFYDYDGGEDFYRSTTPSEDIWKKFELVPPPWDLGPAAGNPALSFGLLEPWPVGCAGDETESQDYWKAWDANYASLIRRDCMWSGFSTQEPLERAVSDLLAVGAPSGYSPKEFATPDYTPELEAGNLAPIFPCLLGEPKIQACSRSESPSDSEGEEIDVTVKKRQSLSTRKPVIIAVRADLLDPRMNLFHISIHQQQHNYAAPFPPESCFQEGAPKRMPPKEALEREAPGGKDDKEDEEIVSLPPVESEAAQSCQPKPIHYDTENWTKKKYHSYLERKRRNDQRSRFLALRDEVPALASCSRVSKVMILVKATEYLHELAEAEERMATEKRQLECQRRQLQKRIEYLSSY

SEQ ID NO: 15327 - protein, 464 aa, Homo sapiens
MPSCSTSTMPGMICKNPDLEFDSLQPCFYPDEDDFYFGGPDSTPPGEDIWKKFELLPTPPLSPSRGFAEHSSEPPSWVTEMLLENELWGSPAEEDAFGLGGLGGLTPNPVILQDCMWSGFSAREKLERAVSEKLQHGRGPPTAGSTAQSPGAGAASPAGRGHGGAAGAGRAGAALPAELAHPAAECVDPAVVFPFPVNKREPAPVPAAPASAPAAGPAVASGAGIAAPAGAPGVAPPRPGGRQTSGGDHKALSTSGEDTLSDSDDEDDEEEDEEEEIDVVTVEKRRSSSNTKAVTTFTITVRPKNAALGPGRAQSSELILKRCLPIHQQHNYAAPSPYVESEDAPPQKKIKSEASPRPLKSVIPPKAKSLSPRNSDSEDSERRRNHNILERQRRNDLRSSFLTLRDHVPELVKNEKAAKVVILKKATEYVHSLQAEEHQLLLEKEKLQARQQQLLKKIEHARTC

SEQ ID NO: 15328 - protein, 255 aa, Homo sapiens
MDVMDGCQFSPSEYFYDGSCIPSPEGEFGDEFVPRVAAFGAHKAELQGSDEDEHVRAPTGHHQAGHCLMWACKACKRKSTTMDRRKAATMRERRRLKKVNQAFETLKRCTTTNPNQRLPKVEILRNAIRYIESLQELLREQVENYYSLPGQSCSEPTSPTSNCSDGMPECNSPVWSRKSSTFDSIYCPDVSNVYATDKNSLSSLDCLSNIVDRITSSEQPGLPLQDLASLSPVASTDSQPATPGASSSRLIYHVL

SEQ ID NO: 15329 - protein, 242 aa, Homo sapiens
MMMDLFETGSYFFYLDGENVTLQPLEVAEGSPLYPGSDGTLSPCQDQMPPEAGSDSSGEEHVLAPPGLQPPHCPGQCLIWACKTCKRKSAPTDRRKAATLRERRRLKKINEAFEALKRRTVANPNQRLPKVEILRSAISYIERLQDLLHRLDQQEKMQELGVDPFSYRPKQENLEGADFLRTCSSQWPSVSDHSRGLVITAKEGGASIDSSASSSLRCLSSIVDSISSEERKLPCVEEVVEK

SEQ ID NO: 15330 - protein, 610 aa, Homo sapiens
MQYSHHCEHLLERLNKQREAGFLCDCTIVIGEFQFKAHRNVLASFSEYFGAIYRSTSENNVFLDQSQVKADGFQKLLEFIYTGTLNLDSWNVKEIHQAADYLKVEEVVTKCKIKMEDFAFIANPSSTEISSITGNIELNQQTCLLTLRDYNNREKSEVSTDLIQANPKQGALAKKSSQTKKKKKAFNSPKTGQNKTVQYPSDILENASVELFLDANKLPTPVVEQVAQINDNSELELTSVVENTFPAQDIVHTVTVKRKRGKSQPNCALKEHSMSNIASVKSPYEAENSGEELDQRYSKAKPMCNTCGKVFSEASSLRRHMRIHKGVKPYVCHLCGKAFTQCNQLKTHVRTHTGEKPYKCELCDKGFAQKCQLVFHSRMHHGEEKPYKCDVCNLQFATSSNLKIHARKHSGEKPYVCDRCGQRFAQASTLTYHVRRHTGEKPYVCDTCGKAFAVSSSLITHSRKHTGEKPYICGICGKSFISSGELNKHFRSHTGERPFICELCGNSYTDIKNLKKHKTKVHSGADKTLDSSAEDHTLSEQDSIQKSPLSETMDVKPSDMTLPLALPLGTEDHHMLLPVTDTQSPTSDTLLRSTVNGYSEPQLIFLQQLY

SEQ ID NO: 15331 - protein, 320 aa, Homo sapiens
MELLSPPLRDVDLTAPDGSLCSFATTDDFYDDPCFDSPDLRFFEDLDPRLMHVGALLKPEEHSHFPAAVHPAPGAREDEHVRAPSGHHQAGRCLLWACKACKRKTTNADRRKAATMRERRRLSKVNEAFETLKRCTSSNPNQRLPKVEILRNAIRYIEGLQALLRDQDAAPPGAAAAFYAPGPLPPGRGGEHYSGDSDASSPRSNCSDGMMDYSGPPSGARRRNCYEGAYYNEAPSEPRPGKSAAVSSLDCLSSIVERISTESPAAPALLLADVPSESPPRRQEAAAPSEGESSGDPTQSPDAAPQCPAGANPNPIYQVL

SEQ ID NO: 15332 - protein, 224 aa, Homo sapiens
MELYETSPYFYQEPRFYDGENYLPVHLQGFEPPGYERTELTLSPEAPGPLEDKGLGTPEHCPGQCLPWACKVCKRKSVSVDRRRAATLREKRRLKKVNEAFEALKRSTLLNPNQRLPKVEILRSAIQYIERLQALLSSLNQEERDLRYRGGGGPQPGVPSECSSHSASCSPEWGSALEFSANPGDHLLTADPTDAHNLHSLTSIVDSITVEDVSVAFPDETMPN

SEQ ID NO: 15333 - protein, 1151 aa, Homo sapiens
MEVVDETEALQRFFEGHDINGALEPSNIDTSILEEYISKEDASDLCFPDISAPASSASYSHGQPAMPGSSGVHHLSPPGGGPSPGRHGPLPPPGYGTPLNCNNNNGMGAAPKPFPGGTGPPIKAEPKAPYAPGTLPDSPPDSGSEAYSPQQVNEPHLLRTITPETLCHVGVPSRLEHPPPPPAHLPGPPPPPPPPPHYPVLQRDLYMKAEPPIPHYAAMGQGLVPTDLHHTQQSQMLHQLLQQHGAELPTHPSKKRKHSESPPSTLNAQMLNGMIKQEPGTVTALPLHPTRAPSPPWPPQGPLSPGPGSLPLSIARVQTPPWHPPGAPSPGLLQDSDSLSGSYLDPNYQSIKWQPHQQNKWATLYDANYKELPMLTYRVDADKGFNFSVGDDAFVCQKKNHFQVTVYIGMLGEPKYVKTPEGLKPLDCFYLKLHGVKLEALNQSINIEQSQSDRSKRPFNPVTVNLPPEQVTKVTVGRLHFSETTANNMRKKGKPNPDQRYFMLVVALQAHAQNQNYTLAAQISERIIVRASNPGQFESDSDVLWQRAQVPDTVFHHGRVGINTDRPDEALVVHGNVKVMGSLMHPSDLRAKEHVQEVDTTEQLKRISRMRLVHYRYKPEFAASAGIEATAPETGVIAQEVKEILPEAVKDTGDMVFANGKTIENFLVVNKERIFMENVGAVKELCKLTDNLETRIDELERWSHKLAKLRRLDSLKSTGSSGAFSHAGSQFSRAGSVPHKKRPPKVASKSSSVVPDQACISQRFLQGTIIALVVVMAFSVVSMSTLYVLSLRTEEDLVDTDGSFAVSTSCLLALLRPQPPGGSEALCPWSSQSFGTTQLRQSPLTTGLPGIQPSLLLVTTSLTSSAPGSAVRTLDMCSSHPCPVICCSSPTTNPTTGPSLGPSFNPGHVLSPSPSPSTNRSGPSQMALLPVTNIRAKSWGLSVNGIGHSKHHKSLEPLASPAVPFPGGQGKAKNSPSLGFHGRARRGALQSSVGPAEPTWAQGQSASLLAEPVPSLTSIQVLENSMSITSQYCAPGDACRPGNFTYHIPVSSGTPLHLSLTLQMNSSSPVSVVLCSLRSKEEPCEEGSLPQSLHTHQDTQGTSHRWPITILSFREFTYHFRVALLGQANCSSEALAQPATDYHFHFYRLCD

SEQ ID NO: 15334 - protein, 828 aa, Homo sapiens
MAAEEADVDIEGDVVAAAGAQPGSGENTASVLQKDHYLDSSWRTENGLIPWTLDNTISEENRAVIEKMLLEEEYYLSKKSQPEKVWLDQKEDDKKYMKSLQKTAKIMVHSPTKPASYSVKWTIEEKELFEQGLAKFGRRWTKISKLIGSRTVLQVKSYARQYFKNKVKCGLDKETPNQKTGHNLQVKNEDKGTKAWTPSCLRGRADPNLNAVKIEKLSDDEEVDITDEVDELSSQTPQKNSSSDLLLDFPNSKMHETNQGEFITSDSQEALFSKSSRGCLQNEKQDETLSSSEITLWTEKQSNGDKKSIELNDQKFNELIKNCNKHDGRGIIVDARQLPSPEPCEIQKNLNDNEMLFHSCQMVEESHEEEELKPPEQEIEIDRNIIQEEEKQAIPEFFEGRQAKTPERYLKIRNYILDQWEICKPKYLNKTSVRPGLKNCGDVNCIGRIHTYLELIGAINFGCEQAVYNRPQTVDKVRIRDRKDAVEAYQLAQRLQSMRTRRRRVRDPWGNWCDAKDLEGQTFEHLSAEELAKRREEEKGRPVKSLKVPRPTKSSFDPFQLIPCNFFSEEKQEPFQVKVASEALLIMDLHAHVSMAEVIGLLGGRYSEVDKVVEVCAAEPCNSLSTGLQCEMDPVSQTQASETLAVRGFSVIGWYHSHPAFDPNPSLRDIDTQAKYQSYFSRGGAKFIGMIVSPYNRNNPLPYSQITCLVISEEISPDGSYRLPYKFEVQQMLEEPQWGLVFEKTRWIIEKYRLSHSSVPMDKIFRRDSDLTCLQKLLECMRKTLSKVTNCFMAEEFLTEIENLFLSNYKSNQENGVTEENCTKELLM

SEQ ID NO: 15335 - protein, 1121 aa, Homo sapiens
MSLENEDKRARTRSKALRGPPETTAADLSCPTPGCTGSGHVRGKYSRHRSLQSCPLAKKRKLEGAEAEHLVSKRKSHPLKLALDEGYGVDSDGSEDTEVKDASVSDESEGTLEGAEAETSGQDEIHRPETAEGRSPVKSHFGSNPIGSATASSKGSYSSYQGIIATSLLNLGQIAEETLVEEDLGQAAKPGPGIVHLLQEAAEGAASEEGEKGLFIQPEDAEEVVEVTTERSQDLCPQSLEDAASEESSKQKGILSHEEEDEEEEEEEEEEEEDEEEEEEEEEEEEEEEEEEEEEEEEEEEEEEEEAAPDVIFQEDTSHTSAQKAPELRGPESPSPKPEYSVIVEVRSDDDKDEDTHSRKSTVTDESEMQDMMTRGNLGLLEQAIALKAEQVRTVCEPGCPPAEQSQLGLGEPGKAAKPLDTVRKSYYSKDPSRAEKREIKCPTPGCDGTGHVTGLYPHHRSLSGCPHKDRIPPEILAMHENVLKCPTPGCTGQGHVNSNRNTHRSLSGCPIAAAEKLAKSHEKQQPQTGDPSKSSSNSDRILRPMCFVKQLEVPPYGSYRPNVAPATPRANLAKELEKFSKVTFDYASFDAQVFGKRMLAPKIQTSETSPKAFQCFDYSQDAEAAHMAATAILNLSTRCWEMPENLSTKPQDLPSKSVDIEVDENGTLDLSMHKHRKRENAFPSSSSCSSSPGVKSPDASQRHSSTSAPSSSMTSPQSSQASRQDEWDRPLDYTKPSRLREEEPEESEPAAHSFASSEADDQEVSEENFEERKYPGEVTLTNFKLKFLSKDIKKELLTCPTPGCDGSGHITGNYASHRSLSGCPLADKSLRNLMAAHSADLKCPTPGCDGSGHITGNYASHRSLSGCPRAKKSGVKVAPTKDDKEDPELMKCPVPGCVGLGHISGKYASHRSASGCPLAARRQKEGSLNGSSFSWKSLKNEGPTCPTPGCDGSGHANGSFLTHRSLSGCPRATFAGKKGKLSGDEVLSPKFKTSDVLENDEEIKQLNQEIRDLNESNSEMEAAMVQLQSQISSMEKNLKNIEEENKLIEEQNEALFLELSGLSQALIQSLANIRLPHMEPICEQNFDAYVSTLTDMYSNQDPENKDLLESIKQAVRGIQV

SEQ ID NO: 15336 - protein, 499 aa, Homo sapiens
MLERPPALAMPMPTEGTPPPLSGTPIPVPAYFRHAEPGFSLKRPRGLSRSLPPPPPAKGSIPISRLFPPRTPGWHQLQPRRVSFRGEASETLQSPGYDPSRPESFFQQSFQRLSRLGHGSYGEVFKVRSKEDGRLYAVKRSMSPFRGPKDRARKLAEVGSHEKVGQHPCCVRLEQAWEEGGILYLQTELCGPSLQQHCEAWGASLPEAQVWGYLRDTLLALAHLHSQGLVHLDVKPANIFLGPRGRCKLGDFGLLVELGTAGAGEVQEGDPRYMAPELLQGSYGTAADVFSLGLTILEVACNMELPHGGEGWQQLRQGYLPPEFTAGLSSELRSVLVMMLEPDPKLRATAEALLALPVLRQPRAWGVLWCMAAEALSRGWALWQALLALLCWLWHGLAHPASWLQPLGPPATPPGSPPCSLLLDSSLSSNWDDDSLGPSLSPEAVLARTVGSTSTPRSRCTPRDALDLSDINSEPPRGSFPSFEPRNLLSLFEDTLDPT

SEQ ID NO: 15337 - protein, 1186 aa, Homo sapiens
MEVDTEEKRHRTRSKGVRVPVEPAIQELFSCPTPGCDGSGHVSGKYARHRSVYGCPLAKKRKTQDKQPQEPAPKRKPFAVKADSSSVDECDDSDGTEDMDEKEEDEGEEYSEDNDEPGDEDEEDEEGDREEEEEIEEEDEDDDEDGEDVEDEEEEEEEEEEEEEEEENEDHQMNCHNTRIMQDTEKDDNNNDEYDNYDELVAKSLLNLGKIAEDAAYRARTESEMNSNTSNSLEDDSDKNENLGRKSELSLDLDSDVVRETVDSLKLLAQGHGVVLSENMNDRNYADSMSQQDSRNMNYVMLGKPMNNGLMEKMVEESDEEVCLSSLECLRNQCFDLARKLSETNPQERNPQQNMNIRQHVRPEEDFPGRTPDRNYSDMLNLMRLEEQLSPRSRVFASCAKEDGCHERDDDTTSVNSDRSEEVFDMTKGNLTLLEKAIALETERAKAMREKMAMEAGRRDNMRSYEDQSPRQLPGEDRKPKSSDSHVKKPYYGKDPSRTEKKESKCPTPGCDGTGHVTGLYPHHRSLSGCPHKDRVPPEILAMHESVLKCPTPGCTGRGHVNSNRNSHRSLSGCPIAAAEKLAKAQEKHQSCDVSKSSQASDRVLRPMCFVKQLEIPQYGYRNNVPTTTPRSNLAKELEKYSKTSFEYNSYDNHTYGKRAIAPKVQTRDISPKGYDDAKRYCKDPSPSSSSTSSYAPSSSSNLSCGGGSSASSTCSKSSFDYTHDMEAAHMAATAILNLSTRCREMPQNLSTKPQDLCATRNPDMEVDENGTLDLSMNKQRPRDSCCPILTPLEPMSPQQQAVMNNRCFQLGEGDCWDLPVDYTKMKPRRIDEDESKDITPEDLDPFQEALEERRYPGEVTIPSPKPKYPQCKESKKDLITLSGCPLADKSIRSMLATSSQELKCPTPGCDGSGHITGNYASHRSLSGCPRAKKSGIRIAQSKEDKEDQEPIRCPVPGCDGQGHITGKYASHRSASGCPLAAKRQKDGYLNGSQFSWKSVKTEGMSCPTPGCDGSGHVSGSFLTHRSLSGCPRATSAMKKAKLSGEQMLTIKQRASNGIENDEEIKQLDEEIKELNESNSQMEADMIKLRTQITTMESNLKTIEEENKVIEQQNESLLHELANLSQSLIHSLANIQLPHMDPINEQNFDAYVTTLTEMYTNQDRYQSPENKALLENIKQAVRGIQV

SEQ ID NO: 15338 - protein, 734 aa, Homo sapiens
MRPAVLGSPDRAPPEDEGPVMVKLEDSEEEGEAALWDPGPEAARLRFRCFRYEEATGPQEALAQLRELCRQWLRPEVRSKEQMLELLVLEQFLGALPPEIQARVQGQRPGSPEEAAALVDGLRREPGGPRRWVTVQVQGQEVLSEKMEPSSFQPLPETEPPTPEPGPKTPPRTMQESPLGLQVKEESEVTEDSDFLESGPLAATQESVPTLLPEEAQRCGTVLDQIFPHSKTGPEGPSWREHPRALWHEEAGGIFSPGFALQLGSISAGPGSVSPHLHVPWDLGMAGLSGQIQSPSREGGFAHALLLPSDLRSEQDPTDEDPCRGVGPALITTRWRSPRGRSRGRPSTGGGVVRGGRCDVCGKVFSQRSNLLRHQKIHTGERPFVCSECGRSFSRSSHLLRHQLTHTEERPFVCGDCGQGFVRSARLEEHRRVHTGEQPFRCAECGQSFRQRSNLLQHQRIHGDPPGPGAKPPAPPGAPEPPGPFPCSECRESFARRAVLLEHQAVHTGDKSFGCVECGERFGRRSVLLQHRRVHSGERPFACAECGQSFRQRSNLTQHRRIHTGERPFACAECGKAFRQRPTLTQHLRVHTGEKPFACPECGQRFSQRLKLTRHQRTHTGEKPYHCGECGLGFTQVSRLTEHQRIHTGERPFACPECGQSFRQHANLTQHRRIHTGERPYACPECGKAFRQRPTLTQHLRTHRREKPFACQDCGRRFHQSTKLIQHQRVHSAE

SEQ ID NO: 15339 - protein, 305 aa, Homo sapiens
MSVDPACPQSLPCFEASDCKESSPMPVICGPEENYPSLQMSSAEMPHTETVSPLPSSMDLLIQDSPDSSTSPKGKQPTSAEKSVAKKEDKVPVKKQKTRTVFSSTQLCVLNDRFQRQKYLSLQQMQELSNILNLSYKQVKTWFQNQRMKSKRWQKNNWPKNSNGVTQKASAPTYPSLYSSYHQGCLVNPTGNLPMWSNQTWNNSTWSNQTQNIQSWSNHSWNTQTWCTQSWNNQAWNSPFYNCGEESLQSCMQFQPNSPASDLEAALEAAGEGLNVIQQTTRYFSTPQTMDLFLNYSMNMQPEDV

SEQ ID NO: 15340 - protein, 188 aa, Homo sapiens
MHRARWLTPVIPALWEAEAGRSRGQEIETILANKKQSAMPWDQDPEQSTGNYSEDEQNGKQKWREEGEAGRKREREKEEKNEKELQDEQENKRKRENEKQKQYPEKRLVSKSLMHTLWAKFKLNRCPTIQESLSLSFEFDMTHKQISQWFCKTRKKYNKEMSKRKHKKKHMRWRSLCCQGWSRTPALK

SEQ ID NO: 15341 - protein, 232 aa, Homo sapiens
MDLPIQDSHDSSTSPKGKQPTTAEKSATKKEDKVPVKKQKTRTVFSSTQLCVLNDRFQRQKYLSLQQMQELSNILNLSYKQVKTWFQNQRMKSKRWQKNNWLKNSNGVTQGCLVNPTGNLPMWSNQTWNNSTWSNQTQNIQSWSNHSWNTQTWCTQSWNNQAWNSPFYNCGEESLQSCMQFQPNSPASDLQAALEAAGEGLNVIQQTTRYFNTPQTMDLFLNYSMNMQPEDV

SEQ ID NO: 15342 - protein, 305 aa, Homo sapiens
MSVDPACPQSLPCFEESDCKESSPMPVICGPEENYPSLQMSSAEMPHTETVSPLPSSMDLLIQDSPDSSTSPKGKQPTSAENSVAKKEDKVPVKKQKTRTVFSSTQLCVLNDRFQRQKYLSLQQMQELSNILNLSYKQVKTWFQNQRMKSKRWQKNNWPKNSNGVTQKASAPTYPSLYSSYHQGCLVNPTGNLPMWSNQTWNNSTWSNQTQNIQSWSNHSWNTQTWCTQSWNNQAWNSPFYNCGEESLQSCMHFQPNSPASDLEAALEAAGEGLNVIQQTTRYFSTPQTMDLFLNYSMNMQPEDV

SEQ ID NO: 15343 - protein, 1441 aa, Homo sapiens
MSGLGDSSSDPANPDSHKRKGSPCDTLASSTEKRRREQENKYLEELAELLSANISDIDSLSVKPDKCKILKKTVDQIQLMKRMEQEKSTTDDDVQKSDISSSSQGVIEKESLGPLLLEALDGFFFVVNCEGRIVFVSENVTSYLGYNQEELMNTSVYSILHVGDHAEFVKNLLPKSLVNGVPWPQEATRRNSHTFNCRMLIHPPDEPGTENQEACQRYEVMQCFTVSQPKSIQEDGEDFQSCLICIARRLPRPPAITGVESFMTKQDTTGKIISIDTSSLRAAGRTGWEDLVRKCIYAFFQPQGREPSYARQLFQEVMTRGTASSPSYRFILNDGTMLSAHTKCKLCYPQSPDMQPFIMGIHIIDREHSGLSPQDDTNSGMSIPRVNPSVNPSISPAHGVARSSTLPPSNSNMVSTRINRQQSSDLHSSSHSNSSNSQGSFGCSPGSQIVANVALNQGQASSQSSNPSLNLNNSPMEGTGISLAQFMSPRRQVTSGLATRPRMPNNSFPPNISTLSSPVGMTSSACNNNNRSYSNIPVTSLQGMNEGPNNSVGFSASSPVLRQMSSQNSPSRLNIQPAKAESKDNKEIASILNEMIQSDNSSSDGKPLDSGLLHNNDRLSDGDSKYSQTSHKLVQLLTTTAEQQLRHADIDTSCKDVLSCTGTSNSASANSSGGSCPSSHSSLTERHKILHRLLQEGSPSDITTLSVEPDKKDSASTSVSVTGQVQGNSSIKLELDASKKKESKDHQLLRYLLDKDEKDLRSTPNLSLDDVKVKVEKKEQMDPCNTNPTPMTKPTPEEIKLEAQSQFTADLDQFDQLLPTLEKAAQLPGLCETDRMDGAVTSVTIKSEILPASLQSATARPTSRLNRLPELELEAIDNQFGQPGTGDQIPWTNNTVTAINQSKSEDQCISSQLDELLCPPTTVEGRNDEKALLEQLVSFLSGKDETELAELDRALGIDKLVQGGGLDVLSERFPPQQATPPLIMEERPNLYSQPYSSPSPTANLPSPFQGMVRQKPSLGTMPVQVTPPRGAFSPGMGMQPRQTLNRPPAAPNQLRLQLQQRLQGQQQLIHQNRQAILNQFAATAPVGINMRSGMQQQITPQPPLNAQMLAQRQRELYSQQHRQRQLIQQQRAMLMRQQSFGNNLPPSSGLPVQMGNPRLPQGAPQQFPYPPNYGTNPGTPPASTSPFSQLAANPEASLANRNSMVSRGMTGNIGGQFGTGINPQMQQNVFQYPGAGMVPQGEANFAPSLSPGSSMVPMPIPPPQSSLLQQTPPASGYQSPDMKAWQQGAIGNNNVFSQAVQNQPTPAQPGVYNNMSITVSMAGGNTNVQNMNPMMAQMQMSSLQMPGMNTVCPEQINDPALRHTGLYCNQLSSTDLLKTEADGTQQVQQVQVFADVQCTVNLVGGDPYLNQPGPLGTQKPTSGPQTPQAQQKSLLQQLLTE

SEQ ID NO: 15344 - protein, 1464 aa, Homo sapiens
MSGMGENTSDPSRAETRKRKECPDQLGPSPKRNTEKRNREQENKYIEELAELIFANFNDIDNFNFKPDKCAILKETVKQIRQIKEQEKAAAANIDEVQKSDVSSTGQGVIDKDALGPMMLEALDGFFFVVNLEGNVVFVSENVTQYLRYNQEELMNKSVYSILHVGDHTEFVKNLLPKSIVNGGSWSGEPPRRNSHTFNCRMLVKPLPDSEEEGHDNQEAHQKYETMQCFAVSQPKSIKEEGEDLQSCLICVARRVPMKERPVLPSSESFTTRQDLQGKITSLDTSTMRAAMKPGWEDLVRRCIQKFHAQHEGESVSYAKRHHHEVLRQGLAFSQIYRFSLSDGTLVAAQTKSKLIRSQTTNEPQLVISLHMLHREQNVCVMNPDLTGQTMGKPLNPISSNSPAHQALCSGNPGQDMTLSSNINFPINGPKEQMGMPMGRFGGSGGMNHVSGMQATTPQGSNYALKMNSPSQSSPGMNPGQPTSMLSPRHRMSPGVAGSPRIPPSQFSPAGSLHSPVGVCSSTGNSHSYTNSSLNALQALSEGHGVSLGSSLASPDLKMGNLQNSPVNMNPPPLSKMGSLDSKDCFGLYGEPSEGTTGQAESSCHPGEQKETNDPNLPPAVSSERADGQSRLHDSKGQTKLLQLLTTKSDQMEPSPLASSLSDTNKDSTGSLPGSGSTHGTSLKEKHKILHRLLQDSSSPVDLAKLTAEATGKDLSQESSSTAPGSEVTIKQEPVSPKKKENALLRYLLDKDDTKDIGLPEITPKLERLDSKTDPASNTKLIAMKTEKEEMSFEPGDQPGSELDNLEEILDDLQNSQLPQLFPDTRPGAPAGSVDKQAIINDLMQLTAENSPVTPVGAQKTALRISQSTFNNPRPGQLGRLLPNQNLPLDITLQSPTGAGPFPPIRNSSPYSVIPQPGMMGNQGMIGNQGNLGNSSTGMIGNSASRPTMPSGEWAPQSSAVRVTCAATTSAMNRPVQGGMIRNPAASIPMRPSSQPGQRQTLQSQVMNIGPSELEMNMGGPQYSQQQAPPNQTAPWPESILPIDQASFASQNRQPFGSSPDDLLCPHPAAESPSDEGALLDQLYLALRNFDGLEEIDRALGIPELVSQSQAVDPEQFSSQDSNIMLEQKAPVFPQQYASQAQMAQGSYSPMQDPNFHTMGQRPSYATLRMQPRPGLRPTGLVQNQPNQLRLQLQHRLQAQQNRQPLMNQISNVSNVNLTLRPGVPTQAPINAQMLAQRQREILNQHLRQRQMHQQQQVQQRTLMMRGQGLNMTPSMVAPSGMPATMSNPRIPQANAQQFPFPPNYGISQQPDPGFTGATTPQSPLMSPRMAHTQSPMMQQSQANPAYQAPSDINGWAQGNMGGNSMFSQQSPPHFGQQANTSMYSNNMNINVSMATNTGGMSSMNQMTGQISMTSVTSVPTSGLSSMGPEQVNDPALRGGNLFPNQLPGMDMIKQEGDTTRKYC

SEQ ID NO: 15345 - protein, 1424 aa, Homo sapiens
MSGLGENLDPLASDSRKRKLPCDTPGQGLTCSGEKRRREQESKYIEELAELISANLSDIDNFNVKPDKCAILKETVRQIRQIKEQGKTISNDDDVQKADVSSTGQGVIDKDSLGPLLLQALDGFLFVVNRDGNIVFVSENVTQYLQYKQEDLVNTSVYNILHEEDRKDFLKNLPKSTVNGVSWTNETQRQKSHTFNCRMLMKTPHDILEDINASPEMRQRYETMQCFALSQPRAMMEEGEDLQSCMICVARRITTGERTFPSNPESFITRHDLSGKVVNIDTNSLRSSMRPGFEDIIRRCIQRFFSLNDGQSWSQKRHYQEAYLNGHAETPVYRFSLADGTIVTAQTKSKLFRNPVTNDRHGFVSTHFLQREQNGYRPNPNPVGQGIRPPMAGCNSSVGGMSMSPNQGLQMPSSRAYGLADPSTTGQMSGARYGGSSNIASLTPGPGMQSPSSYQNNNYGLNMSSPPHGSPGLAPNQQNIMISPRNRGSPKIASHQFSPVAGVHSPMASSGNTGNHSFSSSSLSALQAISEGVGTSLLSTLSSPGPKLDNSPNMNITQPSKVSNQDSKSPLGFYCDQNPVESSMCQSNSRDHLSDKESKESSVEGAENQRGPLESKGHKKLLQLLTCSSDDRGHSSLTNSPLDSSCKESSVSVTSPSGVSSSTSGGVSSTSNMHGSLLQEKHRILHKLLQNGNSPAEVAKITAEATGKDTSSITSCGDGNVVKQEQLSPKKKENNALLRYLLDRDDPSDALSKELQPQVEGVDNKMSQCTSSTIPSSSQEKDPKIKTETSEEGSGDLDNLDAILGDLTSSDFYNNSISSNGSHLGTKQQVFQGTNSLGLKSSQSVQSIRPPYNRAVSLDSPVSVGSSPPVKNISAFPMLPKQPMLGGNPRMMDSQENYGSSMGGPNRNVTVTQTPSSGDWGLPNSKAGRMEPMNSNSMGRPGGDYNTSLPRPALGGSIPTLPLRSNSIPGARPVLQQQQQMLQMRPGEIPMGMGANPYGQAAASNQLGSWPDGMLSMEQVSHGTQNRPLLRNSLDDLVGPPSNLEGQSDERALLDQLHTLLSNTDATGLEEIDRALGIPELVNQGQALEPKQDAFQGQEAAVMMDQKAGLYGQTYPAQGPPMQGGFHLQGQSPSFNSMMNQMNQQGNFPLQGMHPRANIMRPRTNTPKQLRMQLQQRLQGQQFLNQSRQALELKMENPTAGGAAVMRPMMQPQVSSQQGFLNAQMVAQRSRELLSHHFRQQRVAMMMQQQQQQQQQQQQQQQQQQQQQQQQQQQQQTQAFSPPPNVTASPSMDGLLAGPTMPQAPPQQFPYQPNYGMGQQPDPAFGRVSSPPNAMMSSRMGPSQNPMMQHPQAASIYQSSEMKGWPSGNLARNSSFSQQQFAHQGNPAVYSMVHMNGSSGHMGQMNMNPMPMSGMPMGPDQKYC

SEQ ID NO: 15346 - protein, 614 aa, Homo sapiens
MNTFQDQSGSSSNREPLLRCSDARRDLELAIGGVLRAEQQIKDNLREVKAQIHSCISRHLECLRSREVWLYEQVDLIYQLKEETLQQQAQQLYSLLGQFNCLTHQLECTQNKDLANQVSVCLERLGSLTLKPEDSTVLLFEADTITLRQTITTFGSLKTIQIPEHLMAHASSANIGPFLEKRGCISMPEQKSASGIVAVPFSEWLLGSKPASGYQAPYIPSTDPQDWLTQKQTLENSQTSSRACNFFNNVGGNLKGLENWLLKSEKSSYQKCNSHSTTSSFSIEMEKVGDQELPDQDEMDLSDWLVTPQESHKLRKPENGSRETSEKFKLLFQSYNVNDWLVKTDSCTNCQGNQPKGVEIENLGNLKCLNDHLEAKKPLSTPSMVTEDWLVQNHQDPCKVEEVCRANEPCTSFAECVCDENCEKEALYKWLLKKEGKDKNGMPVEPKPEPEKHKDSLNMWLCPRKEVIEQTKAPKAMTPSRIADSFQVIKNSPLSEWLIRPPYKEGSPKEVPGTEDRAGKQKFKSPMNTSWCSFNTADWVLPGKKMGNLSQLSSGEDKWLLRKKAQEVLLNSPLQEEHNFPPDHYGLPAVCDLFACMQLKVDKEKWLYRTPLQM

SEQ ID NO: 15347 - protein, 579 aa, Homo sapiens
MNTAPSRPSPTRRDPYGFGDSRDSRRDRSPIRGSPRREPRDGRNGRDARDSRDIRDPRDLRDHRHSRDLRDHRDSRSVRDVRDVRDLRDFRDLRDSRDFRDQRDPMYDRYRDMRDSRDPMYRREGSYDRYLRMDDYCRRKDDSYFDRYRDSFDGRGPPGPESQSRAKERLKREERRREELYRQYFEEIQRRFDAERPVDCSVIVVNKQTKDYAESVGRKVRDLGMVVDLIFLNTEVSLSQALEDVSRGGSPFAIVITQQHQIHRSCTVNIMFGTPQEHRNMPQADAMVLVARNYERYKNECREKEREEIARQAAKMADEAILQERERGGPEEGVRGGHPPAIQSLINLLADNRYLTAEETDKIINYLRERKERLMRSSTDSLPGPISRQPLGATSGASLKTQPSSQPLQSGQVLPSATPTPSAPPTSQQELQAKILSLFNSGTVTANSSSASPSVAAGNTPNQNFSTAANSQPQQRSQASGNQPPSILGQGGSAQNMGPRPGAPSQGLFGQPSSRLAPASNMTSQRPVSSTGINFDNPSVQKALDTLIQSGPALSHLVSQTTAQMGQPQAPMGSYQRHY

SEQ ID NO: 15348 - protein, 2063 aa, Homo sapiens
MVLDDLPNLEDIYTSLCSSTMEDSEMDFDSGLEDDDTKSDSILEDSTIFVAFKGNIDDKDFKWKLDAILKNVPNLLHMESSKLKVQKVEPWNSVRVTFNIPREAAERLRILAQSNNQQLRDLGILSVQIEGEGAINLALAQNRSQDVRMNGPMGAGNSVRMEAGFPMASGPGIIRMNNPATVMIPPGGNVSSSMMAPGPNPELQPRTPRPASQSDAMDPLLSGLHIQQQSHPSGSLAPPHHPMQPVSVNRQMNPANFPQLQQQQQQQQQQQQQQQQQQQQQQQQQLQARPPQQHQQQQPQGIRPQFTAPTQVPVPPGWNQLPSGALQPPPAQGSLGTMTANQGWKKAPLPGPMQQQLQARPSLATVQTPSHPPPPYPFGSQQASQAHTNFPQMSNPGQFTAPQMKSLQGGPSRVPTPLQQPHLTNKSPASSPSSFQQGSPASSPTVNQTQQQMGPRPPQNNPLPQGFQQPVSSPGRNPMVQQGNVPPNFMVMQQQPPNQGPQSLHPGLGGMPKRLPPGFSAGQANPNFMQGQVPSTTATTPGNSGAPQLQANQNVQHAGGQGAGPPQNQMQVSHGPPNMMQPSLMGIHGNMNNQQAGTSGVPQVNLSNMQGQPQQGPPSQLMGMHQQIVPSQGQMVQQQGTLNPQNPMILSRAQLMPQGQMMVNPPSQNLGPSPQRMTPPKQMLSQQGPQMMAPHNQMMGPQGQVLLQQNPMIEQIMTNQMQGNKQQFNTQNQSNVMPGPAQIMRGPTPNMQGNMVQFTGQMSGQMLPQQGPVNNSPSQVMGIQGQVLRPPGPSPHMAQQHGDPATTANNDVSLSQMMPDVSIQQTNMVPPHVQAMQGNSASGNHFSGHGMSFNAPFSGAPNGNQMSCGQNPGFPVNKDVTLTSPLLVNLLQSDISAGHFGVNNKQNNTNANKPKKKKPPRKKKNSQQDLNTPDTRPAGLEEADQPPLPGEQGINLDNSGPKLPEFSNRPPGYPSQPVEQRPLQQMPPQLMQHVAPPPQPPQQQPQPQLPQQQQPPPPSQPQSQQQQQQQQQMMMMLMMQQDPKSVRLPVSQNVHPPRGPLNPDSQRMPMQQSGSVPVMVSLQGPASVPPSPDKQRMPMPVNTPLGSNSRKMVYQESPQNPSSSPLAEMASLPEASGSEAPSVPGGPNNMPSHVVLPQNQLMMTGPKPGPSPLSATQGATPQQPPVNSLPSSHGHHFPNVAAPTQTSRPKTPNRASPRPYYPQTPNNRPPSTEPSEISLSPERLNASIAGLFPPQINIPLPPRPNLNRGFDQQGLNPTTLKAIGQAPSNLTMNPSNFATPQTHKLDSVVVNSGKQSNSGATKRASPSNSRRSSPGSSRKTTPSPGRQNSKAPKLTLASQTNAALLQNVELPRNVLVSPTPLANPPVPGSFPNNSGLNPQNSTVSVAAVGGVVEDNKESLNVPQDSDCQNSQSRKEQVNIELKAVPAQEVKMVVPEDQSKKDGQPSDPNKLPSVEENKNLVSPAMREAPTSLSQLLDNSGAPNVTIKPPGLTDLEVTPPVVSGEDLKKASVIPTLQDLSSSKEPSNSLNLPHSNELCSSLVHPELSEVSSNVAPSIPPVMSRPVSSSSISTPLPPNQITVFVTSNPITTSANTSAALPTHLQSALMSTVVTMPNAGSKVMVSEGQSAAQSNARPQFITPVFINSSSIIQVMKGSQPSTIPAAPLTTNSGLMPPSVAVVGPLHIPQNIKFSSAPVPPNALSSSPAPNIQTGRPLVLSSRATPVQLPSPPCTSSPVVPSHPPVQQVKELNPDEASPQVNTSADQNTLPSSQSTTMVSPLLTNSPGSSGNRRSPVSSSKGKGKVDKIGQILLTKACKKVTGSLEKGEEQYGADGETEGQGLDTTAPGLMGTEQLSTELDSKTPTPPAPTLLKMTSSPVGPGTASAGPSLPGGALPTSVRSIVTTLVPSELISAVPTTKSNHGGIASESLAGGLVEEKVGSHPELLPSIAPSQNLVSKETSTTALQASVARPELEVNAAIVSGQSSEPKEIVEKSKIPGRRNSRTEEPTVASESVENGHRKRSSRPASASSSTKDITSAVQSKRRKSK

SEQ ID NO: 15349 - protein, 942 aa, Homo sapiens
MDTKEEKKERKQSYFARLKKKKQAKQNAETASAVATRTHTGKEDNNTVVLEPDKCNIAVEEEYMTDEKKKRKSNQLKEIRRTELKRYYSIDDNQNKTHDKKEKKMVVQKPHGTMEYTAGNQDTLNSIALKFNITPNKLVELNKLFTHTIVPGQVLFVPDANSPSSTLRLSSSSPGATVSPSSSDAEYDKLPDADLARKALKPIERVLSSTSEEDEPGVVKFLKMNCRYFTDGKGVVGGVMIVTPNNIMFDPHKSDPLVIENGCEEYGLICPMEEVVSIALYNDISHMKIKDALPSDLPQDLCPLYRPGEWEDLASEKDINPFSKFKSINKEKRQQNGEKIMTSDSRPIVPLEKSTGHTPTKPSGSSVSEKLKKLDSSRETSHGSPTVTKLSKEPSDTSSAFESTAKENFLGEDDDFVDLEELSSQTGGGMHKKDTLKECLSLDPEERKKAESQINNSAVEMQVQSALAFLGTENDVELKGALDLETCEKQDIMPEVDKQSGSPESRVENTLNIHEDLDKVKLIEYYLTKNKEGPQVSENLQKTELSDGKSIEPGGIDITLSSSLSQAGDPITEGNKEPDKTWVKKGEPLPVKLNSSTEANVIKEALDSSLESTLDNSCQGAQMDNKSEVQLWLLKRIQVPIEDILPSKEEKSKTPPMFLCIKVGKPMRKSFATHTAAMVQQYGKRRKQPEYWFAVPRERVDHLYTFFVQWSPDVYGKDAKEQGFVVVEKEELNMIDNFFSEPTTKSWEIITVEEAKRRKSTCSYYEDEDEEVLPVLRPHSALLENMHIEQLARRLPARVQGYPWRLAYSTLEHGTSLKTLYRKSASLDSPVLLVIKDMDNQIFGAYATHPFKFSDHYYGTGETFLYTFSPHFKVFKWSGENSYFINGDISSLELGGGGGRFGLWLDADLYHGRSNSCSTFNNDILSKKEDFIVQDLEVWAFD

SEQ ID NO: 15350 - protein, 2440 aa, Homo sapiens
MSSSGYPPNQGAFSTEQSRYPPHSVQYTFPNTRHQQEFAVPDYRSSHLEVSQASQLLQQQQQQQLRRRPSLLSEFHPGSDRPQERRTSYEPFHPGPSPVDHDSLESKRPRLEQVSDSHFQRVSAAVLPLVHPLPEGLRASADAKKDPAFGGKHEAPSSPISGQPCGDDQNASPSKLSKEELIQSMDRVDREIAKVEQQILKLKKKQQQLEEEAAKPPEPEKPVSPPPVEQKHRSIVQIIYDENRKKAEEAHKIFEGLGPKVELPLYNQPSDTKVYHENIKTNQVMRKKLILFFKRRNHARKQREQKICQRYDQLMEAWEKKVDRIENNPRRKAKESKTREYYEKQFPEIRKQREQQERFQRVGQRGAGLSATIARSEHEISEIIDGLSEQENNEKQMRQLSVIPPMMFDAEQRRVKFINMNGLMEDPMKVYKDRQFMNVWTDHEKEIFKDKFIQHPKNFGLIASYLERKSVPDCVLYYYLTKKNENYKALVRRNYGKRRGRNQQIARPSQEEKVEEKEEDKAEKTEKKEEEKKDEEEKDEKEDSKENTKEKDKIDGTAEETEEREQATPRGRKTANSQGRRKGRITRSMTNEAAAASAAAAAATEEPPPPLPPPPEPISTEPVETSRWTEEEMEVAKKGLVEHGRNWAAIAKMVGTKSEAQCKNFYFNYKRRHNLDNLLQQHKQKTSRKPREERDVSQCESVASTVSAQEDEDIEASNEEENPEDSEVEAVKPSEDSPENATSRGNTEPAVELEPTTETAPSTSPSLAVPSTKPAEDESVETQVNDSISAETAEQMDVDQQEHSAEEGSVCDPPPATKADSVDVEVRVPENHASKVEGDNTKERDLDRASEKVEPRDEDLVVAQQINAQRPEPQSDNDSSATCSADEDVDGEPERQRMFPMDSKPSLLNPTGSILVSSPLKPNPLDLPQLQHRAAVIPPMVSCTPCNIPIGTPVSGYALYQRHIKAMHESALLEEQRQRQEQIDLECRSSTSPCGTSKSPNREWEVLQPAPHQVITNLPEGVRLPTTRPTRPPPPLIPSSKTTVASEKPSFIMGGSISQGTPGTYLTSHNQASYTQETPKPSVGSISLGLPRQQESAKSATLPYIKQEEFSPRSQNSQPEGLLVRAQHEGVVRGTAGAIQEGSITRGTPTSKISVESIPSLRGSITQGTPALPQTGIPTEALVKGSISRMPIEDSSPEKGREEAASKGHVIYEGKSGHILSYDNIKNAREGTRSPRTAHEISLKRSYESVEGNIKQGMSMRESPVSAPLEGLICRALPRGSPHSDLKERTVLSGSIMQGTPRATTESFEDGLKYPKQIKRESPPIRAFEGAITKGKPYDGITTIKEMGRSIHEIPRQDILTQESRKTPEVVQSTRPIIEGSISQGTPIKFDNNSGQSAIKHNVKSLITGPSKLSRGMPPLEIVPENIKVVERGKYEDVKAGETVRSRHTSVVSSGPSVLRSTLHEAPKAQLSPGIYDDTSARRTPVSYQNTMSRGSPMMNRTSDVTISSNKSTNHERKSTLTPTQRESIPAKSPVPGVDPVVSHSPFDPHHRGSTAGEVYRSHLPTHLDPAMPFHRALDPAAAAYLFQRQLSPTPGYPSQYQLYAMENTRQTILNDYITSQQMQVNLRPDVARGLSPREQPLGLPYPATRGIIDLTNMPPTILVPHPGGTSTPPMDRITYIPGTQITFPPRPYNSASMSPGHPTHLAAAASAEREREREREKERERERIAAASSDLYLRPGSEQPGRPGSHGYVRSPSPSVRTQETMLQQRPSVFQGTNGTSVITPLDPTAQLRIMPLPAGGPSISQGLPASRYNTAADALAALVDAAASAPQMDVSKTKESKHEAARLEENLRSRSAAVSEQQQLEQKTLEVEKRSVQCLYTSSAFPSGKPQPHSSVVYSEAGKDKGPPPKSRYEEELRTRGKTTITAANFIDVIITRQIASDKDARERGSQSSDSSSSLSSHRYETPSDAIEVISPASSPAPPQEKLQTYQPEVVKANQAENDPTRQYEGPLHHYRPQQESPSPQQQLPPSSQAEGMGQVPRTHRLITLADHICQIITQDFARNQVSSQTPQQPPTSTFQNSPSALVSTPVRTKTSNRYSPESQAQSVHHQRPGSRVSPENLVDKSRGSRPGKSPERSHVSSEPYEPISPPQVPVVHEKQDSLLLLSQRGAEPAEQRNDARSPGSISYLPSFFTKLENTSPMVKSKKQEIFRKLNSSGGGDSDMAAAQPGTEIFNLPAVTTSGSVSSRGHSFADPASNLGLEDIIRKALMGSFDDKVEDHGVVMSQPMGVVPGTANTSVVTSGETRREEGDPSPHSGGVCKPKLISKSNSRKSKSPIPGQGYLGTERPSSVSSVHSEGDYHRQTPGWAWEDRPSSTGSTQFPYNPLTMRMLSSTPPTPIACAPSAVNQAAPHQQNRIWEREPAPLLSAQYETLSDSDD

SEQ ID NO: 15351 - protein, 2525 aa, Homo sapiens
MSGSTQPVAQTWRATEPRYPPHSLSYPVQIARTHTDVGLLEYQHHSRDYASHLSPGSIIQPQRRRPSLLSEFQPGNERSQELHLRPESHSYLPELGKSEMEFIESKRPRLELLPDPLLRPSPLLATGQPAGSEDLTKDRSLTGKLEPVSPPSPPHTDPELELVPPRLSKEELIQNMDRVDREITMVEQQISKLKKKQQQLEEEAAKPPEPEKPVSPPPIESKHRSLVQIIYDENRKKAEAAHRILEGLGPQVELPLYNQPSDTRQYHENIKINQAMRKKLILYFKRRNHARKQWEQKFCQRYDQLMEAWEKKVERIENNPRRRAKESKVREYYEKQFPEIRKQRELQERMQSRVGQRGSGLSMSAARSEHEVSEIIDGLSEQENLEKQMRQLAVIPPMLYDADQQRIKFINMNGLMADPMKVYKDRQVMNMWSEQEKETFREKFMQHPKNFGLIASFLERKTVAECVLYYYLTKKNENYKSLVRRSYRRRGKSQQQQQQQQQQQQQQQQQPMPRSSQEEKDEKEKEKEAEKEEEKPEVENDKEDLLKEKTDDTSGEDNDEKEAVASKGRKTANSQGRRKGRITRSMANEANSEEAITPQQSAELASMELNESSRWTEEEMETAKKGLLEHGRNWSAIARMVGSKTVSQCKNFYFNYKKRQNLDEILQQHKLKMEKERNARRKKKKAPAAASEEAAFPPVVEDEEMEASGVSGNEEEMVEEAEALHASGNEVPRGECSGPATVNNSSDTESIPSPHTEAAKDTGQNGPKPPATLGADGPPPGPPTPPPEDIPAPTEPTPASEATGAPTPPPAPPSPSAPPPVVPKEEKEEETAAAPPVEEGEEQKPPAAEELAVDTGKAEEPVKSECTEEAEEGPAKGKDAEAAEATAEGALKAEKKEGGSGRATTAKSSGAPQDSDSSATCSADEVDEAEGGDKNRLLSPRPSLLTPTGDPRANASPQKPLDLKQLKQRAAAIPPIQVTKVHEPPREDAAPTKPAPPAPPPPQNLQPESDAPQQPGSSPRGKSRSPAPPADKEAEKPVFFPAFAAEAQKLPGDPPCWTSGLPFPVPPREVIKASPHAPDPSAFSYAPPGHPLPLGLHDTARPVLPRPPTISNPPPLISSAKHPSVLERQIGAISQGMSVQLHVPYSEHAKAPVGPVTMGLPLPMDPKKLAPFSGVKQEQLSPRGQAGPPESLGVPTAQEASVLRGTALGSVPGGSITKGIPSTRVPSDSAITYRGSITHGTPADVLYKGTITRIIGEDSPSRLDRGREDSLPKGHVIYEGKKGHVLSYEGGMSVTQCSKEDGRSSSGPPHETAAPKRTYDMMEGRVGRAISSASIEGLMGRAIPPERHSPHHLKEQHHIRGSITQGIPRSYVEAQEDYLRREAKLLKREGTPPPPPPSRDLTEAYKTQALGPLKLKPAHEGLVATVKEAGRSIHEIPREELRHTPELPLAPRPLKEGSITQGTPLKYDTGASTTGSKKHDVRSLIGSPGRTFPPVHPLDVMADARALERACYEESLKSRPGTASSSGGSIARGAPVIVPELGKPRQSPLTYEDHGAPFAGHLPRGSPVTTREPTPRLQEGSLSSSKASQDRKLTSTPREIAKSPHSTVPEHHPHPISPYEHLLRGVSGVDLYRSHIPLAFDPTSIPRGIPLDAAAAYYLPRHLAPNPTYPHLYPPYLIRGYPDTAALENRQTIINDYITSQQMHHNAATAMAQRADMLRGLSPRESSLALNYAAGPRGIIDLSQVPHLPVLVPPTPGTPATAMDRLAYLPTAPQPFSSRHSSSPLSPGGPTHLTKPTTTSSSERERDRDRERDRDREREKSILTSTTTVEHAPIWRPGTEQSSGSSGSSGGGGGSSSRPASHSHAHQHSPISPRTQDALQQRPSVLHNTGMKGIITAVEPSTPTVLRSTSTSSPVRPAATFPPATHCPLGGTLDGVYPTLMEPVLLPKEAPRVARPERPRADTGHAFLAKPPARSGLEPASSPSKGSEPRPLVPPVSGHATIARTPAKNLAPHHASPDPPAPPASASDPHREKTQSKPFSIQELELRSLGYHGSSYSPEGVEPVSPVSSPSLTHDKGLPKHLEELDKSHLEGELRPKQPGPVKLGGEAAHLPHLRPLPESQPSSSPLLQTAPGVKGHQRVVTLAQHISEVITQDYTRHHPQQLSAPLPAPLYSFPGASCPVLDLRRPPSDLYLPPPDHGAPARGSPHSEGGKRSPEPNKTSVLGGGEDGIEPVSPPEGMTEPGHSRSAVYPLLYRDGEQTEPSRMGSKSPGNTSQPPAFFSKLTESNSAMVKSKKQEINKKLNTHNRNEPEYNISQPGTEIFNMPAITGTGLMTYRSQAVQEHASTNMGLEAIIRKALMGKYDQWEESPPLSANAFNPLNASASLPAAMPITAADGRSDHTLTSPGGGGKAKVSGRPSSRKAKSPAPGLASGDRPPSVSSVHSEGDCNRRTPLTNRVWEDRPSSAGSTPFPYNPLIMRLQAGVMASPPPPGLPAGSGPLAGPHHAWDEEPKPLLCSQYETLSDSE

SEQ ID NO: 15352 - protein, 356 aa, Homo sapiens
MTKSYSESGLMGEPQPQGPPSWTDECLSSQDEEHEADKKEDDLETMNAEEDSLRNGGEEEDEDEDLEEEEEEEEEDDDQKPKRRGPKKKKMTKARLERFKLRRMKANARERNRMHGLNAALDNLRKVVPCYSKTQKLSKIETLRLAKNYIWALSEILRSGKSPDLVSFVQTLCKGLSQPTTNLVAGCLQLNPRTFLPEQNQDMPPHLPTASASFPVHPYSYQSPGLPSPPYGTMDSSHVFHVKPPPHAYSAALEPFFESPLTDCTSPSFDGPLSPPLSINGNFSFKHEPSAEFEKNYAFTMHYPAATLAGAQSHGSIFSGTAAPRCEIPIDNIMSFDSHSHHERVMSAQLNAIFHD

SEQ ID NO: 15353 - protein, 382 aa, Homo sapiens
MLTRLFSEPGLLSDVPKFASWGDGEDDEPRSDKGDAPPPPPPAPGPGAPGPARAAKPVPLRGEEGTEATLAEVKEEGELGGEEEEEEEEEEGLDEAEGERPKKRGPKKRKMTKARLERSKLRRQKANARERNRMHDLNAALDNLRKVVPCYSKTQKLSKIETLRLAKNYIWALSEILRSGKRPDLVSYVQTLCKGLSQPTTNLVAGCLQLNSRNFLTEQGADGAGRFHGSGGPFAMHPYPYPCSRLAGAQCQAAGGLGGGAAHALRTHGYCAAYETLYAAAGGGGASPDYNSSEYEGPLSPPLCLNGNFSLKQDSSPDHEKSYHYSMHYSALPGSRPTGHGLVFGSSAVRGGVHSENLLSYDMHLHHDRGPMYEELNAFFHN

SEQ ID NO: 15354 - protein, 331 aa, Homo sapiens
MSKTFVKSKEMGELVNTPSWMDKGLGSQNEVKEEESRPGTYGMLSSLTEEHDSIEEEEEEEEDGEKPKRRGPKKKKMTKARLERFRARRVKANARERTRMHGLNDALDNLRRVMPCYSKTQKLSKIETLRLARNYIWALSEVLETGQTPEGKGFVEMLCKGLSQPTSNLVAGCLQLGPQSVLLEKHEDKSPICDSAISVHNFNYQSPGLPSPPYGHMETHLLHLKPQVFKSLGESSFGSHLPDCSTPPYEGPLTPPLSISGNFSLKQDGSPDLEKSYSFMPHYPSSSLSSGHVHSTPFQAGTPRYDVPIDMSYDSYPHHGIGTQLNTVFTE

SEQ ID NO: 15355 - protein, 337 aa, Homo sapiens
MLTLPFDESVVMPESQMCRKFSRECEDQKQIKKPESFSKQIVLRGKSIKRAPGEETEKEEEEEDREEEDENGLPRRRGLRKKKTTKLRLERVKFRRQEANARERNRMHGLNDALDNLRKVVPCYSKTQKLSKIETLRLAKNYIWALSEILRIGKRPDLLTFVQNLCKGLSQPTTNLVAGCLQLNARSFLMGQGGEAAHHTRSPYSTFYPPYHSPELTTPPGHGTLDNSKSMKPYNYCSAYESFYESTSPECASPQFEGPLSPPPINYNGIFSLKQEETLDYGKNYNYGMHYCAVPPRGPLGQGAMFRLPTDSHFPYDLHLRSQSLTMQDELNAVFHN

SEQ ID NO: 15356 - protein, 237 aa, Homo sapiens
MPARLETCISDLDCASSSGSDLSGFLTDEEDCARLQQAASASGPPAPARRGAPNISRASEVPGAQDDEQERRRRRGRTRVRSEALLHSLRRSRRVKANDRERNRMHNLNAALDALRSVLPSFPDDTKLTKIETLRFAYNYIWALAETLRLADQGLPGGGARERLLPPQCVPCLPGPPSPASDAESWGSGAAAASPLSDPSSPAASEDFTYRPGDPVFSFPSLPKDLLHTTPCFIPYH

SEQ ID NO: 15357 - protein, 272 aa, Homo sapiens
MFVKSETLELKEEEDVLVLLGSASPALAALTPLSSSADEEEEEEPGASGGARRQRGAEAGQGARGGVAAGAEGCRPARLLGLVHDCKRRPSRARAVSRGAKTAETVQRIKKTRRLKANNRERNRMHNLNAALDALREVLPTFPEDAKLTKIETLRFAHNYIWALTETLRLADHCGGGGGGLPGALFSEAVLLSPGGASAALSSSGDSPSPASTWSCTNSPAPSSSVSSNSTSPYSCTLSPASPAGSDMDYWQPPPPDKHRYAPHLPIARDCI

SEQ ID NO: 15358 - protein, 214 aa, Homo sapiens
MTPQPSGAPTVQVTRETERSFPRASEDEVTCPTSAPPSPTRTRGNCAEAEEGGCRGAPRKLRARRGGRSRPKSELALSKQRRSRRKKANDRERNRMHNLNSALDALRGVLPTFPDDAKLTKIETLRFAHNYIWALTQTLRIADHSLYALEPPAPHCGELGSPGGSPGDWGSLYSPVSQAGSLSPAASLEERPGLLGATFSACLSPGSLAFSDFL

SEQ ID NO: 15359 - protein, 1531 aa, Homo sapiens
MPSDFISLLSADLDLESPKSLYSRESVYDLLPKELQLPPSRETSVASMSQTSGGEAGSPPPAVVAADASSAPSSSSMGGACSSFTTSSSPTIYSTSVTDSKAMQVESCSSAVGVSNRGVSEKQLTSNTVQQHPSTPKRHTVLYISPPPEDLLDNSRMSCQDEGCGLESEQSCSMWMEDSPSNFSNMSTSSYNDNTEVPRKSRKRNPKQRPGVKRRDCEESNMDIFDADSAKAPHYVLSQLTTDNKGNSKAGNGTLENQKGTGVKKSPMLCGQYPVKSEGKELKIVVQPETQHRARYLTEGSRGSVKDRTQQGFPTVKLEGHNEPVVLQVFVGNDSGRVKPHGFYQACRVTGRNTTPCKEVDIEGTTVIEVGLDPSNNMTLAVDCVGILKLRNADVEARIGIAGSKKKSTRARLVFRVNIMRKDGSTLTLQTPSSPILCTQPAGVPEILKKSLHSCSVKGEEEVFLIGKNFLKGTKVIFQENVSDENSWKSEAEIDMELFHQNHLIVKVPPYHDQHITLPVSVGIYVVTNAGRSHDVQPFTYTPDPAAAGALNVNVKKEISSPARPCSFEEAMKAMKTTGCNLDKVNIIPNALMTPLIPSSMIKSEDVTPMEVTAEKRSSTIFKTTKSVGSTQQTLENISNIAGNGSFSSPSSSHLPSENEKQQQIQPKAYNPETLTTIQTQDISQPGTFPAVSASSQLPNSDALLQQATQFQTRETQSREILQSDGTVVNLSQLTEASQQQQQSPLQEQAQTLQQQISSNIFPSPNSVSQLQNTIQQLQAGSFTGSTASGSSGSVDLVQQVLEAQQQLSSVLFSAPDGNENVQEQLSADIFQQVSQIQSGVSPGMFSSTEPTVHTRPDNLLPGRAESVHPQSENTLSNQQQQQQQQQQVMESSAAMVMEMQQSICQAAAQIQSELFPSTASANGNLQQSPVYQQTSHMMSALSTNEDMQMQCELFSSPPAVSGNETSTTTTQQVATPGTTMFQTSSSGDGEETGTQAKQIQNSVFQTMVQMQHSGDNQPQVNLFSSTKSMMSVQNSGTQQQGNGLFQQGNEMMSLQSGNFLQQSSHSQAQLFHPQNPIADAQNLSQETQGSLFHSPNPIVHSQTSTTSSEQMQPPMFHSQSTIAVLQGSSVPQDQQSTNIFLSQSPMNNLQTNTVAQEAFFAAPNSISPLQSTSNSEQQAAFQQQAPISHIQTPMLSQEQAQPPQQGLFQPQVALGSLPPNPMPQSQQGTMFQSQHSIVAMQSNSPSQEQQQQQQQQQQQQQQQQQSILFSNQNTMATMASPKQPPPNMIFNPNQNPMANQEQQNQSIFHQQSNMAPMNQEQQPMQFQSQSTVSSLQNPGPTQSESSQTPLFHSSPQIQLVQGSPSSQEQQVTLFLSPASMSALQTSINQQDMQQSPLYSPQNNMPGIQGATSSPQPQATLFHNTAGGTMNQLQNSPGSSQQTSGMFLFGIQNNCSQLLTSGPATLPDQLMAISQPGQPQNEGQPPVTTLLSQQMPENSPLASSINTNQNIEKIDLLVSLQNQGNNLTGSF

SEQ ID NO: 15360 - protein, 943 aa, Homo sapiens
MPSTSFPVPSKFPLGPAAAVFGRGETLGPAPRAGGTMKSAEEEHYGYASSNVSPALPLPTAHSTLPAPCHNLQTSTPGIIPPADHPSGYGAALDGGPAGYFLSSGHTRPDGAPALESPRIEITSCLGLYHNNNQFFHDVEVEDVLPSSKRSPSTATLSLPSLEAYRDPSCLSPASSLSSRSCNSEASSYESNYSYPYASPQTSPWQSPCVSPKTTDPEEGFPRGLGACTLLGSPRHSPSTSPRASVTEESWLGARSSRPASPCNKRKYSLNGRQPPYSPHHSPTPSPHGSPRVSVTDDSWLGNTTQYTSSAIVAAINALTTDSSLDLGDGVPVKSRKTTLEQPPSVALKVEPVGEDLGSPPPPADFAPEDYSSFQHIRKGGFCDQYLAVPQHPYQWAKPKPLSPTSYMSPTLPALDWQLPSHSGPYELRIEVQPKSHHRAHYETEGSRGAVKASAGGHPIVQLHGYLENEPLMLQLFIGTADDRLLRPHAFYQVHRITGKTVSTTSHEAILSNTKVLEIPLLPENSMRAVIDCAGILKLRNSDIELRKGETDIGRKNTRVRLVFRVHVPQPSGRTLSLQVASNPIECSQRSAQELPLVEKQSTDSYPVVGGKKMVLSGHNFLQDSKVIFVEKAPDGHHVWEMEAKTDRDLCKPNSLVVEIPPFRNQRITSPVHVSFYVCNGKRKRSQYQRFTYLPANVPIIKTEPTDDYEPAPTCGPVSQGLSPLPRPYYSQQLAMPPDPSSCLVAGFPPCPQRSTLMPAAPGVSPKLHDLSPAAYTKGVASPGHCHLGLPQPAGEAPAVQDVPRPVATHPGSPGQPPPALLPQQVSAPPSSSCPPGLEHSLCPSSPSPPLPPATQEPTCLQPCSPACPPATGRPQHLPSTVRRDESPTAGPRLLPEVHEDGSPNLAPIPVTVKREPEELDQLYLDDVNEIIRNDLSSTSTHS

SEQ ID NO: 15361 - protein, 925 aa, Homo sapiens
MNAPERQPQPDGGDAPGHEPGGSPQDELDFSILFDYEYLNPNEEEPNAHKVASPPSGPAYPDDVLDYGLKPYSPLASLSGEPPGRFGEPDRVGPQKFLSAAKPAGASGLSPRIEITPSHELIQAVGPLRMRDAGLLVEQPPLAGVAASPRFTLPVPGFEGYREPLCLSPASSGSSASFISDTFSPYTSPCVSPNNGGPDDLCPQFQNIPAHYSPRTSPIMSPRTSLAEDSCLGRHSPVPRPASRSSSPGAKRRHSCAEALVALPPGASPQRSRSPSPQPSSHVAPQDHGSPAGYPPVAGSAVIMDALNSLATDSPCGIPPKMWKTSPDPSPVSAAPSKAGLPRHIYPAVEFLGPCEQGERRNSAPESILLVPPTWPKPLVPAIPICSIPVTASLPPLEWPLSSQSGSYELRIEVQPKPHHRAHYETEGSRGAVKAPTGGHPVVQLHGYMENKPLGLQIFIGTADERILKPHAFYQVHRITGKTVTTTSYEKIVGNTKVLEIPLEPKNNMRATIDCAGILKLRNADIELRKGETDIGRKNTRVRLVFRVHIPESSGRIVSLQTASNPIECSQRSAHELPMVERQDTDSCLVYGGQQMILTGQNFTSESKVVFTEKTTDGQQIWEMEATVDKDKSQPNMLFVEIPEYRNKHIRTPVKVNFYVINGKRKRSQPQHFTYHPVPAIKTEPTDEYDPTLICSPTHGGLGSQPYYPQHPMVAESPSCLVATMAPCQQFRTGLSSPDARYQQQNPAAVLYQRSKSLSPSLLGYQQPALMAAPLSLADAHRSVLVHAGSQGQSSALLHPSPTNQQASPVIHYSPTNQQLRCGSHQEFQHIMYCENFAPGTTRPGPPPVSQGQRLSPGSYPTVIQQQNATSQRAAKNGPPVSDQKEVLPAGVTIKQEQNLDQTYLDDVNEIIRKEFSGPPARNQT

SEQ ID NO: 15362 - protein, 1075 aa, Homo sapiens
MTTANCGAHDELDFKLVFGEDGAPAPPPPGSRPADLEPDDCASIYIFNVDPPPSTLTTPLCLPHHGLPSHSSVLSPSFQLQSHKNYEGTCEIPESKYSPLGGPKPFECPSIQITSISPNCHQELDAHEDDLQINDPEREFLERPSRDHLYLPLEPSYRESSLSPSPASSISSRSWFSDASSCESLSHIYDDVDSELNEAAARFTLGSPLTSPGGSPGGCPGEETWHQQYGLGHSLSPRQSPCHSPRSSVTDENWLSPRPASGPSSRPTSPCGKRRHSSAEVCYAGSLSPHHSPVPSPGHSPRGSVTEDTWLNASVHGGSGLGPAVFPFQYCVETDIPLKTRKTSEDQAAILPGKLELCSDDQGSLSPARETSIDDGLGSQYPLKKDSCGDQFLSVPSPFTWSKPKPGHTPIFRTSSLPPLDWPLPAHFGQCELKIEVQPKTHHRAHYETEGSRGAVKASTGGHPVVKLLGYNEKPINLQMFIGTADDRYLRPHAFYQVHRITGKTVATASQEIIIASTKVLEIPLLPENNMSASIDCAGILKLRNSDIELRKGETDIGRKNTRVRLVFRVHIPQPSGKVLSLQIASIPVECSQRSAQELPHIEKYSINSCSVNGGHEMVVTGSNFLPESKIIFLEKGQDGRPQWEVEGKIIREKCQGAHIVLEVPPYHNPAVTAAVQVHFYLCNGKRKKSQSQRFTYTPVLMKQEHREEIDLSSVPSLPVPHPAQTQRPSSDSGCSHDSVLSGQRSLICSIPQTYASMVTSSHLPQLQCRDESVSKEQHMIPSPIVHQPFQVTPTPPVGSSYQPMQTNVVYNGPTCLPINAASSQEFDSVLFQQDATLSGLVNLGCQPLSSIPFHSSNSGSTGHLLAHTPHSVHTLPHLQSMGYHCSNTGQRSLSSPVADQITGQPSSQLQPITYGPSHSGSATTASPAASHPLASSPLSGPPSPQLQPMPYQSPSSGTASSPSPATRMHSGQHSTQAQSTGQGGLSAPSSLICHSLCDPASFPPDGATVSIKPEPEDREPNFATIGLQDITLDDVNEIIGRDMSQISVSQGAGVSRQAPLPSPESLDLGRSDGL

SEQ ID NO: 15363 - protein, 902 aa, Homo sapiens
MGAASCEDEELEFKLVFGEEKEAPPLGAGGLGEELDSEDAPPCCRLALGEPPPYGAAPIGIPRPPPPRPGMHSPPPRPAPSPGTWESQPARSVRLGGPGGGAGGAGGGRVLECPSIRITSISPTPEPPAALEDNPDAWGDGSPRDYPPPEGFGGYREAGGQGGGAFFSPSPGSSSLSSWSFFSDASDEAALYAACDEVESELNEAASRFGLGSPLPSPRASPRPWTPEDPWSLYGPSPGGRGPEDSWLLLSAPGPTPASPRPASPCGKRRYSSSGTPSSASPALSRRGSLGEEGSEPPPPPPLPLARDPGSPGPFDYVGAPPAESIPQKTRRTSSEQAVALPRSEEPASCNGKLPLGAEESVAPPGGSRKEVAGMDYLAVPSPLAWSKARIGGHSPIFRTSALPPLDWPLPSQYEQLELRIEVQPRAHHRAHYETEGSRGAVKAAPGGHPVVKLLGYSEKPLTLQMFIGTADERNLRPHAFYQVHRITGKMVATASYEAVVSGTKVLEMTLLPENNMAANIDCAGILKLRNSDIELRKGETDIGRKNTRVRLVFRVHVPQGGGKVVSVQAASVPIECSQRSAQELPQVEAYSPSACSVRGGEELVLTGSNFLPDSKVVFIERGPDGKLQWEEEATVNRLQSNEVTLTLTVPEYSNKRVSRPVQVYFYVSNGRRKRSPTQSFRFLPVICKEEPLPDSSLRGFPSASATPFGTDMDFSPPRPPYPSYPHEDPACETPYLSEGFGYGMPPLYPQTGPPPSYRPGLRMFPETRGTTGCAQPPAVSFLPRPFPSDPYGGRGSSFSLGLPFSPPAPFRPPPLPASPPLEGPFPSQSDVHPLPAEGYNKVGPGYGPGEGAPEQEKSRGGYSSGFRDSVPIQGITLEEVSEIIGRDLSGFPAPPGEEPPA

SEQ ID NO: 15364 - protein, 373 aa, Homo sapiens
MSPCPPQQSRNRVIQLSTSELGEMELTWQEIMSITELQGLNAPSEPSFEPQAPAPYLGPPPPTTYCPCSIHPDSGFPLPPPPYELPASTSHVPDPPYSYGNMAIPVSKPLSLSGLLSEPLQDPLALLDIGLPAGPPKPQEDPESDSGLSLNYSDAESLELEGTEAGRRRSEYVEMYPVEYPYSLMPNSLAHSNYTLPAAETPLALEPSSGPVRAKPTARGEAGSRDERRALAMKIPFPTDKIVNLPVDDFNELLARYPLTESQLALVRDIRRRGKNKVAAQNCRKRKLETIVQLERELERLTNERERLLRARGEADRTLEVMRQQLTELYRDIFQHLRDESGNSYSPEEYALQQAADGTIFLVPRGTKMEATD

SEQ ID NO: 15365 - protein, 772 aa, Homo sapiens; identical to SEQ ID NO: 9341

SEQ ID NO: 15366 - protein, 605 aa, Homo sapiens
MMDLELPPPGLPSQQDMDLIDILWRQDIDLGVSREVFDFSQRRKEYELEKQKKLEKERQEQLQKEQEKAFFAQLQLDEETGEFLPIQPAQHIQSETSGSANYSQVAHIPKSDALYFDDCMQLLAQTFPFVDDNEVSSATFQSLVPDIPGHIESPVFIATNQAQSPETSVAQVAPVDLDGMQQDIEQVWEELLSIPELQCLNIENDKLVETTMVPSPEAKLTEVDNYHFYSSIPSMEKEVGNCSPHFLNAFEDSFSSILSTEDPNQLTVNSLNSDATVNTDFGDEFYSAFIAEPSISNSMPSPATLSHSLSELLNGPIDVSDLSLCKAFNQNHPESTAEFNDSDSGISLNTSPSVASPEHSVESSSYGDTLLGLSDSEVEELDSAPGSVKQNGPKTPVHSSGDMVQPLSPSQGQSTHVHDAQCENTPEKELPVSPGHRKTPFTKDKHSSRLEAHLTRDELRAKALHIPFPVEKIINLPVVDFNEMMSKEQFNEAQLALIRDIRRRGKNKVAAQNCRKRKLENIVELEQDLDHLKDEKEKLLKEKGENDKSLHLLKKQLSTLYLEVFSMLRDEDGKPYSPSEYSLQQTRDGNVFLVPKSKKPDVKKN

SEQ ID NO: 15367 - protein, 694 aa, Homo sapiens; identical to SEQ ID NO: 9351

SEQ ID NO: 15368 - protein, 509 aa, Homo sapiens
MYSPLCLTQDEFHPFIEALLPHVRAFAYTWFNLQARKRKYFKKHEKRMSKEEERAVKDELLSEKPEVKQKWASRLLAKLRKDIRPEYREDFVLTVTGKKPPCCVLSNPDQKGKMRRIDCLRQADKVWRLDLVMVILFKGIPLESTDGERLVKSPQCSNPGLCVQPHHIGVSVKELDLYLAYFVHAADSSQSESPSQPSDADIKDQPENGHLGFQDSFVTSGVFSVTELVRVSQTPIAAGTGPNFSLSDLESSSYYSMSPGAMRRSLPSTSSTSSTKRLKSVEDEMDSPGEEPFYTGQGRSPGSGSQSSGWHEVEPGMPSPTTLKKSEKSGFSSPSPSQTSSLGTAFTQHHRPVITGPRASPHATPSTLHFPTSPIIQQPGPYFSHPAIRYHPQETLKEFVQLVCPDAGQQAGQVGFLNPNGSSQGKVHNPFLPTPMLPPPPPPPMARPVPLPVPDTKPPTTSTEGGAASPTSPTYSTPSTSPANRFVSVGPRDPSFVNIPQQTQSWYLG

SEQ ID NO: 15369 - protein, 420 aa, Homo sapiens
MMYSPICLTQDEFHPFIEALLPHVRAIAYTWFNLQARKRKYFKKHEKRMSKDEERAVKDELLSEKPEIKQKWASRLLAKLRKDIRQEYREDFVLTVTGKKHPCCVLSNPDQKGKIRRIDCLRQADKVWRLDLVMVILFKGIPLESTDGERLMKSPHCTNPALCVQPHHITVSVKELDLFLAYYVQEQDSGQSGSPSHNDPAKNPPGYLEDSFVKSGVFNVSELVRVSRTPITQGTGVNFPIGEIPSQPYYHDMNSGVNLQRSLSSPPSSKRPKTISIDENMEPSPTGDFYPSPSSPAAGSRTWHERDQDMSSPTTMKKPEKPLFSSASPQDSSPRLSTFPQHHHPGIPGVAHSVISTRTPPPPSPLPFPTQAILPPAPSSYFSHPTIRYPPHLNPQDTLKNYVPSYDPSSPQTSQSWYLG

SEQ ID NO: 15370 - protein, 508 aa, Homo sapiens
MYSSPLCLTQDEFHPFIEALLPHVRAFAYTWFNLQARKRKYFKKHEKRMSKDEERAVKDELLGEKPEVKQKWASRLLAKLRKDIRPECREDFVLSITGKKAPGCVLSNPDQKGKMRRIDCLRQADKVWRLDLVMVILFKGIPLESTDGERLVKAAQCGHPVLCVQPHHIGVAVKELDLYLAYFVRERDAEQSGSPRTGMGSDQEDSKPITLDTTDFQESFVTSGVFSVTELIQVSRTPVVTGTGPNFSLGELQGHLAYDLNPASTGLRRTLPSTSSSGSKRHKSGSMEEDVDTSPGGDYYTSPSSPTSSSRNWTEDMEGGISSPVKKTEMDKSPFNSPSPQDSPRLSSFTQHHRPVIAVHSGIARSPHPSSALHFPTTSILPQTASTYFPHTAIRYPPHLNPQDPLKDLVSLACDPASQQPGPLNGSGQLKMPSHCLSAQMLAPPPPGLPRLALPPATKPATTSEGGATSPTSPSYSPPDTSPANRSFVGLGPRDPAGIYQAQSWYLG

SEQ ID NO: 15371 - protein, 462 aa, Homo sapiens
MQLRKMQTVKKEQASLDASSNVDKMMVLNSALTEVSEDSTTGEELLLSEGSVGKNKSSACRRKREFIPDEKKDAMYWEKRRKNNEAAKRSREKRRLNDLVLENKLIALGEENATLKAELLSLKLKFGLISSTAYAQEIQKLSNSTAVYFQDYQTSKSNVSSFVDEHEPSMVSSSCISVIKHSPQSSLSDVSEVSSVEHTQESSVQGSCRSPENKFQIIKQEPMELESYTREPRDDRGSYTASIYQNYMGNSFSGYSHSPPLLQVNRSSSNSPRTSETDDGVVGKSSDGEDEQQVPKGPIHSPVELKHVHATVVKVPEVNSSALPHKLRIKAKAMQIKVEAFDNEFEATQKLSSPIDMTSKRHFELEKHSAPSMVHSSLTPFSVQVTNIQDWSLKSEHWHQKELSGKTQNSFKTGVVEMKDSGYKVSDPENLYLKQGIANLSAEVVSLKRLIATQPISASDSG

SEQ ID NO: 15372 - protein, 502 aa, Homo sapiens
MYSPYCLTQDEFHPFIEALLPHVRAFSYTWFNLQARKRKYFKKHEKRMSKDEERAVKDELLGEKPEIKQKWASRLLAKLRKDIRPEFREDFVLTITGKKPPCCVLSNPDQKGKIRRIDCLRQADKVWRLDLVMVILFKGIPLESTDGERLYKSPQCSNPGLCVQPHHIGVTIKELDLYLAYFVHTPESGQSDSSNQQGDADIKPLPNGHLSFQDCFVTSGVWNVTELVRVSQTPVATASGPNFSLADLESPSYYNINQVTLGRRSITSPPSTSTTKRPKSIDDSEMESPVDDVFYPGTGRSPAAGSSQSSGWPNDVDAGPASLKKSGKLDFCSALSSQGSSPRMAFTHHPLPVLAGVRPGSPRATASALHFPSTSIIQQSSPYFTHPTIRYHHHHGQDSLKEFVQFVCSDGSGQATGQPNGSGQGKVPGSFLLPPPPPVARPVPLPMPDSKSTSTAPDGAALTPPSPSFATTGASSANRFVSIGPRDGNFLNIPQQSQSWFL

SEQ ID NO: 15373 - protein, 968 aa, Homo sapiens
MAEDDPYLGRPEQMFHLDPSLTHTIFNPEVFQPQMALPTDGPYLQILEQPKQRGFRFRYVCEGPSHGGLPGASSEKNKKSYPQVKICNYVGPAKVIVQLVTNGKNIHLHAHSLVGKHCEDGICTVTAGPKDMVVGFANLGILHVTKKKVFETLEARMTEACIRGYNPGLLVHPDLAYLQAEGGGDRQLGDREKELIRQAALQQTKEMDLSVVRLMFTAFLPDSTGSFTRRLEPVVSDAIYDSKAPNASNLKIVRMDRTAGCVTGGEEIYLLCDKVQKDDIQIRFYEEEENGGVWEGFGDFSPTDVHRQFAIVFKTPKYKDINITKPASVFVQLRRKSDLETSEPKPFLYYPEIKDKEEVQRKRQKLMPNFSDSFGGGSGAGAGGGGMFGSGGGGGGTGSTGPGYSFPHYGFPTYGGITFHPGTTKSNAGMKHGTMDTESKKDPEGCDKSDDKNTVNLFGKVIETTEQDQEPSEATVGNGEVTLTYATGTKEESAGVQDNLFLEKAMQLAKRHANALFDYAVTGDVKMLLAVQRHLTAVQDENGDSVLHLAIIHLHSQLVRDLLEVTSGLISDDIINMRNDLYQTPLHLAVITKQEDVVEDLLRAGADLSLLDRLGNSVLHLAAKEGHDKVLSILLKHKKAALLLDHPNGDGLNAIHLAMMSNSLPCLLLLVAAGADVNAQEQKSGRTALHLAVEHDNISLAGCLLLEGDAHVDSTTYDGTTPLHIAAGRGSTRLAALLKAAGADPLVENFEPLYDLDDSWENAGEDEGVVPGTTPLDMATSWQVFDILNGKPYEPEFTSDDLLAQGDMKQLAEDVKLQLYKLLEIPDPDKNWATLAQKLGLGILNNAFRLSPAPSKTLMDNYEVSGGTVRELVEALRQMGYTEAIEVIQAASSPVKTTSQAHSLPLSPASTRQQIDELRDSDSVCDSGVETSFRKLSFTESLTSGASLLTLNKMPHDYGQEGPLEGKI

SEQ ID NO: 15374 - protein, 900 aa, Homo sapiens
MESCYNPGLDGIIEYDDFKLNSSIVEPKEPAPETADGPYLVIVEQPKQRGFRFRYGCEGPSHGGLPGASSEKGRKTYPTVKICNYEGPAKIEVDLVTHSDPPRAHAHSLVGKQCSELGICAVSVGPKDMTAQFNNLGVLHVTKKNMMGTMIQKLQRQRLRSRPQGLTEAEQRELEQEAKELKKVMDLSIVRLRFSAFLRASDGSFSLPLKPVISQPIHDSKSPGASNLKISRMDKTAGSVRGGDEVYLLCDKVQKDDIEVRFYEDDENGWQAFGDFSPTDVHKQYAIVFRTPPYHKMKIERPVTVFLQLKRKRGGDVSDSKQFTYYPLVEDKEEVQRKRRKALPTFSQPFGGGSHMGGGSGGAAGGYGGAGGGGSLGFFPSSLAYSPYQSGAGPMGCYPGGGGGAQMAATVPSRDSGEEAAEPSAPSRTPQCEPQAPEMLQRAREYNARLFGLAQRSARALLDYGVTADARALLAGQRHLLTAQDENGDTPLHLAIIHGQTSVIEQIVYVIHHAQDLGVVNLTNHLHQTPLHLAVITGQTSVVSFLLRVGADPALLDRHGDSAMHLALRAGAGAPELLRALLQSGAPAVPQLLHMPDFEGLYPVHLAVRARSPECLDLLVDSGAEVEATERQGGRTALHLATEMEELGLVTHLVTKLRANVNARTFAGNTPLHLAAGLGYPTLTRLLLKAGADIHAENEEPLCPLPSPPTSDSDSDSEGPEKDTRSSFRGHTPLDLTCSTKVKTLLLNAAQNTMEPPLTPPSPAGPGLSLGDTALQNLEQLLDGPEAQGSWAELAERLGLRSLVDTYRQTTSPSGSLLRSYELAGGDLAGLLEALSDMGLEEGVRLLRGPETRDKLPSTAEVKEDSAYGSQSVEQEAEKLGPPPEPPGGLCHGHPQPQVH

SEQ ID NO: 15375 - protein, 317 aa, Homo sapiens
MFQAAERPQEWAMEGPRDGLKKERLLDDRHDSGLDSMKDEEYEQMVKELQEIRLEPQEVPRGSEPWKQQLTEDGDSFLHLAIIHEEKALTMEVIRQVKGDLAFLNFQNNLQQTPLHLAVITNQPEIAEALLGAGCDPELRDFRGNTPLHLACEQGCLASVGVLTQSCTTPHLHSILKATNYNGHTCLHLASIHGYLGIVELLVSLGADVNAQEPCNGRTALHLAVDLQNPDLVSLLLKCGADVNRVTYQGYSPYQLTWGRPSTRIQQQLGQLTLENLQMLPESEDEESYDTESEFTEFTEDELPYDDCVFGGQRLTL

SEQ ID NO: 15376 - protein, 356 aa, Homo sapiens
MAGVACLGKAADADEWCDSGLGSLGPDAAAPGGPGLGAELGPGLSWAPLVFGYVTEDGDTALHLAVIHQHEPFLDFLLGFSAGTEYMDLQNDLGQTALHLAAILGETSTVEKLYAAGAGLCVAERRGHTALHLACRVGAHACARALLQPRPRRPREAPDTYLAQGPDRTPDTNHTPVALYPDSDLEKEEEESEEDWKLQLEAENYEGHTPLHVAVIHKDVEMVRLLRDAGADLDKPEPTCGRSPLHLAVEAQAADVLELLLRAGANPAARMYGGRTPLGSAMLRPNPILARLLRAHGAPEPEGEDEKSGPCSSSSDSDSGDEGDEYDDIVVHSSRSQTRLPPTPASKPLPDDPRPV

SEQ ID NO: 15377 - protein, 313 aa, Homo sapiens
MEAGPWRVSAPPSGPPQFPAVVPGPSLEVARAHMLALGPQQLLAQDEEGDTLLHLFAARGLRWAAYAAAEVLQVYRRLDIREHKGKTPLLVAAAANQPLIVEDLLNLGAEPNAADHQGRSVLHVAATYGLPGVLLAVLNSGVQVDLEARDFEGLTPLHTAILALNVAMRPSDLCPRVLSTQARDRLDCVHMLLQMGANHTSQEIKSNKTVLHLAVQAANPTLVQLLLELPRGDLRTFVNMKAHGNTALHMAAALPPGPAQEAIVRHLLAAGADPTLRNLENEQPVHLLRPGPGPEGLRQLLKRSRVAPPGLSS

SEQ ID NO: 15378 - protein, 500 aa, Homo sapiens
MNQRRSESRPGNHRLQAYAEPGKGDSGGAGPLSGSARRGRGGGGAIRVRRPCWSGGAGRGGGPAWAVRLPTVTAGWTWPALRTLSSLRAGPSEPHSPGRRPPRAGRPLCQADPQPGKAARRSLEPDPAQTGPRPARAAGMSEARKGPDEAEESQYDSGIESLRSLRSLPESTSAPASGPSDGSPQPCTHPPGPVKEPQEKEDADGERADSTYGSSSLTYTLSLLGGPEAEDPAPRLPLPHVGALSPQQLEALTYISEDGDTLVHLAVIHEAPAVLLCCLALLPQEVLDIQNNLYQTALHLAVHLDQPGAVRALVLKGASRALQDRHGDTALHVACQRQHLACARCLLEGRPEPGRGTSHSLDLQLQNWQGLACLHIATLQKNQPLMELLLRNGADIDVQEGTSGKTALHLAVETQERGLVQFLLQAGAQVDARMLNGCTPLHLAAGRGLMGISSTLCKAGADSLLRNVEDETPQDLTEESLVLLPFDDLKISGKLLLCTD

SEQ ID NO: 15379 - protein, 381 aa, Homo sapiens
MSNPSPQVPEEEASTSVCRPKSSMASTSRRQRRERRFRRYLSAGRLVRAQALLQRHPGLDVDAGQPPPLHRACARHDAPALCLLLRLGADPAHQDRHGDTALHAAARQGPDAYTDFFLPLLSRCPSAMGIKNKDGETPGQILGWGPPWDSAEEEEEDDASKEREWRQKLQGELEDEWQEVMGRFEGDASHETQEPESFSAWSDRLAREHAQKCQQQQREAEGSCRPPRAEGSSQSWRQQEEEQRLFRERARAKEEELRESRARRAQEALGDREPKPTRAGPREEHPRGAGRGSLWRFGDVPWPCPGGGDPEAMAAALVARGPPLEEQGALRRYLRVQQVRWHPDRFLQRFRSQIETWELGRVMGAVTALSQALNRHAEALK

SEQ ID NO: 15380 - protein, 718 aa, Homo sapiens
MIVDKLLDDSRGGEGLRDAAGGCGLMTSPLNLSYFYGASPPAAAPGACDASCSVLGPSAPGSPGSDSSDFSSASSVSSCGAVESRSRGGARAERQPVEPHMGVGRQQRGPFQGVRVKNSVKELLLHIRSHKQKASGQAVDDFKTQGVNIEQFRELKNTVSYSGKRKGPDSLSDGPACKRPALLHSQFLTPPQTPTPGESMEDVHLNEPKQESSADLLQNIINIKNECSPVSLNTVQVSWLNPVVVPQSSPAEQCQDFHGGQVFSPPQKCQPFQVRGSQQMIDQASLYQYSPQNQHVEQQPHYTHKPTLEYSPFPIPPQSPAYEPNLFDGPESQFCPNQSLVSLLGDQRESENIANPMQTSSSVQQQNDAHLHSFSMMPSSACEAMVGHEMASDSSNTSLPFSNMGNPMNTTQLGKSLFQWQVEQEESKLANISQDQFLSKDADGDTFLHIAVAQGRRALSYVLARKMNALHMLDIKEHNGQSAFQVAVAANQHLIVQDLVNIGAQVNTTDCWGRTPLHVCAEKGHSQVLQAIQKGAVGSNQFVDLEATNYDGLTPLHCAVIAHNAVVHELQRNQQPHSPEVQELLLKNKSLVDTIKCLIQMGAAVEAKDRKSGRTALHLAAEEANLELIRLFLELPSCLSFVNAKAYNGNTALHVAASLQYRLTQLDAVRLLMRKGADPSTRNLENEQPVHLVPDGPVGEQIRRILKGKSIQQRAPPY

SEQ ID NO: 15381 - protein, 1299 aa, Homo sapiens [sequence omitted]

SEQ ID NO: 15382 - protein, 1120 aa, Homo sapiens
MAEAPPVSGTFKFNTDAAEFIPQEKKNSGLNCGTQRRLDSNRIGRRNYSSPPPCHLSRQVPYDEISAVHQHSYHPSGSKPKSQQTSFQSSPCNKSPKSHGLQNQPWQKLRNEKHHIRVKKAQSLAEQTSDTAGLESSTRSESGTDLREHSPSESEKEVVGADPRGAKPKKATQFVYSYGRGPKVKGKLKCEWSNRTTPKPEDAGPESTKPVGVFHPDSSEASSRKGVLDGYGARRNEQRRYPQKRPPWEVEGARPRPGRNPPKQEGHRHTNAGHRNNMGPIPKDDLNERPAKSTCDSENLAVINKSSRRVDQEKCTVRRQDPQVVSPFSRGKQNHVLKNVETHTGSLIEQLTTEKYECMVCCELVRVTAPVWSCQSCYHVFHLNCIKKWARSPASQADGQSGWRCPACQNVSAHVPNTYTCFCGKVKNPEWSRNEIPHSCGEVCRKKQPGQDCPHSCNLLCHPGPCPPCPAFMTKTCECGRTRHTVRCGQAVSVHCSNPCENILNCGQHQCAELCHGGQCQPCQIILNQVCYCGSTSRDVLCGTDVGKSDGFGDFSCLKICGKDLKCGNHTCSQVCHPQPCQQCPRLPQLVRCCPCGQTPLSQLLELGSSSRKTCMDPVPSCGKVCGKPLPCGSLDFIHTCEKLCHEGDCGPCSRTSVISCRCSFRTKELPCTSLKSEDATFMCDKRCNKKRLCGRHKCNEICCVDKEHKCPLICGRKLRCGLHRCEEPCHRGNCQTCWQASFDELTCHCGASVIYPPVPCGTRPPECTQTCARVHECDHPVYHSCHSEEKCPPCTFLTQKWCMGKHEFRSNIPCHLVDISCGLPCSATLPCGMHKCQRLCHKGECLVDEPCKQPCTTPRADCGHPCMAPCHTSSPCPVTACKAKVELQCECGRRKEMVICSEASSTYQRIAAISMASKITDMQLGGSVEISKLITKKEVHQARLECDEECSALERKKRLAEAFHISEDSDPFNIRSSGSKFSDSLKEDARKDLKFVSDVEKEMETLVEAVNKGKNSKKSHSFPPMNRDHRRIIHDLAQVYGLESVSYDSEPKRNVVVTAIRGKSVCPPTTLTGVLEREMQARPPPPIPHHRHQSDKNPGSSNLQKITKEPIIDYFDVQD

SEQ ID NO: 15383 - protein, 911 aa, Homo sapiens
MEASWRQVAGGRGRSRGRATAAPSGNGVHLRGAGGGREKGSVGAVPSGTSPGGVATTAAAGSRHSPAGSQALQTTAASELMSQKKFEEIKKANQAAARKLVEEQFSSSSEEGDEDFEGKQGKILANTFITYTTQTDGDTRELERTKQYVNEAFQAGAMTCLICIASVKRNQAVWSCSGCFCIFHMPCIQKWAKDSQFLVSSVTDDDFGKKDCPWPCPKCRFEYKRSETPSRYYCYCGKVEDPPLDPWLVPHSCGQVCEREFKPPCGHKCLLLCHPGPCPPCPKMVTTTCYCKKAKPIPRRCSAKEWSCQLPCGQKLLCGQHKCENPCHAGSCQPCPRVSRQKCVCGKKVAERSCASPLWHCDQVCGKTLPCGNHTCEQVCHVGACGECPRSGKRFCPCQKSKFSLPCTEDVPTCGDSCDKVLECGIHRCSQRCHRGPCETCRQEVEKHCRCGKHTKRMPCHKPYLCETKCVKMRDCQKHQCRRKCCPGNCPPCDQNCGRTLGCRNHKCPSVCHRGSCYPCPETVDVKCNCGNTKVTVPCGRERTTRPPKCKEQCSRPPTCHHTSQEKHRCHFGSCPPCHQPCQKVLEKCGHLCPAPCHDQALIKQTGRHQPTGPWEQPSEPAFIQTALPCPPCQVPIPMECLGKHEVSPLPCHAVGPYSCKRVCGRILDCQNHTCMKECHKVTKTDGCTGKNKAGPECLHCEEGCSKSRPLGCLHPCILRCHPGECPPCVQMLRIKCHCKITSLYVECRKITTADVNEKNLLSCCKNQCPKELPCGHRCKEMCHPGECPFNCNQKVKLRCPCKRIKKELQCNKVRENQVSIECDTTCKEMKRKASEIKEAEAKAALEEEKRRQQAELEAFENRLKGRRKKNRKRDEVAVELSLWQKHKYYLISVCGVVVVVFAWYITHDVN

SEQ ID NO: 15384 - protein, 347 aa, Homo sapiens
MEQYTANSNSSTEQIVVQAGQIQQQQQGGVTAVQLQTEAQVASASGQQVQTLQVVQGQPLMVQVSGGQLITSTGQPIMVQAVPGGQGQTIMQVPVSGTQGLQQIQLVPPGQIQIQGGQAVQVQGQQGQTQQIIIQQPQTAVTAGQTQTQQQIAVQGQQVAQTAEGQTIVYQPVNADGTILQQVTVPVSGMITIPAASLAGAQIVQTGANTNTTSSGQGTVTVTLPVAGNVVNSGGMVMMVPGAGSVPAIQRIPLPGAEMLEEEPLYVNAKQYHRILKRRQARAKLEAEGKIPKERRKYLHESRHRHAMARKRGEGGRFFSPKEKDSPHMQDPNQADEEAMTQIIRVS

SEQ ID NO: 15385 - protein, 207 aa, Homo sapiens
MTMDGDSSTTDASQLGISADYIGGSHYVIQPHDDTEDSMNDHEDTNGSKESFREQDIYLPIANVARIMKNAIPQTGKIAKDAKECVQECVSEFISFITSEASERCHQEKRKTINGEDILFAMSTLGFDSYVEPLKLYLQKFREAMKGEKGIGGAVTATDGLSEELTEEAFTNQLPAGLITTDGQQQNVMVYTTSYQQISGVQQIQFS

SEQ ID NO: 15386 - protein, 458 aa, Homo sapiens
MSTEGGFGGTSSSDAQQSLQSFWPRVMEEIRNLTVKDFRVQELPLARIKKIMKLDEDVKMISAEAPVLFAKAAQIFITELTLRAWIHTEDNKRRTLQRNDIAMAITKFDQFDFLIDIVPRDELKPPKRQEEVRQSVTPAEPVQYYFTLAQQPTAVQVQGQQQGQQTTSSTTTIQPGQIIIAQPQQGQTTPVTMQVGEGQQVQIVQAQPQGQAQQAQSGTGQTMQVMQQIITNTGEIQQIPVQLNAGQLQYIRLAQPVSGTQVVQGQIQTLATNAQQGQRNASQGKPRRCLKETLQITQTEVQQGQQQFSQFTDGQRNSVQQARVSELTGEAEPREVKATGNSTPCTSSLPTTHPPSHRAGASCVCCSQPQQSSTSPPPSDALQWVVVEVSGTPNQLETHRELHAPLPGMTSLSPLHPSQQLYQIQQVTMPAGQDLAQPMFIQSANQPSDGQAPQVTGD

SEQ ID NO: 15387 - protein, 133 aa, Homo sapiens
MMLNSDTMELDLPPTHSETESGFSDCGGGAGPDGAGPGGPGGGQARGPEPGEPGRKDLQHLSREERRRRRRATAKYRTAHATRERIRVEAFNLAFAELRKLLPTLPPDKKLSKIEILRLAICYISYLNHVLDV

SEQ ID NO: 15388 - protein, 135 aa, Homo sapiens
MMLSPDQAADSDHPSSAHSDPESLGGTDTKVLGSVSDLEPVEEAEGDGKGGSRAALYPHPQQLSREEKRRRRRATAKYRSAHATRERIRVEAFNLAFAELRKLLPTLPPDKKLSKIEILRLAICYISYLNHVLDV

SEQ ID NO: 15389 - protein, 690 aa, Homo sapiens
MEKILQMAEGIDIGEMPSYDLVLSKPSKGQKRHLSTCDGQNPPKKQAGSKFHARPRFEPVHFVASSSKDERQEDPYGPQTKEVNEQTHFASMPRDIYQDYTQDSFSIQDGNSQYCDSSGFILTKDQPVTANMYFDSGNPAPSTTSQQANSQSTPEPSPSQTFPESVVAEKQYFIEKLTATIWKNLSNPEMTSGSDKINYTYMLTRCIQACKTNPEYIYAPLKEIPPADIPKNKKLLTDGYACEVRCQNIYLTTGYAGSKNGSRDRATELAVKLLQKRIEVRVVRRKFKHTFGEDLVVCQIGMSSYEFPPALKPPEDLVVLGKDASGQPIFNASAKHWTNFVITENANDAIGILNNSASFNKMSIEYKYEMMPNRTWRCRVFLQDHCLAEGYGTKKTSKHAAADEALKILQKTQPTYPSVKSSQCHTGSSPRGSGKKKDIKDLVVYENSSNPVCTLNDTAQFNRMTVEYVYERMTGLRWKCKVILESEVIAEAVGVKKTVKYEAAGEAVKTLKKTQPTVINNLKKGAVEDVISRNEIQGRSAEEAYKQQIKEDNIGNQLLRKMGWTGGGLGKSGEGIREPISVKEQHKREGLGLDVERVNKIAKRDIEQIIRNYARSESHTDLTFSRELTNDERKQIHQIAQKYGLKSKSHGVGHDRYLVVGRKRRKEDLLDQLKQEGQVGHYELVMPQAN

SEQ ID NO: 15390 - protein, 411 aa, Homo sapiens
MDGRAELPAFPRAGAPPLAASDTVPAAPEGAGAARPAAPLRPTSFSVLDILDPNKFNSRRRRCVLLGPVAPAACAPCASAPCAPAPAASGRPPRAEELERRALAGAGGVGAAGAEPPNAGDPFKAGEAETNDTNGYSSGGGGHSPSADSGDEVPDDEDDDEDEAPETEAARGAEEARGGGGGLGARGSGCQGAAETDASPGATVDEAAAPGPRENSPVAQGPPGGAAAPGGAGTTPQGTATAAKPKRKRTGSDSKSGKPRRARTAFTYEQLVALENKFKATRYLSVCERLNLALSLSLTETQVKIWFQNRRTKWKKQNPGADTSAPTGGGGGPGPGAGPGTGLPGGLSPLSPSPPMGAPLGMHGPAGYPAHGPGGLVCAAQLPFLSSPAVLSPFVLGSQTYGAPAFYAPHL

SEQ ID NO: 15391 - protein, 310 aa, Homo sapiens
MLAWQDGGAKAAPSHHKISFSVLDILDPQKFTRAALPAVRPAPREARKSLAEVEAGKDASSRDPVRQLETPDAAGPGAGQASPLEGSEAEEEEDAEDPRRPRLRERAARLLPGLARSPDAPAGALASGEPCEDGGGGPVRSPPGSPGSPRPRRRRLEPNCAKPRRARTAFTYEQLVALENKFRATRYLSVCERLNLALSLSLTETQVKIWFQNRRTKWKKQNPGADGAAQVGGGAPQPGAAGGGGGGGSGGSPGPPGTGALHFQTFPSYSAANVLFPSAASFPLTAAAPGSPFAPFLGPSYLTPFYAPRL

SEQ ID NO: 15392 - protein, 371 aa, Homo sapiens
MSMSPKHTTPFSVSDILSPLEESYKKVGMEGGGLGAPLAAYRQGQAAPPTAAMQQHAVGHHGAVTAAYHMTAAGVPQLSHSAVGGYCNGNLGNMSELPPYQDTMRNSASGPGWYGANPDPRFPAISRFMGPASGMNMSGMGGLGSLGDVSKNMAPLPSAPRRKRRVLFSQAQVYELERRFKQQKYLSAPEREHLASMIHLTPTQVKIWFQNHRYKMKRQAKDKAAQQQLQQDSGGGGGGGGTGCPQQQQAQQQSPRRVAVPVLVKDGKPCQAGAPAPGAASLQGHAQQQAQHQAQAAQAAAAAISVGSGGAGLGAHPGHQPGSAGQSPDLAHHAASPAALQGQVSSLSHLNSSGSDYGTMSCSTLLYGRTW

SEQ ID NO: 15393 - protein, 273 aa, Homo sapiens
MSLTNTKTGFSVKDILDLPDTNDEEGSVAEGPEEENEGPEPAKRAGPLGQGALDAVQSLPLKNPFYDSSDNPYTRWLASTEGLQYSLHGLAAGAPPQDSSSKSPEPSADESPDNDKETPGGGGDAGKKRKRRVLFSKAQTYELERRFRQQRYLSAPEREHLASLIRLTPTQVKIWFQNHRYKMKRARAEKGMEVTPLPSPRRVAVPVLVRDGKPCHALKAQDLAAATFQAGIPFSAYSAQSLQHMQYNAQYSSASTPQYPTAHPLVQAQQWTW

SEQ ID NO: 15394 - protein, 364 aa, Homo sapiens
MMLPSPVTSTPFSVKDILNLEQQHQHFHGAHLQADLEHHFHSAPCMLAAAEGTQFSDGGEEDEEDEGEKLSYLNSLAAADGHGDSGLCPQGYVHTVLRDSCSEPKEHEEEPEVVRDRSQKSCQLKKSLETAGDCKAAEESERPKPRSRRKPRVLFSQAQVFELERRFKQQRYLSAPEREHLASSLKLTSTQVKIWFQNRRYKCKRQRQDKSLELGAHAPPPPPRRVAVPVLVRDGKPCVTPSAQAYGAPYSVGASAYSYNSFPAYGYGNSAAAAAAAAAAAAAAAAYSSSYGCAYPAGGGGGGGGTSAATTAMQPACSAAGGGPFVNVSNLGGFGSGGSAQPLHQGTAAGAACAQGTLQGIRAW

SEQ ID NO: 15395 - protein, 354 aa, Homo sapiens
MSLSPKHTTPFSVSDILSPIEETYKKFSGAMDGAPPGLGAPLGAAAAYRAPPPGPSSQAATVAGMQPSHAMAGHNAAAAAAAAAAAAAAAATYHMPPGVSQFPHGAMGSYCNGGLGNMGELPAYTDGMRGGAATGWYGANPDPRYSSISRFMGPSAGVNVAGMGSLTGIADAAKSLGPLHAAAAAAAPRRKRRVLFSQAQVYELERRFKQQKYLSAPEREHLASMIHLTPTQVKIWFQNHRYKMKRQAKDKAAQQLQQEGGLGPPPPPPPSPRRVAVPVLVKDGKPCQNGASTPTPGQAGPQPPAPTPAPELEELSPSPPALHGPGGGLAALDAAAGEYSGGVLGANLLYGRTW

SEQ ID NO: 15396 - protein, 324 aa, Homo sapiens
MFPSPALTPTPFSVKDILNLEQQQRSLAAAGELSARLEATLAPSSCMLAAFKPEAYAGPEAAAPGLPELRAELGRAPSPAKCASAFPAAPAFYPRAYSDPDPAKDPRAEKKELCALQKAVELEKTEADNAERPRARRRRKPRVLFSQAQVYELERRFKQQRYLSAPERDQLASVLKLTSTQVKIWFQNRRYKCKRQRQDQTLELVGLPPPPPPPARRIAVPVLVRDGKPCLGDSAPYAPAYGVGLNPYGYNAYPAYPGYGGAACSPGYSCTAAYPAGPSPAQPATAAANNNFVNFGVGDLNAVQSPGIPQSNSGVSTLHGIRAW

SEQ ID NO: 15397 - protein, 301 aa, Homo sapiens
MLLSPVTSTPFSVKDILRLERERSCPAASPHPRVRKSPENFQYLRMDAEPRGSEVHNAGGGGGDRKLDGSEPPGGPCEAVLEMDAERMGEPQPGLNAASPLGGGTRVPERGVGNSGDSVRGGRSEQPKARQRRKPRVLFSQAQVLALERRFKQQRYLSAPEREHLASALQLTSTQVKIWFQNRRYKCKRQRQDKSLELAGHPLTPRRVAVPVLVRDGKPCLGPGPGAPAFPSPYSAAVSPYSCYGGYSGAPYGAGYGTCYAGAPSGPAPHTPLASAGFGHGGQNATPQGHLAATLQGVRAW

SEQ ID NO: 15398 - protein, 239 aa, Homo sapiens
MATSGRLSFTVRSLLDLPEQDAQHLPRREPEPRAPQPDPCAAWLDSERGHYPSSDESSLETSPPDSSQRPSARPASPGSDAEKRKKRRVLFSKAQTLELERRFRQQRYLSAPEREQLASLLRLTPTQVKIWFQNHRYKLKRARAPGAAESPDLAASAELHAAPGLLRRVVVPVLVRDGQPCGGGGGGEVGTAAAQEKCGAPPAAACPLPGYPAFGPGSALGLFPAYQHLASPALVSWNW

SEQ ID NO: 15399 - protein, 234 aa, Homo sapiens
MLRVPEPRPGEAKAEGAAPPTPSKPLTSFLIQDILRDGAQRQGGRTSSQRQRDPEPEPEPEPEGGRSRAGAQNDQLSTGPRAAPEEAETLAETEPERHLGSYLLDSENTSGALPRLPQTPKQPQKRSRAAFSHTQVIELERKFSHQKYLSAPERAHLAKNLKLTETQVKIWFQNRRYKTKRKQLSSELGDLEKHSSLPALKEEAFSRASLVSVYNSYPYYPYLYCVGSWSPAFW

SEQ ID NO: 15400 - protein, 333 aa, Homo sapiens
MAVRGANTLTSFSIQAILNKKEERGGLAAPEGRPAPGGTAASVAAAPAVCCWRLFGERDAGALGGAEDSLLASPAGTRTAAGRTAESPEGWDSDSALSEENESRRRCADARGASGAGLAGGSLSLGQPVCELAASKDLEEEAAGRSDSEMSASVSGDRSPRTEDDGVGPRGAHVSALCSGAGGGGGSGPAGVAEEEEEPAAPKPRKKRSRAAFSHAQVFELERRFNHQRYLSGPERADLAASLKLTETQVKIWFQNRRYKTKRRQMAADLLASAPAAKKVAVKVLVRDDQRQYLPGEVLRPPSLLPLQPSYYYPYYCLPGWALSTCAAAAGTQ

SEQ ID NO: 15401 - protein, 367 aa, Homo sapiens
MLAVGAMEGTRQSAFLLSSPPLAALHSMAEMKTPLYPAAYPPLPAGPPSSSSSSSSSSSPSPPLGTHNPGGLKPPATGGLSSLGSPPQQLSAATPHGINDILSRPSMPVASGAALPSASPSGSSSSSSSSASASSASAAAAAAAAAAAAASSPAGLLAGLPRFSSLSPPPPPPGLYFSPSAAAVAAVGRYPKPLAELPGRTPIFWPGVMQSPPWRDARLACTPHQGSILLDKDGKRKHTRPTFSGQQIFALEKTFEQTKYLAGPERARLAYSLGMTESQVKVWFQNRRTKWRKKHAAEMATAKKKQDSETERLKGASENEEEDDDYNKPLDPNSDDEKITQLLKKHKSSSGGGGGLLLHASEPESSS

SEQ ID NO: 15402 - protein, 277 aa, Homo sapiens
MDTNRPGAFVLSSAPLAALHNMAEMKTSLFPYALQGPAGFKAPALGGLGAQLPLGTPHGISDILGRPVGAAGGGLLGGLPRLNGLASSAGVYFGPAAAVARGYPKPLAELPGRPPIFWPGVVQGAPWRDPRLAGPAPAGGVLDKDGKKKHSRPTFSGQQIFALEKTFEQTKYLAGPERARLAYSLGMTESQVKVWFQNRRTKWRKRHAVEMASAKKKQDSDAEKLKVGGSDAEDDDEYNRPLDPNSDDEKITRLLKKHKPSNLALVSPCGGGAGDAL

SEQ ID NO: 15403 - protein, 265 aa, Homo sapiens
MESNLQGTFLLNNTPLAQFPEMKAPVCQYSVQNSFYKLSPPGLGPQLAAGTPHGITDILSRPVAAPNNSLLSGYPHVAGFGGLSSQGVYYSPQVGNFSKAGNEYPTRTRNCWADTGQDWRGGRQCSNTPDPLSDSIHKKKHTRPTFTGHQIFALEKTFEQTKYLAGPERARLAYSLGMTESQVKVWFQNRRTKWRKKSALEPSSSTPRAPGGAGAGAGGDRAPSENEDDEYNKPLDPDSDDEKIRLLLRKHRAAFSVLSLGAHSV

SEQ ID NO: 15404 - protein, 691 aa, Homo sapiens
MALLLTLTSPDLEGTWDTRDKDGFKAQEGPPLAVPEFPVCGLYRIYGVCGSFSSFFIIRCSLCALETLKSPQHDPLEIPEQSLKLIPLVSGKRELTRGQKAGEKPLAAGPGEEELLRGSAPHAQDTQSEELPPSCTISGEKKPPAVSGEATGADAGRLCPPPRSRAPHKDRTLARSRPQTQGEDCSLPVGEVKIGKRSYSPAPGKQKKPNAMGLAPTSSPGAPNSARATHNPVPCGSGRGPCHLANLLSTLAQSNQNRDHKQGPPEVTCQIRKKTRTLYRSDQLEELEKIFQEDHYPDSDKRREIAQTVGVTPQRIMVKGAGSLVAGWSGGGPTIETLELQSERSAVAWVWFQNRRAKWRKMEKLNGKESKDNPAAPGPASSQCSSAAEILPAVPMEPKPDPFPQESPLDTFPEPPMLLTSDQTLAPTQPSEGAQRVVTPPLFSPPPVRRADLPFPLGPVHTPQLMPLLMDVAGSDSSHKDGPCGSWGTSITLPPPCSYLEELEPQDYQQSNQPGPFQFSQAPQPPLFQSPQPKLPYLPTFPFSMPSSLTLPPPEDSLFMFPCGPSGGTSQGYCPGASSGQILMQPPAGNIGTASWSDPCLPELPFPGPFCPQALGHPPGGDGYFPDLFPTPCPQALGRQPSSALSWMPEGARPGTGPLLSKAKEEPPAASLDQPSALEEARGDDKNSHVP

SEQ ID NO: 15405 - protein, 800 aa, Homo sapiens
MKARRNKKQIPSFRKLIKTSKVKLENKLKNKQFKQQSTLKKYRKEQRKLRQAVKDAVSKKPIPLENPKEKRPGKRIEREEEEEEEALPLDMMDEDDLQLMKDLGQRVSFLTRDLSSSEPVHAKKRKHERIIDKYEKIPRTLQTAPEKELIHLLPIKDKSGIIPQTREKPVTDSNKDEEDQEEERELEEEIIEDPIQELTIEEHLIERKKKLQEKKMHIAALASAILSDPENNIKKLKELRSMLMEQDPDVAVTVRKLVIVSLMELFKDITPSYKIRPLTEAEKSTKTRKETQKLREFEEGLVSQYKFYLENLEQMVKDWKQRKLKKSNVVSLKAYKGLAEVAVKSLCELLVALPHFNFHNNIIVLIVPLMNDMSKLISEMCCEAVKKLFKQDKLGQASLGVIKVISGFVKGRNYEVRPEMLKTFLCLRIKEVEVKKDTEDINKPKKFMTFKEKRKSLSRMQRKWKKAEEKLERELREAEASESTEKKLKLHTETLNIVFVTYFRILKKAQRSPLLPAVLEGLAKFAHLINVEFFDDLLVVLHTLIESGDLSYQESLHCVQTAFHILSGQGDVLNIDPLKFYTHLYKTLFKLHAGATNEGVEIVLQCLDVMLTKRRKQVSQQRALAFIKRLCTLALHVLPNSSIGILATTRILMHTFPKTDLLLDSESQGSGVFLPELDEPEYCNAQNTALWELHALRRHYHPIVQRFAAHLIAGAPSEGSGALKPELSRRSATELFEAYSMAEMTFNPPVESSNPKIKGKFLQGDSFLNEDLNQLIKRYSSEVATESPLDFTKYLKTSLH

SEQ ID NO: 15406 - protein, 516 aa, Homo sapiens
MEREPGAAGVRRALGRRLEAVLASRSEANAVFDILAVLQSEDQEEIQEAVRTCSRLFGALLERGELFVGQLPSEEMVMTGSQGATRKYKVWMRHRYHSCCNRLGELLGHPSFQVKELALSALLKFVQLEGAHPLEKSKWEGNYLFPRELFKLVVGGLLSPEEDQSLLLSQFREYLDYDDTRYHTMQAAVDAVARVTGQHPEVPPAFWNNAFTLLSAVSLPRREPTVSSFYVKRAELWDTWKVAHLKEHRRVFQAMWLSFLKHKLPLSLYKKVLLIVHDAILPQLAQPTLMIDFLTRACDLGGALSLLALNGLFILIHKHNLEYPDFYRKLYGLLDPSVFHVKYRARFFHLADLFLSSSHLPAYLVAAFAKRLARLALTAPPEALLMVLPFICNLLRRHPACRVLVHRPHGPELDADPYDPGEEDPAQSRALESSLWELQALQRHYHPEVSKAASVINQALSMPEVSIAPLLELTAYEIFERDLKKKGPEPVPLEFIPAQGLLGRPGELCAQHFTLS

SEQ ID NO: 15407 - protein, 471 aa, Homo sapiens
MQSNKTFNLEKQNHTPRKHHQHHHQQQHHQQQQQQPPPPPIPANGQQASSQNEGLTIDLKNFRKPGEKTFTQRSRLFVGNLPPDITEEEMRKLFEKYGKAGEVFIHKDKGFGFIRLETRTLAEIAKVELDNMPLRGKQLRVRFACHSASLTVRNLPQYVSNELLEEAFSVFGQVERAVVIVDDRGRPSGKGIVEFSGKPAARKALDRCSEGSFLLTTFPRPVTVEPMDQLDDEEGLPEKLVIKNQQFHKEREQPPRFAQPGSFEYEYAMRWKALIEMEKQQQDQVDRNIKEAREKLEMEMEAARHEHQVMLMRQDLMRRQEELRRMEELHNQEVQKRKQLELRQEEERRRREEEMRRQQEEMMRRQQEGFKGTFPDAREQEIRMGQMAMGGAMGINNRGAMPPAPVPAGTPAPPGPATMMPDGTLGLTPPTTERFGQAATMEGIGAIGGTPPAFNRAAPGAEFAPNKRRRY

SEQ ID NO: 15408 - protein, 251 aa, Homo sapiens
MPSPRPRGSPPPAPSGSRVRPPRSGRSPAPRSPTGPNTPRAPGRFESPFSVEAILARPDPCAPAASQPSGSACVHPAFWTAASLCATGGLPWACPTSWLPAYLSVGFYPVPGPRVAPVCGLLGFGVTGLELAHCSGLWAFPDWAPTEDLQDTERQQKRVRTMFNLEQLEELEKVFAKQHNLVGKKRAQLAARLKLTENQVRVWFQNRRVKYQKQQKLRAAVTSAEAASLDEPSSSSIASIQSDDAESGVDG

SEQ ID NO: 15409 - protein, 590 aa, Homo sapiens
MAAPYPGSGGGSEVKCVGGRGASVPWDFLPGLMVKAPSGPCLQAQRKEKSRNAARSRRGKENLEFFELAKLLPLPGAISSQLDKASIVRLSVTYLRLRRFAALGAPPWGLRAAGPPAGLAPGRRGPAALVSEVFEQHLGGHILQSLDGFVFALNQEGKFLYISETVSIYLGLSQVEMTGSSVFDYIHPGDHSEVLEQLGLRTPTPGPPTPPSVSSSSSSSSSLADTPEIEASLTKVPPSSLVQERSFFVRMKSTLTKRGLHVKASGYKVIHVTGRLRAHALGLVALGHTLPPAPLAELPLHGHMIVFRLSLGLTILACESRVSDHMDLGPSELVGRSCYQFVHGQDATRIRQSHVDLLDKGQVMTGYYRWLQRAGGFVWLQSVATVAGSGKSPGEHHVLWVSHVLSQAEGGQTPLDAFQLPASVACEEASSPGPEPTEPEPPTEGKQAAPAENEAPQTQGKRIKVEPGPRETKGSEDSGDEDPSSHPATPRPEFTSVIRAGVLKQDPVRPWGLAPPGDPPPTLLHAGFLPPVVRGLCTPGTIRYGPAELGLVYPHLQRLGPGPALPEAFYPPLGLPYPGPAGTRLPRKGD

SEQ ID NO: 15410 - protein, 824 aa, Homo sapiens
MDEDEKDRAKRASRNKSEKKRRDQFNVLIKELSSMLPGNTRKMDKTTVLEKVIGFLQKHNEVSAQTEICDIQQDWKPSFLSNEEFTQLMLEALDGFIIAVTTDGSIIYVSDSITPLLGHLPSDVMDQNLLNFLPEQEHSEVYKILSSHMLVTDSPSPEYLKSDSDLEFYCHLLRGSLNPKEFPTYEYIKFVGNFRSYNNVPSPSCNGFDNTLSRPCRVPLGKEVCFIATVRLATPQFLKEMCIVDEPLEEFTSRHSLEWKFLFLDHRAPPIIGYLPFEVLGTSGYDYYHIDDLELLARCHQHLMQFGKGKSCCYRFLTKGQQWIWLQTHYYITYHQWNSKPEFIVCTHSVVSYADVRVERRQELALEDPPSEALHSSALKDKGSSLEPRQHFNTLDVGASGLNTSHSPSASSRSSHKSSHTAMSEPTSTPTKLMAEASTPALPRSATLPQELPVPGLSQAATMPAPLPSPSSCDLTQQLLPQTVLQSTPAPMAQFSAQFSMFQTIKDQLEQRTRILQANIRWQQEELHKIQEQLCLVQDSNVQMFLQQPAVSLSFSSTQRPEAQQQLQQRSAAVTQPQLGAGPQLPGQISSAQVTSQHLLRESSVISTQGPKPMRSSQLMQSSGRSGSSLVSPFSSATAALPPSLNLTTPASTSQDASQCQPSPDFSHDRQLRLLLSQPIQPMMPGSCDARQPSEVSRTGRQVKYAQSQTVFQNPDAHPANSSSAPMPVLLMGQAVLHPSFPASQPSPLQPAQARQQPPQHYLQVQAPTSLHSEQQDSLLLSTYSQQPGTLGYPQPPPAQPQPLRPPRRVSSLSESSGLQQPPR

SEQ ID NO: 15411 - protein, 933 aa, Homo sapiens
MAPTKPSFQQDPSRRERITAQHPLPNQSECRKIYRYDGIYCESTYQNLQALRKEKSRDAARSRRGKENFEFYELAKLLPLPAAITSQLDKASIIRLTISYLKMRDFANQGDPPWNLRMEGPPPNTSVKVIGAQRRRSPSALAIEVFEAHLGSHILQSLDGFVFALNQEGKFLYISETVSIYLGLSQVELTGSSVFDYVHPGDHVEMAEQLGMKLPPGRGLLSQGTAEDGASSASSSSQSETPEPVESTSPSLLTTDNTLERSFFIRMKSTLTKRGVHIKSSGYKVIHITGRLRLRVSLSHGRTVPSQIMGLVVVAHALPPPTINEVRIDCHMFVTRVNMDLNIIYCENRISDYMDLTPVDIVGKRCYHFIHAEDVEGIRHSHLDLLNKGQCVTKYYRWMQKNGGYIWIQSSATIAINAKNANEKNIIWVNYLLSNPEYKDTPMDIAQLPHLPEKTSESSETSDSESDSKDTSGITEDNENSKSDEKGNQSENSEDPEPDRKKSGNACDNDMNCNDDGHSSSNPDSRDSDDSFEHSDFENPKAGEDGFGALGAMQIKVERYVESESDLRLQNCESLTSDSAKDSDSAGEAGAQASSKHQKRKKRRKRQKGGSASRRRLSSASSPGGLDAGLVEPPRLLSSPNSASVLKIKTEISEPINFDNDSSIWNYPPNREISRNESPYSMTKPPSSEHFPSPQGGGGGGGGGGGLHVAIPDSVLTPPGADGAAARKTQFGASATAALAPVASDPLSPPLSASPRDKHPGNGGGGGGGGGGAGGGGPSASNSLLYTGDLEALQRLQAGNVVLPLVHRVTGTLAATSTAAQRVYTTGTIRYAPAEVTLAMQSNLLPNAHAVNFVDVNSPGFGLDPKTPMEMLYHHVHRLNMSGPFGGAVSAASLTQMPAGNVFTTAEGLFSTLPFPVYSNGIHAAQTLERKED

SEQ ID NO: 15412 - protein, 802 aa, Homo sapiens
MYRSTKGASKARRDQINAEIRNLKELLPLAEADKVRLSYLHIMSLACIYTRKGVFFAGGTPLAGPTGLLSAQELEDIVAALPGFLLVFTAEGKLLYLSESVSEHLGHSMVDLVAQGDSIYDIIDPADHLTVRQQLTLPSALDTDRLFRCRFNTSKSLRRQSAGNKLVLIRGRFHAHPPGAYWAGNPVFTAFCAPLEPRPRPGPGPGPGPASLFLAMFQSRHAKDLALLDISESVLIYLGFERSELLCKSWYGLLHPEDLAHASAQHYRLLAESGDIQAEMVVRLQAKTGGWAWIYCLLYSEGPEGPITANNYPISDMEAWSLRQQLNSEDTQAAYVLGTPTMLPSFPENILSQEECSSTNPLFTAALGAPRSTSFPSAPELSVVSASEELPRPSKELDFSYLTFPSGPEPSLQAELSKDLVCTPPYTPHQPGGCAFLFSLHEPFQTHLPTPSSTLQEQLTPSTATFSDQLTPSSATFPDPLTSPLQGQLTETSVRSYEDQLTPCTSTFPDQLLPSTATFPEPLGSPAHEQLTPPSTAFQAHLDSPSQTFPEQLSPNPTKTYFAQEGCSFLYEKLPPSPSSPGNGDCTLLALAQLRGPLSVDVPLVPEGLLTPEASPVKQSFFHYSEKEQNEIDRLIQQISQLAQGMDRPFSAEAGTGGLEPLGGLEPLDSNLSLSGAGPPVLSLDLKPWKCQELDFLADPDNMFLEETPVEDIFMDLSTPDPSEEWGSGDPEAEGPGGAPSPCNNLSPEDHSFLEDLATYETAFETGVSAFPYDGFTDELHQLQSQVQDSFHEDGSGGEPTF

SEQ ID NO: 15413 - protein, 470 aa, Homo sapiens
MAGENHQWQGSILYNMLMSAKQTRAAPEAPETRLVDQCWGCSCGDEPGVGREGLLGGRNVALLYRCCFCGKDHPRQGSILYSMLTSAKQTYAAPKAPEATLGPCWGCSCGSDPGVGRAGLPGGRPVALLYRCCFCGEDHPRQGSILYSLLTSSKQTHVAPAAPEARPGGAWWDRSYFAQRPGGKEALPGGRATALLYRCCFCGEDHPQQGSTLYCVPTSTNQAQAAPEERPRAPWWDTSSGALRPVALKSPQVVCEAASAGLLKTLRFVKYLPCFQVLPLDQQLVLVRNCWASLLMLELAQDRLQFETVEVSEPSMLQKILTTRRRETGGNEPLPVPTLQHHLAPPAEARKVPSASQVQAIKCFLSKCWSLNISTKEYAYLKGTVLFNPDVPGLQCVKYIQGLQWGTQQILSEHTRMTHQGPHDRFIELNSTLFLLRFINANVIAELFFRPIIGTVSMDDMMLEMLCTKI

SEQ ID NO: 15414 - protein, 257 aa, Homo sapiens
MSTSQPGACPCQGAASRPAILYALLSSSLKAVPRPRSRCLCRQHRPVQLCAPHRTCREALDVLAKTVAFLRNLPSFWQLPPQDQRRLLQGCWGPLFLLGLAQDAVTFEVAEAPVPSILKKILLEEPSSSGGSGQLPDRPQPSLAAVQWLQCCLESFWSLELSPKEYACLKGTILFNPDVPGLQAASHIGHLQQEAHWVLCEVLEPWCPAAQGRLTRVLLTASTLKSIPTSLLGDLFFRPIIGDVDIAGLLGDMLLLR

SEQ ID NO: 15415 - protein, 614 aa, Homo sapiens
MTTLDSNNNTGGVITYIGSSGSSPSRTSPESLYSDNSNGSFQSLTQGCPTYFPPSPTGSLTQDPARSFGSIPPSLSDDGSPSSSSSSSSSSSSFYNGSPPGSLQVAMEDSSRVSPSKSTSNITKLNGMVLLCKVCGDVASGFHYGVHACEGCKGFFRRSIQQNIQYKRCLKNENCSIVRINRNRCQQCRFKKCLSVGMSRDAVRFGRIPKREKQRMLAEMQSAMNLANNQLSSQCPLETSPTQHPTPGPMGPSPPPAPVPSPLVGFSQFPQQLTPPRSPSPEPTVEDVISQVARAHREIFTYAHDKLGSSPGNFNANHASGSPPATTPHRWENQGCPPAPNDNNTLAAQRHNEALNGLRQAPSSYPPTWPPGPAHHSCHQSNSNGHRLCPTHVYAAPEGKAPANSPRQGNSKNVLLACPMNMYPHGRSGRTVQEIWEDFSMSFTPAVREVVEFAKHIPGFRDLSQHDQVTLLKAGTFEVLMVRFASLFNVKDQTVMFLSRTTYSLQELGAMGMGDLLSAMFDFSEKLNSLALTEEELGLFTAVVLVSADRSGMENSASVEQLQETLLRALRALVLKNRPLETSRFTKLLLKLPDLRTLNNMHSEKLLSFRVDAQ

SEQ ID NO: 15416 - protein, 579 aa, Homo sapiens
MEVNAGGVIAYISSSSSASSPASCHSEGSENSFQSSSSSVPSSPNSSNSDTNGNPKNGDLANIEGILKNDRIDCSMKTSKSSAPGMTKSHSGVTKFSGMVLLCKVCGDVASGFHYGVHACEGCKGFFRRSIQQNIQYKKCLKNENCSIMRMNRNRCQQCRFKKCLSVGMSRDAVRFGRIPKREKQRMLIEMQSAMKTMMNSQFSGHLQNDTLVEHHEQTALPAQEQLRPKPQLEQENIKSSSPPSSDFAKEEVIGMVTRAHKDTFMYNQEQQENSAESMQPQRGERIPKNMEQYNLNHDHCGNGLSSHFPCSESQQHLNGQFKGRNIMHYPNGHAICIANGHCMNFSNAYTQRVCDRVPIDGFSQNENKNSYLCNTGGRMHLVCPLSKSPYVDPHKSGHEIWEEFSMSFTPAVKEVVEFAKRIPGFRDLSQHDQVNLLKAGTFEVLMVRFASLFDAKERTVTFLSGKKYSVDDLHSMGAGDLLNSMFEFSEKLNALQLSDEEMSLFTAVVLVSADRSGIENVNSVEALQETLIRALRTLIMKNHPNEASIFTKLLLKLPDLRSLNNMHSEELLAFKVHP

SEQ ID NO: 15417 - protein, 460 aa, Homo sapiens
MSSPTTSSLDTPLPGNGPPQPGAPSSSPTVKEEGPEPWPGGPDPDVPGTDEASSACSTDWVIPDPEEEPERKRKKGPAPKMLGHELCRVCGDKASGFHYNVLSCEGCKGFFRRSVVRGGARRYACRGGGTCQMDAFMRRKCQQCRLRKCKEAGMREQCVLSEEQIRKKKIRKQQQESQSQSQSPVGPQGSSSSASGPGASPGGSEAGSQGSGEGEGVQLTAAQELMIQQLVAAQLQCNKRSFSDQPKVTPWPLGADPQSRDARQQRFAHFTELAIISVQEIVDFAKQVPGFLQLGREDQIALLKASTIEIMLLETARRYNHETECITFLKDFTYSKDDFHRAGLQVEFINPIFEFSRAMRRLGLDDAEYALLIAINIFSADRPNVQEPGRVEALQQPYVEALLSYTRIKRPQDQLRFPRMLMKLVSLRTLSSVHSEQVFALRLQDKKLPPLLSEIWDVHE

SEQ ID NO: 15418 - protein, 447 aa, Homo sapiens
MSLWLGAPVPDIPPDSAVELWKPGAQDASSQAQGGSSCILREEARMPHSAGGTAGVGLEAAEPTALLTRAEPPSEPTEIRPQKRKKGPAPKMLGNELCSVCGDKASGFHYNVLSCEGCKGFFRRSVIKGAHYICHSGGHCPMDTYMRRKCQECRLRKCRQAGMREECVLSEEQIRLKKLKRQEEEQAHATSLPPRASSPPQILPQLSPEQLGMIEKLVAAQQQCNRRSFSDRLRVTPWPMAPDPHSREARQQRFAHFTELAIVSVQEIVDFAKQLPGFLQLSREDQIALLKTSAIEVMLLETSRRYNPGSESITFLKDFSYNREDFAKAGLQVEFINPIFEFSRAMNELQLNDAEFALLIAISIFSADRPNVQDQLQVERLQHTYVEALHAYVSIHHPHDRLMFPRMLMKLVSLRTLSSVHSEQVFALRLQDKKLPPLLSEIWDVHE

SEQ ID NO: 15419 - protein, 486 aa, Homo sapiens
MVMQFQGLENPIQISPHCSCTPSGFFMEMMSMKPAKGVLTEQVAGPLGQNLEVEPYSQYSNVQFPQVQPQISSSSYYSNLGFYPQQPEEWYSPGIYELRRMPAETLYQGETEVAEMPVTKKPRMGASAGRIKGDELCVVCGDRASGYHYNALTCEGCKGFFRRSITKNAVYKCKNGGNCVMDMYMRRKCQECRLRKCKEMGMLAECMYTGLLTEIQCKSKRLRKNVKQHADQTVNEDSEGRDLRQVTSTTKSCREKTELTPDQQTLLHFIMDSYNKQRMPQEITNKILKEEFSAEENFLILTEMATNHVQVLVEFTKKLPGFQTLDHEDQIALLKGSAVEAMFLRSAEIFNKKLPSGHSDLLEERIRNSGISDEYITPMFSFYKSIGELKMTQEEYALLTAIVILSPDRQYIKDREAVEKLQEPLLDVLQKLCKIHQPENPQHFACLLGRLTELRTFNHHHAEMLMSWRVNDHKFTPLLCEIWDVQ

SEQ ID NO: 15420 - protein, 434 aa, Homo sapiens
MEVRPKESWNHADFVHCEDTESVPGKPSVNADEEVGGPQICRVCGDKATGYHFNVMTCEGCKGFFRRAMKRNARLRCPFRKGACEITRKTRRQCQACRLRKCLESGMKKEMIMSDEAVEERRALIKRKKSERTGTQPLGVQGLTEEQRMMIRELMDAQMKTFDTTFSHFKNFRLPGVLSSGCELPESLQAPSREEAAKWSQVRKDLCSLKVSLQLRGEDGSVWNYKPPADSGGKEIFSLLPHMADMSTYMFKGIISFAKVISYFRDLPIEDQISLLKGAAFELCQLRFNTVFNAETGTWECGRLSYCLEDTAGGFQQLLLEPMLKFHYMLKKLQLHEEEYVLMQAISLFSPDRPGVLQHRVVDQLQEQFAITLKSYIECNRPQPAHRFLFLKIMAMLTELRSINAQHTQRLLRIQDIHPFATPLMQELFGITGS

SEQ ID NO: 15421 - protein, 352 aa, Homo sapiens
MASREDELRNCVVCGDQATGYHFNALTCEGCKGFFRRTVSKSIGPTCPFAGSCEVSKTQRRHCPACRLQKCLDAGMRKDMILSAEALALRRAKQAQRRAQQTPVQLSKEQEELIRTLLGAHTRHMGTMFEQFVQFRPPAHLFIHHQPLPTLAPVLPLVTHFADINTFMVLQVIKFTKDLPVFRSLPIEDQISLLKGAAVEICHIVLNTTFCLQTQNFLCGPLRYTIEDGARVSPTVGFQVEFLELLFHFHGTLRKLQLQEPEYVLLAAMALFSPDRPGVTQRDEIDQLQEEMALTLQSYIKGQQRRPRDRFLYAKLLGLLAELRSINEAYGYQIQHIQGLSAMMPLLQEICS

SEQ ID NO: 15422 - protein, 603 aa, Homo sapiens
MATIEEIAHQIIEQQMGEIVTEQQTGQKIQIVTALDHNTQGKQFILTNHDGSTPSKVILARQDSTPGKVFLTTPDAAGVNQLFFTTPDLSAQHLQLLTDNSPDQGPNKVFDLCVVCGDKASGRHYGAVTCEGCKGFFKRSIRKNLVYSCRGSKDCIINKHHRNRCQYCRLQRCIAFGMKQDSVQCERKPIEVSREKSSNCAASTEKIYIRKDLRSPLTATPTFVTDSESTRSTGLLDSGMFMNIHPSGVKTESAVLMTSDKAESCQGDLSTLANVVTSLANLGKTKDLSQNSNEMSMIESLSNDDTSLCEFQEMQTNGDVSRAFDTLAKALNPGESTACQSSVAGMEGSVHLITGDSSINYTEKEGPLLSDSHVAFRLTMPSPMPEYLNVHYIGESASRLLFLSMHWALSIPSFQALGQENSISLVKAYWNELFTLGLAQCWQVMNVATILATFVNCLHNSLQQDKMSTERRKLLMEHIFKLQEFCNSMVKLCIDGYEYAYLKAIVLFSPDHPSLENMEQIEKFQEKAYVEFQDYITKTYPDDTYRLSRLLLRLPALRLMNATITEELFFKGLIGNIRIDSVIPHILKMEPADYNSQIIGHSI

SEQ ID NO: 15423 - protein, 596 aa, Homo sapiens
MTSPSPRIQIISTDSAVASPQRIQIVTDQQTGQKIQIVTAVDASGSPKQQFILTSPDGAGTGKVILASPETSSAKQLIFTTSDNLVPGRIQIVTDSASVERLLGKTDVQRPQVVEYCVVCGDKASGRHYGAVSCEGCKGFFKRSVRKNLTYSCRSNQDCIINKHHRNRCQFCRLKKCLEMGMKMESVQSERKPFDVQREKPSNCAASTEKIYIRKDLRSPLIATPTFVADKDGARQTGLLDPGMLVNIQQPLIREDGTVLLATDSKAETSQGALGTLANVVTSLANLSESLNNGDTSEIQPEDQSASEITRAFDTLAKALNTTDSSSSPSLADGIDTSGGGSIHVISRDQSTPIIEVEGPLLSDTHVTFKLTMPSPMPEYLNVHYICESASRLLFLSMHWARSIPAFQALGQDCNTSLVRACWNELFTLGLAQCAQVMSLSTILAAIVNHLQNSIQEDKLSGDRIKQVMEHIWKLQEFCNSMAKLDIDGYEYAYLKAIVLFSPDHPGLTSTSQIEKFQEKAQMELQDYVQKTYSEDTYRLARILVRLPALRLMSSNITEELFFTGLIGNVSIDSIIPYILKMETAEYNGQITGASL

SEQ ID NO: 15424 - protein, 385 aa, Homo sapiens
MSKPAGSTSRILDIPCKVCGDRSSGKHYGVYACDGCSGFFKRSIRRNRTYVCKSGNQGGCPVDKTHRNQCRACRLKKCLEVNMNKDAVQHERGPRTSTIRKQVALYFRGHKEENGAAAHFPSAALPAPAFFTAVTQLEPHGLELAAVSTTPERQTLVSLAQPTPKYPHEVNGTPMYLYEVATESVCESAARLLFMSIKWAKSVPAFSTLSLQDQLMLLEDAWRELFVLGIAQWAIPVDANTLLAVSGMNGDNTDSQKLNKIISEIQALQEVVARFRQLRLDATEFACLKCIVTFKAVPTHSGSELRSFRNAAAIAALQDEAQLTLNSYIHTRYPTQPCRFGKLLLLLPALRSISPSTIEEVFFKKTIGNVPITRLLSDMYKSSDI

SEQ ID NO: 15425 - protein, 410 aa, Homo sapiens
METRPTALMSSTVAAAAPAAGAASRKESPGRWGLGEDPTGVSPSLQCRVCGDSSSGKHYGIYACNGCSGFFKRSVRRRLIYRCQVGAGMCPVDKAHRNQCQACRLKKCLQAGMNQDAVQNERQPRSTAQVHLDSMESNTESRPESLVAPPAPAGRSPRGPTPMSAARALGHHFMASLITAETCAKLEPEDADENIDVTSNDPEFPSSPYSSSSPCGLDSIHETSARLLFMAVKWAKNLPVFSSLPFRDQVILLEEAWSELFLLGAIQWSLPLDSCPLLAPPEASAAGGAQGRLTLASMETRVLQETISRFRALAVDPTEFACMKALVLFKPETRGLKDPEHVEALQDQSQVMLSQHSKAHHPSQPVRFGKLLLLLPSLRFITAERIELLFFRKTIGNTPMEKLLCDMFKN

SEQ ID NO: 15426 - protein, 423 aa, Homo sapiens
MAMVVSSWRDPQDDVAGGNPGGPNPAAQAARGGGGGAGEQQQQAGSGAPHTPQTPGQPGAPATPGTAGDKGQGPPGSGQSQQHIECVVCGDKSSGKHYGQFTCEGCKSFFKRSVRRNLTYTCRANRNCPIDQHHRNQCQYCRLKKCLKVGMRREAVQRGRMPPTQPNPGQYALTNGDPLNGHCYLSGYISLLLRAEPYPTSRYGSQCMQPNNIMGIENICELAARLLFSAVEWARNIPFFPDLQITDQVSLLRLTWSELFVLNAAQCSMPLHVAPLLAAAGLHASPMSADRVVAFMDHIRIFQEQVEKLKALHVDSAEYSCLKAIVLFTSDACGLSDAAHIESLQEKSQCALEEYVRSQYPNQPSRFGKLLLRLPSLRTVSSSVIEQLFFVRLVGKTPIETLIRDMLLSGSSFNWPYMSIQCS

SEQ ID NO: 15427 - protein, 414 aa, Homo sapiens
MAMVVSTWRDPQDEVPGSQGSQASQAPPVPGPPPGAPHTPQTPGQGGPASTPAQTAAGGQGGPGGPGSDKQQQQQHIECVVCGDKSSGKHYGQFTCEGCKSFFKRSVRRNLSYTCRANRNCPIDQHHRNQCQYCRLKKCLKVGMRREAVQRGRMPPTQPTHGQFALTNGDPLNCHSYLSGYISLLLRAEPYPTSRFGSQCMQPNNIMGIENICELAARMLFSAVEWARNIPFFPDLQITDQVALLRLTWSELFVLNAAQCSMPLHVAPLLAAAGLHASPMSADRVVAFMDHIRIFQEQVEKLKALHVDSAEYSCLKAIVLFTSDACGLSDVAHVESLQEKSQCALEEYVRSQYPNQPTRFGKLLLRLPSLRTVSSSVIEQLFFVRLVGKTPIETLIRDMLLSGSSFNWPYMAIQ

SEQ ID NO: 15428 - protein, 404 aa, Homo sapiens
MAMVTGGWGGPGGDTNGVDKAGGYPRAAEDDSASPPGAASDAEPGDEERPGLQVDCVVCGDKSSGKHYGVFTCEGCKSFFKRSIRRNLSYTCRSNRDCQIDQHHRNQCQYCRLKKCFRVGMRKEAVQRGRIPHSLPGAVAASSGSPPGSALAAVASGGDLFPGQPVSELIAQLLRAEPYPAAAGRFGAGGGAAGAVLGIDNVCELAARLLFSTVEWARHAPFFPELPVADQVALLRLSWSELFVLNAAQAALPLHTAPLLAAAGLHAAPMAAERAVAFMDQVRAFQEQVDKLGRLQVDSAEYGCLKAIALFTPDACGLSDPAHVESLQEKAQVALTEYVRAQYPSQPQRFGRLLLRLPALRAVPASLISQLFFMRLVGKTPIETLIRDMLLSGSTFNWPYGSGQ

SEQ ID NO: 15429 - protein, 777 aa, Homo sapiens
MDSKESLTPGREENPSSVLAQERGDVMDFYKTLRGGATVKVSASSPSLAVASQSDSKQRRLLVDFPKGSVSNAQQPDLSKAVSLSMGLYMGETETKVMGNDLGFPQQGQISLSSGETDLKLLEESIANLNRSTSVPENPKSSASTAVSAAPTEKEFPKTHSDVSSEQQHLKGQTGTNGGNVKLYTTDQSTFDILQDLEFSSGSPGKETNESPWRSDLLIDENCLLSPLAGEDDSFLLEGNSNEDCKPLILPDTKPKIKDNGDLVLSSPSNVTLPQVKTEKEDFIELCTPGVIKQEKLGTVYCQASFPGANIIGNKMSAISVHGVSTSGGQMYHYDMNTASLSQQQDQKPIFNVIPPIPVGSENWNRCQGSGDDNLTSLGTLNFPGRTVFSNGYSSPSMRPDVSSPPSSSSTATTGPPPKLCLVCSDEASGCHYGVLTCGSCKVFFKRAVEGQHNYLCAGRNDCIIDKIRRKNCPACRYRKCLQAGMNLEARKTKKKIKGIQQATTGVSQETSENPGNKTIVPATLPQLTPTLVSLLEVIEPEVLYAGYDSSVPDSTWRIMTTLNMLGGRQVIAAVKWAKAIPGFRNLHLDDQMTLLQYSWMFLMAFALGWRSYRQSSANLLCFAPDLIINEQRMTLPCMYDQCKHMLYVSSELHRLQVSYEEYLCMKTLLLLSSVPKDGLKSQELFDEIRMTYIKELGKAIVKREGNSSQNWQRFYQLTKLLDSMHEVVENLLNYCFQTFLDKTMSIEFPEMLAEIITNQIPKYSNGNIKKLLFHQK

SEQ ID NO: 15430 - protein, 984 aa, Homo sapiens
METKGYHSLPEGLDMERRWGQVSQAVERSSLGPTERTDENNYMEIVNVSCVSGAIPNNSTQGSSKEKQELLPCLQQDNNRPGILTSDIKTELESKELSATVAESMGLYMDSVRDADYSYEQQNQQGSMSPAKIYQNVEQLVKFYKGNGHRPSTLSCVNTPLRSFMSDSGSSVNGGVMRAIVKSPIMCHEKSPSVCSPLNMTSSVCSPAGINSVSSTTASFGSFPVHSPITQGTPLTCSPNAENRGSRSHSPAHASNVGSPLSSPLSSMKSSISSPPSHCSVKSPVSSPNNVTLRSSVSSPANINNSRCSVSSPSNTNNRSTLSSPAASTVGSICSPVNNAFSYTASGTSAGSSTLRDVVPSPDTQEKGAQEVPFPKTEEVESAISNGVTGQLNIVQYIKPEPDGAFSSSCLGGNSKINSDSSFSVPIKQESTKHSCSGTSFKGNPTVNPFPFMDGSYFSFMDDKDYYSLSGILGPPVPGFDGNCEGSGFPVGIKQEPDDGSYYPEASIPSSAIVGVNSGGQSFHYRIGAQGTISLSRSARDQSFQHLSSFPPVNTLVESWKSHGDLSSRRSDGYPVLEYIPENVSSSTLRSVSTGSSRPSKICLVCGDEASGCHYGVVTCGSCKVFFKRAVEGQHNYLCAGRNDCIIDKIRRKNCPACRLQKCLQAGMNLGARKSKKLGKLKGIHEEQPQQQQPPPPPPPPQSPEEGTTYIAPAKEPSVNTALVPQLSTISRALTPSPVMVLENIEPEIVYAGYDSSKPDTAENLLSTLNRLAGKQMIQVVKWAKVLPGFKNLPLEDQITLIQYSWMCLSSFALSWRSYKHTNSQFLYFAPDLVFNEEKMHQSAMYELCQGMHQISLQFVRLQLTFEEYTIMKVLLLLSTIPKDGLKSQAAFEEMRTNYIKELRKMVTKCPNNSGQSWQRFYQLTKLLDSMHDLVSDLLEFCFYTFRESHALKVEFPAMLVEIISDQLPKVESGNAKPLYFHRK

SEQ ID NO: 15431 - protein, 598 aa, Homo sapiens
MPCIQAQYGTPAPSPGPRDHLASDPLTPEFIKPTMDLASPEAAPAAPTALPSFSTFMDGYTGEFDTFLYQLPGTVQPCSSASSSASSTSSSSATSPASASFKFEDFQVYGCYPGPLSGPVDEALSSSGSDYYGSPCSAPSPSTPSFQPPQLSPWDGSFGHFSPSQTYEGLRAWTEQLPKASGPPQPPAFFSFSPPTGPSPSLAQSPLKLFPSQATHQLGEGESYSMPTAFPGLAPTSPHLEGSGILDTPVTSTKARSGAPGGSEGRCAVCGDNASCQHYGVRTCEGCKGFFKRTVQKNAKYICLANKDCPVDKRRRNRCQFCRFQKCLAVGMVKEVVRTDSLKGRRGRLPSKPKQPPDASPANLLTSLVRAHLDSGPSTAKLDYSKFQELVLPHFGKEDAGDVQQFYDLLSGSLEVIRKWAEKIPGFAELSPADQDLLLESAFLELFILRLAYRSKPGEGKLIFCSGLVLHRLQCARGFGDWIDSILAFSRSLHSLLVDVPAFACLSALVLITDRHGLQEPRRVEELQNRIASCLKEHVAAVAGEPQPASCLSRLLGKLPELRTLCTQGLQRIFYLKLEDLVPPPPIIDKIFMDTLPF

SEQ ID NO: 15432 - protein, 598 aa, Homo sapiens
MPCVQAQYGSSPQGASPASQSYSYHSSGEYSSDFLTPEFVKFSMDLTNTEITATTSLPSFSTFMDNYSTGYDVKPPCLYQMPLSGQQSSIKVEDIQMHNYQQHSHLPPQSEEMMPHSGSVYYKPSSPPTPTTPGFQVQHSPMWDDPGSLHNFHQNYVATTHMIEQRKTPVSRLSLFSFKQSPPGTPVSSCQMRFDGPLHVPMNPEPAGSHHVVDGQTFAVPNPIRKPASMGFPGLQIGHASQLLDTQVPSPPSRGSPSNEGLCAVCGDNAACQHYGVRTCEGCKGFFKRTVQKNAKYVCLANKNCPVDKRRRNRCQYCRFQKCLAVGMVKEVVRTDSLKGRRGRLPSKPKSPQEPSPPSPPVSLISALVRAHVDSNPAMTSLDYSRFQANPDYQMSGDDTQHIQQFYDLLTGSMEIIRGWAEKIPGFADLPKADQDLLFESAFLELFVLRLAYRSNPVEGKLIFCNGVVLHRLQCVRGFGEWIDSIVEFSSNLQNMNIDISAFSCIAALAMVTERHGLKEPKRVEELQNKIVNCLKDHVTFNNGGLNRPNYLSKLLGKLPELRTLCTQGLQRIFYLKLEDLVPPPAIIDKLFLDTLPF

SEQ ID NO: 15433 - protein, 626 aa, Homo sapiens
MPCVQAQYSPSPPGSSYAAQTYSSEYTTEIMNPDYTKLTMDLGSTEITATATTSLPSISTFVEGYSSNYELKPSCVYQMQRPLIKVEEGRAPSYHHHHHHHHHHHHHHQQQHQQPSIPPASSPEDEVLPSTSMYFKQSPPSTPTTPAFPPQAGALWDEALPSAPGCIAPGPLLDPPMKAVPTVAGARFPLFHFKPSPPHPPAPSPAGGHHLGYDPTAAAALSLPLGAAAAAGSQAAALESHPYGLPLAKRAAPLAFPPLGLTPSPTASSLLGESPSLPSPPSRSSSSGEGTCAVCGDNAACQHYGVRTCEGCKGFFKRTVQKNAKYVCLANKNCPVDKRRRNRCQYCRFQKCLSVGMVKEVVRTDSLKGRRGRLPSKPKSPLQQEPSQPSPPSPPICMMNALVRALTDSTPRDLDYSRYCPTDQAAAGTDAEHVQQFYNLLTASIDVSRSWAEKIPGFTDLPKEDQTLLIESAFLELFVLRLSIRSNTAEDKFVFCNGLVLHRLQCLRGFGEWLDSIKDFSLNLQSLNLDIQALACLSALSMITERHGLKEPKRVEELCNKITSSLKDHQSKGQALEPTESKVLGALVELRKICTLGLQRIFYLKLEDLVSPPSIIDKLFLDTLPF

SEQ ID NO: 15434 - protein, 461 aa, Homo sapiens
MDYSYDEDLDELCPVCGDKVSGYHYGLLTCESCKGFFKRTVQNNKHYTCTESQSCKIDKTQRKRCPFCRFQKCLTVGMRLEAVRADRMRGGRNKFGPMYKRDRALKQQKKAQIRANGFKLETGPPMGVPPPPPPAPDYVLPPSLHGPEPKGLAAGPPAGPLGDFGAPALPMAVPGAHGPLAGYLYPAFPGRAIKSEYPEPYASPPQPGLPYGYPEPFSGGPNVPELILQLLQLEPDEDQVRARILGCLQEPTKSRPDQPAAFGLLCRMADQTFISIVDWARRCMVFKELEVADQMTLLQNCWSELLVFDHIYRQVQHGKEGSILLVTGQEVELTTVATQAGSLLHSLVLRAQELVLQLLALQLDRQEFVCLKFIILFSLDLKFLNNHILVKDAQEKANAALLDYTLCHYPHCGDKFQQLLLCLVEVRALSMQAKEYLYHKHLGNEMPRNNLLIEMLQAKQT

SEQ ID NO: 15435 - protein, 541 aa, Homo sapiens
MSSNSDTGDLQESLKHGLTPIGAGLPDRHGSPIPARGRLVMLPKVETEALGLARSHGEQGQMPENMQVSQFKMVNYSYDEDLEELCPVCGDKVSGYHYGLLTCESCKGFFKRTVQNNKRYTCIENQNCQIDKTQRKRCPYCRFQKCLSVGMKLEAVRADRMRGGRNKFGPMYKRDRALKQQKKALIRANGLKLEAMSQVIQAMPSDLTISSAIQNIHSASKGLPLNHAALPPTDYDRSPFVTSPISMTMPPHGSLQGYQTYGHFPSRAIKSEYPDPYTSSPESIMGYSYMDSYQTSSPASIPHLILELLKCEPDEPQVQAKIMAYLQQEQANRSKHEKLSTFGLMCKMADQTLFSIVEWARSSIFFRELKVDDQMKLLQNCWSELLILDHIYRQVVHGKEGSIFLVTGQQVDYSIIASQAGATLNNLMSHAQELVAKLRSLQFDQREFVCLKFLVLFSLDVKNLENFQLVEGVQEQVNAALLDYTMCNYPQQTEKFGQLLLRLPEIRAISMQAEEYLYYKHLNGDVPYNNLLIEMLHAKRA

SEQ ID NO: 15436 - protein, 480 aa, Homo sapiens
MERDEPPPSGGGGGGGSAGFLEPPAALPPPPRNGFCQDELAELDPGTISVSDDRAEQRTCLICGDRATGLHYGIISCEGCKGFFKRSICNKRVYRCSRDKNCVMSRKQRNRCQYCRLLKCLQMGMNRKAIREDGMPGGRNKSIGPVQISEEEIERIMSGQEFEEEANHWSNHGDSDHSSPGNRASESNQPSPGSTLSSSRSVELNGFMAFREQYMGMSVPPHYQYIPHLFSYSGHSPLLPQQARSLDPQSYSLIHQLLSAEDLEPLGTPMLIEDGYAVTQAELFALLCRLADELLFRQIAWIKKLPFFCELSIKDYTCLLSSTWQELILLSSLTVYSKQIFGELADVTAKYSPSDEELHRFSDEGMEVIERLIYLYHKFHQLKVSNEEYACMKAINFLNQDIRGLTSASQLEQLNKRYWYICQDFTEYKYTHQPNRFPDLMMCLPEIRYIAGKMVNVPLEQLPLLFKVVLHSCKTSVGKE

SEQ ID NO: 15437 - protein, 772 aa, Homo sapiens; identical to SEQ ID NO: 9341

SEQ ID NO: 15438 - protein, 503 aa, Homo sapiens
MEEHGVTQTEHMATIEAHAVAQQVQQVHVATYTEHSMLSADEDSPSSPEDTSYDDSDILNSTAADEVTAHLAAAGPVGMAAAAAVATGKKRKRPHVFESNPSIRKRQQTRLLRKLRATLDEYTTRVGQQAIVLCISPSKPNPVFKVFGAAPLENVVRKYKSMILEDLESALAEHAPAPQEVNSELPPLTIDGIPVSVDKMTQAQLRAFIPEMLKYSTGRGKPGWGKESCKPIWWPEDIPWANVRSDVRTEEQKQRVSWTQALRTIVKNCYKQHGREDLLYAFEDQQTQTQATATHSIAHLVPSQTVVQTFSNPDGTVSLIQVGTGATVATLADASELPTTVTVAQVNYSAVADGEVEQNWATLQGGEMTIQTTQASEATQAVASLAEAAVAASQEMQQGATVTMALNSEAAAHAVATLAEATLQGGGQIVLSGETAAAVGALTGVQDANGLVQIPVSMYQTVVTSLAQGNGPVQVAMAPVTTRISDSAVTMDGQAVEVVTLEQ

SEQ ID NO: 15439 - protein, 237 aa, Homo sapiens
MALPPSPLAMEYVNDFDLMKFEVKREPSEGRPGPPTASLGSTPYSSVPPSPTFSEPGMVGATEGTRPGLEELYWLATLQQQLGAGEALGLSPEEAMELLQGQGPVPVDGPHGYYPGSPEETGAQHVQLAERFSDAALVSMSVRELNRQLRGCGRDEALRLKQRRRTLKNRGYAQACRSKRLQQRRGLEAERARLAAQLDALRAEVARLARERDLYKARCDRLTSSGPGSGDPSHLFL

SEQ ID NO: 15440 - protein, 271 aa, Homo sapiens
MYYAVSQARVNAVPGTMLRPQRPGDLQLGASLYELVGYRQPPSSSSSSTSSTSSTSSSSTTAPLLPKAAREKPEAPAEPPGPGPGSGAHPGGSARPDAKEEQQQQLRRKINSRERKRMQDLNLAMDALREVILPYSAAHCQGAPGRKLSKIATLLLARNYILLLGSSLQELRRALGEGAGPAAPRLLLAGLPLLAAAPGSVLLAPGAVGPPDALRPAKYLSLALDEPPCGQFALPGGGAGGPGLCTCAVCKFPHLVPASLGLAAVQAQFSK

SEQ ID NO: 15441 - protein, 323 aa, Homo sapiens
MDSDASLVSSRPSSPEPDDLFLPARSKGSSGSAFTGGTVSSSTPSDCPPELSAELRGAMGSAGAHPGDKLGGSGFKSSSSSTSSSTSSAAASSTKKDKKQMTEPELQQLRLKINSRERKRMHDLNIAMDGLREVMPYAHGPSVRKLSKIATLLLARNYILMLTNSLEEMKRLVSEIYGGHHAGFHPSACGGLAHSAPLPAATAHPAAAAHAAHHPAVHHPILPPAAAAAAAAAAAAAVSSASLPGSGLPSVGSIRPPHGLLKSPSAAAAAPLGGGGGGSGASGGFQHWGGMPCPCSMCQVPPPHHHVSAMGAGSLPRLTSDAK

SEQ ID NO: 15442 - protein, 272 aa, Homo sapiens
MNSDSSSVSSRASSPDMDEMYLRDHHHRHHHHQESRLNSVSSTQGDMMQKMPGESLSRAGAKAAGESSKYKIKKQLSEQDLQQLRLKINGRERKRMHDLNLAMDGLREVMPYAHGPSVRKLSKIATLLLARNYILMLTSSLEEMKRLVGEIYGGHHSAFHCGTVGHSAGHPAHAANSVHPVHPILGGALSSGNASSPLSAASLPAIGTIRPPHSLLKAPSTPPALQLGSGFQHWAGLPCPCTICQMPPPPHLSALSTANMARLSAESKDLLK

SEQ ID NO: 15443 - protein, 465 aa, Homo sapiens
MNAQLTMEAIGELHGVSHEPVPAPADLLGGSPHARSSVAHRGSHLPPAHPRSMGMASLLDGGSGGGDYHHHHRAPEHSLAGPLHPTMTMACETPPGMSMPTTYTTLTPLQPLPPISTVSDKFPHHHHHHHHHHHPHHHQRLAGNVSGSFTLMRDERGLASMNNLYTPYHKDVAGMGQSLSPLSSSGLGSIHNSQQGLPHYAHPGAAMPTDKMLTPNGFEAHHPAMLGRHGEQHLTPTSAGMVPINGLPPHHPHAHLNAQGHGQLLGTAREPNPSVTGAQVSNGSNSGQMEEINTKEVAQRITTELKRYSIPQAIFAQRVLCRSQGTLSDLLRNPKPWSKLKSGRETFRRMWKWLQEPEFQRMSALRLAACKRKEQEHGKDRGNTPKKPRLVFTDVQRRTLHAIFKENKRPSKELQITISQQLGLELSTVSNFFMNARRRSLDKWQDEGSSNSGNSSSSSSTCTKA

SEQ ID NO: 15444 - protein, 504 aa, Homo sapiens
MKAAYTAYRCLTKDLEGCAMNPELTMESLGTLHGPAGGGSGGGGGGGGGGGGGGPGHEQELLASPSPHHAGRGAAGSLRGPPPPPTAHQELGTAAAAAAAASRSAMVTSMASILDGGDYRPELSIPLHHAMSMSCDSSPPGMGMSNTYTTLTPLQPLPPISTVSDKFHHPHPHHHPHHHHHHHHQRLSGNVSGSFTLMRDERGLPAMNNLYSPYKEMPGMSQSLSPLAATPLGNGLGGLHNAQQSLPNYGPPGHDKMLSPNFDAHHTAMLTRGEQHLSRGLGTPPAAMMSHLNGLHHPGHTQSHGPVLAPSRERPPSSSSGSQVATSGQLEEINTKEVAQRITAELKRYSIPQAIFAQRVLCRSQGTLSDLLRNPKPWSKLKSGRETFRRMWKWLQEPEFQRMSALRLAACKRKEQEPNKDRNNSQKKSRLVFTDLQRRTLFAIFKENKRPSKEMQITISQQLGLELTTVSNFFMNARRRSLEKWQDDLSTGGSSSTSSTCTKA

SEQ ID NO: 15445 - protein, 494 aa, Homo sapiens
MELSLESLGGLHSVAHAQAGELLSPGHARSAAAQHRGLVAPGRPGLVAGMASLLDGGGGGGGGGAGGAGGAGSAGGGADFRGELAGPLHPAMGMACEAPGLGGTYTTLTPLQHLPPLAAVADKFHQHAAAAAVAGAHGGHPHAHPHPAAAPPPPPPPQRLAASVSGSFTLMRDERAALASVGHLYGPYGKELPAMGSPLSPLPNALPPALHGAPQPPPPPPPPPLAAYGPPGHLAGDKLLPPAAFEPHAALLGRAEDALARGLPGGGGGTGSGGAGSGSAAGLLAPLGGLAAAGAHGPHGGGGGPGGSGGGPSAGAAAEEINTKEVAQRITAELKRYSIPQAIFAQRILCRSQGTLSDLLRNPKPWSKLKSGRETFRRMWKWLQEPEFQRMSALRLAACKRKEQEQQKERALQPKKQRLVFTDLQRRTLIAIFKENKRPSKEMQVTISQQLGLELNTVSNFFMNARRRCMNRWAEEPSTAPGGPAGATATFSKA

SEQ ID NO: 15446 - protein, 266 aa, Homo sapiens
MGSKTLPAPVPIHPSLQLTNYSFLQAVNGLPTVPSDHLPNLYGFSALHAVHLHQWTLGYPAMHLPRSSFSKVPGTVSSLVDARFQLPAFPWFPHVIQPKPEITAGGSVPALKTKPRFDFANLALAATQEDPAKLGRGEGPGSPAGGLGALLDVTKLSPEKKPTRGRLPSKTKKEFVCKFCGRHFTKSYNLLIHERTHTDERPYTCDICHKAFRRQDHLRDHRYIHSKEKPFKCQECGKGFCQSRTLAVHKTLHSQVKELKTSKIKC

SEQ ID NO: 15447 - protein, 312 aa, Homo sapiens
MGSKALPAPIPLHPSLQLTNYSFLQAVNTFPATVDHLQGLYGLSAVQTMHMNHWTLGYPNVHEITRSTITEMAAAQGLVDARFPFPALPFTTHLFHPKQGAIAHVLPALHKDRPRFDFANLAVAATQEDPPKMGDLSKLSPGLGSPISGLSKLTPDRKPSRGRLPSKTKKEFICKFCGRHFTKSYNLLIHERTHTDERPYTCDICHKAFRRQDHLRDHRYIHSKEKPFKCQECGKGFCQSRTLAVHKTLHMQESPHKCPTCGRTFNQRSNLKTHLLTHTDIKPYSCEQCGKVFRRNCDLRRHSLTHTPRQDF

SEQ ID NO: 15448 - protein, 325 aa, Homo sapiens
MLSHADLLDARLGMKDAAELLGHREAVKCRLGVGGSDPGGHPGDLAPNSDPVEGATLLPGEDITTVGSTPASLAVSAKDPDKQPGPQGGPNPSQAGQQQGQQKQKRHRTRFTPAQLNELERSFAKTHYPDIFMREELALRIGLTESRVQVWFQNRRAKWKKRKKTTNVFRAPGTLLPTPGLPQFPSAAAAAAAAMGDSLCSFHANDTRWAAAAMPGVSQLPLPPALGRQQAMAQSLSQCSLAAGPPPNSMGLSNSLAGSNGAGLQSHLYQPAFPGMVPASLPGPSNVSGSPQLCSSPDSSDVWRGTSIASLRRKALEHTVSMSFT

SEQ ID NO: 15449 - protein, 354 aa, Homo sapiens
MMSYLKQPPYGMNGLGLAGPAMDLLHPSVGYPATPRKQRRERTTFTRSQLDVLEALFAKTRYPDIFMREEVALKINLPESRVQVWFKNRRAKCRQQQQSGSGTKSRPAKKKSSPVRESSGSESSGQFTPPAVSSSASSSSSASSSSANPAAAAAAGLGGNPVAAASSLSTPAASSIWSPASISPGSAPASVSVPEPLAAPSNTSCMQRSVAAGAATAAASYPMSYGQGGSYGQGYPTPSSSYFGGVDCSSYLAPMHSHHHPHQLSPMAPSSMAGHHHHHPHAHHPLSQSSGHHHHHHHHHHQGYGGSGLAFNSADCLDYKEPGAAAASSAWKLNFNSPDCLDYKDQASWRFQVL

SEQ ID NO: 15450 - protein, 289 aa, Homo sapiens
MMSYLKQPPYAVNGLSLTTSGMDLLHPSVGYPATPRKQRRERTTFTRAQLDVLEALFAKTRYPDIFMREEVALKINLPESRVQVWFKNRRAKCRQQQQQQQNGGQNKVRPAKKKTSPAREVSSESGTSGQFTPPSSTSVPTIASSSAPVSIWSPASISPLSDPLSTSSSCMQRSYPMTYTQASGYSQGYAGSTSYFGGMDCGSYLTPMHHQLPGPGATLSPMGTNAVTSHLNQSPASLSTQGYGASSLGFNSTTDCLDYKDQTASWKLNFNADCLDYKDQTSSWKFQVL

SEQ ID NO: 15451 - protein, 267 aa, Homo sapiens
MPRAFLVKKPCVSTCKRNWSELPDEERGEIYVPVSLGFCPPQPYREPEPSVAEPPSCPLALNMSLRDSSYSMAPGPCVVAQLPSEDMGHLTDPQSRDHGFLRTKMKVTLGDSPSGDLFTCRVCQKAFTYQRMLNRHMKCHNDVKRHLCTYCGKGFNDTFDLKRHVRTHTGVRPYKCSLCDKAFTQRCSLESHLKKIHGVQQKYAYKERRAKLYVCEECGCTSESQEGHVLHLKEHHPDSPLLRKTSKKVAVALQNTVTSLLQGSPHL

SEQ ID NO: 15452 - protein, 275 aa, Homo sapiens
MPKVFLVKRRSLGVSVRSWDELPDEKRADTYIPVGLGRLLHDPPEDCRSDGGSSSGSGSSSAGEPGGAESSSSPHAPESETPEPGDAEGPDGHLATKQRPVARSKIKFTTGTCSDSVVHSCDLCGKGFRLQRMLNRHLKCHNQVKRHLCTFCGKGFNDTFDLKRHVRTHTGIRPYKCNVCNKAFTQRCSLESHLKKIHGVQQQYAYKQRRDKLYVCEDCGYTGPTQEDLYLHVNSAHPGSSFLKKTSKKLAALLQGKLTSAHQENTSLSEEEERK

SEQ ID NO: 15453 - protein, 214 aa, Homo sapiens
MPRAFLVRSRRPQPPNWGHLPDQLRGDAYIPGGPLTVPGGKGQERRSVTIWLFSSDCSSLGGPPAQQSSSVRDPWTAQPTQGNLTSAPRGPGTLGCPLCPKAFPLQRMLTRHLKCHSPVRRHLCRCCGKGFHDAFDLKRHMRTHTGIRPFRCSACGKAFTQRCSLEAHLAKVHGQPASYAYRERREKLHVCEDCGFTSSRPDTYAQHRALHRAA

SEQ ID NO: 15454 - protein, 1014 aa, Homo sapiens
MAESSDKLYRVEYAKSGRASCKKCSESIPKDSLRMAIMVQSPMFDGKVPHWYHFSCFWKVGHSIRHPDVEVDGFSELRWDDQQKVKKTAEAGGVTGKGQDGIGSKAEKTLGDFAAEYAKSNRSTCKGCMEKIEKGQVRLSKKMVDPEKPQLGMIDRWYHPGCFVKNREELGFRPEYSASQLKGFSLLATEDKEALKKQLPGVKSEGKRKGDEVDGVDEVAKKKSKKEKDKDSKLEKALKAQNDLIWNIKDELKKVCSTNDLKELLIFNKQQVPSGESAILDRVADGMVFGALLPCEECSGQLVFKSDAYYCTGDVTAWTKCMVKTQTPNRKEWVTPKEFREISYLKKLKVKKQDRIFPPETSASVAATPPPSTASAPAAVNSSASADKPLSNMKILTLGKLSRNKDEVKAMIEKLGGKLTGTANKASLCISTKKEVEKMNKKMEEVKEANIRVVSEDFLQDVSASTKSLQELFLAHILSPWGAEVKAEPVEVVAPRGKSGAALSKKSKGQVKEEGINKSEKRMKLTLKGGAAVDPDSGLEHSAHVLEKGGKVFSATLGLVDIVKGTNSYYKLQLLEDDKENRYWIFRSWGRVGTVIGSNKLEQMPSKEDAIEHFMKLYEEKTGNAWHSKNFTKYPKKFYPLEIDYGQDEEAVKKLTVNPGTKSKLPKPVQDLIKMIFDVESMKKAMVEYEIDLQKMPLGKLSKRQIQAAYSILSEVQQAVSQGSSDSQILDLSNRFYTLIPHDFGMKKPPLLNNADSVQAKVEMLDNLLDIEVAYSLLRGGSDDSSKDPIDVNYEKLKTDIKVVDRDSEEAEIIRKYVKNTHATTHNAYDLEVIDIFKIEREGECQRYKPFKQLHNRRLLWHGSRTTNFAGILSQGLRIAPPEAPVTGYMFGKGIYFADMVSKSANYCHTSQGDPIGLILLGEVALGNMYELKHASHISKLPKGKHSVKGLGKTTPDPSANISLDGVDVPLGTGISSGVNDTSLLYNEYIVYDIAQVNLKYLLKLKFNFKTSLW

SEQ ID NO: 15455 - protein, 701 aa, Homo sapiens
MAQAGVVGEVTQVLCAAGGALELPELRRRLRMGLSADALERLLRQRGRFVVAVRAGGAAAAPERVVLAASPLRLCRAHQGSKPGCVGLCAQLHLCRFMVYGACKFLRAGKNCRNSHSLTTEHNLSVLRTHGVDHLSYNELCQLLFQNDPWLLPEICQHYNKGDGPHGSCAFQKQCIKLHICQYFLQGECKFGTSCKRSHDFSNSENLEKLEKLGMSSDLVSRLPTIYRNAHDIKNKSSAPSRVPPLFVPQGTSERKDSSGSVSPNTLSQEEGDQICLYHIRKSCSFQDKCHRVHFHLPYRWQFLDRGKWEDLDNMELIEEAYCNPKIERILCSESASTFHSHCLNFNAMTYGATQARRLSTASSVTKPPHFILTTDWIWYWSDEFGSWQEYGRQGTVHPVTTVSSSDVEKAYLAYCTPGSDGQAATLKFQAGKHNYELDFKAFVQKNLVYGTTKKVCRRPKYVSPQDVTTMQTCNTKFPGPKSIPDYWDSSALPDPGFQKITLSSSSEEYQKVWNLFNRTLPFYFVQKIERVQNLALWEVYQWQKGQMQKQNGGKAVDERQLFHGTSAIFVDAICQQNFDWRVCGVHGTSYGKGSYFARDAAYSHHYSKSDTQTHTMFLARVLVGEFVRGNASFVRPPAKEGWSNAFYDSCVNSVSDPSIFVIFEKHQVYPEYVIQYTTSSKPSVTPSILLALGSLFSSRQ

SEQ ID NO: 15456 - protein, 687 aa, Homo sapiens
MERVNDASCGPSGCYTYQVSRHSTEMLHNLNQQRKNGGRFCDVLLRVGDESFPAHRAVLAACSEYFESVFSAQLGDGGAADGGPADVGGATAAPGGGAGGSRELEMHTISSKVFGDILDFAYTSRIVVRLESFPELMTAAKFLLMRSVIEICQEVIKQSNVQILVPPARADIMLFRPPGTSDLGFPLDMTNGAALAANSNGIAGSMQPEEEAARAAGAAIAGQASLPVLPGVDRLPMVAGPLSPQLLTSPFPSVASSAPPLTGKRGRGRPRKANLLDSMFGSPGGLREAGILPCGLCGKVFTDANRLRQHEAQHGVTSLQLGYIDLPPPRLGENGLPISEDPDGPRKRSRTRKQVACEICGKIFRDVYHLNRHKLSHSGEKPYSCPVCGLRFKRKDRMSYHVRSHDGSVGKPYICQSCGKGFSRPDHLNGHIKQVHTSERPHKCQTCNASFATRDRLRSHLACHEDKVPCQVCGKYLRAAYMADHLKKHSEGPSNFCSICNRGFSSASYLKVHVKTHHGVPLPQVSRHQEPILNGGAAFHCARTYGNKEGQKCSHQDPIESSDSYGDLSDASDLKTPEKQSANGSFSCDMAVPKNKMESDGEKKYPCPECGSFFRSKSYLNKHIQKVHVRALGGPLGDLGPALGSPFSPQQNMSLLESFGFQIVQSAFASSLVDPEVDQQPMGPEGK

SEQ ID NO: 15457 - protein, 340 aa, Homo sapiens
MATGGYRTSSGLGGSTTDFLEEWKAKREKMRAKQNPPGPAPPGGGSSDAAGKPPAGALGTPAAAAANELNNNLPGGAPAAPAVPGPGGVNCAVGSAMLTRAAPGPRRSEDEPPAASASAAPPPQRDEEEPDGVPEKGKSSGPSARKGKGQIEKRKLREKRRSTGVVNIPAAECLDEYEDDEAGQKERKREDAITQQNTIQNEAVNLLDPGSSYLLQEPPRTVSGRYKSTTSVSEEDVSSRYSRTDRSGFPRYNRDANVSGTLVSSSTLEKKIEDLEKEVVRERQENLRLVRLMQDKEEMIGKLKEEIDLLNRDLDDIEDENEQLKQENKTLLKVVGQLTR

SEQ ID NO: 15458 - protein, 534 aa, Homo sapiens
MKFTLGLGSRAWRVSWEGAAAAAAGPGAGGSALRCRAQRVSSPRLGRRGSRLSGALPLCLSRGGGGAQALPDCAGPSPGHPGHPGARQLAGPLAMEQTYGEVNQLGGVFVNGRPLPNAIRLRIVELAQLGIRPCDISRQLRVSHGCVSKILARYNETGSILPGAIGGSKPRVTTPNVVKHIRDYKQGDPGIFAWEIRDRLLADGVCDKYNVPSVSSISRILRNKIGSLAQPGPYEASKQPPSQPTLPYNHIYQYPYPSPVSPTGAKMGSHPGVPGTAGHVSIPRSWPSAHSVSNILGIRTFMEQTGALAGSEGTAYSPKMEDWAGVNRTAFPATPAVNGLEKPALEADIKYTQSASTLSAVGGFLPACAYPASNQHGVYSAPGGGYLAPGPPWPPAQGPPLAPPGAGVAVHGGELAAAMTFKHPSREGSLPAPAARPRTPSVAYTDCPSRPRPPRGSSPRTRARRERQADPGAQVCAAAPAIGTGRIGGLAEEEASAGPRGARPASPQAQPCLWPDPPHFLYWSGFLGFSELGF

SEQ ID NO: 15459 - protein, 417 aa, Homo sapiens; identical to SEQ ID NO: 10026

SEQ ID NO: 15460 - protein, 479 aa, Homo sapiens
MTTLAGAVPRMMRPGPGQNYPRSGFPLEVSTPLGQGRVNQLGGVFINGRPLPNHIRHKIVEMAHHGIRPCVISRQLRVSHGCVSKILCRYQETGSIRPGAIGGSKPKQVTTPDVEKKIEEYKRENPGMFSWEIRDKLLKDAVCDRNTVPSVSSISRILRSKFGKGEEEEADLERKEAEESEKKAKHSIDGILSERASAPQSDEGSDIDSEPDLPLKRKQRRSRTTFTAEQLEELERAFERTHYPDIYTREELAQRAKLTEARVQVWFSNRRARWRKQAGANQLMAFNHLIPGGFPPTAMPTLPTYQLSETSYQPTSIPQAVSDPSSTVHRPQPLPPSTVHQSTIPSNPDSSSAYCLPSTRHGFSSYTDSFVPPSGPSNPMNPTIGNGLSPQVMGLLTNHGGVPHQPQTDYALSPLTGGLEPTTTVSASCSQRLDHMKSLDSLPTSQSYCPPTYSTTGYSMDPVTGYQYGQYGQSKPWTF

SEQ ID NO: 15461 - protein, 350 aa, Homo sapiens
MHQDGISSMNQLGGLFVNGRPLPLDTRQQIVRLAVSGMRPCDISRILKVSNGCVSKILGRYYRTGVLEPKGIGGSKPRLATPPVVARIAQLKGECPALFAWEIQRQLCAEGLCTQDKTPSVSSINRVLRALQEDQGLPCTRLRSPAVLAPAVLTPHSGSETPRGTHPGTGHRNRTIFSPSQAEALEKEFQRGQYPDSVARGKLATATSLPEDTVRVWFSNRRAKWRRQEKLKWEMQLPGASQGLTVPRVAPGIISAQQSPGSVPTAALPALEPLGPSCYQLCWATAPERCLSDTPPKACLKPCWDCGSFLLPVIAPSCVDVAWPCLDASLAHHLIGGAGKATPTHFSHWP

SEQ ID NO: 15462 - protein, 391 aa, Homo sapiens
MDLEKNYPTPRTSRTGHGGVNQLGGVFVNGRPLPDVVRQRIVELAHQGVRPCDISRQLRVSHGCVSKILGRYYETGSIKPGVIGGSKPKVATPKVVEKIAEYKRQNPTMFAWEIRDRLLAERVCDNDTVPSVSSINRIIRTKVQQPPNQPVPASSHSIVSTGSVTQVSSVSTDSAGSSYSISGILGITSPSADTNKRKRDEGIQESPVPNGHSLPGRDFLRKQMRGDLFTQQQLEVLDRVFERQHYSDIFTTTEPIKPEQTTEYSAMASLAGGLDDMKANLASPTPADIGSSVPGPQSYPIVTGRDLASTTLPGYPPHVPPAGQGSYSAPTLTGMVPGSEFSGSPYSHPQYSSYNDSWRFPNPGLLGSPYYYSAAARGAAPPAAATAYDRH

SEQ ID NO: 15463 - protein, 422 aa, Homo sapiens [sequence omitted]

SEQ ID NO: 15464 - protein, 505 aa, Homo sapiens
MAALPGTVPRMMRPAPGQNYPRTGFPLEVSTPLGQGRVNQLGGVFINGRPLPNHIRHKIVEMAHHGIRPCVISRQLRVSHGCVSKILCRYQETGSIRPGAIGGSKPRQVATPDVEKKIEEYKRENPGMFSWEIRDRLLKDGHCDRSTVPSGLVSSISRVLRIKFGKKEEEDEADKKEDDGEKKAKHSIDGILGDKGNRLDEGSDVESEPDLPLKRKQRRSRTTFTAEQLEELEKAFERTHYPDIYTREELAQRTKLTEARVQVWFSNRRARWRKQAGANQLAAFNHLLPGGFPPTGMPTLPPYQLPDSTYPTTTISQDGGSTVHRPQPLPPSTMHQGGLAAAAAAADTSSAYGARHSFSSYSDSFMNPAAPSNHMNPVSNGLSPQVMSILGNPSAVPPQPQADFSISPLHGGLDSATSISASCSQRADSIKPGDSLPTSQAYCPPTYSTTGYSVDPVAGYQYGQYGQTAVDYLAKNVSLSTQRRMKLGEHSAVLGLLPVETGQAY

SEQ ID NO: 15465 - protein, 450 aa, Homo sapiens
MPHNSIRSGHGGLNQLGGAFVNGRPLPEVVRQRIVDLAHQGVRPCDISRQLRVSHGCVSKILGRYYETGSIRPGVIGGSKPKVATPKVVEKIGDYKRQNPTMFAWEIRDRLLAEGVCDNDTVPSVSSINRIIRTKVQQPFNLPMDSCVATKSLSPGHTLIPSSAVTPPESPQSDSLGSTYSINGLLGIAQPGSDKRKMDDSDQDSCRLSIDSQSSSSGPRKHLRTDAFSQHHLEPLECPFERQHYPEAYASPSHTKGEQGLYPLPLLNSTLDDGKATLTPSNTPLGRNLSTHQTYPVVADPHSPFAIKQETPEVSSSSSTPSSLSSSAFLDLQQVGSGVPPFNAFPHAASVYGQFTGQALLSGREMVGPTLPGYPPHIPTSGQGSYASSAIAGMVAGSEYSGNAYGHTPYSSYSEAWRFPNSSLLSSPYYYSSTSRPSAPPTTATAFDHL

SEQ ID NO: 15466 - protein, 341 aa, Homo sapiens
MEPAFGEVNQLGGVFVNGRPLPNAIRLRIVELAQLGIRPCDISRQLRVSHGCVSKILARYNETGSILPGAIGGSKPRVTTPTVVKHIRTYKQRDPGIFAWEIRDRLLADGVCDKYNVPSVSSISRILRNKIGNLAQQGHYDSYKQHQPTPQPALPYNHIYSYPSPITAAAAKVPTPPGVPAIPGSVAMPRTWPSSHSVTDILGIRSITDQVSDSSPYHSPKVEEWSSLGRNNFPAAAPHAVNGLEKGALEQEAKYGQAPNGLPAVGSFVSASSMAPYPTPAQVSPYMTYSAAPSGYVAGHGWQHAGGTSLSPHNCDIPASLAFKGMQAAREGSHSVTASAL

SEQ ID NO: 15467 - protein, 917 aa, Homo sapiens
MFRKARRVNVRKRNDSEEEERERDEEQEPPPLLPPPGTGEEAGPGGGDRAPGGESLLGPGPSPPSALTPGLGAEAGGGFPGGAEPGNGLKPRKRPRENKEVPRASLLSFQDEEEENEEVFKVKKSSYSKKIVKLLKKEYKEDLEKSKIKTELNSSAESEQPLDKTGHVKDTNQEDGVIISEHGEDEMDMESEKEEEKPKTGGAFSNALSSLNVLRPGEIPDAAFIHAARKKRQMARELGDFTPHDNEPGKGRLVREDENDASDDEDDDEKRRIVFSVKEKSQRQKIAEEIGIEGSDDDALVTGEQDEELSRWEQEQIRKGINIPQVQASQPAEVNMYYQNTYQTMPYGSSYGIPYSYTAYGSSDAKSQKTDNTVPFKTPSNEMTPVTIDLVKKQLKDRLDSMKELHKTNRQQHEKHLQSRVDSTRAIERLEGSSGGIGERYKFLQEMRGYVQDLLECFSEKVPLINELESAIHQLYKQRASRLVQRRQDDIKDESSEFSSHSNKALMAPNLDSFGRDRALYQEHAKRRIAEREARRTRRRQAREQTGKMADHLEGLSSDDEETSTDITNFNLEKDRISKESGKVFEDVLESFYSIDCIKSQFEAWRSKYYTSYKDAYIGLCLPKLFNPLIRLQLLTWTPLEAKCRDFENMLWFESLLFYGCEEREQEKDDVDVALLPTIVEKVILPKLTVIAENMWDPFSTTQTSRMVGITLKLINGYPSVVNAENKNTQVYLKALLLRMRRTLDDDVFMPLYPKNVLENKNSGPYLFFQRQFWSSVKLLGNFLQWYGIFSNKTLQELSIDGLLNRYILMAFQNSEYGDDSIKKAQNVINCFPKQWFMNLKGERTISQLENFCRYLVHLADTIYRNSIGCSDVEKRNARENIKQIVKLLASVRALDHAMSVASDHNVKEFKSLIEGK

SEQ ID NO: 15468 - protein, 1689 aa, Homo sapiens
MGSKRRRATSPSSSVSGDFDDGHHSVSTPGPSRKRRRLSNLPTVDPIAVCHELYNTIRDYKDEQGRLLCELFIRAPKRRNQPDYYEVVSQPIDLMKIQQKLKMEEYDDVNLLTADFQLLFNNAKSYYKPDSPEYKAACKLWDLYLRTRNEFVQKGEADDEDDDEDGQDNQGTVTEGSSPAYLKEILEQLLEAIVVATNPSGRLISELFQKLPSKVQYPDYYAIIKEPIDLKTIAQRIQNGSYKSIHAMAKDIDLLAKNAKTYNEPGSQVFKDANSIKKIFYMKKAEIEHHEMAKSSLRMRTPSNLAAARLTGPSHSKGSLGEERNPTSKYYRNKRAVQGGRLSAITMALQYGSESEEDAALAAARYEEGESEAESITSFMDVSNPFYQLYDTVRSCRNNQGQLIAEPFYHLPSKKKYPDYYQQIKMPISLQQIRTKLKNQEYETLDHLECDLNLMFENAKRYNVPNSAIYKRVLKLQQVMQAKKKELARRDDIEDGDSMISSATSDTGSAKRKSKKNIRKQRMKILFNVVLEAREPGSGRRLCDLFMVKPSKKDYPDYYKIILEPMDLKIIEHNIRNDKYAGEEGMIEDMKLMFRNARHYNEEGSQVYNDAHILEKLLKEKRKELGPLPDDDDMASPKLKLSRKSGISPKKSKYMTPMQQKLNEVYEAVKNYTDKRGRRLSAIFLRLPSRSELPDYYLTIKKPMDMEKIRSHMMANKYQDIDSMVEDFVMMFNNACTYNEPESLIYKDALVLHKVLLETRRDLEGDEDSHVPNVTLLIQELIHNLFVSVMSHQDDEGRCYSDSLAEIPAVDPNFPNKPPLTFDIIRKNVENNRYRRLDLFQEHMFEVLERARRMNRTDSEIYEDAVELQQFFIKIRDELCKNGEILLSPALSYTTKHLHNDVEKERKEKLPKEIEEDKLKREEEKREAEKSEDSSGAAGLSGLHRTYSQDCSFKNSMYHVGDYVYVEPAEANLQPHIVCIERLWEDSAGEKWLYGCWFYRPNETFHLATRKFLEKEVFKSDYYNKVPVSKILGKCVVMFVKEYFKLCPENFRDEDVFVCESRYSAKTKSFKKIKLWTMPISSVRFVPRDVPLPVVRVASVFANADKGDDEKNTDNSEDSRAEDNFNLEKEKEDVPVEMSNGEPGCHYFEQLHYNDMWLKVGDCVFIKSHGLVRPRVGRIEKVWVRDGAAYFYGPIFIHPEETEHEPTKMFYKKEVFLSNLEETCPMTCILGKCAVLSFKDFLSCRPTEIPENDILLCESRYNESDKQMKKFKGLKRFSLSAKVVDDEIYYFRKPIVPQKEPSPLLEKKIQLLEAKFAELEGGDDDIEEMGEEDSEVIEPPSLPQLQTPLASELDLMPYTPPQSTPKSAKGSAKKEGSKRKINMSGYILFSSEMRAVIKAQHPDYSFGELSRLVGTEWRNLETAKKAEYEERAAKVAEQQERERAAQQQQPSASPRAGTPVGALMGVVPPPTPMGMLNQQLTPVAGMMGGYPPGLPPLQGPVDGLVSMGSMQPLHPGGPPPHHLPPGVPGLPGIPPPGVMNQGVAPMVGTPAPGGSPYGQQVGVLGPPGQQAPPPYPGPHPAGPPVIQQPTTPMFVAPPPKTQRLLHSEAYLKYIEGLSAESNSISKWDQTLAARRRDVHLSKEQESRLPSHWLKSKGAHTTMADALWRLRDLMLRDTLNIRQAYNLENV

SEQ ID NO: 15469 - protein, 430 aa, Homo sapiens
MDEQPRLMHSHAGVGMAGHPGLSQHLQDGAGGTEGEGGRKQDIGDILQQIMTITDQSLDEAQARKHALNCHRMKPALFNVLCEIKEKTVLSIRGAQEEEPTDPQLMRLDNMLLAEGVAGPEKGGGSAAAAAAAAASGGAGSDNSVEHSDYRAKLSQIRQIYHTELEKYEQACNEFTTHVMNLLREQSRTRPISPKEIERMVSIIHRKFSSIQMQLKQSTCEAVMILRSRFLDARRKRRNFNKQATEILNEYFYSHLSNPYPSEEAKEELAKKCGITVSQVSNWFGNKRIRYKKNIGKFQEEANIYAAKTAVTATNVSAHGSQANSPSTPNSAGSSSSFNMSNSGDLFMSVQSLNGDSYQGAQVGANVQSQVDTLRHVISQTGGYSDGLAASQMYSPQGISANGGWQDATTPSSVTSPTEGPGSVHSDTSN

SEQ ID NO: 15470 - protein, 430 aa, Homo sapiens
MDERLLGPPPPGGGRGGLGLVSGEPGGPGEPPGGGDPGGGSGGVPGGRGKQDIGDILQQIMTITDQSLDEAQAKKHALNCHRMKPALFSVLCEIKEKTGLSIRSSQEEEPVDPQLMRLDNMLLAEGVAGPEKGGGSAAAAAAAAASGGGVSPDNSIEHSDYRSKLAQIRHIYHSELEKYEQACNEFTTHVMNLLREQSRTRPVAPKEMERMVSIIHRKFSAIQMQLKQSTCEAVMILRSRFLDARRKRRNFSKQATEVLNEYFYSHLSNPYPSEEAKEELAKKCGITVSQVSNWFGNKRIRYKKNIGKFQEEANIYAVKTAVSVTQGGHSRTSSPTPPSSAGSGGSFNLSGSGDMFLGMPGLNGDSYSASQVESLRHSMGPGGYGDNLGGGQMYSPREMRANGSWQEAVTPSSVTSPTEGPGSVHSDTSN

SEQ ID NO: 15471 - protein, 434 aa, Homo sapiens
MDDQSRMLQTLAGVNLAGHSVQGGMALPPPPHGHEGADGDGRKQDIGDILHQIMTITDQSLDEAQAKKHALNCHRMKPALFSVLCEIKEKTGLSIRGAQEEDPPDPQLMRLDNMLLAEGVSGPEKGGGSAAAAAAAAASGGSSDNSIEHSDYRAKLTQIRQIYHTELEKYEQACNEFTTHVMNLLREQSRTRPISPKEIERMVGIIHRKFSSIQMQLKQSTCEAVMILRSRFLDARRKRRNFSKQATEILNEYFYSHLSNPYPSEEAKEELAKKCSITVSQVSNWFGNKRIRYKKNIGKFQEEANLYAAKTAVTAAHAVAAAVQNNQTNSPTTPNSGSSGSFNLPNSGDMFMNMQSLNGDSYQGSQVGANVQSQVDTLRHVINQTGGYSDGLGGNSLYSPHNLNANGGWQDATTPSSVTSPTEGPGSVHSDTSN

SEQ ID NO: 15472 - protein, 374 aa, Homo sapiens
MAAPPRPAPSPPAPRRLDTSDVLQQIMAITDQSLDEAQARKHALNCHRMKPALFSVLCEIKEKTVVSIRGIQDEDPPDAQLLRLDNMLLAEGVCRPEKRGRGGAVARAGTATPGGCPNDNSIEHSDYRAKLSQIRQIYHSELEKYEQACREFTTHVTNLLQEQSRMRPVSPKEIERMVGAIHGKFSAIQMQLKQSTCEAVMTLRSRLLDARRKRRNFSKQATEVLNEYFYSHLNNPYPSEEAKEELARKGGLTISQVSNWFGNKRIRYKKNMGKFQEEATIYTGKTAVDTTEVGVPGNHASCLSTPSSGSSGPFPLPSAGDAFLTLRTLASLQPPPGGGCLQSQAQGSWQGATPQPATASPAGDPGSINSSTSN

SEQ ID NO: 15473 - protein, 356 aa, Homo sapiens
MDAGVTESGLNVTLTIRLLMHGKEVGSIIGKKGESVKRIREESGARINISEGNCPERIITLTGPTNAIFKAFAMIIDKLEEDINSSMTNSTAASRPPVTLRLVVPATQCGSLIGKGGCKIKEIRESTGAQVQVAGDMLPNSTERAITIAGVPQSVTECVKQICLVMLETLSQSPQGRVMTIPYQPMPASSPVICAGGQDRCSDAAGYPHATHDLEGPPLDAYSIQGQHTISPLDLAKLNQVARQQSHFAMMHGGTGFAGIDSSSPEVKGYWASLDASTQTTHELTIPNNLIGCIIGRQGANINEIRQMSGAQIKIANPVEGSSGRQVTITGSAASISLAQYLINARLSSEKGMGCS

SEQ ID NO: 15474 - protein, 365 aa, Homo sapiens
MDTGVIEGGLNVTLTIRLLMHGKEVGSIIGKKGESVKKMREESGARINISEGNCPERIITLAGPTNAIFKAFAMIIDKLEEDISSSMTNSTAASRPPVTLRLVVPASQCGSLIGKGGCKIKEIRESTGAQVQVAGDMLPNSTERAITIAGIPQSIIECVKQICVVMLETLSQSPPKGVTIPYRPKPSSSPVIFAGGQDRYSTGSDSASFPHTTPSMCLNPDLEGPPLEAYTIQGQYAIPQPDLTKLHQLAMQQSHFPMTHGNTGFSGIESSSPEVKGYWGLDASAQTTSHELTIPNDLIGCIIGRQGAKINEIRQMSGAQIKIANPVEGSTDRQVTITGSAASISLAQYLINVRLSSETGGMGSS

SEQ ID NO: 15475 - protein, 371 aa, Homo sapiens
MGEGDAFWAPSVLPHSTLSTLSHHPQPQFGRRMESKVSEGGLNVTLTIRLLMHGKEVGSIIGKKGETVKKMREESGARINISEGNCPERIVTITGPTDAIFKAFAMIAYKFEEDIINSMSNSPATSKPPVTLRLVVPASQCGSLIGKGGSKIKEIRESTGAQVQVAGDMLPNSTERAVTISGTPDAIIQCVKQICVVMLESPPKGATIPYRPKPASTPVIFAGGQAYTIQGQYAIPHPDQLTKLHQLAMQQTPFPPLGQTNPAFPGEKLPLHSSEEAQNLMGQSSGLDASPPASTHELTIPNDLIGCIIGRQGTKINEIRQMSGAQIKIANATEGSSERQITITGTPANISLAQYLINARLTSEVTGMGTL

SEQ ID NO: 15476 - protein, 403 aa, Homo sapiens
MSGSDGGLEEEPELSITLTLRMLMHGKEVGSIIGKKGETVKRIREQSSARITISEGSCPERITTITGSTAAVFHAVSMIAFKLDEDLCAAPANGGNVSRPPVTLRLVIPASQCGSLIGKAGTKIKEIRETTGAQVQVAGDLLPNSTERAVTVSGVPDAIILCVRQICAVILESPPKGATIPYHPSLSLGTVLLSANQGFSVQGQYGAVTPAEVTKLQQLSSHAVPFATPSVVPGLDPGTQTSSQEFLVPNDLIGCVIGRQGSKISEIRQMSGAHIKIGNQAEGAGERHVTITGSPVSIALAQYLITACLETAKSTSGGTPSSAPADLPAPFSPPLTALPTAPPGLLGTPYAISLSNFIGLKPMPFLALPPASPGPPPGLAAYTAKMAAANGSKKAERQKFSPY

SEQ ID NO: 15477 - protein, 350 aa, Homo sapiens
MEGVAVVTAGSVGAAKTEGAAALPPPPPVSPPALTPAPAAGEEGPAPLSETGAPGCSGSRPPELEPERSLGRFRGRFEDEDEELEEEEELEEEEEEEEEDMSHFSLRLEGGRQDSEDEEERLINLSELTPYILCSICKGYLIDATTITECLHTFCKSCIVRHFYYSNRCPKCNIVVHQTQPLYNIRLDRQLQDIVYKLVINLEEREKKQMHDFYKERGLEVPKPAVPQPVPSSKGRSKKVLESVFRIPPELDMSLLLEFIGANEGTGHFKPLEKKFVRVSGEATIGHVEKFLRRKMGLDPACQVDIICGDHLLEQYQTLREIRRAIGDAAMQDGLLVLHYGLVVSPLKIT

SEQ ID NO: 15478 - protein, 501 aa, Homo sapiens
MAASWRLGCDPRLLRYLVGFPGRRSVGLVKGALGWSVSRGANWRWFHSTQWLRGDPIKILMPSLSPTMEEGNIVKWLKKEGEAVSAGDALCEIETDKAVVTLDASDDGILAKIVVEEGSKNIRLGSLIGLIVEEGEDWKHVEIPKDVGPPPPVSKPSEPRPSPEPQISIPVKKEHIPGTLRFRLSPAARNILEKHSLDASQGTATGPRGIFTKEDALKLVQLKQTGKITESRPTPAPTATPTAPSPLQATAGPSYPRPVIPPVSTPGQPNAVGTFTEIPASNIRRVIAKRLTESKSTVPHAYATADCDLGAVLKVRQDLVKDDIKVSVNDFIIKAAAVTLKQMPDVNVSWDGEGPKQLPFIDISVAVATDKGLLTPIIKDAAAKGIQEIADSVKALSKKARDGKLLPEEYQGGSFSISNLGMFGIDEFTAVINPPQACILAVGRFRPVLKLTEDEEGNAKLQQRQLITVTMSSDSRVVDDELATRFLKSFKANLENPIRLA

SEQ ID NO: 15479 - protein, 283 aa, Homo sapiens
MNGEEQYYAATQLYKDPCAFQRGPAPEFSASPPACLYMGRQPPPPPPHPFPGALGALEQGSPPDISPYEVPPLADDPAVAHLHHHLPAQLALPHPPAGPFPEGAEPGVLEEPNRVQLPFPWMKSTKAHAWKGQWAGGAYAAEPEENKRTRTAYTRAQLLELEKEFLFNKYISRPRRVELAVMLNLTERHIKIWFQNRRMKWKKEEDKKRGGGTAVGGGGVAEPEQDCAVTSGEELLALPPPPPPGGAVPPAAPVAAREGRLPPGLSASPQPSSVAPRRPQEPR

SEQ ID NO: 15480 - protein, 1588 aa, Homo sapiens
MLPPKHLSATKPKKSWAPNLYELDSDLTKEPDVIIGEGPTDSEFFHQRFRNLIYVEFVGPRKTLIKLRNLCLDWLQPETRTKEEIIELLVLEQYLTIIPEKLKPWVRAKKPENCEKLVTLLENYKEMYQPEDDNNSDVTSDDDMTRNRRESSPPHSVHSFSDRDWDRRGRSRDMEPRDRWSHTRNPRSRMPPRDLSLPVVAKTSFEMDREDDRDSRAYESRSQDAESYQNVVDLAEDRKPHNTIQDNMENYRKLLSLVQLAEDDGHSHMTQGHSSRSKRSAYPSTSRGLKTMPEAKKSTHRRGICEDESSHGVIMEKFIKDVSRSSKSGRARESSDRSQRFPRMSDDNWKDISLNKRESVIQQRVYEGNAFRGGFRFNSTLVSRKRVLERKRRYHFDTDGKGSIHDQKGCPRKKPFECGSEMRKAMSVSSLSSLSSPSFTESQPIDFGAMPYVCDECGRSFSVISEFVEHQIMHTRENLYEYGESFIHSVAVSEVQKSQVGGKRFECKDCGETFNKSAALAEHRKIHARGYLVECKNQECEEAFMPSPTFSELQKIYGKDKFYECRVCKETFLHSSALIEHQKIHFGDDKDNEREHERERERERGETFRPSPALNEFQKMYGKEKMYECKVCGETFLHSSSLKEHQKIHTRGNPFENKGKVCEETFIPGQSLKRRQKTYNKEKLCDFTDGRDAFMQSSELSEHQKIHSRKNLFEGRGYEKSVIHSGPFTESQKSHTITRPLESDEDEKAFTISSNPYENQKIPTKENVYEAKSYERSVIHSLASVEAQKSHSVAGPSKPKVMAESTIQSFDAINHQRVRAGGNTSEGREYSRSVIHSLVASKPPRSHNGNELVESNEKGESSIYISDLNDKRQKIPARENPCEGGSKNRNYEDSVIQSVFRAKPQKSVPGEGSGEFKKDGEFSVPSSNVREYQKARAKKKYIEHRSNETSVIHSLPFGEQTFRPRGMLYECQECGECFAHSSDLTEHQKIHDREKPSGSRNYEWSVIRSLAPTDPQTSYAQEQYAKEQARNKCKDFRQFFATSEDLNTNQKIYDQEKSHGEESQGENTDGEETHSEETHGQETIEDPVIQGSDMEDPQKDDPDDKIYECEDCGLGFVDLTDLTDHQKVHSRKCLVDSREYTHSVIHTHSISEYQRDYTGEQLYECPKCGESFIHSSFLFEHQRIHEQDQLYSMKGCDDGFIALLPMKPRRNRAAERNPALAGSAIRCLLCGQGFIHSSALNEHMRLHREDDLLEQSQMAEEAIIPGLALTEFQRSQTEERLFECAVCGESFVNPAELADHVTVHKNEPYEYGSSYTHTSFLTEPLKGAIPFYECKDCGKSFIHSTVLTKHKELHLEEEEEDEAAAAAAAAAQEVEANVHVPQVVLRIQGLNVEAAEPEVEAAEPEVEAAEPEVEAAEPNGEAEGPDGEAAEPIGEAGQPNGEAEQPNGDADEPDGAGIEDPEERAEEPEGKAEEPEGDADEPDGVGIEDPEEGEDQEIQVEEPYYDCHECTETFTSSTAFSEHLKTHASMIIFEPANAFGECSGYIERASTSTGGANQADEKYFKCDVCGQLFNDRLSLARHQNTHTG

SEQ ID NO: 15481 - protein, 933 aa, Homo sapiens
MTELKAKGPRAPHVAGGPPSPEVGSPLLCRPAAGPFPGSQTSDTLPEVSAIPISLDGLLFPRPCQGQDPSDEKTQDQQSLSDVEGAYSRAEATRGAGGSSSSPPEKDSGLLDSVLDTLLAPSGPGQSQPSPPACEVTSSWCLFGPELPEDPPAAPATQRVLSPLMSRSGCKVGDSSGTAAAHKVLPRGLSPARQLLLPASESPHWSGAPVKPSPQAAAVEVEEEDGSESEESAGPLLKGKPRALGGAAAGGGAAAVPPGAAAGGVALVPKEDSRFSAPRVALVEQDAPMAPGRSPLATTVMDFIHVPILPLNHALLAARTRQLLEDESYDGGAGAASAFAPPRSSPCASSTPVAVGDFPDCAYPPDAEPKDDAYPLYSDFQPPALKIKEEEEGAEASARSPRSYLVAGANPAAFPDFPLGPPPPLPPRATPSRPGEAAVTAAPASASVSSASSSGSTLECILYKAEGAPPQQGPFAPPPCKAPGASGCLLPRDGLPSTSASAAAAGAAPALYPALGLNGLPQLGYQAAVLKEGLPQVYPPYLNYLRPDSEASQSPQYSFESLPQKICLICGDEASGCHYGVLTCGSCKVFFKRAMEGQHNYLCAGRNDCIVDKIRRKNCPACRLRKCCQAGMVLGGRKFKKFNKVRVVRALDAVALPQPVGVPNESQALSQRFTFSPGQDIQLIPPLINLLMSIEPDVIYAGHDNTKPDTSSSLLTSLNQLGERQLLSVVKWSKSLPGFRNLHIDDQITLIQYSWMSLMVFGLGWRSYKHVSGQMLYFAPDLILNEQRMKESSFYSLCLTMWQIPQEFVKLQVSQEEFLCMKVLLLLNTIPLEGLRSQTQFEEMRSSYIRELIKAIGLRQKGVVSSSQRFYQLTKLLDNLHDLVKQLHLYCLNTFIQSRALSVEFPEMMSEVIAAQLPKILAGMVKPLLFHKK

SEQ ID NO: 15482 - protein, 272 aa, Homo sapiens; identical to SEQ ID NO: 10327

SEQ ID NO: 15483 - protein, 299 aa, Homo sapiens
MAQNLKDLAGRLPAGPRGMGTALKLLLGAGAVAYGVRESVFTVEGGHRAIFFNRIGGVQQDTILAEGLHFRIPWFQYPIIYDIRARPRKISSPTGSKDLQMVNISLRVLSRPNAQELPSMYQRLGLDYEERVLPSIVNEVLKSVVAKFNASQLITQRAQVSLLIRRELTERAKDFSLILDDVAITELSFSREYTAAVEAKQVAQQEAQRAQFLVEKAKQEQRQKIVQAEGEAEAAKMLGEALSKNPGYIKLRKIRAAQNISKTIATSQNRIYLTADNLVLNLQDESFTRGSDSLIKGKK

SEQ ID NO: 15484 - protein, 1012 aa, Homo sapiens
MTKHPPNRRGISFEVGAQLEARDRLKNWYPAHIEDIDYEEGKVLIHFKRWNHRYDEWFCWDSPYLRPLEKIQLRKEGLHEEDGSSEFQINEQVLACWSDCRFYPAKVTAVNKDGTYTVKFYDGVVQTVKHIHVKAFSKDQNIVGNARPKETDHKSLSSSPDKREKFKEQRKATVNVKKDKEDKPLKTEKRPKQPDKEGKLICSEKGKVSEKSLPKNEKEDKENISENDREYSGDAQVDKKPENDIVKSPQENLREPKRKRGRPPSIAPTAVDSNSQTLQPITLELRRRKISKGCEVPLKRPRLDKNSSQEKSKNYSENTDKDLSRRRSSRLSTNGTHEILDPDLVVSDLVDTDPLQDTLSSTKESEEGQLKSALEAGQVSSALTCHSFGDGSGAAGLELNCPSMGENTMKTEPTSPLVELQEISTVEVTNTFKKTDDFGSSNAPAVDLDHKFRCKVVDCLKFFRKAKLLHYHMKYFHGMEKSLEPEESPGKRHVQTRGPSASDKPSQETLTRKRVSASSPTTKDKEKNKEKKFKEFVRVKPKKKKKKKKKTKPECPCSEEISDTSQEPSPPKAFAVTRCGSSHKPGVHMSPQLHGPESGHHKGKVKALEEDNLSESSSESFLWSDDEYGQDVDVTTNPDEELDGDDRYDFEVVRCICEVQEENDFMIQCEECQCWQHGVCMGLLEENVPEKYTCYVCQDPPGQRPGFKYWYDKEWLSRGHMHGLAFLEENYSHQNAKKIVATHQLLGDVQRVIEVLHGLQLKMSILQSREHPDLPLWCQPWKQHSGEGRSHFRNIPVTDTRSKEEAPSYRTLNGAVEKPRPLALPLPRSVEESYITSEHCYQKPRAYYPAVEQKLVVETRGSALDDAVNPLHENGDDSLSPRLGWPLDQDRSKGDSDPKPGSPKVKEYVSKKALPEEAPARKLLDRGGEGLLSSQHQWQFNLLTHVESLQDEVTHRMDSIEKELDVLESWLDYTGELEPPEPLARLPQLKHCIKQLLMDLGKVQQIALCCST

SEQ ID NO: 15485 - protein, 110 aa, Homo sapiens
MAKHHPDLIFCRKQAGVAIGRLCEKCDGKCVICDSYVRPCTLVRICDECNYGSYQGRCVICGGPGVSDAYYCKECTIQEKDRDGCPKIVNLGSSKTDLFYERKKYGFKKR

SEQ ID NO: 15486 - protein, 284 aa, Homo sapiens
MDYSYLNSYDSCVAAMEASAYGDFGACSQPGGFQYSPLRPAFPAAGPPCPALGSSNCALGALRDHQPAPYSAVPYKFFPEPSGLHEKRKQRRIRTTFTSAQLKELERVFAETHYPDIYTREELALKIDLTEARVQVWFQNRRAKFRKQERAASAKGAAGAAGAKKGEARCSSEDDDSKESTCSPTPDSTASLPPPPAPGLASPRLSPSPLPVALGSGPGPGPGPQPLKGALWAGVAGGGGGGPGAGAAELLKAWQPAESGPGPFSGVLSSFHRKPGPALKTNLF

SEQ ID NO: 15487 - protein, 314 aa, Homo sapiens
MYKMEYSYLNSSAYESCMAGMDTSSLASAYADFSSCSQASGFQYNPIRTTFGATSGCPSLTPGSCSLGTLRDHQSSPYAAVPYKLFTDHGGLNEKRKQRRIRTTFTSAQLKELERVFAETHYPDIYTREELALKIDLTEARVQVWFQNRRAKFRKQERAAAAAAAAAKNGSSGKKSDSSRDDESKEAKSTDPDSTGGPGPNPNPTPSCGANGGGGGGPSPAGAPGAAGPGGPGGEPGKGGAAAAAAAAAAAAAAAAAAAAGGLAAAGGPGQGWAPGPGPITSIPDSLGGPFASVLSSLQRPNGAKAALVKSSMF

SEQ ID NO: 15488 - protein, 762 aa, Homo sapiens
MASNERDAISWYQKKIGAYDQQIWEKSIEQTQIKGLKNKPKKMGHIKPDLIDVDLIRGSTFAKAKPEIPWTSLTRKGLVRVVFFPLFSNWWIQVTSLRIFVWLLLLYFMQVIAIVLYLMMPIVNISEVLGPLCLMLLMGTVHCQIVSTQITRPSGNNGNRRRRKLRKTVNGDGSRENGNNSSDKVRGIETLESVPIIGGFWETIFGNRIKRVKLISNKGTETDNDPSCVHPIIKRRQCRPEIRMWQTREKAKFSDGEKCRREAFRRLGNGVSDDLSSEEDGEARTQMILLRRSVEGASSDNGCEVKNRKSILSRHLNSQVKKTTTRWCHIVRDSDSLAESEFESAAFSQGSRSGVSGGSRSLNMSRRDSESTRHDSETEDMLWDDLLHGPECRSSVTSDSEGAHVNTLHSGTKRDPKEDVFQQNHLFWLQNSSPSSDRVSAIIWEGNECKKMDMSVLEISGIIMSRVNAYQQGVGYQMLGNVVTIGLAFFPFLHRLFREKSLDQLKSISAEEILTLFCGAPPVTPIIVLSIINFFERLCLTWMFFFMMCVAERTYKQRFLFAKLFSHITSARKARKYEIPHFRLKKVENIKIWLSLRSYLKRRGPQRSVDVVVSSVFLLTLSIAFICCAQVLQGHKTFLNDAYNWEFLIWETALLLFLLRLASLGSETNKKYSNVSILLTEQINLYLKMEKKPNKKEQLTLVNNVLKLSTKLLKELDTPFRLYGLTMNPLIYNITRVVILSAVSGVISDLLGFNIRLWKIKS

SEQ ID NO: 15489 - protein, 785 aa, Homo sapiens
MASKVTDAIVWYQKKEFLSVATTAPGPQQVLPGYCQCSLKDQGLFIQCLIGAYDQQIWEKSVEQREIKFIKLGLRNKPKKTAHVKPDLIDVDLVRGSAFAKAKPESPWTSLTRKGIVRVVFFPFFFRWWLQVTSKVIFFWLLVLYLLQVAAIVLFCSTSSPHSIPLTEVIGPIWLMLLLGTVHCQIVSTRTPKPPLSTGGKRRRKLRKAAHLEVHREGDGSSTTDNTQEGAVQNHGTSTSHSVGTVFRDLWHAAFFLSGSKKAKNSIDKSTETDNGYVSLDGKKTVKSGEDGIQNHEPQCETIRPEETAWNTGTLRNGPSKDTQRTITNVSDEVSSEEGPETGYSLRRHVDRTSEGVLRNRKSHHYKKHYPNEDAPKSGTSCSSRCSSSRQDSESARPESETEDVLWEDLLHCAECHSSCTSETDVENHQINPCVKKEYRDDPFHQSHLPWLHSSHPGLEKISAIVWEGNDCKKADMSVLEISGMIMNRVNSHIPGIGYQIFGNAVSLILGLTPFVFRLSQATDLEQLTAHSASELYVIAFGSNEDVIVLSMVIISFVVRVSLVWIFFFLLCVAERTYKQRLLFAKLFGHLTSARRARKSEVPHFRLKKVQNIKMWLSLRSYLKRRGPQRSVDVIVSSAFLLTISVVFICCAQLLHVHEIFLDCHYNWELVIWCISLTLFLLRFVTLGSETSKKYSNTSILLTEQINLYLKMEKKPNKKEELTLVNNVLKLATKLLKELDSPFRLYGLTMNPLLYNITQVVILSAVSGVISDLLGFNLKLWKIKS

SEQ ID NO: 15490 - protein, 314 aa, Homo sapiens
MDAFKGGMSLERLPEGLRPPPPPPHDMGPAFHLARPADPREPLENSASESSDTELPEKERGGEPKGPEDSGAGGTGCGGADDPAKKKKQRRQRTHFTSQQLQELEATFQRNRYPDMSMREEIAVWTNLTEPRVRVWFKNRRAKWRKRERNQQLDLCKGGYVPQFSGLVQPYEDVYAAGYSYNNWAAKSLAPAPLSTKSFTFFNSMSPLSSQSMFSAPSSISSMTMPSSMGPGAVPGMPNSGLNNINNLTGSSLNSAMSPGACPYGTPASPYSVYRDTCNSSLASLRLKSKQHSSFGYGGLQGPASGLNACQYNS

SEQ ID NO: 15491 - protein, 317 aa, Homo sapiens
METNCRKLVSACVQLGVQPAAVECLFSKDSEIKKVEFTDSPESRKEAASSKFFPRQHPGANEKDKSQQGKNEDVGAEDPSKKKRQRRQRTHFTSQQLQELEATFQRNRYPDMSTREEIAVWTNLTEARVRVWFKNRRAKWRKRERNQQAELCKNGFGPQFNGLMQPYDDMYPGYSYNNWAAKGLTSASLSTKSFPFFNSMNVNPLSSQSMFSPPNSISSMSMSSSMVPSAVTGVPGSSLNSLNNLNNLSSPSLNSAVPTPACPYAPPTPPYVYRDTCNSSLASLRLKAKQHSSFGYASVQNPASNLSACQYAVDRPV

SEQ ID NO: 15492 - protein, 302 aa, Homo sapiens
MEFGLLSEAEARSPALSLSDAGTPHPQLPEHGCKGQEHSDSEKASASLPGGSPEDGSLKKKQRRQRTHFTSQQLQELEATFQRNRYPDMSTREEIAVWTNLTEARVRVWFKNRRAKWRKRERSQQAELCKGSFAAPLGGLVPPYEEVYPGYSYGNWPPKALAPPLAAKTFPFAFNSVNVGPLASQPVFSPPSSIAASMVPSAAAAPGTVPGPGALQGLGGGPPGLAPAAVSSGAVSCPYASAAAAAAAAASSPYVYRDPCNSSLASLRLKAKQHASFSYPAVHGPPPAANLSPCQYAVERPV

SEQ ID NO: 15493 - protein, 436 aa, Homo sapiens
MMATQTLSIDSYQDGQQMQVVTELKTEQDPNCSEPDAEGVSPPPVESQTPMDVDKQAIYRHPLFPLLALLFEKCEQSTQGSEGTTSASFDVDIENFVRKQEKEGKPFFCEDPETDNLMVKAIQVLRIHLLELEKVNELCKDFCSRYIACLKTKMNSETLLSGEPGSPYSPVQSQQIQSAITGTISPQGIVVPASALQQGNVAMATVAGGTVYQPVTVVTPQGQVVTQTLSPGTIRIQNSQLQLQLNQDLSILHQDDGSSKNKRGVLPKHATNVMRSWLFQHIGHPYPTEDEKKQIAAQTNLTLLQVNNWFINARRRILQPMLDSSCSETPKTKKKTAQNRPVQRFWPDSIASGVAQPPPSELTMSEGAVVTITTPVNMNVDSLQSLSSDGATLAVQQVMMAGQSEDESVDSTEEDAGALAPAHISGLVLENSDSLQ

SEQ ID NO: 15494 - protein, 472 aa, Homo sapiens
MMQHASPAPALTMMATQNVPPPPYQDSPQMTATAQPPSKAQAVHISAPSAAASTPVPSAPIDPQAQLEADKRAVYRHPLFPLLTLLFEKCEQATQGSECITSASFDVDIENFVHQQEQEHKPFFSDDPELDNLMVKAIQVLRIHLLELEKVNELCKDFCNRYITCLKTKMHSDNLLRNDLGGPYSPNQPSINLHSQDLLQNSPNSMSGVSNNPQGIVVPASALQQGNIAMTTVNSQVVSGGALYQPVTMVTSQGQVVTQAIPQGAIQIQNTQVNLDLTSLLDNEDKKSKNKRGVLPKHATNIMRSWLFQHLMHPYPTEDEKRQIAAQTNLTLLQVNNWFINARRRILQPMLDASNPDPAPKAKKIKSQHRPTQRFWPNSIAAGVLQQQGGAPGTNPDGSINLDNLQSLSSDSATMAMQQAMMAAHDDSLDGTEEEDEDEMEEEEEEELEEEVDELQTTNVSDLGLEHSDSLE

SEQ ID NO: 15495 - protein, 500 aa, Homo sapiens
MATVIPGDLSEVRDTQKVPSGKRKRGETKPRKNFPCQLCDKAFNSVEKLKVHSYSHTGERPYKCIQQDCTKAFVSKYKLQRHMATHSPEKTHKCNYCEKMFHRKDHLKNHLHTHDPNKETFKCEECGKNYNTKLGFKRHLALHAATSGDLTCKVCLQTFESTGVLLEHLKSHAGKSSGGVKEKKHQCEHCDRRFYTRKDVRRHMVVHTGRKDFLCQYCAQRFGRKDHLTRHMKKSHNQELLKVKTEPVDFLDPFTCNVSVPIKDELLPVMSLPSSELLSKPFTNTLQLNLYNTPFQSMQSSGSAHQMITTLPLGMTCPIDMDTVHPSHHLSFKYPFSSTSYAISIPEKEQPLKGEIESYLMELQGGVPSSSQDSQASSSSKLGLDPQIGSLDDGAGDLSLSKSSISISDPLNTPALDFSQLFNFIPLNGPPYNPLSVGSLGMSYSQEEAHSSVSQLPPQTQDLQDPANTIGLGSLHSLSAAFTSSLSTSTTLPRFHQAFQ

SEQ ID NO: 15496 - protein, 463 aa, Homo sapiens
MATFPCQLCGKTFLTLEKFTIHNYSHSRERPYKCVQPDCGKAFVSRYKLMRHMATHSPQKSHQCAHCEKTFNRKDHLKNHLQTHDPNKMAFGCEECGKKYNTMLGYKRHLALHAASSGDLTCGVCALELGSTEVLLDHLKAHAEEKPPSGTKEKKHQCDHCERCFYTRKDVRRHLVVHTGCKDFLCQFCAQRFGRKDHLTRHTKKTHSQELMKESLQTGDLLSTFHTISPSFQLKAAALPPFPLGASAQNGLASSLPAEVHSLTLSPPEQAAQPMQPLPESLASLHPSVSPGSPPPPLPNHKYNTTSTSYSPLASLPLKADTKGFCNISLFEDLPLQEPQSPQKLNPGFDLAKGNAGKVNLPKELPADAVNLTIPASLDLSPLLGFWQLPPPATQNTFGNSTLALGPGESLPHRLSCLGQQQQEPPLAMGTVSLGQLPLPPIPHVFSAGTGSAILPHFHHAFR

SEQ ID NO: 15497 - protein, 496 aa, Homo sapiens
MTTFFTSVPPWIQDAKQEEEVGWKLVPRPRGREAESQVKCQCEISGTPFSNGEKLRPHSLPQPEQRPYSCPQLHCGKAFASKYKLYRHMATHSAQKPHQCMYCDKMFHRKDHLRNHLQTHDPNKEALHCSECGKNYNTKLGYRRHLAMHAASSGDLSCKVCLQTFESTQALLEHLKAHSRRVAGGAKEKKHPCDHCDRRFYTRKDVRRHLVVHTGRKDFLCQYCAQRFGRKDHLTRHVKKSHSQELLKIKTEPVDMLGLLSCSSTVSVKEELSPVLCMASRDVMGTKAFPGMLPMGMYGAHIPTMPSTGVPHSLVHNTLPMGMSYPLESSPISSPAQLPPKYQLGSTSYLPDKLPKVEVDSFLAELPGSLSLSSAEPQPASPQPAAAAALLDEALLAKSPANLSEALCAANVDFSHLLGFLPLNLPPCNPPGATGGLVMGYSQAEAQPLLTTLQAQPQDSPGAGGPLNFGPLHSLPPVFTSGLSSTTLPRFHQAFQ

SEQ ID NO: 15498 - protein, 350 aa, Homo sapiens
MEPKRIREGYLVKKGSVFNTWKPMWVVLLEDGIEFYKKKSDNSPKGMIPLKGSTLTSPCQDFGKRMFVFKITTTKQQDHFFQAAFLEERDAWVRDIKKAIKCIEGGQKFARKSTRRSIRLPETIDLGALYLSMKDTEKGIKELNLEKDKKIFNHCFTGNCVIDWLVSNQSVRNRQEGLMIASSLLNEGYLQPAGDMSKSAVDGTAENPFLDNPDAFYYFPDSGFFCEENSSDDDVILKEEFRGVIIKQGCLLKQGHRRKNWKVRKFILREDPAYLHYYDPAGAEDPLGAIHLRGCVVTSVESNSNGRKSEEENLFEIITADEVHYFLQAATPKERTEWIRAIQMASRTGK

SEQ ID NO: 15499 - protein, 673 aa, Homo sapiens
MDLTKMGMIQLQNPSHPTGLLCKANQMRLAGTLCDVVIMVDSQEFHAHRTVLACTSKMFEILFHRNSQHYTLDFLSPKTFQQILEYAYTATLQAKAEDLDDLLYAAEILEIEYLEEQCLKMLETIQASDDNDTEATMADGGAEEEEDRKARYLKNIFISKHSSEESGYASVAGQSLPGPMVDQSPSVSTSFGLSAMSPTKAAVDSLMTIGQSLLQGTLQPPAGPEEPTLAGGGRHPGVAEVKTEMMQVDEVPSQDSPGAAESSISGGMGDKVEERGKEGPGTPTRSSVITSARELHYGREESAEQVPPPAEAGQAPTGRPEHPAPPPEKHLGIYSVLPNHKADAVLSMPSSVTSGLHVQPALAVSMDFSTYGGLLPQGFIQRELFSKLGELAVGMKSESRTIGEQCSVCGVELPDNEAVEQHRKLHSGMKTYGCELCGKRFLDSLRLRMHLLAHSAGAKAFVCDQCGAQFSKEDALETHRQTHTGTDMAVFCLLCGKRFQAQSALQQHMEVHAGVRSYICSECNRTFPSHTALKRHLRSHTGDHPYECEFCGSCFRDESTLKSHKRIHTGEKPYECNGCGKKFSLKHQLETHYRVHTGEKPFECKLCHQRSRDYSAMIKHLRTHNGASPYQCTICTEYCPSLSSMQKHMKGHKPEEIPPDWRIEKTYLYLCYV

SEQ ID NO: 15500 - protein, 1410 aa, Homo sapiens
MADTDLFMECEEEELEPWQKISDVIEDSVVEDYNSVDKTTTVSVSQQPVSAPVPIAAHASVAGHLSTSTTVSSSGAQNSDSTKKTLVTLIANNNAGNPLVQQGGQPLILTQNPAPGLGTMVTQPVLRPVQVMQNANHVTSSPVASQPIFITTQGFPVRNVRPVQNAMNQVGIVLNVQQGQTVRPITLVPAPGTQFVKPTVGVPQVFSQMTPVRPGSTMPVRPTTNTFTTVIPATLTIRSTVPQSQSQQTKSTPSTSTTPTATQPTSLGQLAVQSPGQSNQTTNPKLAPSFPSPPAVSIASFVTVKRPGVTGENSNEVAKLVNTLNTIPSLGQSPGPVVVSNNSSAHGSQRTSGPESSMKVTSSIPVFDLQDGGRKICPRCNAQFRVTEALRGHMCYCCPEMVEYQKKGKSLDSEPSVPSAAKPPSPEKTAPVASTPSSTPIPALSPPTKVPEPNENVGDAVQTKLIMLVDDFYYGRDGGKVAQLTNFPKVATSFRCPHCTKRLKNNIRFMNHMKHHVELDQQNGEVDGHTICQHCYRQFSTPFQLQCHLENVHSPYESTTKCKICEWAFESEPLFLQHMKDTHKPGEMPYVCQVCQYRSSLYSEVDVHFRMIHEDTRHLLCPYCLKVFKNGNAFQQHYMRHQKRNVYHCNKCRLQFLFAKDKIEHKLQHHKTFRKPKQLEGLKPGTKVTIRASRGQPRTVPVSSNDTPPSALQEAAPLTSSMDPLPVFLYPPVQRSIQKRAVRKMSVMGRQTCLECSFEIPDFPNHFPTYVHCSLCRYSTCCSRAYANHMINNHVPRKSPKYLALFKNSVSGIKLACTSCTFVTSVGDAMAKHLVFNPSHRSSSILPRGLTWIAHSRHGQTRDRVHDRNVKNMYPPPSFPTNKAATVKSAGATPAEPEELLTPLAPALPSPASTATPPPTPTHPQALALPPLATEGAECLNVDDQDEGSPVTQEPELASGGGGSGGVGKKEQLSVKKLRVVLFALCCNTEQAAEHFRNPQRRIRRWLRRFQASQGENLEGKYLSFEAEEKLAEWVLTQREQQLPVNEETLFQKATKIGRSLEGGFKISYEWAVRFMLRHHLTPHARRAVAHTLPKDVAENAGLFIDFVQRQIHNQDLPLSMIVAIDEISLFLDTEVLSSDDRKENALQTVGTGEPWCDVVLAILADGTVLPTLVFYRGQMDQPANMPDSILLEAKESGYSDDEIMELWSTRVWQKHTACQRSKGMLVMDCHRTHLSEEVLAMLSASSTLPAVVPAGCSSKIQPLDVCIKRTVKNFLHKKWKEQAREMADTACDSDVLLQLVLVWLGEVLGVIGDCPELVQRSFLVASVLPGPDGNINSPTRNADMQEELIASLEEQLKLSGEHSESSTPRPRSSPEETIEPESLHQLFEGESETESFYGFEEADLDLMEI

SEQ ID NO: 15501 - protein, 291 aa, Homo sapiens
MSCQAFTSADTFIPLNSDASATLPLIMHHSAAECLPVSNHATNVMSTATGLHYSVPSCHYGNQPSTYGVMAGSLTPCLYKFPDHTLSHGFPPIHQPLLAEDPTAADFKQELRRKSKLVEEPIDMDSPEIRELEKFANEFKVRRIKLGYTQTNVGEALAAVHGSEFSQTTICRFENLQLSFKNACKLKAILSKWLEEAEQVGALYNEKVGANERKRKRRTTISIAAKDALERHFGEQNKPSSQEIMRMAEELNLEKEVVRVWFCNRRQREKRVKTSLNQSLFSISKEHLECR

SEQ ID NO: 15502 - protein, 256 aa, Homo sapiens
MLWQKPTAPEQAPAPARPYQGVRVKEPVKELLRRKRGHASSGAAPAPTAVVLPHQPLATYTTVGPSCLDMEGSVSAVTEEAALCAGWLSQPTPATLQPLAPWTPYTEYVPHEAVSCPYSADMYVQPVCPSYTVVGPSSVLTYASPPLITNVTTRSSATPAVGPPLEGPEHQAPLTYFPWPQPLSTLPTSTLQYQPPAPALPGPQFVQLPISIPEPVLQDMEDPRRAASSLTIDKLLLEEEDSDAYALNHTLSVEGF

SEQ ID NO: 15503 - protein, 743 aa, Homo sapiens
MNNPSETSKPSMESGDGNTGTQTNGLDFQKQPVPVGGAISTAQAQAFLGHLHQVQLAGTSLQAAAQSLNVQSKSNEESGDSQQPSQPSQQPSVQAAIPQTQLMLAGGQITGLTLTPAQQQLLLQQAQAQAQLLAAAVQQHSASQQHSAAGATISASAATPMTQIPLSQPIQIAQDLQQLQQLQQQNLNLQQFVLVHPTTNLQPAQFIISQTPQGQQGLLQAQNLLTQLPQQSQANLLQSQPSITLTSQPATPTRTIAATPIQTLPQSQSTPKRIDTPSLEEPSDLEELEQFAKTFKQRRIKLGFTQGDVGLAMGKLYGNDFSQTTISRFEALNLSFKNMCKLKPLLEKWLNDAENLSSDSSLSSPSALNSPGIEGLSRRRKKRTSIETNIRVALEKSFLENQKPTSEEITMIADQLNMEKEVIRVWFCNRRQKEKRINPPSSGGTSSSPIKAIFPSPTSLVATTPSLVTSSAATTLTVSPVLPLTSAAVTNLSVTGTSDTTSNNTATVISTAPPASSAVTSPSLSPSPSASASTSEASSASETSTTQTTSTPLSSPLGTSQVMVTASGLQTAAAAALQGAAQLPANASLAAMAAAAGLNPSLMAPSQFAAGGALLSLNPGTLSGALSPALMSNSTLATIQALASGGSLPITSLDATGNLVFANAGGAPNIVTAPLFLNPQNLSLLTSNPVSLVSAAAASAGNSAPVASLHATSTSAESIQNSLFTVASASGAASTTTTASKAQ

SEQ ID NO: 15504 - protein, 479 aa, Homo sapiens
MVHSSMGAPEIRMSKPLEAEKQGLDSPSEHTDTERNGPDTNHQNPQNKTSPFSVSPTGPSTKIKAEDPSGDSAPAAPLPPQPAQPHLPQAQLMLTGSQLAGDIQQLLQLQQLVLVPGHHLQPPAQFLLPQAQQSQPGLLPTPNLFQLPQQTQGALLTSQPRAGLPTQAVTRPTLPDPHLSHPQPPKCLEPPSHPEEPSDLEELEQFARTFKQRRIKLGFTQGDVGLAMGKLYGNDFSQTTISRFEALNLSFKNMCKLKPLLEKWLNDAETMSVDSSLPSPNQLSSPSLGFDGLPGRRRKKRTSIETNVRFALEKSFLANQKPTSEEILLIAEQLHMEKEVIRVWFCNRRQKEKRINPCSAAPMLPSPGKPASYSPHMVTPQGGAGTLPLSQASSSLSTTVTTLSSAVGTLHPSRTAGGGGGGGGAAPPLNSIPSVTPPPPATTNSTNPSPQGSHSAIGLSGLNPSTGPGLWWNPAPYQP

SEQ ID NO: 15505 - protein, 436 aa, Homo sapiens
MVNLESMHTDIKMSGDVADSTDARSTLSQVEPGNDRNGLDFNRQIKTEDLSDSLQQTLSHRPCHLSQGPAMMSGNQMSGLNASPCQDMASLHPLQQLVLVPGHLQSVSQFLLSQTQPGQQGLQPNLLPFPQQQSGLLLPQTGPGLASQAFGHPGLPGSSLEPHLEASQHLPVPKHLPSSGGADEPSDLEELEKFAKTFKQRRIKLGFTQGDVGLAMGKLYGNDFSQTTISRFEALNLSFKNMCKLKPLLEKWLNDAESSPSDPSVSTPSSYPSLSEVFGRKRKKRTSIETNIRLTLEKRFQDNPKPSSEEISMIAEQLSMEKEVVRVWFCNRRQKEKRINCPVATPIKPPVYNSRLVSPSGSLGPLSVPPVHSTMPGTVTSSCSPGNNSRPSSPGSGLHASSPTASQNNSKAAVNSASSFNSSGSWYRWNHSTYLH

SEQ ID NO: 15506 - protein, 451 aa, Homo sapiens
MATTAQYLPRGPGGGAGGTGPLMHPDAAAAAAAAAAAERLHAGAAYREVQKLMHHEWLGAGAGHPVGLAHPQWLPTGGGGGGDWAGGPHLEHGKAGGGGTGRADDGGGGGGFHARLVHQGAAHAGAAWAQGSTAHHLGPAMSPSPGASGGHQPQPLGLYAQAAYPGGGGGGLAGMLAAGGGGAGPGLHHALHEDGHEAQLEPSPPPHLGAHGHAHGHAHAGGLHAAAAHLHPGAGGGGSSVGEHSDEDAPSSDDLEQFAKQFKQRRIKLGFTQADVGLALGTLYGNVFSQTTICRFEALQLSFKNMCKLKPLLNKWLEETDSSSGSPTNLDKIAAQGRKRKKRTSIEVGVKGALESHFLKCPKPSAHEITGLADSLQLEKEVVRVWFCNRRQKEKRMTPAAGAGHPPMDDVYAPGELGPGGGGASPPSAPPPPPPAALHHHHHHTLPGSVQ

SEQ ID NO: 15507 - protein, 443 aa, Homo sapiens
MATAASNHYSLLTSSASIVHAEPPGGMQQGAGGYREAQSLVQGDYGALQSNGHPLSHAHQWITALSHGGGGGGGGGGGGGGGGGGGGGDGSPWSTSPLGQPDIKPSVVVQQGGRGDELHGPGALQQQHQQQQQQQQQQQQQQQQQQQQQRPPHLVHHAANHHPGPGAWRSAAAAAHLPPSMGASNGGLLYSQPSFTVNGMLGAGGQPAGLHHHGLRDAHDEPHHADHHPHPHSHPHQQPPPPPPPQGPPGHPGAHHDPHSDEDTPTSDDLEQFAKQFKQRRIKLGFTQADVGLALGTLYGNVFSQTTICRFEALQLSFKNMCKLKPLLNKWLEEADSSSGSPTSIDKIAAQGRKRKKRTSIEVSVKGALESHFLKCPKPSAQEITSLADSLQLEKEVVRVWFCNRRQKEKRMTPPGGTLPGAEDVYGGSRDTPPHHGVQTPVQ

SEQ ID NO: 15508 - protein, 500 aa, Homo sapiens
MATAASNPYLPGNSLLAAGSIVHSDAAGAGGGGGGGGGGGGGGAGGGGGGMQPGSAAVTSGAYRGDPSSVKMVQSDFMQGAMAASNGGHMLSHAHQWVTALPHAAAAAAAAAAAAVEASSPWSGSAVGMAGSPQQPPQPPPPPPQGPDVKGGAGRDDLHAGTALHHRGPPHLGPPPPPPHQGHPGGWGAAAAAAAAAAAAAAAAHLPSMAGGQQPPPQSLLYSQPGGFTVNGMLSAPPGPGGGGGGAGGGAQSLVHPGLVRGDTPELAEHHHHHHHHAHPHPPHPHHAQGPPHHGGGGGGAGPGLNSHDPHSDEDTPTSDDLEQFAKQFKQRRIKLGFTQADVGLALGTLYGNVFSQTTICRFEALQLSFKNMCKLKPLLNKWLEEADSSTGSPTSIDKIAAQGRKRKKRTSIEVSVKGALESHFLKCPKPSAQEITNLADSLQLEKEVVRVWFCNRRQKEKRMTPPGIQQQTPDDVYSQVGTVSADTPPPHHGLQTSVQ

SEQ ID NO: 15509 - protein, 361 aa, Homo sapiens
MATAASNPYSILSSTSLVHADSAGMQQGSPFRNPQKLLQSDYLQGVPSNGHPLGHHWVTSLSDGGPWSSTLATSPLDQQDVKPGREDLQLGAIIHHRSPHVAHHSPHTNHPNAWGASPAPNPSITSSGQPLNVYSQPGFTVSGMLEHGGLTPPPAAASAQSLHPVLREPPDHGELGSHHCQDHSDEETPTSDELEQFAKQFKQRRIKLGFTQADVGLALGTLYGNVFSQTTICRFEGLQLSFKNMCKLKPLLNKWLEEADSSTGSPTSIDKIAAQGRKRKKRTSIEVSVKGVLETHFLKCPKPAAQEISSLADSLQLEKEVVRVWFCNRRQKEKRMTPPGDQQPHEVYSHTVKTDTSCHDL

SEQ ID NO: 15510 - protein, 419 aa, Homo sapiens
MMSMNSKQPHFAMHPTLPEHKYPSLHSSSEAIRRACLPTPPLQSNLFASLDETLLARAEALAAVDIAVSQGKSHPFKPDATYHTMNSVPCTSTSTVPLAHHHHHHHHHQALEPGDLLDHISSPSLALMAGAGGAGAAAGGGGAHDGPGGGGGPGGGGGPGGGPGGGGGGGPGGGGGGPGGGLLGGSAHPHPHMHSLGHLSHPAAAAAMNMPSGLPHPGLVAAAAHHGAAAAAAAAAAGQVAAASAAAAVVGAAGLASICDSDTDPRELEAFAERFKQRRIKLGVTQADVGSALANLKIPGVGSLSQSTICRFESLTLSHNNMIALKPILQAWLEEAEGAQREKMNKPELFNGGEKKRKRTSIAAPEKRSLEAYFAVQPRPSSEKIAAIAEKLDLKKNVVRVWFCNQRQKQKRMKFSATY

SEQ ID NO: 15511 - protein, 409 aa, Homo sapiens
MMMMSLNSKQAFSMPHGGSLHVEPKYSALHSTSPGSSAPIAPSASSPSSSSNAGGGGGGGGGGGGGGGRSSSSSSSGSSGGGGSEAMRRACLPTPPSNIFGGLDESLLARAEALAAVDIVSQSKSHHHHPPHHSPFKPDATYHTMNTIPCTSAASSSSVPISHPSALAGTHHHHHHHHHHHHQPHQALEGELLEHLSPGLALGAMAGPDGAVVSTPAHAPHMATMNPMHQAALSMAHAHGLPSHMGCMSDVDADPRDLEAFAERFKQRRIKLGVTQADVGSALANLKIPGVGSLSQSTICRFESLTLSHNNMIALKPILQAWLEEAEKSHREKLTKPELFNGAEKKRKRTSIAAPEKRSLEAYFAIQPRPSSEKIAAIAEKLDLKKNVVRVWFCNQRQKQKRMKYSAGI

SEQ ID NO: 15512 - protein, 338 aa, Homo sapiens
MMAMNSKQPFGMHPVLQEPKFSSLHSGSEAMRRVCLPAPQLQGNIFGSFDESLLARAEALAAVDIVSHGKNHPFKPDATYHTMSSVPCTSTSSTVPISHPAALTSHPHHAVHQGLEGDLLEHISPTLSVSGLGAPEHSVMPAQIHPHHLGAMGHLHQAMGMSHPHTVAPHSAMPACLSDVESDPRELEAFAERFKQRRIKLGVTQADVGAALANLKIPGVGSLSQSTICRFESLTLSHNNMIALKPVLQAWLEEAEAAYREKNSKPELFNGSERKRKRTSIAAPEKRSLEAYFAIQPRPSSEKIAAIAEKLDLKKNVVRVWFCNQRQKQKRMKYSAVH

SEQ ID NO: 15513 - protein, 360 aa, Homo sapiens
MAGHLASDFAFSPPPGGGGDGPGGPEPGWVDPRTWLSFQGPPGGPGIGPGVGPGSEVWGIPPCPPPYEFCGGMAYCGPQVGVGLVPQGGLETSQPEGEAGVGVESNSDGASPEPCTVTPGAVKLEKEKLEQNPEESQDIKALQKELEQFAKLLKQKRITLGYTQADVGLTLGVLFGKVFSQTTICRFEALQLSFKNMCKLRPLLQKWVEEADNNENLQEICKAETLVQARKRKRTSIENRVRGNLENLFLQCPKPTLQQISHIAQQLGLEKDVVRVWFCNRRQKGKRSSSDYAQREDFEAAGSPFSGGPVSFPLAPGPHFGTPGYGSPHFTALYSSVPFPEGEAFPPVSVTTLGSPMHSN

SEQ ID NO: 15514 - protein, 359 aa, Homo sapiens
MAGHLASDFAFSPPPGGGGDGPWGAEPGWVDPLTWLSFQGPPGGPGIGPGVGPGSEVWGIPPCPPPYELCGGMAYCGPQVGVGLVPQGGLETSQPESEAGVGVESNSNGASPEPCTVPPGAVKLEKEKLEQNPEKSQDIKALQKELEQFAKLLKQKRITLGYTQADVGLILGVLFGKVFSQKTICRFEALQLSFKNMCKLRPLLQKWVEEADNNENLQEICKAETLMQARKRKRTSIENRVRGNLENLFLQCPKPTLQISHIAQQLGLEKDVVRVWFCNRRQKGKRSSSDYAQREDFEAAGSPFSGGPVSFPPAPGPHFGTPGYGSPHFTALYSSVPFPEGEVFPPVSVITLGSPMHSN

SEQ ID NO: 15515 - protein, 328 aa, Homo sapiens
MAGHRPSNHFCPLPGSGGGGPRGPMPLRVDTLTWLSTQAAPGRVMVWPAVRPGICPGPDVWRIPLGPLPHEFRGWIAPCRPRLGASEAGDWLRRPSEGALPGPYIALRSIPKLPPPEDISGILKELQQLAKELRQKRLSLGYSQADVGIAVGALFGKVLSQTTICRFEAQQLSVANMWKLRPLLKKWLKEVEAENLLGLCKMEMILQQSGKWRRASRERRIGNSLEKFFQRCPKPTPQQISHIAGCLQLQKDVVRVWFYNRSKMGSRPTNDASPREIVGTAGPPCPGAPVCFHLGLGLPVDIPHYTRLYSAGVAHSSAPATTLGLLRF

SEQ ID NO: 15516 - protein, 301 aa, Homo sapiens
MPGISSQILTNAQGQVIGTLPWVVNSASVAAPAPAQSLQVQAVTPQLLLNAQGQVIATLASSPLPPPVAVRKPSTPESPAKSEVQPIQPTPTVPQPAVVIASPAPAAKPSASAPIPITCSETPTVSQLVSKPHTPSLDEDGINLEEIREFAKNFKIRRLSLGLTQTQVGQALTATEGPAYSQSAICRFEKLDITPKSAQKLKPVLEKWLNEAELRNQEGQQNLMEFVGGEPSKKRKRRTSFTPQAIEALNAYFEKNPLPTGQEITEIAKELNYDREVVRVWFCNRRQTLKNTSKLNVFQIP

SEQ ID NO: 15517 - protein, 691 aa, Homo sapiens
MSALLQDPMIAGQVSKPLLSVRSEMNAELRGEDKAATSDSELNEPLLAPVESNDSEDTPSKLFGARGNPALSDPGTPDQHQASQTHPPFPVGPQPLLTAQQLASAVAGVMPGGPPALNQPILIPFNMAGQLGGQQGLVLTLPTANLTNIQGLVAAAAAGGIMTLPLQNLQATSSLNSQLQQLQLQLQQQQQQQQQQPPPSTNQHPQPAPQAPSQSQQQPLQPTPPQQPPPASQQPPAPTSQLQQAPQPQQHQPHSHSQNQNQPSPTQQSSSPPQKPSQSPGHGLPSPLTPPNPLQLVNNPLASQAAAAAAAMSSIASSQAFGNALSSLQGVTGQLVTNAQGQIIGTIPLMPNPGPSSQAASGTQGLQVQPITPQLLTNAQGQIIATVIGNQILPVINTQGITLSPIKPGQQLHQPSQTSVGQAASQGNLLHLAHSQASMSQSPVRQASSSSSSSSSSSALSVGQLVSNPQTAAGEVDGVNLEEIREFAKAFKIRRLSLGLTQTQVGQALSATEGPAYSQSAICRHTILRSHFFLPQEAQENTIASSLTAKLNPGLLYPARFEKLDITPKSAQKIKPVLERWMAEAEARHRAGMQNLTEFIGSEPSKKRKRRTSFTPQALEILNAHFEKNTHPSGQEMTEIAEKLNYDREVVRVWFCNKRQALKNTIKRLKQHEPATAVPLEPLTDSLEENS

SEQ ID NO: 15518 - protein, 468 aa, Homo sapiens
MVDTESPLCPLSPLEAGDLESPLSEEFLQEMGNIQEISQSIGEDSSGSFGFTEYQYLGSCPGSDGSVITDTLSPASSPSSVTYPVVPGSVDESPSGALNIECRICGDKASGYHYGVHACEGCKGFFRRTIRLKLVYDKCDRSCKIQKKNRNKCQYCRFHKCLSVGMSHNAIRFGRMPRSEKAKLKAEILTCEHDIEDSETADLKSLAKRIYEAYLKNFNMNKVKARVILSGKASNNPPFVIHDMETLCMAEKTLVAKLVANGIQNKEAEVRIFHCCQCTSVETVTELTEFAKAIPGFANLDLNDQVTLLKYGVYEAIFAMLSSVMNKDGMLVAYGNGFITREFLKSLRKPFCDIMEPKFDFAMKFNALELDDSDISLFVAAIICCGDRPGLLNVGHIEKMQEGIVHVLRLHLQSNHPDDIFLFPKLLQKMADLRQLVTEHAQLVQIIKKTESDAALHPLLQEIYRDMY

SEQ ID NO: 15519 - protein, 441 aa, Homo sapiens
MEQPQEEAPEVREEEEKEEVAEAEGAPELNGGPQHALPSSSYTDLSRSSSPPSLLDQLQMGCDGASCGSLNMECRVCGDKASGFHYGVHACEGCKGFFRRTIRMKLEYEKCERSCKIQKKNRNKCQYCRFQKCLALGMSHNAIRFGRMPEAEKRKLVAGLTANEGSQYNPQVADLKAFSKHIYNAYLKNFNMTKKKARSILTGKASHTAPFVIHDIETLWQAEKGLVWKQLVNGLPPYKEISVHVFYRCQCTTVETVRELTEFAKSIPSFSSLFLNDQVTLLKYGVHEAIFAMLASIVNKDGLLVANGSGFVTREFLRSLRKPFSDIIEPKFEFAVKFNALELDDSDLALFIAAIILCGDRPGLMNVPRVEAIQDTILRALEFHLQANHPDAQYLFPKLLQKMADLRQLVTEHAQMMQRIKKTETETSLHPLLQEIYKDMY

SEQ ID NO: 15520 - protein, 505 aa, Homo sapiens
MGETLGDSPIDPESDSFTDTLSANISQEMTMVDTEMPFWPTNFGISSVDLSVMEDHSHSFDIKPFTTVDFSSISTPHYEDIPFTRTDPVVADYKYDLKLQEYQSAIKVEPASPPYYSEKTQLYNKPHEEPSNSLMAIECRVCGDKASGFHYGVHACEGCKGFFRRTIRLKLIYDRCDLNCRIHKKSRNKCQYCRFQKCLAVGMSHNAIRFGRMPQAEKEKLLAEISSDIDQLNPESADLRALAKHLYDSYIKSFPLTKAKARAILTGKTTDKSPFVIYDMNSLMMGEDKIKFKHITPLQEQSKEVAIRIFQGCQFRSVEAVQEITEYAKSIPGFVNLDLNDQVTLLKYGVHEIIYTMLASLMNKDGVLISEGQGFMTREFLKSLRKPFGDFMEPKFEFAVKFNALELDDSDLAIFIAVIILSGDRPGLLNVKPIEDIQDNLLQALELQLKLNHPESSQLFAKLLQKMTDLRQIVTEHVQLLQVIKKTETDMSLHPLLQEIYKDLY

SEQ ID NO: 15521 - protein, 828 aa, Homo sapiens
MDSEAFQSARDFLDMNFQSLAMKHMDLKQMELDTAAAKVDELTKQLESLWSDSPAPPGPQAGPPSRPPRYSSSSIPEPFGSRGSPRKAATDGADTPFGRSESAPTLHPYSPLSPKGRPSSPRTPLYLQPDAYGSLDRATSPRPRAFDGAGSSLGRAPSPRPGPGPLRQQGPPTPFDFLGRAGSPRGSPLAEGPQAFFPERGPSPRPPATAYDAPASAFGSSLLGSGGSAFAPPLRAQDDLTLRRRPPKAWNESDLDVAYEKKPSQTASYERLDVFARPASPSLQLLPWRESSLDGLGGTGKDNLTSATLPRNYKVSPLASDRRSDAGSYRRSLGSAGPSGTLPRSWQPVSRIPMPPSSPQPRGAPRQRPIPLSMIFKLQNAFWEHGASRAMLPGSPLFTRAPPPKLQPQPQPQPQPQSQPQPQLPPQPQTQPQTPTPAPQHPQQTWPPVNEGPPKPPTELEPEPEIEGLLTPVLEAGDVDEGPVARPLSPTRLQPALPPEAQSVPELEEVARVLAEIPRPLKRRGSMEQAPAVALPPTHKKQYQQIISRLFHRHGGPGPGGPEPELSPITEGSEARAGPPAPAPPAPIPPPAPSQSSPPEQPQSMEMRSVLRKAGSPRKARRARLNPLVLLLDAALTGELEVVQQAVKEMNDPSQPNEEGITALHNAICGANYSIVDFLITAGANVNSPDSHGWTPLHCAASCNDTVICMALVQHGAAIFATTLSDGATAFEKCDPYREGYADCATYLADVEQSMGLMNSGAVYALWDYSAEFGDELSFREGESVTVLRRDGPEETDWWWAALHGQEGYVPRNYFGLFPRVKPQRSKV

SEQ ID NO: 15522 - protein, 825 aa, Homo sapiens; identical to SEQ ID NO: 14803

SEQ ID NO: 15523 - protein, 1147 aa, Homo sapiens
MDSKDESSHVWPTSAEHEQNAAQVHFVPDTGTVAQIVYTDDQVRPPQQVVYTADGASYTSVDGPEHTLVYIHPVEAAQTLFTDPGQVAYVQQDATAQQASLPVHNQVLPSIESVDGSDPLATLQTPLGRLEAKEEEDEDEDEDTEEDEEEDGEDTDLDDWEPDPPRPFDPHDLWCEECNNAHASVCPKHGPLHPIPNRPVLTRARASLPLVLYIDRFLGGVFSKRRIPKRTQFGPVEGPLVRGSELKDCYIHLKVSLDKGDRKERDLHEDLWFELSDETLCNWMMFVRPAQNHLEQNLVAYQYGHHVYYTTIKNVEPKQELKVWYAASYAEFVNQKIHDISEEERKVLREQEKNWPCYECNRRFISSEQLQQHLNSHDEKLDVFSRTRGRGRGRGKRRFGPGRRPGRPPKFIRLEITSENGEKSDDGTQDLLHFPTKEQFDEAEPATLNGLDQPEQTTIPIPQLPQETQSSLEHEPETHTLHLQPQHEESVVPTQSTLTADDMRRAKRIRLELQNAALQHLFIRKSFRPFKCLQCGKAFREKDKLDQHLRFHGREGNCPLTCDLCNKGFISSTSLESHMKLHSDQKTYSCIFCPESFDRLDLLKDHVAIHINDGYFTCPTCKKRFPDFIQVKKHVRSFHSEKIYQCTECDKAFCRPDKLRLHMLRHSDRKDFLCSTCGKQFKRKDKLREHMQRMHNPEREAKKADRISRSKTFKPRITSTDYDSFTFKCRLCMMGFRRRGMLVNHLSKRHPDMKIEEVPELTLPIIKPNRDYFCQYCDKVYKSASKRKAHILKNHPGAELPPSIRKLRPAGPGEPDPMLSTHTQLTGTIATPPVCCPHCSKQYSSKTKMVQHIRKKHPEFAQLSNTIHTPLTTAVISATPAVLTTDSATGETVVTTDLLTQAMTELSQTLTTDYRTPQGDYQRIQYIPVSQSASGLQQPQHIQLQVVQVASATSPHQSQQSTVDVGQLHDPQPYPQHAIQVQHIQVSGQPLSPSAQQAQQGLSPSHIQGSSSTQGQALQQQQQQQQNSSVQHTYLPSAWNSFRGYSSEIQMMTLPPGQFVITDSGVATPVTTGQVKAVTSGHYVLSESQSELEEKQTSALSGGVQVEPPAHSDSLDPQTNSQQQTTQYIITTTTNGNGSSEVHITKP

SEQ ID NO: 15524 - protein, 511 aa, Homo sapiens
MLKMAEPIASLMIVECRACLRCSPLFLYQREKDRMTENMKECLAQTNAAVGDMVTVVKTEVCSPLRDQEYGQPCSRRPDSSAMEVEPKKLKGKRDLIVPKSFQQVDFWFCESCQEYFVDECPNHGPPVFVSDTPVPVGIPDRAALTIPQGMEVVKDTSGESDVRCVNEVIPKGHIFGPYEGQISTQDKSAGFFSWLIVDKNNRYKSIDGSDETKANWMRYVVISREEREQNLLAFQHSERIYFRACRDIRPGEWLRVWYSEDYMKRLHSMSQETIHRNLARGEKRLQREKSEQVLDNPEDLRGPIHLSVLRQGKSPYKRGFDEGDVHPQAKKKKIDLIFKDVLEASLESAKVEAHQLALSTSLVIRKVPKYQDDAYSQCATTMTHGVQNIGQTQGEGDWKVPQGVSKEPGQLEDEEEEPSSFKADSPAEASLASDPHELPTTSFCPNCIRLKKKVRELQAELDMLKSGKLPEPPVLPPQVLELPEFSDPAGKLVWMRLLSEGRVRSGLCGG

SEQ ID NO: 15525 - protein, 367 aa, Homo sapiens; identical to SEQ ID NO: 10757

SEQ ID NO: 15526 - protein, 707 aa, Homo sapiens
MHGAARAPATSVSADCCIPAGLRLGPVPGTFKLGKYLSDRREPGPKKKVRMVRGELVDESGGSPLEWIGLIRAARNSQEQTLEAIADLPGGQIFYRALRDVQPGEELTVWYSNSLAQWFDIPTTATPTHDEKGEERYICWYCWRTFRYPNSLKAHLRFHCVFSGGGGGAFLHHEHAARQGAVPAADGLGLSPKPPAPDFAAPSQAGTLRPHPLGPPPVQACGAREGIKREASSAPSATSPTPGKWGQPKKGKEQLDRALDMSGAARGQGHFLGIVGGSSAGVGSLAFYPGVRSAFKPAGLARAAAAAHGDPYREESSSKQGAGLALGRLLGGGRACGRPGSGENSAAGGAGHHHHHHAHHHHHPKCLLAGDPPPPPPPGLPCSGALRGFPLLSVPPEEASAFKHVERAPPAAAALPGARYAQLPPAPGLPLERCALPPLDPGGLKAYPGGECSHLPAVMPAFTVYNGELLYGSPATTAYYPLKLHFGGLLKYPESISYFSGPAAAALSPAELGSLASIDREIAMHNQQLSEMAAGKGRGRLDSGTLPPAVAAAGGTGGGGSGGSGAGKPKTGHLCLYCGKLYSRKYGLKIHMRTHTGYKPLKCKVCLRPFGDPSNLNKHIRLHAEGNTPYRCEFCGKVLVRRRDLERHVKSRHPGQSLLAKAGDGPGAEPGYPPEPGDPKSDDSDVDVCFTDDQSDPEVGGGGERDL

SEQ ID NO: 15527 - protein, 571 aa, Homo sapiens
MALPRPSEAVPQDKVCYPPESSPQNLAAYYTPFPSYGHYRNSLATVEEDFQPFRQLEAAASAAPAMPPFPFRMAPPLLSPGLGLQREPLYDLPWYSKLPPWYPIPHVPREVPPFLSSSHEYAGASSEDLGHQIIGGDNESGPCCGPDTLIPPPPADASLLPEGLRTSQLLPCSPSKQSEDGPKPSNQEGKSPARFQFTEEDLHFVLYGVTPSLEHPASLHHAISGLLVPPDSSGSDSLPQTLDKDSLQLPEGLCLMQTVFGEVPHFGVFCSSFIAKGVRFGPFQGKVVNASEVKTYGDNSVMWEIFEDGHLSHFIDGKGGTGNWMSYVNCARFPKEQNLVAVQCQGHIFYESCKEIHQNQELLVWYGDCYEKFLDIPVSLQVTEPGKQPSGPSEESAEGYRCERCGKVFTYKYYRDKHLKYTPCVDKGDRKFPCSLCKRSFEKRDRLRIHILHVHEKHRPHKCSTCGKCFSQSSSLNKHMRVHSGDRPYQCVYCTKRFTASSILRTHIRQHSGEKPFKCKYCGKSFASHAAHDSHVRRSHKEDDGCSCSICGKIFSDQETFYSHMKFHEDY

SEQ ID NO: 15528 - protein, 1507 aa, Homo sapiens
MPRRRPPASGAAQFPERIATRSPDPIPLCTFQRQPRAAPVQPPCRLFFVTFAGCGHRWRSESKPGWISRSRSGIALRAARPPGSSPPRPAAPRPPPPGGVVAEAPGDVVIPRPRVQPMRVARGGPWTPNPAFREAESWSQIGNQRVSEQLLETSLGNEVSDTEPLSPASAGLRRNPALPPGPFAQNFSWGNQENLPPALGKIANGGGTGAGKAECGYETESHLLEPHEIPLNVNTHKFSDCEFPYEFCTVCFSPFKLLGMSGVEGVWNQHSRSASMHTFLNHSATGIREAGCRKDMPVSEMAEDGSEEIMFIWCEDCSQYHDSECPELGPVVMVKDSFVLSRARSWPASGHVHTQAGQGMRGYEDRDRADPQQLPEAVPAGLVRRLSGQQLPCRSTLTWGRLCHLVAQGRSSLPPNLEIRRLEDGAEGVFAITQLVKRTQFGPFESRRVAKWEKESAFPLKVFQKDGHPVCFDTSNEDDCNWMMLVRPAAEAEHQNLTAYQHGSDVYFTTSRDIPPGTELRVWYAAFYAKKMDKPMLKQAGSGVHAAGTPENSAPVESEPSQWACKVCSATFLELQLLNEHLLGHLEQAKSLPPGSQSEAAAPEKEQDTPRGEPPAVPESENVATKEQKKKPRRGRKPKVSKAEQPLVIVEDKEPTEQVAEIITEVPPDEPVSATPDERIMELVLGKLATTTTDTSSVPKFTHHQNNTITLKRSLILSSRHGIRRKLIKQLGEHKRVYQCNICSKIFQNSSNLSRHVRSHGDKLFKCEECAKLFSRKESLKQHVSYKHSRNEVDGEYRYRCGTCEKTFRIESALEFHNCRTDDKTFQCEMCFRFFSTNSNLSKHKKKHGDKKFACEVCSKMFYRKDVMLDHQRRHLEGVRRVKREDLEAGGENLVRYKKEPSGCPVCGKVFSCRSNMNKHLLTHGDKKYTCEICGRKFFRVDVLRDHIHVHFKDIALMDDHQREEFIGKIGISSEENDDNSDESADSEPHKYSCKRCQLTFGRGKEYLKHIMEVHKEKGYGCSICNRRFALKATYHAHMVIHRENLPDPNVQKYIHPCEICGRIFNSIGNLERHKLIHTGVKSHACEQCGKSFARKDMLKEHMRVHDNVREYLCAECGKGMKTKHALRHHMKLHKGIKEYECKECHRRFAQKVNMLKHCKRHTGIKDFMCELCGKTFSERNTMETHKLIHTVGKQWTCSVCDKKYVTEYMLQKHVQLTHDKVEAQSCQLCGTKVSTRASMSRHMRRKHPEVLAVRIDDLDHLPETTTIDASSIGIVQPELTLEQEDLAEGKHGKAAKRSHKRKQKPEEEAGAPVPEDATFSEYSEKETEFTGSVGDETNSAVQSIQQVVVTLGDPNVTTPSSSVGLTNITVTPITTAAATQFTNLQPVAVGHLTTPERQLQLDNSILTVTFDTVSGSAMLHNRQNDVQIHPQPEASNPQSVAHFINLTTLVNSITPLGSQLSDQHPLTWRAVPQTDVLPPSQPQAPPQQAAQPQVQAEQQQQQMYSY

SEQ ID NO: 15529 - protein, 1276 aa, Homo sapiens
MRSKARARKLAKSDGDVVNNMYEPNRDLLASHSAEDEAEDSAMSPIPVGPPSPFPTSEDFTPKEGSPYEAPVYIPEDIPIPADFELRESSIPGAGLGVWAKRKMEAGERLGPCVVVPRAAAKETDFGWEQILTDVEVSPQEGCITKISEDLGSEKFCVDANQAGAGSWLKYIRVACSCDDQNLTMCQISEQIYYKVIKDIEPGEELLVHVKEGVYPLGTVPPGLDEEPTFRCDECDELFQSKLDLRRHKKYTCGSVGAALYEGLAEELKPEGLGGGSGQAHECKDCERMFPNKYSLEQHMVIHTEEREYKCDQCPKAFNWKSNLIRHQMSHDSGKRFECENCVKVFTDPSNLQRHIRSQHVGARAHACPDCGKTFATSSGLKQHKHIHSTVKPFICEVCHKSYTQFSNLCRHKRMHADCRTQIKCKDCGQMFSTTSSLNKHRRFCEGKNHYTPGGIFAPGLPLTPSPMMDKAKPSPSLNHASLGFNEYFPSRPHPGSLPFSTAPPTFPALTPGFPGIFPPSLYPRPPLLPPTSLLKSPLNHTQDAKLPSPLGNPALPLVSAVSNSSQGTTAAAGPEEKFESRLEDSCVEKLKTRSSDMSDGSDFEDVNTTTGTDLDTTTGTGSDLDSDVDSDPDKDKGKGKSAEGQPKFGGGLAPPGAPNSVAEVPVFYSQHSFFPPPDEQLLTATGAAGDSIKAIASIAEKYFGPGFMGMQEKKLGSLPYHSAFPFQFLPNFPHSLYPFTDRALAHNLLVKAEPKSPRDALKVGGPSAECPFDLTTKPKDVKPILPMPKGPSAPASGEEQPLDLSIGSRARASQNGGGREPRKNHVYGERKLGAGEGLPQVCPARMPQQPPLHYAKPSPFFMDPIYSRVEKRKVTDPVGALKEKYLRPSPLLFHPQMSAIETMTEKLESFAAMKADSGSSLQPLPHHPFNFRSPPPTLSDPILRKGKERYTCRYCGKIFPRSANLTRHLRTHTGEQPYRCKYCDRSFSISSNLQRHVRNIHNKEKPFKCHLCNRCFGQQTNLDRHLKKHEHENAPVSQHPGVLTNHLGTSASSPTSESDNHALLDEKEDSYFSEIRNFIANSEMNQASTRTEKRADMQIVDGSAQCPGLASEKQEDVEEEDDDDLEEDDEDSLAGKSQDDTVSPAPEPQAAYEDEEDEEPAASLAVGFDHTRRCAEDHEGGLLALEPMPTFGKGLDLRRAAEEAFEVKDVLNSTLDSEALKHTLCRQAKNQAYAMMLSLSEDTPLHTPSQGSLDAWLKVTGATSESGAFHPINHL

SEQ ID NO: 15530 - protein, 1718 aa, Homo sapiens
MNQNTTEPVAATETLAEVPEHVLRGLPEEVRLFPSAVDKTRIGVWATKPILKGKKFGPFVGDKKKRSQVKNNVYMWEVYYPNLGWMCIDATDPEKGNWLRYVNWACSGEEQNLFPLEINRAIYYKTLKPIAPGEELLVWYNGEDNPEIAAAIEEERASARSKRSSPKSRKGKKKSQENKNKGNKIQDIQLKTSEPDFTSANMRDSAEGPKEDEEKPSASALEQPATLQEVASQEVPPELATPAPAWEPQPEPDERLEAAACEVNDLGEEEEEEEEEDEEEEEDDDDDELEDEGEEEASMPNENSVKEPEIRCDEKPEDLLEEPKTTSEETLEDCSEVTPAMQIPRTKEEANGDVFETFMFPCQHCERKFTTKQGLERHMHIHISTVNHAFKCKYCGKAFGTQINRRRHERRHEAGLKRKPSQTLQPSEDLADGKASGENVASKDDSSPPSLGPDCLIMNSEKASQDTINSSVVEENGEVKELHPCKYCKKVFGTHTNMRRHQRRVHERHLIPKGVRRKGGLEEPQPPAEQAQATQNVYVPSTEPEEEGEADDVYIMDISSNISENLNYYIDGKIQTNNNTSNCDVIEMESASADLYGINCLLTPVTVEITQNIKTTQVPVTEDLPKEPLGSTNSEAKKRRTASPPALPKIKAETDSDPMVPSCSLSLPLSISTTEAVSFHKEKSVYLSSKLKQLLQTQDKLTPAGISATEIAKLGPVCVSAPASMLPVTSSRFKRRTSSPPSSPQHSPALRDFGKPSDGKAAWTDAGLTSKKSKLESHSDSPAWSLSGRDERETVSPPCFDEYKMSKEWTASSAFSSVCNQQPLDLSSGVKQKAEGTGKTPVQWESVLDLSVHKKHCSDSEGKEFKESHSVQPTCSAVKKRKPTTCMLQKVLLNEYNGIDLPVENPADGTRSPSPCKSLEAQPDPDLGPGSGFPAPTVESTPDVCPSSPALQTPSLSSGQLPPLLIPTDPSSPPPCPPVLTVATPPPPLLPTVPLPAPSSSASPHPCPSPLSNATAQSPLPILSPTVSPSPSPIPPVEPLMSAASPGPPTLSSSSSSSSSSSSFSSSSSSSSPSPPPLSAISSVVSSGDNLEASLPMISFKQEELENEGLKPREEPQSAAEQDVVVQETFNKNFVCNVCESPFLSIKDLTKHLSIHAEEWPFKCEFCVQLFKDKTDLSEHRFLLHGVGNIFVCSVCKKEFAFLCNLQQHQRDLHPDKVCTHHEFESGTLRPQNFTDPSKAHVEHMQSLPEDPLETSKEEEELNDSSEELYTTIKIMASGIKTKDPDVRLGLNQHYPSFKPPPFQYHHRNPMGIGVTATNFTTHNIPQTFTTAIRCTKCGKGVDNMPELHKHILACASASDKKRYTPKKNPVPLKQTVQPKNGVVVLDNSGKNAFRRMGQPKRLNFSVELSKMSSNKLKLNALKKKNQLVQKAILQKNKSAKQKADLKNACESSSHICPYCNREFTYIGSLNKHAAFSCPKKPLSPPKKKVSHSSKKGGHSSPASSDKNSNSNHRRRTADAEIKMQSMQTPLGKTRARSSGPTQVPLPSSSFRSKQNVKFAASVKSKKPSSSSLRNSSPIRMAKITHVEGKKPKAVAKNHSAQLSSKTSRSLHVRVQKSKAVLQSKSTLASKKRTDRFNIKSRERSGGPVTRSLQLAAAADLSENKREDGSAKQELKDFSYSLRLASRCSPPAAPYITRQYRKVKAPAAAQFQGPFFKE

SEQ ID NO: 15531 - protein, 801 aa, Homo sapiens
MHHRMNEMNLSPVGMEQLTSSSVSNALPVSGSHLGLAASPTHSAIPAPGLPVAIPNLGPSLSSLPSALSLMLPMGIGDRGVMCGLPERNYTLPPPPYPHLESSYFRTILPGILSYLADRPPPQYIHPNSINVDGNTALSITNNPSALDPYQSNGNVGLEPGIVSIDSRSVNTHGAQSLHPSDGHEVALDTAITMENVSRVTSPISTDGMAEELTMDGVAGEHSQIPNGSRSHEPLSVDSVSNNLAADAVGHGGVIPMHGNGLELPVVMETDHIASRVNGMSDSALSDSIHTVAMSTNSVSVALSTSHNLASLESVSLHEVGLSLEPVAVSSITQEVAMGTGHVDVSSDSLSFVSPSLQMEDSNSNKENMATLFTIWCTLCDRAYPSDCPEHGPVTFVPDTPIESRARLSLPKQLVLRQSIVGAEVGVWTGETIPVRTCFGPLIGQQSHSMEVAEWTDKAVNHIWKIYHNGVLEFCIITTDENECNWMMFVRKARNREEQNLVAYPHDGKIFFCTSQDIPPENELLFYYSRDYAQQIGVPEHPDVHLCNCGKECNSYTEFKAHLTSHIHNHLPTQGHSGSHGPSHSKERKWKCSMCPQAFISPSKLHVHFMGHMGMKPHKCDFCSKAFSDPSNLRTHLKIHTGQKNYRCTLCDKSFTQKAHLESHMVIHTGEKNLKCDYCDKLFMRRQDLKQHVLIHTQERQIKCPKCDKLFLRTNHLKKHLNSHEGKRDYVCEKCTKAYLTKYHLTRHLKTCKGPTSSSSAPEEEEEDDSEEEDLADSVGTEDCRINSAVYSADESLSAHK

SEQ ID NO: 15532 - protein, 630 aa, Homo sapiens
MLGMYVPDRFSLKSSRVQDGMGLYTARRVRKGEKFGPFAGEKRMPEDLDENMDYRLMWEVRGSKGEVLYILDATNPRHSNWLRFVHEAPSQEQKNLAAIQEGENIFYLAVEDIETDTELLIGYLDSDMEAEEEEQQIMTVIKEGEVENSRRQSTAGRKDRLGCKEDYACPQCESSFTSEDILAEHLQTLHQKPTEEKEFKCKNCGKKFPVKQALQRHVLQCTAKSSLKESSRSFQCSVCNSSFSSASSFEQHQETCRGDARFVCKADSCGKRLKSKDALKRHQENVHTGDPKKKLICSVCNKKCSSASSLQEHRKIHEIFDCQECMKKFISANQLKRHMITHSEKRPYNCEICNKSFKRLDQVGAHKVIHSEDKPYKCKLCGKGFAHRNVYKNHKKTHSEERPFQCEECKALFRTPFSLQRHLLIHNSERTFKCHHCDATFKRKDTLNVHVQVVHERHKKYRCELCNKAFVTPSVLRSHKKTHTGEKEKICPYCGQKFASSGTLRVHIRSHTGERPYQCPYCEKGFSKNDGLKMHIRTHTREKPYKCSECSKAFSQKRGLDEHKRTHTGEKPFQCDVCDLAFSLKKMLIRHKMTHNPNRPLAECQFCHKKFTRNDYLKVHMDNIHGVADS

SEQ ID NO: 15533 - protein, 595 aa, Homo sapiens
MLKPGDPGGSAFLKVDPAYLQHWQQLFPHGGAGPLKGSGAAGLLSAPQPLQPPPPPPPPERAEPPPDSLRPRPASLSSASSTPASSSTSASSASSCAAAAAAAALAGLSALPVSQLPVFAPLAAAAVAAEPLPPKELCLGATSGPGPVKCGGGGGGGGEGRGAPRFRCSAEELDYYLYGQQRMEIIPLNQHTSDPNNRCDMCADNRNGECPMHGPLHSLRRLVGTSSAAAAAPPPELPEWLRDLPREVCLCTSTVPGLAYGICAAQRIQQGTWIGPFQGVLLPPEKVQAGAVRNTQHLWEIYDQDGTLQHFIDGGEPSKSSWMRYIRCARHCGEQNLTVVQYRSNIFYRACIDIPRGTELLVWYNDSYTSFFGIPLQCIAQDENLNVPSTVMEAMCRQDALQPFNKSSKLAPTTQQRSVVFPQTPCSRNFSLLDKSGPIESGFNQINVKNQRVLASPTSTSQLHSEFSDWHLWKCGQCFKTFTQRILLQMHVCTQNPDRPYQCGHCSQSFSQPSELRNHVVTHSSDRPFKCGYCGRAFAGATTLNNHIRTHTGEKPFKCERCERSFTQATQLSRHQRMPNECKPITESPESIEVD

SEQ ID NO: 15534 - protein, 492 aa, Homo sapiens
MSPERSQEESPEGDTERTERKPMVKDAFKDISIYFTKEEWAEMGDWEKTRYRNVKMNYNALITVGLRATRPAFMCHRRQAIKLQVDDTEDSDEEWTPRQQVKPPWMAFRGEQSKHQKGMPKASFNNESSLRELSGTPNLLNTSDSEQAQKPVSPPGEASTSGQHSRLKLELRRKETEGKMYSLRERKGHAYKEISEPQDDDYLYCEMCQNFFIDSCAAHGPPTFVKDSAVDKGHPNRSALSLPPGLRIGPSGIPQAGLGVWNEASDLPLGLHFGPYEGRITEDEEAANSGYSWLITKGRNCYEYVDGKDKSSANWMRYVNCARDDEEQNLVAFQYHRQIFYRTCRVIRPGCELLVWSGDEYGQELGIRSSIEPAESLGQAVNCWSGMGMSMARNWASSGAASGRKSSWQGENQSQRSIHVPHAVWPFQVKNFSVNMWNAITPLRTSQDHLQENFSNQRIPAQGIRIRSGNILIHAAVMTKPKVKRSKKGPNS

SEQ ID NO: 15535 - protein, 689 aa, Homo sapiens
MEDTGIQRGIWDGDAKAVQQCLTDIFTSVYTTCDIPENAIFGPCVLSHTSLYDSIAFIALKSTDKRTVPYIFRVDTSAANGSSEGLMWLRLVQSARDKEEQNLEAYIKNGQLFYRSLRRIAKDEELLVWYGKELTELLLLCPSRSHNKMNGSSPYTCLECSQRFQFEFPYVAHLRFRCPKRLHSADISPQDEQGGGVGTKDHGGGGGGGKDQQQQQQEAPLGPGPKFCKAGPLHHYPSPSPESSNPSAAAGGSSAKPSTDFHNLARELENSRGGSSCSPAQSLSSGSGSGGGGGHQEAELSPDGIATGGGKGKRKFPEEAAEGGGGAGLVGGRGRFVERPLPASKEDLVCTPQQYRASGSYFGLEENGRLFAPPSPETGEAKRSAFVEVKKAARAASLQEEGTADGAGVASEDQDAGGGGGSSTPAAASPVGAEKLLAPRPGGPLPSRLEGGSPARGSAFTSVPQLGSAGSTSGGGGTGAGAAGGAGGGQGAASDERKSAFSQPARSFSQLSPLVLGQKLGALEPCHPADGVGPTRLYPAAADPLAVKLQGAADLNGGCGSLPSGGGGLPKQSPFLYATAFWPKSSAAAAAAAAAAAAGPLQLQLPSALTLLPPSFTSLCLPAQNWCAKCNASFRMTSDLVYHMRSHHKKEYAMEPLVKRRREEKLKCPICNESFRERHHLSRHMTSHN

SEQ ID NO: 15536 - protein, 894 aa, Homo sapiens
MSPEKSQEESPEEDTERTERKPMVKDAFKDISIYFTKEEWAEMGDWEKTRYRNVKRNYNALITIGLRATRPAFMCHRRQAIKLQVDDTEDSDEEWTPRQQVKPPWMALRVEQRKHQKGMPKASFSNESSLKELSRTANLLNASGSEQAQKPVSPSGEASTSGQHSRLKLELRKKETERKMYSLRERKGHAYKEVSEPQDDDYLYCEMCQNFFIDSCAAHGPPTFVKDSAVDKGHPNRSALSLPPGLRIGPSGIPQAGLGVWNEASDLPLGLHFGPYEGRITEDEEAANNGYSWLITKGRNCYEYVDGKDKSWANWMRYVNCARDDEEQNLVAFQYHRQIFYRTCRVIRPGCELLVWYGDEYGQELGIKWGSKWKKELMAGREPKPEIHPCPSCCLAFSSQKFLSQHVERNHSSQNFPGPSARKLLQPENPCPGDQNQEQQYPDPHSRNDKTKGQEIKERSKLLNKRTWQREISRAFSSPPKGQMGSCRVGKRIMEEESRTGQKVNPGNTGKLFVGVGISRIAKVKYGECGQGFSVKSDVITHQRTHTGEKLYVCRECGRGFSWKSHLLIHQRIHTGEKPYVCRECGRGFSWQSVLLTHQRTHTGEKPYVCRECGRGFSRQSVLLTHQRRHTGEKPYVCRECGRGFSRQSVLLTHQRRHTGEKPYVCRECGRGFSWQSVLLTHQRTHTGEKPYVCRECGRGFSWQSVLLTHQRTHTGEKPYVCRECGRGFSNKSHLLRHQRTHTGEKPYVCRECGRGFRDKSHLLRHQRTHTGEKPYVCRECGRGFRDKSNLLSHQRTHTGEKPYVCRECGRGFSNKSHLLRHQRTHTGEKPYVCRECGRGFRNKSHLLRHQRTHTGEKPYVCRECGRGFSDRSSLCYHQRTHTGEKPYVCREDE

SEQ ID NO: 15537 - protein, 417 aa, Homo sapiens
MGRRRAPELYRAPFPLYALQVDPSTGLLIAAGGGGAAKTGIKNGVHFLQLELINGRLSASLLHSHDTETRATMNLALAGDILAAGQDAHCQLLRFQAHQQQGNKAEKAGSKEQGPRQRKGAAPAEKKCGAETQHEGLELRVENLQAVQTDFSSDPLQKVVCFNHDNTLLATGGTDGYVRVWKVPSLEKVLEFKAHEGEIEDLALGPDGKLVTVGRDLKASVWQKDQLVTQLHWQENGPTFSSTPYRYQACRFGQVPDQPAGLRLFTVQIPHKRLRQPPPCYLTAWDGSNFLPLRTKSCGHEVVSCLDVSESGTFLGLGTVTGSVAIYIAFSLQCLYYVREAHGIVVTDVAFLPEKGRGPELLGSHETALFSVAVDSRCQLHLLPSRRSVPVWLLLLLCVGLIIVTILLLQSAFPGFL

SEQ ID NO: 15538 - protein, 226 aa, Homo sapiens
MEAERRRQAEKPKKGRVGSNLLPERHPATGTPTTTVDSSAPPCRRLPGAGGGRSRFSPQGGQRGRPHSRRRHRTTFSPVQLEQLESAFGRNQYPDIWARESLARDTGLSEARIQVWFQNRRAKQRKQERSLLQPLAHLSPAAFSSFLPESTACPYSYAAPPPPVTCFPHPYSHALPSQPSTGGAFALSHQSEDWYPTLHPAPAGHLPCPPPPPMLPLSLEPSKSWN

SEQ ID NO: 15539 - protein, 737 aa, Homo sapiens
MPDHDSTALLSRQTKRRRVDIGVKRTVGTASAFFAKARATFFSAMNPQGSEQDVEYSVVQHADGEKSNVLRKLLKRANSYEDAMMPFPGATIISQLLKNNMNKNGGTEPSFQASGLSSTGSEVHQEDICSNSSRDSPPECLSPFGRPTMSQFDMDRLCDEHLRAKRARVENIIRGMSHSPSVALRGNENEREMAPQSVSPRESYRENKRKQKLPQQQQQSFQQLVSARKEQKREERRQLKQQLEDMQKQLRQLQEKFYQIYDSTDSENDEDGNLSEDSMRSEILDARAQDSVGRSDNEMCELDPGQFIDRARALIREQEMAENKPKREGNNKERDHGPNSLQPEGKHLAETLKQELNTAMSQVVDTVVKVFSAKPSRQVPQVFPPLQIPQARFAVNGENHNFHTANQRLQCFGDVIIPNPLDTFGNVQMASSTDQTEALPLVVRKNSSDQSASGPAAGGHHQPLHQSPLSATTGFTTSTFRHPFPLPLMAYPFQSPLGAPSGSFSGKDRASPESLDLTRDTTSLRTKMSSHHLSHHPCSPAHPPSTAEGLSLSLIKSECGDLQDMSEISPYSGSAMQEGLSPNHLKKAKLMFFYTRYPSSNMLKTYFSDVKFNRCITSQLIKWFSNFREFYYIQMEKYARQAINDGVTSTEELSITRDCELYRALNMHYNKANDFEVPERFLEVAQITLREFFNAIIAGKDVDPSWKKAIYKVICKLDSEVPEIFKSPNCLQELLHE

SEQ ID NO: 15540 - protein, 592 aa, Homo sapiens
MDPNSILLSPQPQICSHLAEACTEGERSSSPPELDRDSPFPWSQVPSSSPTDPEWFGDEHIQAKRARVETIVRGMCLSPNPLVPGNAQAGVSPRCPKKARERKRKQNLPTPQGLLMPAPAWDQGNRKGGPRVREQLHLLKQQLRHLQEHILQAAKPRDTAQGPGGCGTGKGPLSAKQGNGCGPRPWVVDGDHQQGTSKDLSGAEKHQESEKPSFLPSGAPASLEILRKELTRAVSQAVDSVLQKVLLDPPGHLTQLGRSFQGQVAEGRSEPSPPVGGACKDPLALAALPRRVQLQAGVPVGNLSLAKRLDSPRYPIPPRMTPKPCQDPPANFPLTAPSHIQENQILSQLLGHRYNNGHWSSSPPQDSSSQRHPSSEPALRPWRTTKPQPLVLSQQQCPLPFTSAHLESLPLLPSVKMEQRGLHAVMEALPFSLLHIQEGLNPGHLKKAKLMFFFTRYPSSNLLKVYFPDVQFNRCITSQMIKWFSNFREFYYIQMEKSARQAISDGVTNPKMLVVLRNSELFQALNMHYNKGNDFEVPDCFLEIASLTLQEFFRAVSAGRDSDPSWKKPIYKIISKLDSDIPEIFKSSSYPQ

SEQ ID NO: 15541 - protein, 245 aa, Homo sapiens
MTSSYGHVLERQPALGGRLDSPGNLDTLQAKKNFSVSHLLDLEEAGDMVAAQADENVGEAGRSLLESPGLTSGSDTPQQDNDQLNSEEKKKRKQRRNRTTFNSSQLQALERVFERTHYPDAFVREDLARRVNLTEARVQVWFQNRRAKFRRNERAMLANKNASLLKSYSGDVTAVEQPIVPRPAPRPTDYLSWGTASPYSAMATYSATCANNSPAQGINMANSIANLRLKAKEYSLQRNQVPTVN

SEQ ID NO: 15542 - protein, 253 aa, Homo sapiens
MDSAAAAFALDKPALGPGPPPPPPALGPGDCAQARKNFSVSHLLDLEEVAAAGRLAARPGARAEAREGAAREPSGGSSGSEAAPQDGECPSPGRGSAAKRKKKQRRNRTTFNSSQLQALERVFERTHYPDAFVREELARRVNLSEARVQVWFQNRRAKFRRNERAMLASRSASLLKSYSQEAAIEQPVAPRPTALSPDYLSWTASSPYSTVPPYSPGSSGPATPGVNMANSIASLRLKAKEFSLHHSQVPTVN

SEQ ID NO: 15543 - protein, 523 aa, Homo sapiens
MMLRGNLKQVRIEKNPARLRALESAVGESEPAAAAAMALALAGEPAPPAPAPPEDHPDEEMGFTIDIKSFLKPGEKTYTQRCRLFVGNLPTDITEEDFKRLFERYGEPSEVFINRDRGFGFIRLESRTLAEIAKAELDGTILKSRPLRIRFATHGAALTVKNLSPVVSNELLEQAFSQFGPVEKAVVVVDDRGRATGKGFVEFAAKPPARKALERCGDGAFLLTTTPRPVIVEPMEQFDDEDGLPEKLMQKTQQYHKEREQPPRFAQPGTFEFEYASRWKALDEMEKQQREQVDRNIREAKEKLEAEMEAARHEHQLMLMRQDLMRRQEELRRLEELRNQELQKRKQIQLRHEEEHRRREEEMIRHREQEELRRQQEGFKPNYMENREQEMRMGDMGPRGAINMGDAFSPAPAGNQGPPPMMGMNMNNRATIPGPPMGPGPAMGPEGAANMGTPMMPDNGAVHNDRFPQGPPSQMGSPMGSRTGSETPQAPMSGVGPVSGGPGGFGRGSQGGNFEGPNKRRRY

SEQ ID NO: 15544 - protein, 328 aa, Homo sapiens
MDAVLLEHFPGGLDAFPSSYFDEDDFFTDQSSRDPLEDGDELLADEQAEVEFLSHQLHEYCYRDGACLLLQPAPPAAPLALAPPSSGGLGEPDDGGGGGYCCETGAPPGGFPYSPGSPPSCLAYPCAGAAVLSPGARLRGLSGAAAAAARRRRRVRSEAELQQLRQAANVRERRRMQSINDAFEGLRSHIPTLPYEKRLSKVDTLRLAIGYINFLSELVQADLPLRGGGAGGCGGPGGGGRLGGDSPGSQAQKVIICHRGTRSPSPSDPDYGLPPLAGHSLSWTDEKQLKEQNIIRTAKVWTPEDPRKLNSKSSFNNIENEPPFEFVS

SEQ ID NO: 15545 - protein, 322 aa, Homo sapiens
MADRDSGSEQGGAALGSGGSLGHPGSGSGSGGGGGGGGGGGGSGGGGGGAPGGLQHETQELASKRVDIQNKRFYLDVKQNAKGRFLKIAEVGAGGNKSRLTLSMSVAVEFRDYLGDFIEHYAQLGPSQPPDLAQAQDEPRRALKSEFLVRENRKYYMDLKENQRGRFLRIRQTVNRGPGLGSTQGQTIALPAQGLIEFRDALAKLIDDYGVEEEPAELPEGTSLTVDNKRFFFDVGSNKYGVFMRVSEVKPTYRNSITVPYKVWAKFGHTFCKYSEEMKKIQEKQREKRAACEQLHQQQQQQQEETAAATLLLQGEEEGEED

SEQ ID NO: 15546 - protein, 312 aa, Homo sapiens
MADGDSGSERGGGGGPCGFQPASRGGGEQETQELASKRLDIQNKRFYLDVKQNAKGRFLKIAEVGAGGSKSRLTLSMAVAAEFRDSLGDFIEHYAQLGPSSPEQLAAGAEEGGGPRRALKSEFLVRENRKYYLDLKENQRGRFLRIRQTVNRGGGGFGAGPGPGGLQSGQTIALPAQGLIEFRDALAKLIDDYGGEDDELAGGPGGGAGGPGGGLYGELPEGTSITVDSKRFFFDVGCNKYGVFLRVSEVKPSYRNAITVPFKAWGKFGGAFCRYADEMKEIQERQRDKLYERRGGGSGGGEESEGEEVDED

SEQ ID NO: 15547 - protein, 347 aa, Homo sapiens
MERARRRGGGGGRGRGGKNVGGSGLSKSRLYPQAQHSHYPHYAASATPNQAGGAAEIQELASKRVDIQKKRFYLDVKQSSRGRFLKIAEVWIGRGRQDNIRKSKLTLSLSVAAELKDCLGDFIEHYAHLGLKGHRQEHGHSKEQGSRRRQKHSAPSPPVSVGSEEHPHSVLKTDYIERDNRKYYLDLKENQRGRFLRIRQTMMRGTGMIGYFGHSLGQEQTIVLPAQGMIEFRDALVQLIEDYGEGDIEERRGGDDDPLELPEGTSFRVDNKRFYFDVGSNKYGIFLKVSEVRPPYRNTITVPFKAWTRFGENFIKYEEEMRKICNSHKEKRMDGRKASGEEQECLD

SEQ ID NO: 15548 - protein, 462 aa, Homo sapiens
MASNSSSCPTPGGGHLNGYPVPPYAFFFPPMLGGLSPPGALTTLQHQLPVSGYSTPSPATIETQSSSSEEIVPSPPSPPPLPRIYKPCFVCQDKSSGYHYGVSACEGCKGFFRRSIQKNMVYTCHRDKNCIINKVTRNRCQYCRLQKCFEVGMSKESVRNDRNKKKKEVPKPECSESYTLTPEVGELIEKVRKAHQETFPALCQLGKYTTNNSSEQRVSLDIDLWDKFSELSTKCIIKTVEFAKQLPGFTTLTIADQITLLKAACLDILILRICTRYTPEQDTMTFSDGLTLNRTQMHNAGFGPLTDLVFAFANQLLPLEMDDAETGLLSAICLICGDRQDLEQPDRVDMLQEPLLEALKVYVRKRRPSRPHMFPKMLMKITDLRSISAKGAERVITLKMEIPGSMPPLIQEMLENSEGLDTLSGQPGGGGRDGGGLAPPPGSCSPSLSPSSNRSSPATHSP

SEQ ID NO: 15549 - protein, 455 aa, Homo sapiens
MTTSGHACPVPAVNGHMTHYPATPYPLLFPPVIGGLSLPPLHGLHGHPPPSGCSTPSPATIETQSTSSEELVPSPPSPLPPPRVYKPCFVCQDKSSGYHYGVSACEGCKGFFRRSIQKNMIYTCHRDKNCVINKVTRNRCQYCRLQKCFEVGMSKESVRNDRNKKKKETSKQECTESYEMTAELDDLTEKIRKAHQETFPSLCQLGKYTTNSSADHRVRLDLGLWDKFSELATKCIIKIVEFAKRLPGFTGLTIADQITLLKAACLDILILRICTRYTPEQDTMTFSDGLTLNRTQMHNAGFGPLTDLVFTFANQLLPLEMDDTETGLLSAICLICGDRQDLEEPTKVDKLQEPLLEALKIYIRKRRPSKPHMFPKILMKITDLRSISAKGAERVITLKMEIPGSMPPLIQEMLENSEGHEPLTPSSSGNTAEHSPSISPSSVENSGVSQSPLVQ

SEQ ID NO: 15550 - protein, 454 aa, Homo sapiens
MATNKERLFAAGALGPGSGYPGAGFPFAFPGALRGSPPFEMLSPSFRGLGQPDLPKEMASLSVETQSTSSEEMVPSSPSPPPPPRVYKPCFVCNDKSSGYHYGVSSCEGCKGFFRRSIQKNMVYTCHRDKNCIINKVTRNRCQYCRLQKCFEVGMSKEAVRNDRNKKKKEVKEEGSPDSYELSPQLEELITKVSKAHQETFPSLCQLGKYTTNSSADHRVQLDLGLWDKFSELATKCIIKIVEFAKRLPGFTGLSIADQITLLKAACLDILMLRICTRYTPEQDTMTFSDGLTLNRTQMHNAGFGPLTDLVFAFAGQLLPLEMDDTETGLLSAICLICGDRMDLEEPEKVDKLQEPLLEALRLYARRRRPSQPYMFPRMLMKITDLRGISTKGAERAITLKMEIPGPMPPLIREMLENPEMFEDDSSQPGPHPNASSEDEVPGGQGKGGLKSPA

SEQ ID NO: 15551 - protein, 313 aa, Homo sapiens
MSQSRHRAEAPPLEREDSGTFSLGKMITAKPGKTPIQVLHEYGMKTKNIPVYECERSDVQIHVPTFTFRVTVGDITCTGEGTSKKLAKHRAAEAAINILKANASICFAVPDPLMPDPSKQPKNQLNPIGSLQELAIHHGWRLPEYTLSQEGGPAHKREYTTICRLESFMETGKGASKKQAKRNAAEKFLAKFSNISPENHISLTNVVGHSLGCTWHSLRNSPGEKINLLKRSLLSIPNTDYIQLLSEIAKEQGFNITYLDIDELSANGQYQCLAELSTSPITVCHGSGISCGNAQSDAAHNALQYLKIIAERK

SEQ ID NO: 15552 - protein, 346 aa, Homo sapiens
MHLPGCAPAMADGSFSLAGHLLRSPGGSTSRLHSIEAILGFTKDDGILGTFPAERGARGAKERDRRLGARPACPKAPEEGSEPSPPPAPAPAPEYEAPRPYCPKEPGEARPSPGLPVGPATGEAKLSEEEQPKKKHRRNRTTFTTYQLHELERAFEKSHYPDVYSREELAGKVNLPEVRVQVWFQNRRAKWRRQEKLEVSSMKLQDSPLLSFSRSPPSATLSPLGAGPGSGGGPAGGALPLESWLGPPLPGGGATALQSLPGFGPPAQSLPASYTPPPPPPPFLNSPPLGPGLQPLAPPPPSYPCGPGFGDKFPLDEADPRNSSIAALRLKAKEHIQAIGKPWQAL

SEQ ID NO: 15553 - protein, 184 aa, Homo sapiens
MFLSPGEGPATEGGGLGPGEEAPKKKHRRNRTTFTTYQLHQLERAFEASHYPDVYSREELAAKVHLPEVRVQVWFQNRRAKWRRQERLESGSGAVAAPRLPEAPALPFARPPAMSLPLEPWLGPGPPAVPGLPRLLGPGPGLQASFGPHAFAPTFADGFALEEASLRLLAKEHAQALDRAWPPA

SEQ ID NO: 15554 - protein, 714 aa, Homo sapiens
MNTLQGPVSFKDVAVDFTQEEWQQLDPDEKITYRDVMLENYSHLVSVGYDTTKPNVIIKLEQGEEPWIMGGEFPCQHSPEAWRVDDLIERIQENEDKHSRQAACINSKTLTEEKENTFSQIYMETSLVPSSIIAHNCVSCGKNLESISQLISSDGSYARTKPDECNECGKTYHGEKMCEFNQNGDTYSHNEENILQKISILEKPFEYNECMEALDNEAVFIAHKRAYIGEKPYEWNDSGPDFIQMSNFNAYQRSQMEMKPFECSECGKSFCKKSKFIIHQRAHTGEKPYECNVCGKSFSQKGTLTVHRRSHLEEKPYKCNECGKTFCQKLHLTQHLRTHSGEKPYECSECGKTFCQKTHLTLHQRNHSGERPYPCNECGKSFSRKSALSDHQRTHTGEKLYKCNECGKSYYRKSTLITHQRTHTGEKPYQCSECGKFFSRVSYLTIHYRSHLEEKPYECNECGKTFNLNSAFIRHRKVHTEEKSHECSECGKFSQLYLTDHHTAHLEEKPYECNECGKTFLVNSAFDGHQPLPKGEKSYECNVCGKLFNELSYYTEHYRSHSEEKPYGCSECGKTFSHNSSLFRHQRVHTGEKPYECYECGKFFSQKSYLTIHHRIHSGEKPYECSKCGKVFSRMSNLTVHYRSHSGEKPYECNECGKVFSQKSYLTVHYRTHSGEKPYECNECGKKFHHRSAFNSHQRIHRRGNMNVLDVENL

SEQ ID NO: 15555 - protein, 420 aa, Homo sapiens
MATSLGSNTYNRQNWEDADFPILCQTCLGENPYIRMTKEKYGKECKICARPFTVFRWCPGVRMRFKKTEVCQTCSKLKNVCQTCLLDLEYGLPIQVRDAGLSFKDDMPKSDVNKEYYTQNMEREISNSDGTRPVGMLGKATSTSDMLLKLARTTPYYKRNRPHICSFWVKGECKRGEECPYRHEKPTDPDDPLADQNIKDRYYGINDPVADKLLKRASTMPRLDPPEDKTITTLYVGGLGDTITETDLRNHFYQFGEIRTITVVQRQQCAFIQFATRQAAEVAAEKSFNKLIVNGRRLNVKWGRSQAARGKEKEKDGTTDSGIKLEPVPGLPGALPPPPAAEEEASANYFNLPPSGPPAVVNIALPPPPGIAPPPPPGFGPHMFHPMGPPPPFMRAPGPIHYPSQDPQRMGAHAGKHSSP

SEQ ID NO: 15556 - protein, 500 aa, Homo sapiens
MDHTEGSPAEEPPAHAPSPGKFGERPPPKRLTREAMRNYLKERGDQTVLILHAKVAQKSYGNEKRFFCPPPCVYLMGSGWKKKKEQMERDGCSEQESQPCAFIGIGNSDQEMQQLNLEGKNYCTAKTLYISDSDKRKHFMLSVKMFYGNSDDIGVFLSKRIKVISKPSKKKQSLKNADLCIASGTKVALFNRLRSQTVSTRYLHVEGGNFHASSQQWGAFFIHLLDDDESEGEEFTVRDGYIHYGQTVKLVCSVTGMALPRLIIRKVDKQTALLDADDPVSQLHKCAFYLKDTERMYLCLSQERIIQFQATPCPKEPNKEMINDGASWTIISTDKAEYTFYEGMGPVLAPVTPVPVVESLQLNGGGDVAMLELTGQNFTPNLRVWFGDVEAETMYRCGESMLCVVPDISAFREGWRWVRQPVQVPVTLVRNDGIIYSTSLTFTYTPEPGPRPHCSAAGAILRANSSQVPPNESNTNSEGSYTNASTNSTSVTSSTATVVS

SEQ ID NO: 15557 - protein, 517 aa, Homo sapiens
MDPAGAADPSVPPNPLTHLSLQDRSEMQLQSEADRRSLPGTWTRSSPEHTTILRGGVRRCLQQQCEQTVRILHAKVAQKSYGNEKRFFCPPPCVYLSGPGWRVKPGQDQAHQAGETGPTVCGYMGLDSASGSATETQKLNFEQQPDSREFGCAKTLYISDADKRKHFRLVLRLVLRGGRELGTFHSRLIKVISKPSQKKQSLKNTDLCISSGSKVSLFNRLRSQTVSTRYLSVEDGAFVASARQWAAFTLHLADGHSAQGDFPPREGYVRYGSLVQLVCTVTGITLPPMIIRKVAKQCALLDVDEPISQLHKCAFQFPGSPPGGGGTYLCLATEKVVQFQASPCPKEANRALLNDSSCWTIIGTESVEFSFSTSLACTLEPVTPVPLISTLELSGGGDVATLELHGENFHAGLKVWFGDVEAETMYRSPRSLVCVVPDVAAFCSDWRWLRAPITIPMSLVRADGLFYPSAFSFTYTPEYSVRPGHPGVPEPATDADALLESIHQEFTRTNFHLFIQT

SEQ ID NO: 15558 - protein, 1133 aa, Homo sapiens
MPVQAPQWTDFLSCPICTQTFDETIRKPISLGCGHTVCKMCLNKLHRKACPFDQTTINTDIELLPVNSALLQLVGAQVPEQQPITLCSGVEDTKHYEEAKKCVEELALYLKPLSSARGVGLNSTTQSVLSRPMQRKLVTLVHCQLVEEEGRIRAMRAARSLGERTVTELILQHQNPQQLSSNLWAAVRARGCQFLGPAMQEEALKLVLLALEDGSALSRKVLVLFVVQRLEPRFPQASKTSIGHVVQLLYRASCFKVTKRDEDSSLMQLKEEFRTYEALRREHDSQIVQIAMEAGLRIAPDQWSSLLYGDQSHKSHMQSIIDKLQTPASFAQSVQELTIALQRTGDPANLNRLRPHLELLANIDPSPDAPPPTWEQLENGLVAVRTVVHGLVDYIQNHSKKGADQQQPPQHSKYKTYMCRDMKQRGGCPRGASCTFAHSQEELEKFRKMNKRLVPRRPLSASLGQLNEVGLPSAAILPDEGAVDLPSRKPPALPNGIVSTGNTVTQLIPRGTDPSYDSSLKPGKIDHLSSSAPGSPPDLLESVPKSISALPVNPHSIPPRGPADLPPMPVTKPLQMVPRGSQLYPAQQTDVYYQDPRGAAPPFEPAPYQQGMYYTPPPQCVSRFVRPPPSAPEPAPPYLDHYPPYLQERVVNSQYGTQPQQYPPIYPSHYDGRRVYPAPSYTREEIFRESPIPIEIPPAAVPSYVPESRERYQQIESYYPVAPHPTQIRPSYLREPPYSRLPPPPQPHPSLDELHRRRKEIMAQLEERKVISPPPFAPSPTLPPTFHPEEFLDEDLKVAGKYKGNDYSQYSPWSCDTIGSYIGTKDAKPKDVVAAGSVEMMNVESKGMRDQRLDLQRRAAETSDDDLIPFGDRPTVSRFGAISRTSKTIYQGAGPMQAMAPQGAPTKSINISDYSPYGTHGGWGASPYSPHQNIPSQGHFSERERISMSEVASHGKPLPSAEREQLRLELQQLNHQISQQTQLRGLEAVSNRLVLQREANTLAGQSQPPPPPPPKWPGMISSEQLSLELHQVEREIGKRTRELSMENQCSLDMKSKLNTSKQAENGQPEPQNKVPAEDLTLTFSDVPNGSALTQENISLLSNKTSSLNLSEDPEGGGDNNDSQRSGVTPSSAP

SEQ ID NO: 15559 - protein, 1191 aa, Homo sapiens
MPVQAAQWTEFLSCPICYNEFDENVHKPISLGCSHTVCKTCLNKLHRKACPFDQTAINTDIDVLPVNFALLQLVGAQVPDHQSIKLSNLGENKHYEVAKKCVEDLALYLKPLSGGKGVASLNQSALSRPMQRKLVTLVNCQLVEEEGRVRAMRAARSLGERTVTELILQHQNPQQLSANLWAAVRARGCQFLGPAMQEEALKLVLLALEDGSALSRKVLVLFVVQRLEPRFPQASKTSIGHVVQLLYRASCFKVTKRDEDSSLMQLKEEFRSYEALRREHDAQIVHIAMEAGLRISPEQWSSLLYGDLAHKSHMQSIIDKLQSPESFAKSVQELTIVLQRTGDPANLNRLRPHLELLANIDPNPDAVSPTWEQLENAMVAVKTVVHGLVDFIQNYSRKGHETPQPQPNSKYKTSMCRDLRQQGGCPRGTNCTFAHSQEELEKYRLRNKKINATVRTFPLLNKVGVNNTVTTTAGNVISVIGSTETTGKIVPSTNGISNAENSVSQLISRSTDSTLRALETVKKVGKVGANGQNAAGPSADSVTENKIGSPPKTPVSNVAATSAGPSNVGTELNSVPQKSSPFLTRVPVYPPHSENIQYFQDPRTQIPFEVPQYPQTGYYPPPPTVPAGVAPCVPRFVRSNNVPESSLPPASMPYADHYSTFSPRDRMNSSPYQPPPPQPYGPVPPVPSGMYAPVYDSRRIWRPPMYQRDDIIRSNSLPPMDVMHSSVYQTSLRERYNSLDGYYSVACQPPSEPRTTVPLPREPCGHLKTSCEEQIRRKPDQWAQYHTQKAPLVSSTLPVATQSPTPPSPLFSVDFRADFSESVSGTKFEEDHLSHYSPWSCGTIGSCINAIDSEPKDVIANSNAVLMDLDSGDVKRRVHLFETQRRTKEEDPIIPFSDGPIISKWGAISRSSRTGYHTTDPVQATASQGSATKPISVSDYVPYVNAVDSRWSSYGNEATSSAHYVERDRFIVTDLSGHRKHSSTGDLLSLELQQAKSNSLLLQREANALAMQQKWNSLDEGRHLTLNLLSKEIELRNGELQSDYTEDATDTKPDRDIELELSALDTDEPDGQSEPIEEILDIQLGISSQNDQLLNGMAVENGHPVQQHQKEPPKQKKQSLGEDHVILEEQKTILPVTSCFSQPLPVSISNASCLPITTSVSAGNLILKTHVMSEDKNDFLKPVANGKMVNS

SEQ ID NO: 15560 - protein, 485 aa, Homo sapiens; identical to SEQ ID NO: 11277

SEQ ID NO: 15561 - protein, 523 aa, Homo sapiens
MPSVMEKPSAGSGILSRSRAKTVPNGGQPHSEDDSSEEEHSHDSMIRVGTNYQAVIPECKPESPARYSNKELKGMLVWSPNHCVSDAKLDKYIAMAKEKHGYNIEQALGMLLWHKHDVEKSLADLANFTPFPDEWTVEDKVLFEQAFGFHGKCFQRIQQMLPDKLIPSLVKYYYSWKKTRSRTSVMDRQARRLGGRKDKEDSDELEEGRGGVSEGEPDPADPKREPLPSRPLNARPGPGKKEVQVSQYRHHPLRTRRRPPKGMYLSPEGLTAVSGSPDLANLTLRGLDSQLISLKRQVQSMKQTNSSLRQALEGGIDPLRPPEANTKFNSRWTTDEQLLAVQAIRRYGKDFGAIAEVIGNKTLTQVKTFFVSYRRRFNLEEVLQEWEAEQDGAPGAPVPMEEARRGAPLPAPALEEDDEVQITSVSTSVPRSVPPAPPPPPPPTSLSQPPPLLRPPLPTAPTLLRQPPPLQQGRFLQPRLAPNQPPPPLIRPALAAPRHSARPGPQPPPTLIGTPLEPPAPSL

SEQ ID NO: 15562 - protein, 495 aa, Homo sapiens
MRVGAEYQARIPEFDPGATKYTDKDNGGMLVWSPYHSIPDAKLDEYIAIAKEKHGYNVEQALGMLFWHKHNIEKSLADLPNFTPFPDEWTVEDKVLFEQAFSFHGKSFHRIQQMLPDKTIASLVKYYYSWKKTRSRTSLMDRQARKLANRHNQGDSDDDVEETHPMDGNDSDYDPKKEAKKEGNTEQPVQTSKIGLGRREYQSLQHRHHSQRSKCRPPKGMYLTQEDVVAVSCSPNAANTILRQLDMELISLKRQVQNAKQVNSALKQKMEGGIEEFKPPESNQKINARWTTEEQLLAVQGVRKYGKDFQAIADVIGNKTVGQVKNFFVNYRRRFNLEEVLQEWEAEQGTQASNGDASTLGEETKSASNVPSGKSTDEEEEAQTPQAPRTLGPSPPAPSSTPTPTAPIATLNQPPPLLRPTLPAAPALHRQPPPLQQQARFIQPRPTLNQPPPPLIRPANSMPPRLNPRPVLSTVGGQQPPSLIGIQTDSQSSLH

SEQ ID NO: 15563 - protein, 619 aa, Homo sapiens
MASGAYNPYIEIIEQPRQRGMRFRYKCEGRSAGSIPGEHSTDNNRTYPSIQIMNYYGKGKVRITLVTKNDPYKPHPHDLVGKDCRDGYYEAEFGQERRPLFFQNLGIRCVKKKEVKEAIITRIKAGINPFNVPEKQLNDIEDCDLNVVRLCFQVFLPDEHGNLTTALPPVVSNPIYDNRAPNTAELRICRVNKNCGSVRGGDEIFLLCDKVQKDDIEVRFVLNDWEAKGIFSQADVHRQVAIVFKTPPYCKAITEPVTVKMQLRRPSDQEVSESMDFRYLPDEKDTYGNKAKKQKTTLLFQKLCQDHVETGFRHVDQDGLELLTSGDPPTLASQSAGITVNFPERPRPGLLGSIGEGRYFKKEPNLFSHDAVVREMPTGVSSQAESYYPSPGPISSGLSHHASMAPLPSSSWSSVAHPTPRSGNTNPLSSFSTRTLPSNSQGIPPFLRIPVGNDLNASNACIYNNADDIVGMEASSMPSADLYGISDPNMLSNCSVNMMTTSSDSMGETDNPRLLSMNLENPSCNSVLDPRDLRQLHQMSSSSMSAGANSNTTVFVSQSDAFEGSDFSCADNSMINESGPSNSTNPNSHGFVQDSQYSGIGSMQNEQLSDSFPYEFFQV

SEQ ID NO: 15564 - protein, 551 aa, Homo sapiens
MDELFPLIFPAEPAQASGPYVEIIEQPKQRGMRFRYKCEGRSAGSIPGERSTDTTKTHPTIKINGYTGPGTVRISLVTKDPPHRPHPHELVGKDCRDGFYEAELCPDRCIHSFQNLGIQCVKKRDLEQAISQRIQTNNNPFQVPIEEQRGDYDLNAVRLCFQVTVRDPSGRPLRLPPVLSHPIFDNRAPNTAELKICRVNRNSGSCLGGDEIFLLCDKVQKEDIEVYFTGPGWEARGSFSQADVHRQVAIVFRTPPYADPSLQAPVRVSMQLRRPSDRELSEPMEFQYLPDTDDRHRIEEKRKRTYETFKSIMKKSPFSGPTDPRPPPRRIAVPSRSSASVPKPAPQPYPFTSSLSTINYDEFPTMVFPSGQISQASALAPAPPQVLPQAPAPAPAPAMVSALAQAPAPVPVLAPGPPQAVAPPAPKPTQAGEGTLSEALLQLQFDDEDLGALLGNSTDPAVFTDLASVDNSEFQQLLNQGIPVAPHTTEPMLMEYPEAITRLVTGAQRPPDPAPAPLGAPGLPNGLLSGDEDFSSIADMDFSALLSQISS

SEQ ID NO: 15565 - protein, 579 aa, Homo sapiens
MLRSGPASGPSVPTGRAMPSRRVARPPAAPELGALGSPDLSSLSLAVSRSTDELEIIDEYIKENGFGLDGGQPGPGEGLPRLVSRGAASLSTVTLGPVAPPATPPPWGCPLGRLVSPAPGPGPQPHLVITEQPKQRGMRFRYECEGRSAGSILGESSTEASKTLPAIELRDCGGLREVEVTACLVWKDWPHRVHPHSLVGKDCTDGICRVRLRPHVSPRHSFNNLGIQCVRKKEIEAAIERKIQLGIDPYNAGSLKNHQEVDMNVVRICFQASYRDQQGQMRRMDPVLSEPVYDKKSTNTSELRICRINKESGPCTGGEELYLLCDKVQKEDISVVFSRASWEGRADFSQADVHRQIAIVFKTPPYEDLEIVEPVTVNVFLQRLTDGVCSEPLPFTYLPRDHDSYGVDKKRKRGMPDVLGELNSSDPHGIESKRRKKKPAILDHFLPNHGSGPFLPPSALLPDPDFFSGTVSLPGLEPPGGPDLLDDGFAYDPTAPTLFTMLDLLPPAPPHASAVVCSGGAGAVVGETPGPEPLTLDSYQAPGPGDGGTASLVGSNMFPNHYREAAFGGGLLSPGPEAT

SEQ ID NO: 15566 - protein, 1566 aa, Homo sapiens
MTADKDKDKDKEKDRDRDRDREREKRDKARESENSRPRRSCTLEGGAKNYAESDHSEDEDNDNNSATAEESTKKNKKKPPKKKSRYERTDTGEITSYITEDDVVYRPGDCVYIESRRPNTPYFICSIQDFKLVHNSQACCRSPTPALCDPPACSLPVASQPPQHLSEAGRGPVGSKRDHLLMNVKWYYRQSEVPDSVYQHLVQDRHNENDSGRELVITDPVIKNRELFISDYVDTYHAAALRGKCNISHFSDIFAAREFKARVDSFFYILGYNPETRRLNSTQGEIRVGPSHQAKLPDLQPFPSPDGDTVTQHEELVWMPGVNDCDLLMYLRAARSMAAFAGMCDGGSTEDGCVAASRDDTTLNALNTLHESGYDAGKALQRLVKKPVPKLIEKCWTEDEVKRFVKGLRQYGKNFFRIRKELLPNKETGELITFYYYWKKTPEAASSRAHRRHRRQAVFRRIKTRTASTPVNTPSRPPSSEFLDLSSASEDDFDSEDSEQELKGYACRHCFTTTSKDWHHGGRENILLCTDCRIHFKKYGELPPIEKPVDPPPFMFKPVKEEDDGLSGKHSMRTRRSRGSMSTLRSGRKKQPASPDGRTSPINEDIRSSGRNSPSAASTSSNDSKAETVKKSAKKVKEEASSPLKSNKRQREKVASDTEEADRTSSKKTKTQEISRPNSPSEGEGESSDSRSVNDEGSSDPKDIDQDNRSTSPSIPSPQDNESDSDSSAQQQMLQAQPPALQAPTGVTPAPSSAPPGTPQLPTPGPTPSATAVPPQGSPTASQAPNQPQAPTAPVPHTHIQQAPALHPQRPPSPHPPPHPSPHPPLQPLTGSAGQPSAPSHAQPPLHGQGPPGPHSLQAGPLLQHPGPPQPFGLPPQASQGQAPLGTSPAAAYPHTSLQLPASQSALQSQQPPREQPLPPAPLAMPHIKPPPTTPIPQLPAPQAHKHPPHLSGPSPFSMNANLPPPPALKPLSSLSTHHPPSAHPPPLQLMPQSQPLPSSPAQPPGLTQSQNLPPPPASHPPTGLHQVAPQPPFAQHPFVPGGPPPITPPTCPSTSTPPAGPGTSAQPPCSGAAASGGSIAGGSSCPLPTVQIKEEALDDAEEPESPPPPPRSPSPEPTVVDTPSHASQSARFYKHLDRGYNSCARTDLYFMPLAGSKLAKKREEAIEKAKREAEQKAREEREREKEKEKEREREREREREAERAAKASSSAHEGRLSDPQLSGPGHMRPSFEPPPTTIAAVPPYIGPDTPALRTLSEYARPHVMSPTNRNHPFYMPLNPTDPLLAYHMPGLYNVDPTIRERELREREIREREIRERELRERMKPGFEVKPPELDPLHPAANPMEHFARHSALTIPPTAGPHPFASFHPGLNPLERERLALAGPQLRPEMSYPDRLAAERIHAERMASLTSDPLARLQMFNVTPHHHQHSHIHSHLHLHQQDPLHQGSAGPVHPLVDPLTAGPHLARFPYPPGTLPNPLLGQPPHEHEMLRHPVFGTPYPRDLPGAIPPPMSAAHQLQAMHAQSAELQRLAMEQQWLHGHPHMHGGHLPSQEDYYSRLKKEGDKQL

SEQ ID NO: 15567 - protein, 1097 aa, Homo sapiens
MATQVMGQSSGGGGLFTSSGNIGMALPNDMYDLHDLSKAELAAPQLIMLANVALTGEVNGSCCDYLVGEERQMAELMPVGDNNFSDSEEGEGLEESADIKGEPHGLENMELRSLELSVVEPQPVFEASGAPDIYSSNKDLPPETPGAEDKGKSSKTKPFRCKPCQYEAESEEQFVHHIRVHSAKKFFVEESAEKQAKARESGSSTAEEGDFSKGPIRCDRCGYNTNRYDHYTAHLKHHTRAGDNERVYKCIICTYTTVSEYHWRKHLRNHFPRKVYTCGKCNYFSDRKNNYVQHVRTHTGERPYKCELCPYSSSQKTHLTRHMRTHSGEKPFKCDQCSYVASNQHEVTRHARQVHNGPKPLNCPHCDYKTADRSNFKKHVELHVNPRQFNCPVCDYAASKKCNLQYHFKSKHPTCPNKTMDVSKVKLKKTKKREADLPDNITNEKTEIEQTKIKGDVAGKKNEKSVKAEKRDVSKEKKPSNNVSVIQVTTRTRKSVTEVKEMDVHTGSNSEKFSKTKKSKRKLEVDSHSLHGPVNDEESSTKKKKKVESKSKNNSQEVPKGDSKVEENKKQNTCMKKSTKKKTLKNKSSKKSSKPPQKEPVEKGSAQMDPPQMGPAPTEAVQKGPVQVEPPPPMEHAQMEGAQIRPAPDEPVQMEVVQEGPAQKELLPPVEPAQMVGAQIVLAHMELPPPMETAQTEVAQMGPAPMEPAQMEVAQVESAPMQVVQKEPVQMELSPPMEVVQKEPVQIELSPPMEVVQKEPVKIELSPPIEVVQKEPVQMELSPPMGVVQKEPAQREPPPPREPPLHMEPISKKPPLRKDKKEKSNMQSERARKEQVLIEVGLVPVKDSWLLKESVSTEDLSPPSPPLPKENLREEASGDQKLLNTGEGNKEAPLQKVGAEEADESLPGLAANINESTHISSSGQNLNTPEGETLNGKHQTDSIVCEMKMDTDQNTRENLTGINSTVEEPVSPMLPPSAVEEREAVSKTALASPPATMAANESQEIDEDEGIHSHEGSDLSDNMSEGSDDSGLHGARPVPQESSRKNAKEALAVKAAKGDFVCIFCDRSFRKGKDYSKHLNRHLVNVYYLEEAAQGQE

SEQ ID NO: 15568 - protein, 979 aa, Homo sapiens
MATQAYTELQAAPPPSQPPQAPPQAQPQPPPPPPPAAPQPPQPPTAAATPQPQYVTELQSPQPQAQPPGGQKQYVTELPAVPAPSQPTGAPTPSPAPQQYIVVTVSEGAMRASETVSEASPGSTASQTGVPTQVVQQVQGTQQRLLVQTSVQAKPGHVSPLQLTNIQVPQQALPTQRLVVQSAAPGSKGGQVSLTVHGTQQVHSPPEQSPVQANSSSSKTAGAPTGTVPQQLQVHGVQQSVPVTQERSVVQATPQAPKPGPVQPLTVQGLQPVHVAQEVQQLQQVPVPHVYSSQVQYVEGGDASYTASAIRSSTYSYPETPLYTQTASTSYYEAAGTATQVSTPATSQAVASSGSMPMYVSGSQVVASSTSTGAGASNSSGGGGSGGGGGGGGGGGGGGSGSTGGGGSGAGTYVIQGGYMLGSASQSYSHTTRASPATVQWLLDNYETAEGVSLPRSTLYCHYLLHCQEQKLEPVNAASFGKLIRSVFMGLRTRRLGTRGNSKYHYYGLRIKASSPLLRLMEDQQHMAMRGQPFSQKQRLKPIQKMEGMTNGVAVGQQPSTGLSDISAQVQQYQQFLDASRSLPDFTELDLQGKVLPEGVGPGDIKAFQVLYREHCEAIVDVMVNLQFTLVETLWKTFWRYNLSQPSEAPPLAVHDEAEKRLPKAILVLLSKFEPVLQWTKHCDNVLYQGLVEILIPDVLRPIPSALTQAIRNFAKSLESWLTHAMVNIPEEMLRVKVAAAGAFAQTLRRYTSLNHLAQAARAVLQNTAQINQMLSDLNRVDFANVQEQASWVCRCEDRVVQRLEQDFKVTLQQQNSLEQWAAWLDGVVSQVLKPYQGSAGFPKAAKLFLLKWSFYSSMVIRDLTLRSAASFGSFHLIRLLYDEYMYYLIEHRVAQAKGETPIAVMGEFANLATSLNPLDPDKDEEEEEEEESEDELPQDISLAAGGESPALGPETLEPPAKLARTDARGLFVQALPSS

SEQ ID NO: 15569 - protein, 723 aa, Homo sapiens
MQNSEGGADSPASVALRPSAAAPPVPASPQRVLVQAASSNPKGAQMQPISLPRVQQVPQQVQPVQHVYPAQVQYVEGGDAVYTNGAIRTAYTYNPEPQMYAPSSTASYFEAPGGAQVTVAASSPPAVPSHSMVGITMDVGGSPIVSSAGAYLIHGGMDSTRHSLAHTSRSSPATLEMAIENLQKSEGITSHKSGLLNSHLQWLLDNYETAEGVSLPRSSLYNHYLRHCQEHKLDPVNAASFGKLIRSVFMGLRTRRLGTRGNSKYHYYGIRLKPDSPLNRLQEDTQYMAMRQQPMHQKPRYRPAQKTDSLGDSGSHSGLHSTPEQTMAVQSQHHQQYIDVSHVFPEFPAPDLGSFLLQDGVTLHDVKALQLVYRRHCEATVDVVMNLQFHYIEKLWLSFWNSKASSSDGPTSLPASDEDPEGAVLPKDKLISLCQCDPILRWMRSCDHILYQALVEILIPDVLRPVPSTLTQAIRNFAKSLEGWLTNAMSDFPQQVIQTKVGVVSAFAQTLRRYTSLNHLAQAARAVLQNTSQINQMLSDLNRVDFANVQEQASWVCQCEESVVQRLEQDFKLTLQQQSSLDQWASWLDSVVTQVLKQHAGSPSFPKAARQFLLKWSFYSSMVIRDLTLRSAASFGSFHLIRLLYDEYMFYLVEHRVAEATGETPIAVMGEFNDLASLSLTLLDKDDMGDEQRGSEAGPDARSLGEPLVKRERSDPNHSLQGI

SEQ ID NO: 15570 - protein, 749 aa, Homo sapiens
MQTSETGSDTGSTVTLQTSVASQAAVPTQVVQQVPVQQQVQQVQTVQQVQHVYPAQVQYVEGSDTVYTNGAIRTTTYPYTETQMYSQNTGGNYFDTQGSSAQVTTVVSSHSMVGTGGIQMGVTGGQLISSSGGTYLIGNSMENSGHSVTHTTRASPATIEMAIETLQKSDGLSTHRSSLLNSHLQWLLDNYETAEGVSLPRSTLYNHYLRHCQEHKLDPVNAASFGKLIRSIFMGLRTRRLGTRGNSKYHYYGIRVKPDSPLNRLQEDMQYMAMRQQPMQQKQRYKPMQKVDGVADGFTGSGQQTGTSVEQTVIAQSQHHQQFLDASRALPEFGEVEISSLPDGTTFEDIKSLQSLYREHCEAILDVVVNLQFSLIEKLWQTFWRYSPSTPTDGTTITESSNLSEIESRLPKAKLITLCKHESILKWMCNCDHGMYQALVEILIPDVLRPIPSALTQAIRNFAKSLEGWLSNAMNNIPQRMIQTKVAAVSAFAQTLRRYTSLNHLAQAARAVLQNTSQINQMLSDLNRVDFANVQEQASWVCQCDDNMVQRLETDFKMTLQQQSTLEQWAAWLDNVMMQALKPYEGRPSFPKAARQFLLKWSFYSSMVIRDLTLRSAASFGSFHLIRLLYDEYMFYLVEHRVAQATGETPIAVMGEFGDLNAVSPGNLDKDEGSEVESEMDEELDDSSEPQAKREKTELSQAFPVGCMQPVLETGVQPSLLNPIHSEHIVTSTQTIRQCSATGNTYTAV

SEQ ID NO: 15571 - protein, 735 aa, Homo sapiens
MHCGLLEEPDMDSTESWIERCLNESENKRYSSHTSLGNVSNDENEEKENNRASKPHSTPATLQWLEENYEIAEGVCIPRSALYMHYLDFCEKNDTQPVNAASFGKIIRQQFPQLTTRRLGTRGQSKYHYYGIAVKESSQYYDVMYSKKGAAWVSETGKKEVSKQTVAYSPRSKLGTLLPEFPNVKDLNLPASLPEEKVSTFIMMYRTHCQRILDTVIRANFDEVQSFLLHFWQGMPPHMLPVLGSSTVVNIVGVCDSILYKAISGVLMPTVLQALPDSLTQVIRKFAKQLDEWLKVALHDLPENLRNIKFELSRRFSQILRRQTSLNHLCQASRTVIHSADITFQMLEDWRNVDLNSITKQTLYTMEDSRDEHRKLITQLYQEFDHLLEEQSPIESYIEWLDTMVDRCVVKVAAKRQGSLKKVAQQFLLMWSCFGTRVIRDMTLHSAPSFGSFHLIHLMFDDYVLYLLESLHCQERANELMRAMKGEGSTAEVREEIILTEAAAPTPSPVPSFSPAKSATSVEVPPPSSPVSNPSPEYTGLSTTGAMQSYTWSLTYTVTTAAGSPAENSQQLPCMRNTHVPSSSVTHRIPVYPHREEHGYTGSYNYGSYGNQHPHPMQSQYPALPHDTAISGPLHYAPYHRSSAQYPFNSPTSRMEPCLMSSTPRLHPTPVTPRWPEVPSANTCYTSPSVHSARYGNSSDMYTPLTTRRNSEYEHMQHFPGFAYINGEASTGWAK

SEQ ID NO: 15572 - protein, 616 aa, Homo sapiens
MAEDEPDAKSPKTGGRAPPGGAEAGEPTTLLQRLRGTISKAVQNKVEGILQDVQKFSDNDKLYLYLQLPSGPTTGDKSSEPSTLSNEEYMYAYRWIRNHLEEHTDTCLPKQSVYDAYRKYCESLACCRPLSTANFGKIIREIFPDIKARRLGGRGQSKYCYSGIRRKTLVSMPPLPGLDLKGSESPEMGPEVTPAPRDELVEAACALTCDWAERILKRSFSSIVEVARFLLQQHLISARSAHAHVLKAMGLAEEDEHAPRERSSKPKNGLENPEGGAHKKPERLAQPPKDLEARTGAGPLARGERKKSVVESSAPGANNLQVNALVARLPLLLPRAPRSLIPPIPVSPPILAPRLSSGALKVATLPLSSRAGAPPAAVPIINMILPTVPALPGPGPGPGRAPPGGLTQPRGTENREVGIGGDQGPHDKGVKRTAEVPVSEASGQAPPAKAAKQDIEDTASDAKRKRGRPRKKSGGSGERNSTPLKSAAAMESAQSSRLPWETWGSGGEGNSAGGAERPGPMGEAEKGAVLAQGQGDGTVSKGGRGPGSQHTKEAEDKIPLVPSKVSVIKGSRSQKEAFPLAKGEVDTAPQGNKDLKEHVLQSSLSQEHKDPKATPP

SEQ ID NO: 15573 - protein, 928 aa, Homo sapiens
MAKVPELEDTFLQAQPAPQLSPGIQEDCCVQLLGKGLLVYPEETVYLAAEGQPGGEQGGGEKGEDPELPGAVKSEMHLNNGNFSSEEEDADNHDSKTKAADQYLSQKKTITQIVKDKKKQTQLTLQWLEENYIVCEGVCLPRCILYAHYLDFCRKEKLEPACAATFGKTIRQKFPLLTTRRLGTRGHSKYHYYGIGIKESSAYYHSVYSGKGLTRFSGSKLKNEGGFTRKYSLSSKTGTLLPEFPSAQHLVYQGCISKDKVDTLIMMYKTHCQCILDNAINGNFEEIQHFLLHFWQGMPDHLLPLLENPVIIDIFCVCDSILYKVLTDVLIPATMQEMPESLLADIRNFAKNWEQWVVSSLENLPEALTDKKIPIVRRFVSSLKRQTSFLHLAQIARPALFDQHVVNSMVSDIERVDLNSIGSQALLTISGSTDTESGIYTEHDSITVFQELKDLLKKNATVEAFIEWLDTVVEQRVIKTSKQNGRSLKKRAQDFLLKWSFFGARVMHNLTLNNASSFGSFHLIRMLLDEYILLAMETQFNNDKEQELQNLLDKYMKNSDASKAAFTASPSSCFLANRNKGSMVSSDAVKNESHVETTYLPLPSSQPGGLGPALHQFPAGNTDNMPLTGQMELSQIAGHLMTPPISPAMASRGSVINQGPMAGRPPSVGPVLSAPSHCSTYPEPIYPTLPQANHDFYSTSSNYQTVFRAQPHSTSGLYPHHTEHGRCMAWTEQQLSRDFFSGSCAGSPYNSRPPSSYGPSLQAQDSHNMQFLNTGSFNFLSNTGAASCQGATLPPNSPNGYYGSNINYPESHRLGSMVNQHVSVISSIRSLPPYSDIHDPLNILDDSGRKQTSSFYTDTSSPVACRTPVLASSLQTPIPSSSSQCMYGTSNQYPAQETLDSHGTSSREMVSSLPPINTVFMGTAAGGT

SEQ ID NO: 15574 - protein, 1363 aa, Homo sapiens
MSSSRAQQMHAFSWIRNTLEEHPETSLPKQEVYDEYKSYCDNLGYHPLSAADFGKIMKNVFPNMKARRLGTRGKSKYCYSGLRKKAFVHMPTLPNLDFHKTGDGLEGAEPSGQLQNIDEEVISSACRLVCEWAQKVLSQPFDTVLELARFLVKSHYIGTKSMAALTVMAAAPAGMKGITQPSAFIPTAESNSFQPQVKTLPSPIDAKQQLQRKIQKKQQEQKLQSPLPGESAAKKSESATSNGVTNLPNGNPSILSPQPIGIVVAAVPSPIPVQRTRQLVTSPSPMSSSDGKVLPLNVQVVTQHMQSVKQAPKTPQNVPASPGGDRSARHRYPQILPKPANTSALTIRSPTTVLFTSSPIKTAVVPASHMSSLNVVKMTTISLTPSNSNTPLKHSASVSSATGTTEESRSVPQIKNGSVVSLQSPGSRSSSAGGTSAVEVKVEPETSSDEHPVQCQENSDEAKAPQTPSALLGQKSNTDGALQKPSNEGVIEIKATKVCDQRTKCKSRCNEMLPGTSTGNNQSTITLSVASQNLTFTSSSSPPNGDSINKDPKLCTKSPRKRLSSTLQETQVPPVKKPIVEQLSAATIEGQKQGSVKKDQKVPHSGKTEGSTAGAQIPSKVSVNVSSHIGANQPLNSSALVISDSALEQQTTPSSSPDIKVKLEGSVFLLDSDSKSVGSFNPNGWQQITKDSEFISASCEQQQDISVMTIPEHSDINDLEKSVWELEGMPQDTYSQQLHSQIQESSLNQIQAHSSDQLPLQSELKEFEPSVSQTNESYFPFDDELTQDSIVEELVLMEQQMSMNNSHSYGNCLGMTLQSQSVTPGAPMSSHTSSTHFYHPIHSNGTPIHTPTPTPTPTPTPTPTPTPTSEMIAGSQSLSRESPCSRLAQTTPVDSALGSSRHTPIGTPHSNCSSSVPPSPVECRNPFAFTPISSSMAYHDASIVSSSPVKPMQRPMATHPDKTKLEWMNNGYSGVGNSSVSGHGILPSYQELVEDRFRKPHAFAVPGQSYQSQSRHHDTHFGRLTPVSPVQHQGATVNNTNKQEGFAVPAPLDNKGTNSSASSNFRCRSVSPAVHRQRNLSGSTLYPVSNIPRSNVTPFGSPVTPEVHVFTNVHTDACANNIAQRSQSVPLTVMMQTAFPNALQKQANSKKITNVLLSKLDSDNDDAVRGLGMNNLPSNYTARMNLTQILEPSTVFPSANPQNMIDSSTSVYEFQTPSYLTKSNSTGQINFSPGDNQAQSEIGEQQLDFNSTVKDLLSGDSLQTNQQLVGQGASDLTNTASDFSSDIRLSSELSGSINDLNTLDPNLLFDPGRQQGQDDEATLEELKNDPLFQQICSESMNSMTSSGFEWIESKDHPTVEMLG

SEQ ID NO: 15575 - protein, 586 aa, Homo sapiens
MAEGVPASPSSGEGSRGPHSGVIQWLVDNFCICEECSVPRCLMYEIYVETCGQNTENQVNPATFGKLVRLVFPDLGTRRLGTRGSARYHYDGICIKKSSFFYAQYCYLIGEKRYHSGDAIAFEKSTNYNSIIQQEATCEDHSPMKTDPVGSPLSEFRRCPFLEQEQAKKYSCNMMAFLADEYCNYCRDILRNVEDLLTSFWKSLQQDTVMLMSLPDVCQLFKCYDVQLYKGIEDVLLHDFLEDVSIQYLKSVQLFSKKFKLWLLNALEGVPALLQISKLKEVTLFVKRLRRKTYLSNMAKTMRMVLKSKRRVSVLKSDLQAIINQGTLATSKKALASDRSGADELENNPEMKCLRNLISLLGTSTDLRVFLSCLSSHLQAFVFQTSRSKEEFTKLAASFQLRWNLLLTAVSKAMTLCHRDSFGSWHLFHLLLLEYMIHILQSCLEEEEEEEDMGTVKEMLPDDPTLGQPDQALFHSLNSSLSQACASPSMEPLGVMPTHMGQGRYPVGVSNMVLRILGFLVDTAMGNKLIQVLLEDETTESAVKLSLPMGQEALITLKDGQQFVIQISDVPQSSEDIYFRENNANV

SEQ ID NO: 15576 - protein, 260 aa, Homo sapiens
MELTQPAEDLIQTQQTPASELGDPEDPGEEAADGSDTVVLSLFPCTPEPVNPEPDASVSSPQAGSSLKHSTTLTNRQRGNEVSALPATLDSLSIHQLAAQGELDQLKEHLRKGDNLVNKPDERGFTPLIWASAFGEIETVRFLLEWGADPHILAKERESALSLASTGGYTDIVGLLLERDVDINIYDWNGGTPLLYAVRGNHVKCVEALLARGADLTTEADSGYTPMDLAVALGYRKVQQVIENHILKLFQSNLVPADPE

SEQ ID NO: 15577 - protein, 272 aa, Homo sapiens
MEAQGVAEGAGPGAASGVPHPAALAPAAAPTLAPASVAAAASQFTLLVMQPCAGQDEAAAPGGSVGAGKPVRYLCEGAGDGEEEAGEDEADLLDTSDPPGGGESAASLEDLEDEETHSGGEGSSGGARRRGSGGGSMSKTCTYEGCSETTSQVAKQRKPWMCKKHRNKMYKDKYKKKKSDQALNCGGTASTGSAGNVKLEESADNILSIVKQRTGSFGDRPARPTLLEQVLNQKRLSLLRSPEVVQFLQKQQQLLNQQVLEQRQQQFPGTSM

SEQ ID NO: 15578 - protein, 184 aa, Homo sapiens
MARSLVHDTVFYCLSVYQVKISPTPQLGAASSAEGHVGQGAPGLMGNMNPEGGVNHENGMNRDGGMIPEGGGGNQEPRQQPQPPPEEPAQAAMEGPQPENMQPRTRRTKFTLLQVEELESVFRHTQYPDVPTRRELAENLGVTEDKVRVWFKNKRARCRRHQRELMLANELRADPDDCVYIVVD

SEQ ID NO: 15579 - protein, 288 aa, Homo sapiens
MEPPDQCSQYMTSLLSPAVDDEKELQDMNAMVLSLTEEVKEEEEDAQPEPEQGTAAGEKLKSAGAQGGEEKDGGGEEKDGGGAGVPGHLWEGDLEGTSGSDGNVEDSDQSEKEPGQQYSRPQGAVGGLEPGNAQQPNVHAFTPLQLQELERIFQREQFPSEFLRRRLARSMNVTELAVQIWFENRRAKWRRHQRALMARNMLPFMAVGQPVMVTAAEAITAPLFISGMRDDYFWDHSHSSSLCFPMPPFPPPSLPLPLMLLPPMPPAGQAEFGPFPFVIVPSFTFPNV

SEQ ID NO: 15580 - protein, 288 aa, Homo sapiens
MEPPDQCSQYMTSLLSPAVDDEKELQDMNAMVLSLTEEVKEEEEDAQPEPEQGTAAGEKLKSAGAQGGEEKDGGGEEKDGGGAGVPGHLWEGNLEGTSGSDGNVEDSDQSEKEPGQQYSRPQGAVGGLEPGNAQQPNVHAFTPLQLQELECIFQREQFPSEFLRRRLARSMNVTELAVQIWFENRRAKWRRHQRALMARNMLPFMAVGQPVMVTAAEAITAPLFISGMRDDYFWDHSHSSSLCFPMPPFPPPSLPLPLMLLPPMPPAGQAEFGPFPFVIVPSFTFPNV

SEQ ID NO: 15581 - protein, 131 aa, Homo sapiens; identical to SEQ ID NO: 7201

SEQ ID NO: 15582 - protein, 1914 aa, Homo sapiens
MADGKGDAAAVAGAGAEAPAVAGAGDGVETESMVRGHRPVSPAPGASGLRPCLWQLETELREQEVSEVSSLNYCRSFCQTLLQYASNKNASEHIVYLLEVYRLAIQSFASARPYLTTECEDVLLVLGRLVLSCFELLLSVSESELPCEVWLPFLQSLQESHDALLEFGNNNLQILVHVTKEGVWKNPVLLKILSQQPVETEEVNKLIAQEGPSFLQMRIKHLLKSNCIPQATALSKLCAESKEISNVSSFQQAYITCLCSMLPNEDAIKEIAKVDCKEVLDIICNLESEGQDNTAFVLCTTYLTQQLQTASVYCSWELTLFWSKLQRRIDPSLDTFLERCRQFGVIAKTQQHLFCLIRVIQTEAQDAGLGVSILLCVRALQLRSSEDEEMKASVCKTIACLLPEDLEVRRACQLTEFLIEPSLDGFNMLEELYLQPDQKFDEENAPVPNSLRCELLLALKAHWPFDPEFWDWKTLKRHCHQLLGQEASDSDDDLSGYEMSINDTDVLESFLSDYDEGKEDKQYRRRDLTDQHKEKRDKKPIGSSERYQRWLQYKFFCLLCKRECIEARILHHSKMHMEDGIYTCPVCIKKFKRKEMFVPHVMEHVKMPPSRRDRSKKKLLLKGSQKGICPKSPSAIPEQNHSLNDQAKGESHEYVTFSKLEDCHLQDRDLYPCPGTDCSRVFKQFKYLSVHLKAEHQNNDENAKHYLDMKNRREKCTYCRRHFMSAFHLREHEQVHCGPQPYMCVSIDCYARFGSVNELLNHKQKHDDLRYKCELNGCNIVFSDLGQLYHHEAQHFRDASYTCNFLGCKKFYYSKIEYQNHLSMHNVENSNGDIKKSVKLEESATGEKQDCINQPHLLNQTDKSHLPEDLFCAESANSQIDTETAENLKENSDSNSSDQLSHSSSASMNEELIDTLDHSETMQDVLLSNEKVFGPSSLKEKCSSMAVCFDGTKFTCGFDGCGSTYKNARGMQKHLRKVHPYHFKPKKIKTKDLFPSLGNEHNQTTEKLDAEPKPCSDTNSDSPDEGLDHNIHIKCKREHQGYSSESSICASKRPCTEDTMLELLLRLKHLSLKNSITHGSFSGSLQGYPSSGAKSLQSVSSISDLNFQNQDENMPSQYLAQLAAKPFFCELQGCKYEFVTREALLMHYLKKHNYSKEKVLQLTMFQHRYSPFQCHICQRSFTRKTHLRIHYKNKHQIGSDRATHKLLDNEKCDHEGPCSVDRLKGDCSAELGGDPSSNSEKPHCHPKKDECSSETDLESSCEETESKTSDISSPIGSHREEQEGREGRGSRRTVAKGNLCYILNKYHKPFHCIHKTCNSSFTNLKGLIRHYRTVHQYNKEQLCLEKDKARTKRELVKCKKIFACKYKECNKRFLCSKALAKHCSDSHNLDHIEEPKVLSEAGSAARFSCNQPQCPAVFYTFNKLKHHLMEQHNIEGEIHSDYEIHCDLNGCGQIFTHRSNYSQHVYYRHKDYYDDLFRSQKVANERLLRSEKVCQTADTQGHEHQTTRRSFNAKSKKCGLIKEKKAPISFKTRAEALHMCVEHSEHTQYPCMVQGCLSVVKLESSIVRHYKRTHQMSSAYLEQQMENLVVCVKYGTKIKEEPPSEADPCIKKEENRSCESERTEHSHSPGDSSAPIQNTDCCHSSERDGGQKGCIESSSVFDADTLLYRGTLKCNHSSKTTSLEQCNIVQPPPPCKIENSIPNPNGTESGTYFTSFQLPLPRIKESETRQHSSGQENTVKNPTHVPKENFRKHSQPRSFDLKTYKPMGFESSFLKFIQESEEKEDDFDDWEPSEHLTLSNSSQSSNDLTGNVVANNMVNDSEPEVDIPHSSSDSTIHENLTAIPPLIVAETTTVPSLENLRVVLDKALTDCGELALKQLHYLRPVVVLERSKFSTPILDLFPTKKTDELCVGSS

SEQ ID NO: 15583 - protein, 523 aa, Homo sapiens
MESAPAAPDPAASEPGSSGADAAAGSRETPLNQESARKSEPPAPVRRQSYSSTSRGISVTKKTHTSQIEIIPCKICGDKSSGIHYGVITCEGCKGFFRRSQQSNATYSCPRQKNCLIDRTSRNRCQHCRLQKCLAVGMSRDAVKFGRMSKKQRDSLYAEVQKHRMQQQQRDHQQQPGEAEPLTPTYNISANGLTELHDDLSNYIDGHTPEGSKADSAVSSFYLDIQPSPDQSGLDINGIKPEPICDYTPASGFFPYCSFTNGETSPTVSMAELEHLAQNISKSHLETCQYLREELQQITWQTFLQEEIENYQNKQREVMWQLCAIKITEAIQYVVEFAKRIDGFMELCQNDQIVLLKAGSLEVVFIRMCRAFDSQNNTVYFDGKYASPDVFKSLGCEDFISFVFEFGKSLCSMHLTEDEIALFSAFVLMSADRSWLQEKVKIEKLQQKIQLALQHVLQKNHREDGILTKLICKVSTLRALCGRHTEKLMAFKAIYPDIVRLHFPPLYKELFTSEFEPAMQIDG

SEQ ID NO: 15584 - protein, 470 aa, Homo sapiens
MCENQLKTKADATAQIEVIPCKICGDKSSGIHYGVITCEGCKGFFRRSQQNNASYSCPRQRNCLIDRTNRNRCQHCRLQKCLALGMSRDAVKFGRMSKKQRDSLYAEVQKHQQRLQEQRQQQSGEAEALARVYSSSISNGLSNLNNETSGTYANGHVIDLPKSEGYYNVDSGQPSPDQSGLDMTGIKQIKQEPIYDLTSVPNLFTYSSFNNGQLAPGITMTEIDRIAQNIIKSHLETCQYTMEELHQLAWQTHTYEEIKAYQSKSREALWQQCAIQITHAIQYVVEFAKRITGFMELCQNDQILLLKSGCLEVVLVRMCRAFNPLNNTVLFEGKYGGMQMFKALGSDDLVNEAFDFAKNLCSLQLTEEEIALFSSAVLISPDRAWLIEPRKVQKLQEKIYFALQHVIQKNHLDDETLAKLIAKIPTITAVCNLHGEKLQVFKQSHPEIVNTLFPPLYKELFNPDCATGCK

SEQ ID NO: 15585 - protein, 518 aa, Homo sapiens
MDRAPQRQHRASRELLAAKKTHTSQIEVIPCKICGDKSSGIHYGVITCEGCKGFFRRSQRCNAAYSCTRQQNCPIDRTSRNRCQHCRLQKCLALGMSRDAVKFGRMSKKQRDSLHAEVQKQLQQRQQQQQEPVVKTPPAGAQGADTLTYTLGLPDGQLPLGSSPDLPEASACPPGLLKASGSGPSYSNNLAKAGLNGASCHLEYSPERGKAEGRESFYSTGSQLTPDRCGLRFEEHRHPGLGELGQGPDSYGSPSFRSTPEAPYASLTEIEHLVQSVCKSYRETCQLRLEDLLRQRSNIFSREEVTGYQRKSMWEMWERCAHHLTEAIQYVVEFAKRLSGFMELCQNDQIVLLKAGAMEVVLVRMCRAYNADNRTVFFEGKYGGMELFRALGCSELISSIFDFSHSLSALHFSEDEIALYTALVLINAHRPGLQEKRKVEQLQYNLELAFHHHLCKTHRQSILAKLPPKGKLRSLCSQHVERLQIFQHLHPIVVQAAFPPLYKELFSTETESPVGLSK

SEQ ID NO: 15586 - protein, 497 aa, Homo sapiens
MRTQIEVIPCKICGDKSSGIHYGVITCEGCKGFFRRSQRCNAAYSCTRQQNCPIDRTSRNRCQHCRLQKCLALGMSRDAVKFGRMSKKQRDSLHAEVQKQLQQRQQQQQEPVVKTPPAGAQGADTLTYTLGLPDGQLPLGSSPDLPEASACPPGLLKASGSGPSYSNNLAKAGLNGASCHLEYSPERGKAEGRESFYSTGSQLTPDRCGLRFEEHRHPGLGELGQGPDSYGSPSFRSTPEAPYASLTEIEHLVQSVCKSYRETCQLRLEDLLRQRSNIFSREEVTGYQRKSMWEMWERCAHHLTEAIQYVVEFAKRLSGFMELCQNDQIVLLKAGAMEVVLVRMCRAYNADNRTVFFEGKYGGMELFRALGCSELISSIFDFSHSLSALHFSEDEIALYTALVLINAHRPGLQEKRKVEQLQYNLELAFHHHLCKTHRQSILAKLPPKGKLRSLCSQHVERLQIFQHLHPIVVQAAFPPLYKELFSTETESPVGLSK

SEQ ID NO: 15587 - protein, 1687 aa, Homo sapiens
MTSSSPAGLEGSDLSSINTMMSAVMSVGKVTENGGSPQGIKSPSKPPGPNRIGRRNQETKEEKSSYNCPLCEKICTTQHQLTMHIRQHNTDTGGADHSCSICGKSLSSASSLDRHMLVHSGERPYKCTVCGQSFTTNGNMHRHMKIHEKDPNSATATAPPSPLKRRRLSSKRKLSHDAESEREDPAPAKKMVEDGQSGDLEKKADEVFHCPVCFKEFVCKYGLETHMETHSDNPLRCDICCVTFRTHRGLLRHNALVHKQLPRDAMGRPFIQNNPSIPAGFHDLGFTDFSCRKFPRISQAWCETNLRRCISEQHRFVCDTCDKAFPMLCSLALHKQTHVAADQGQEKPQATPLPGDALDQKGFLALLGLQHTKDVRPAPAEEPLPDDNQAIQLQTLKCQLPQDPGCTNLLSLSPFEAASLGGSLTVLPATKDSIKHLSLQPFQKGFIIQPDSSIVVKPISGESAIELADIQQILKMAASAPPQISLPPFSKAPAAPLQAIFKHMPPLKPKPLVTPRTVVATSTPPPLINAQQASPGCISPSLPPPPLKLLKGSVEAASNAHLLQSKSGTQPHAATRLSLQQPRAELPGQPEMKTQLEQDSIIEALLPLSMEAKIKQEITEGELKAFMTAPGGKKTPAMRKVLYPCRFCNQVFAFSGVLRAHVRSHLGISPYQCNICDYIAADKAALIRHLRTHSGERPYICKICHYPFTVKANCERHLRKKHLKATRKDIEKNIEYVSSSAAELVDAFCAPDTVCRLCGEDLKHYRALRIHMRTHCGRGLGGGHKGRKPFECKECSAAFAAKRNCIHHILKQHLHVPEQDIESYVLAADGLGPAEAPAAEASGRGEDSGCAALGDCKPLTAFLEPQNGFLHRGPTQPPPPHVSIKLEPASSFAVDFNEPLDFSQKGLALVQVKQENISFLSPSSLVPYDCSMEPIDLSIPKNFRKGDKDLATPSEAKKPEEEAGSSEQPSPCPAPGPSLPVTLGPSGILESPMAPAPAATPEPPAQPLQGPVQLAVPIYSSALVSSPPLVGSSALLSGTALLRPLRPKPPLLLPKPPVTEELPPLASIAQIISSVSSAPTLLKTKVADPGPASTGSNTTASDSLGGSVPKAATTATPAATTSPKESSEPPAPASSPEAASPTEQGPAGTSKKRGRKRGMRSRPRANSGGVDLDSSGEFASIEKMLATTDTNKFSPFLQTAEDNTQDEVAGAPADHHGPSDEEQGSPPEDKLLRAKRNSYTNCLQKITCPHCPRVFPWASSLQRHMLTHTDSQSDAETAAAAGEVLDLTSRDREQPSEGATELRQVAGDAPVEQATAETASPVHREEHGRGESHEPEEEHGTEESTGDADGAEEDASSNQSLDLDFATKLMDFKLAEGDGEAGAGGAASQEQKLACDTCGKSFKFLGTLSRHRKAHGRQEPKDEKGDGASTAEEGPQPAPEQEEKPPETPAEVVESAPGAGEAPAEKLAEETEGPSDGESAAEKRSSEKSDDDKKPKTDSPKSVASKADKRKKVCSVCNKRFWSLQDLTRHMRSHTGERPYKCQTCERTFTLKHSLVRHQRIHQKARHAKHHGKDSDKEERGEEDSENESTHSGNNAVSENEAELAPNASNHMAVTRSRKEGLASATKDCSHREEKVTAGWPSEPGQGDLNPESPAALGQDLLEPRSKRPAHPILATADGASQLVGME

SEQ ID NO: 15588 - protein, 453 aa, Homo sapiens
MRIPVDASTSRRFTPPSTALSPGKMSEALPLGAPDAGAALAGKLRSGDRSMVEVLADHPGELVRTDSPNFLCSVLPTHWRCNKTLPIAFKVVALGDVPDGTLVTVMAGNDENYSAELRNATAAMKNQVARFNDLRFVGRSGRGKSFTLTITVFTNPPQVATYHRAIKITVDGPREPRRHRQKLDDQTKPGSLSFSERLSELEQLRRTAMRVSPHHPAPTPNPRASLNHSTAFNPQPQSQMQDTRQIQPSPPWSYDQSYQYLGSIASPSVHPATPISPGRASGMTTLSAELSSRLSTAPDLTAFSDPRQFPALPSISDPRMHYPGAFTYSPTPVTSGIGIGMSAMGSATRYHTYLPPPYPGSSQAQGGPFQASSPSYHLYYGASAGSYQFSMVGGERSPPRILPPCTNASTGSALLNPSLPNQSDVVEAEGSHSNSPTNMAPSARLEEAVWRPY

SEQ ID NO: 15589 - protein, 604 aa, Homo sapiens
MISVKRNTWRALSLVIGDCRKKGNFEYCQDRTEKHSTMPDSPVDVKTQSRLTPPTMPPPPTTQGAPRTSSFTPTTLTNGTSHSPTALNGAPSPPNGFSNGPSSSSSSSLANQQLPPACGARQLSKLKRFLTTLQQFGNDISPEIGERVRTLVLGLVNSTLTIEEFHSKLQEATNFPLRPFVIPFLKANLPLLQRELLHCARLAKQNPAQYLAQHEQLLLDASTTSPVDSSELLLDVNENGKRRTPDRTKENGFDREPLHSEHPSKRPCTISPGQRYSPNNGLSYQPNGLPHPTPPPPQHYRLDDMAIAHHYRDSYRHPSHRDLRDRNRPMGLHGTRQEEMIDHRLTDREWAEEWKHLDHLLNCIMDMVEKTRRSLTVLRRCQEADREELNYWIRRYSDAEDLKKGGGSSSSHSRQQSPVNPDPVALDAHREFLHRPASGYVPEEIWKKAEEAVNEVKRQAMTELQKAVSEAERKAHDMITTERAKMERTVAEAKRQAAEDALAVINQQEDSSESCWNCGRKASETCSGCNTARYCGSFCQHKDWEKHHHICGQTLQAQQQGDTPAVSSSVTPNSGAGSPMDTPPAATPRSTTPGTPSTIETTPR

SEQ ID NO: 15590 - protein, 521 aa, Homo sapiens
MASNSLFSTVTPCQQNFFWDPSTSRRFSPPSSSLQPGKMSDVSPVVAAQQQQQQQQQQQQQQQQQQQQQQQEAAAAAAAAAAAAAAAAAVPRLRPPHDNRTMVEIIADHPAELVRTDSPNFLCSVLPSHWRCNKTLPVAFKVVALGEVPDGTVVTVMAGNDENYSAELRNASAVMKNQVARFNDLRFVGRSGRGKSFTLTITVFTNPPQVATYHRAIKVTVDGPREPRRHRQKLDDSKPSLFSDRLSDLGRIPHPSMRVGVPPQNPRPSLNSAPSPFNPQGQSQITDPRQAQSSPPWSYDQSYPSYLSQMTSPSIHSTTPLSSTRGTGLPAITDVPRRISDDDTATSDFCLWPSTLSKKSQAGASELGPFSDPRQFPSISSLTESRFSNPRMHYPATFTYTPPVTSGMSLGMSATTHYHTYLPPPYPGSSQSQSGPFQTSSTPYLYYGTSSGSYQFPMVPGGDRSPSRMLPPCTTTSNGSTLLNPNLPNQNDGVDADGSHSSSPTVLNSSGRMDESVWRPY

SEQ ID NO: 15591 - protein, 415 aa, Homo sapiens
MRIPVDPSTSRRFTPPSPAFPCGGGGGKMGENSGALSAQAAVGPGGRARPEVRSMVDVLADHAGELVRTDSPNFLCSVLPSHWRCNKTLPVAFKVVALGDVPDGTVVTVMAGNDENYSAELRNASAVMKNQVARFNDLRFVGRSGRGKSFTLTITVFTNPTQVATYHRAIKVTVDGPREPRRHRQKLEDQTKPFPDRFGDLERLRMRVTPSTPSPRGSLSTTSHFSSQPQTPIQGTSELNPFSDPRQFDRSFPTLPTLTESRFPDPRMHYPGAMSAAFPYSATPSGTSISSLSVAGMPATSRFHHTYLPPPYPGAPQNQSGPFQANPSPYHLYYGTSSGSYQFSMVAGSSSGGDRSPTRMLASCTSSAASVAAGNLMNPSLGGQSDGVEADGSHSNSPTALSTPGRMDEAVWRPY

SEQ ID NO: 15592 - protein, 462 aa, Homo sapiens
MDTKHFLPLDFSTQVNSSLTSPTGRGSMAAPSLHPSLGPGIGSPGQLHSPISTLSSPINGMGPPFSVISSPMGPHSMSVPTTPTLGFSTGSPQLSSPMNPVSSSEDIKPPLGLNGVLKVPAHPSGNMASFTKHICAICGDRSSGKHYGVYSCEGCKGFFKRTVRKDLTYTCRDNKDCLIDKRQRNRCQYCRYQKCLAMGMKREAVQEERQRGKDRNENEVESTSSANEDMPVERILEAELAVEPKTETYVEANMGLNPSSPNDPVTNICQAADKQLFTLVEWAKRIPHFSELPLDDQVILLRAGWNELLIASFSHRSIAVKDGILLATGLHVHRNSAHSAGVGAIFDRVLTELVSKMRDMQMDKTELGCLRAIVLFNPDSKGLSNPAEVEALREKVYASLEAYCKHKYPEQPGRFAKLLLRLPALRSIGLKCLEHLFFFKLIGDTPIDTFLMEMLEAPHQMT

SEQ ID NO: 15593 - protein, 533 aa, Homo sapiens
MSWAARPPFLPQRHAAGQCGPVGVRKEMHCGVASRWRRRRPWLDPAAAAAAAVAGGEQQTPEPEPGEAGRDGMGDSGRDSRSPDSSSPNPLPQGVPPPSPPGPPLPPSTAPSLGGSGAPPPPPMPPPPLGSPFPVISSSMGSPGLPPPAPPGFSGPVSSPQINSTVSLPGGGSGPPEDVKPPVLGVRGLHCPPPPGGPGAGKRLCAICGDRSSGKHYGVYSCEGCKGFFKRTIRKDLTYSCRDNKDCTVDKRQRNRCQYCRYQKCLATGMKREAVQEERQRGKDKDGDGEGAGGAPEEMPVDRILEAELAVEQKSDQGVEGPGGTGGSGSSPNDPVTNICQAADKQLFTLVEWAKRIPHFSSLPLDDQVILLRAGWNELLIASFSHRSIDVRDGILLATGLHVHRNSAHSAGVGAIFDRVLTELVSKMRDMRMDKTELGCLRAIILFNPDAKGLSNPSEVEVLREKVYASLETYCKQKYPEQQGRFAKLLLRLPALRSIGLKCLEHLFFFKLIGDTPIDTFLMEMLEAPHQLA

SEQ ID NO: 15594 - protein, 463 aa, Homo sapiens
MYGNYSHFMKFPAGYGGSPGHTGSTSMSPSAALSTGKPMDSHPSYTDTPVSAPRTLSAVGTPLNALGSPYRVITSAMGPPSGALAAPPGINLVAPPSSQLNVVNSVSSSEDIKPLPGLPGIGNMNYPSTSPGSLVKHICAICGDRSSGKHYGVYSCEGCKGFFKRTIRKDLIYTCRDNKDCLIDKRQRNRCQYCRYQKCLVMGMKREAVQEERQRSRERAESEAECATSGHEDMPVERILEAELAVEPKTESYGDMNMENSTNDPVTNICHAADKQLFTLVEWAKRIPHFSDLTLEDQVILLRAGWNELLIASFSHRSVSVQDGILLATGLHVHRSSAHSAGVGSIFDRVLTELVSKMKDMQMDKSELGCLRAIVLFNPDAKGLSNPSEVETLREKVYATLEAYTKQKYPEQPGRFAKLLLRLPALRSIGLKCLEHLFFFKLIGDTPIDTFLMEMLETPLQIT

SEQ ID NO: 15595 - protein, 1324 aa, Homo sapiens
MSRRKQAKPQHFQSDPEVASLPRRDGDTEKGQPSRPTKSKDAHVCGRCCAEFFELSDLLLHKKNCTKNQLVLIVNENPASPPETFSPSPPPDNPDEQMNDTVNKTDQVDCSDLSEHNGLDREESMEVEAPVANKSGSGTSSGSHSSTAPSSSSSSSSSSGGGGSSSTGTSAITTSLPQLGDLTTLGNFSVINSNVIIENLQSTKVAVAQFSQEARCGGASGGKLAVPALMEQLLALQQQQIHQLQLIEQIRHQILLLASQNADLPTSSSPSQGTLRTSANPLSTLSSHLSQQLAAAAGLAQSLASQSASISGVKQLPPIQLPQSSSGNTIIPSNSGSSPNMNILAAAVTTPSSEKVASSAGASHVSNPAVSSSSSPAFAISSLLSPASNPLLPQQASANSVFPSPLPNIGTTAEDLNSLSALAQQRKSKPPNVTAFEAKSTSDEAFFKHKCRFCAKVFGSDSALQIHLRSHTGERPFKCNICGNRFSTKGNLKVHFQRHKEKYPHIQMNPYPVPEHLDNIPTSTGIPYGMSIPPEKPVTSWLDTKPVLPTLTTSVGLPLPPTLPSLIPFIKTEEPAPIPISHSATSPPGSVKSDSGGPESATRNLGGLPEEAEGSTLPPSGGKSEESGMVTNSVPTASSSVLSSPAADCGPAGSATTFTNPLLPLMSEQFKAKFPFGGLLDSAQASETSKLQQLVENIDKKATDPNECIICHRVLSCQSALKMHYRTHTGERPFKCKICGRAFTTKGNLKTHYSVHRAMPPLRVQHSCPICQKKFTNAVVLQQHIRMHMGGQIPNTPVPDSYSESMESDTGSFDEKNFDDLDNFSDENMEDCPEGSIPDTPKSADASQDSLSSSPLPLEMSSIAALENQMKMINAGLAEQLQASLKSVENGSIEGDVLTNDSSSVGGDMESQSAGSPAISESTSSMQALSPSNSTQEFHKSPSIEEKPQRAVPSEFANGLSPTPVNGGALDLTSSHAEKIIKEDSLGILFPFRDRGKFKNTACDICGKTFACQSALDIHYRSHTKERPFICTVCNRGFSTKGNLKQHMLTHQMRDLPSQLFEPSSNLGPNQNSAVIPANSLSSLIKTEVNGFVHVSPQDSKDTPTSHVPSGPLSSSATSPVLLPALPRRTPKQHYCNTCGKTFSSSSALQIHERTHTGEKPFACTICGRAFTTKGNLKVHMGTHMWNSTPARRGRRLSVDGPMTFLGGNPVKFPEMFQKDLAARSGSGDPSSFWNQYAAALSNGLAMKANEISVIQNGGIPPIPGSLGSGNSSPVSGLTGNLERLQNSEPNAPLAGLEKMASSENGTNFRFTRFVEDSKEIVTS

SEQ ID NO: 15596 - protein, 1007 aa, Homo sapiens
MSRRKQRKPQQLISDCEGPSASENGDASEEDHPQVCAKCCAQFTDPTEFLAHQNACSTDPPVMVIIGGQENPNNSSASSEPRPEGHNNPQVMDTEHSNPPDSGSSVPTDPTWGPERRGEESPGHFLVAATGTAAGGGGGLILASPKLGATPLPPESTPAPPPPPPPPPPPGVGSGHLNIPLILEELRVLQQRQIHQMQMTEQICRQVLLLGSLGQTVGAPASPSELPGTGTASSTKPLLPLFSPIKPVQTSKTLASSSSSSSSSSGAETPKQAFFHLYHPLGSQHPFSAGGVGRSHKPTPAPSPALPGSTDQLIASPHLAFPSTTGLLAAQCLGAARGLEATASPGLLKPKNGSGELSYGEVMGPLEKPGGRHKCRFCAKVFGSDSALQIHLRSHTGERPYKCNVCGNRFTTRGNLKVHFHRHREKYPHVQMNPHPVPEHLDYVITSSGLPYGMSVPPEKAEEEAATPGGGVERKPLVASTTALSATESLTLLSTSAGTATAPGLPAFNKFVLMKAVEPKNKADENTPPGSEGSAISGVAESSTATRMQLSKLVTSLPSWALLTNHFKSTGSFPFPYVLEPLGASPSETSKLQQLVEKIDRQGAVAVTSAASGAPTTSAPAPSSSASSGPNQCVICLRVLSCPRALRLHYGQHGGERPFKCKVCGRAFSTRGNLRAHFVGHKASPAARAQNSCPICQKKFTNAVTLQQHVRMHLGGQIPNGGTALPEGGGAAQENGSEQSTVSGAGSFPQQQSQQPSPEEELSEEEEEEDEEEEEDVTDEDSLAGRGSESGGEKAISVRGDSEEASGAEEEVGTVAAAATAGKEMDSNEKTTQQSSLPPPPPPDSLDQPQPMEQGSSGVLGGKEEGGKPERSSSPASALTPEGEATSVTLVEELSLQEAMRKEPGESSSRKACEVCGQAFPSQAALEEHQKTHPKEGPLFTCVFCRQGFLERATLKKHMLLAHHQVQPFAPHGPQNIAALSLVPGCSPSITSTGLSPFPRKDDPTIP

SEQ ID NO: 15597 - protein, 1300 aa, Homo sapiens
MSRRKQAKPQHLKSDEELLPPDGAPEHAAPGEGAEDADSGPESRSGGEETSVCEKCCAEFFKWADFLEHQRSCTKLPPVLIVHEDAPAPPPEDFPEPSPASSPSERAESEAAEEAGAEGAEGEARPVEKEAEPMDAEPAGDTRAPRPPPAAPAPPTPAYGAPSTNVTLEALLSTKVAVAQFSQGARAAGGSGAGGGVAAAAVPLILEQLMALQQQQIHQLQLIEQIRSQVALMQRPPPRPSLSPAAAPSAPGPAPSQLPGLAALPLSAGAPAAAIAGSGPAAPAAFEGAQPLSRPESGASTPGGPAEPSAPAAPSAAPAPAAPAPAPAPQSAASSQPQSASTPPALAPGSLLGAAPGLPSPLLPQTSASGVIFPNPLVSIAATANALDPLSALMKHRKGKPPNVSVFEPKASAEDPFFKHKCRFCAKVFGSDSALQIHLRSHTGERPFKCNICGNRFSTKGNLKVHFQRHKEKYPHIQMNPYPVPEYLDNVPTCSGIPYGMSLPPEKPVTTWLDSKPVLPTVPTSVGLQLPPTVPGAHGYADSPSATPASRSPQRPSPASSECASLSPGLNHVESGVSATAESPQSLLGGPPLTKAEPVSLPCTNARAGDAPVGAQASAAPTSVDGAPTSLGSPGLPAVSEQFKAQFPFGGLLDSMQTSETSKLQQLVENIDKKMTDPNQCVICHRVLSCQSALKMHYRTHTGERPFKCKICGRAFTTKGNLKTHFGVHRAKPPLRVQHSCPICQKKFTNAVVLQQHIRMHMGGQIPNTPLPEGFQDAMDSELAYDDKNAETLSSYDDDMDENSMEDDAELKDAATDPAKPLLSYAGSCPPSPPSVISSIAALENQMKMIDSVMSCQQLTGLKSVENGSGESDRLSNDSSSAVGDLESRSAGSPALSESSSSQALSPAPSNGESFRSKSPGLGAPEEPQEIPLKTERPDSPAAAPGSGGAPGRAGIKEEAPFSLLFLSRERGKCPSTVCGVCGKPFACKSALEIHYRSHTKERPFVCALCRRGCSTMGNLKQHLLTHRLKELPSQLFDPNFALGPSQSTPSLISSAAPTMIKMEVNGHGKAMALGEGPPLPAGVQVPAGPQTVMGPGLAPMLAPPPRRTPKQHNCQSCGKTFSSASALQIHERTHTGEKPFGCTICGRAFTTKGNLKVHMGTHMWNNAPARRGRRLSVENPMALLGGDALKFSEMFQKDLAARAMNVDPSFWNQYAAAITNGLAMKNNEISVIQNGGIPQLPVSLGGSALPPLGSMASGMDKARTGSSPPIVSLDKASSETAASRPFTRFIEDNKEIGIN

SEQ ID NO: 15598 - protein, 1053 aa, Homo sapiens
MSRRKQAKPQHINSEEDQGEQQPQQQTPEFADAAPAAPAAGELGAPVNHPGNDEVASEDEATVKRLRREETHVCEKCCAEFFSISEFLEHKKNCTKNPPVLIMNDSEGPVPSEDFSGAVLSHQPTSPGSKDCHRENGGSSEDMKEKPDAESVVYLKTETALPPTPQDISYLAKGKVANTNVTLQALRGTKVAVNQRSADALPAPVPGANSIPWVLEQILCLQQQQLQQIQLTEQIRIQVNMWASHALHSSGAGADTLKTLGSHMSQQVSAAVALLSQKAGSQGLSLDALKQAKLPHANIPSATSSLSPGLAPFTLKPDGTRVLPNVMSRLPSALLPQAPGSVLFQSPFSTVALDTSKKGKGKPPNISAVDVKPKDEAALYKHKCKYCSKVFGTDSSLQIHLRSHTGERPFVCSVCGHRFTTKGNLKVHFHRHPQVKANPQLFAEFQDKVAAGNGIPYALSVPDPIDEPSLSLDSKPVLVTTSVGLPQNLSSGTNPKDLTGGSLPGDLQPGPSPESEGGPTLPGVGPNYNSPRAGGFQGSGTPEPGSETLKLQQLVENIDKATTDPNECLICHRVLSCQSSLKMHYRTHTGERPFQCKICGRAFSTKGNLKTHLGVHRTNTSIKTQHSCPICQKKFTNAVMLQQHIRMHMGGQIPNTPLPENPCDFTGSEPMTVGENGSTGAICHDDVIESIDVEEVSSQEAPSSSSKVPTPLPSIHSASPTLGFAMMASLDAPGKVGPAPFNLQRQGSRENGSVESDGLTNDSSSLMGDQEYQSRSPDILETTSFQALSPANSQAESIKSKSPDAGSKAESSENSRTEMEGRSSLPSTFIRAPPTYVKVEVPGTFVGPSTLSPGMTPLLAAQPRRQAKQHGCTRCGKNFSSASALQIHERTHTGEKPFVCNICGRAFTTKGNLKVHYMTHGANNNSARRGRKLAIENTMALLGTDGKRVSEIFPKEILAPSVNVDPVVWNQYTSMLNGGLAVKTNEISVIQSGGVPTLPVSLGATSVVNNATVSKMDGSQSGISADVEKPSATDGVPKHQFPHFLEENKIAVS

SEQ ID NO: 15599 - protein, 763 aa, Homo sapiens; identical to SEQ ID NO: 11655

SEQ ID NO: 15600 - protein, 733 aa, Homo sapiens
MERRSESPCLRDSPDRRSGSPDVKGPPPVKVARLEQNGSPMGARGRPNGAVAKAVGGLMIPVFCVVEQLDGSLEYDNREEHAEFVLVRKDVLFSQLVETALLALGYSHSSAAQAQGIIKLGRWNPLPLSYVTDAPDATVADMLQDVYHVVTLKIQLQSCSKLEDLPAEQWNHATVRNALKELLKEMNQSTLAKECPLSQSMISSIVNSTYYANVSATKCQEFGRWYKKYKKIKVERVERENLSDYCVLGQRPMHLPNMNQLASLGKTNEQSPHSQIHHSTPIRNQVPALQPIMSPGLLSPQLSPQLVRQQIAMAHLINQQIAVSRLLAHQHPQAINQQFLNHPPIPRAVKPEPTNSSVEVSPDIYQQVRDELKRASVSQAVFARVAFNRTQGLLSEILRKEEDPRTASQSLLVNLRAMQNFLNLPEVERDRIYQDERERSMNPNVSMVSSASSSPSSSRTPQAKTSTPTTDLPIKVDGANINITAAIYDEIQQEMKRAKVSQALFAKVAANKSQGWLCELLRWKENPSPENRTLWENLCTIRRFLNLPQHERDVIYEEESRHHHSERMQHVVQLPPEPVQVLHRQQSQPAKESSPPREEAPPPPPPTEDSCAKKPRSRTKISLEALGILQSFIHDVGLYPDQEAIHTLSAQLDLPKHTIIKFFQNQRYHVKHHGKLKEHLGSAVDVAEYKDEELLTESEENDSEEGSEEMYKVEAEEENADKSKAAPAEIDQR

SEQ ID NO: 15601 - protein, 1400 aa, Homo sapiens
MMASFQRSNSHDKVRRIVAEEGRTARNLIAWSVPLESKDDDGKPKCQTGGKSKRTIQGTHKTTKQSTAVDCKITSSTTGDKHFDKSPTKTRHPRKIDLRARYWAFLFDNLRRAVDEIYVTCESDQSVVECKEVLMMLDNYVRDFKALIDWIQLQEKLEKTDAQSRPTSLAWEVKKMSPGRHVIPSPSTDRINVTSNARRSLNFGGSTGTVPAPRLAPTGVSWADKVKAHHTGSTASSEITPAQSCPPMTVQKASRKNERKDAEGWETVQRGRPIRSRSTAVMPKVSLATEATRSKDDSDKENVCLLPDESIQKGQFVGDGTSNTIESHPKDSLHSCDHPLAEKTQFTVSTLDDVKNSGSIRDNYVRTSEISAVHIDTECVSVMLQAGTPPLQVNEEKFPAEKARIENEMDPSDISNSMAEVLAKKEELADRLEKANEEAIASAIAEEEQLTREIEAEENNDINIETDNDSDFSASMGSGSVSFCGMSMDWNDVLADYEARESWRQNTSWGDIVEEEPARPPGHGIHMHEKLSSPSRKRTIAESKKKHEEKQMKAQQLREKLREEKTLKLQKLLEREKDVRKWKEELLDQRRRMMEEKLLHAEFKREVQLQAIVKKAQEEEAKVNEIAFINTLEAQNKRHDVLSKLKEYEQRLNELQEERQRRQEEKQARDEAVQERKRALEAERQARVEELLMKRKEQEARIEQQRQEKEKAREDAARERARDREERLAALTAAQQEAMEELQKKIQLKHDESIRRHMEQIEQRKEKAAELSSGRHANTDYAPKLTPYERKKQCSLCNVLISSEVYLFSHVKGRKHQQAVRENTSIQGRELSDEEVEHLSLKKYIIDIVVESTAPAEALKDGEERQKNKKKAKKIKARMNFRAKEYESLMETKNSGSDSPYKAKLQRLAKDLLKQVQVQDSGSWANNKVSALDRTLGEITRILEKENVADQIAFQAAGGLTALEHILQAVVPATNVNTVLRIPPKSLCNAINVYNLTCNNCSENCSDVLFSNKITFLMDLLIHQLTVYVPDENNTILGRNTNKQVFEGLTTGLLKVSAVVLGCLIANRPDGNCQPATPKIPTQEMKNKPSQGDPFNNRVQDLISYVVNMGLIDKLCACFLSVQGPVDENPKMAIFLQHAAGLLHAMCTLCFAVTGRSYSIFDNNRQDPTGLTAALQATDLAGVLHMLYCVLFHGTILDPSTASPKENYTQNTIQVAIQSLRFFNSFAALHLPAFQSIVGAEGLSLAFRHMASSLLGHCSQVSCESLLHEVIVCVGYFTVNHPDNQVIVQSGRHPTVLQKLCQLPFQYFSDPRLIKVLFPSLIAACYNNHQNKIILEQEMSCVLLATFIQDLAQTPGQAENQPYQPKGKCLGSQDYLELANRFPQQAWEEARQFFLKKEKK

SEQ ID NO: 15602 - protein, 348 aa, Homo sapiens
MPRSFLVKKVKLDAFSSADLESAYGRARSDLGAPLHDKGYLSDYVGPSSVYDGDAEAALLKGPSPEPMYAAAVRGELGPAAAGSAPPPTPRPELATAAGGYINGDAAVSEGYAADAFFITDGRSRRKASNAGSAAAPSTASAAAPDGDAGGGGGAGGRSLGSGPGGRGGTRAGAGTEARAGPGAAGAGGRHACGECGKTYATSSNLSRHKQTHRSLDSQLARRCPTCGKVYVSMPAMAMHLLTHDLRHKCGVCGKAFSRPWLLQGHMRSHTGEKPFGCAHCGKAFADRSNLRAHMQTHSAFKHFQCKRCKKSFALKSYLNKHYESACFKGGAGGPAAPAPPQLSPVQA

SEQ ID NO: 15603 - protein, 307 aa, Homo sapiens
MPRSFLVKKIKGDGFQCSGVPAPTYHPLETAYVLPGARGPPGDNGYAPHRLPPSSYDADQKPGLELAPAEPAYPPAAPEEYSDPESPQSSLSARYFRGEAAVTDSYSMDAFFISDGRSRRRRGGGGGDAGGSGDAGGAGGRAGRAGAQAGGGHRHACAECGKTYATSSNLSRHKQTHRSLDSQLARKCPTCGKAYVSMPALAMHLLTHNLRHKCGVCGKAFSRPWLLQGHMRSHTGEKPFGCAHCGKAFADRSNLRAHMQTHSAFKHYRCRQCDKSFALKSYLHKHCEAACAKAAEPPPPTPAGPAS

SEQ ID NO: 15604 - protein, 201 aa, Homo sapiens
MSFATLRPAPPGRYLYPEVSPLSEDEDRGSDSSGSDEKPCRVHAARCGLQGARRRAGGRRAGGGGPGGRPGREPRQRHTANARERDRTNSVNTAFTALRTLIPTEPADRKLSKIETLRLASSYISHLGNVLLAGEACGDGQPCHSGPAFFHAARAGSPPPPPPPPPARDGENTQPKQICTFCLSNQRKLSKDRDRKTAIRS

SEQ ID NO: 15605 - protein, 216 aa, Homo sapiens
MGGSGVGTAWHGPLARPSGTLPFASSMPSPVDASSADGGSGLGSHRRKRTTFSKGQLLELERAFAAWPYPNISTHEHLAWVTCLPEAKVQVWFQKRWAKIIKNRKSGILSPGSECPQSSCSLPDTLQQPWDPQMPGQPPPSSGTPQRTSVCRHSSCPAPGLSPRQGWEGAKAVAPWGSAGASEVHPSLERATPQTSLGSLSDLIYALAIVVNVDHS

SEQ ID NO: 15606 - protein, 1596 aa, Homo sapiens
MESRETLSSSRQRGGESDFLPVSSAKPPAAPGCAGEPLLSTPGPGKGIPVGGERMEPEEEDELGSGRDVDSNSNADSEKWVAGDGLEEQEFSIKEANFTEGSLKLKIQTTKRAKKPPKNLENYICPPEIKITIKQSGDQKVSRAGKNSKATKEEERSHSKKKLLTASDLAASDLKGFQPQAYERPQKHSTLHYDTGLPQDFTGDTLKPKHQQKSSSQNHMDWSTNSDSGPVTQNCFISPESGRETASTSKIPALEPVASFAKAQGKKGSAGNTWSQLSNNNKDLLLGGVAPSPSSHSSPAPPSSSAECNGLQPLVDQDGGGTKEPPEPPTVGSKKKSSKKDVISQTIPNPDLDWVKNAQKAFDNTEGKREGYSADSAQEASPARQNVSSASNPENDSSHVRITIPIKAPSLDPTNHKRKKRQSIKAVVEKIMPEKALASGITMSSEVVNRILSNSEGNKKDPRVPKLSKMIENESPSVGLETGGNAEKVIPGGVSKPRKPPMVMTPPTCTDHSPSRKLPEIQHPKFAAKRRWTCSKPKPSTMLREAVMATSDKLMLEPPSAYPITPSSPLYTNTDSLTVITPVKKKRGRPKKQPLLTVETIHEGTSTSPVSPISREFPGTKKRKRRRNLAKLAQLVPGEDKPMSEMKFHKKVGKLGVLDKKTIKTINKMKTLKRKNILNQILSCSSSVALKAKAPPETSPGAAAIESKLGKQINVSKRGTIYIGKKRGRKPRAELPPPSEEPKTAIKHPRPVSSQPDVPAVPSNFQSLVASSPAAMHPLSTQLGGSNGNLSPASTETNFSELKTMPNLQPISALPTKTQKGIHSGTWKLSPPRLMANSPSHLCEIGSLKEITLSPVSESHSEETIPSDSGIGTDNNSTSDQAEKSSESRRRYSFDFCSLDNPEAIPSDTSTKNRHGHRQKHLIVDNFLAHESLKKPKHKRKRKSLQNRDDLQFLADLEELITKFQVFRISHRSYTFYHENPYPSIFRINFDHYYPVPYIQYDPLLYLRRTSDLKSKKKRGRPAKTNDTMTKVPFLQGFSYPIPSGSYYAPYGMPYTSMPMMNLGYYGQYPAPLYLSHTLGAASPFMRPTVPPPQFHTNSHVKMSGAAKHKAKHGVHLQGPVSMGLGDMQPSLNPPKVGSASLSSGRLHKRKHKHKHKHKEDRILGTHDNLSGLFAGKATGFSSHILSERLSSADKELPLVSEKNKHKEKQKHQHSEAGHKASKNNFEVDTLSTLSLSDAQHWTQAKEKGDLSSEPVDSCTKRYSGSGGDGGSTRSENLDVFSEMNPSNDKWDSDVSGSKRRSYEGFGTYREKDIQAFKMNRKERSSYDSSMSPGMPSPHLKVDQTAVHSKNEGSVPTMMTRKKPAAVDSVTIPPAPVLSLLAASAATSDAVGSSLKKRFKRREIEAIQCEVRKMCNYTKILSTKKNLDHVNKILKAKRLQRQSKTGNNFVKKRRGRPRKQPTQFDEDSRDQMPVLEKCIDLPSKRGQKPSLSPLVLEPAASQDTIMATIEAVIHMAREAPPLPPPPPPPLPPPPPPPLPPPPPLPKTPRGGKRKHKPQAPAQPPQQSPPQQPLPQEEEVKAKRQRKSRGSESEVLP

SEQ ID NO: 15607 - protein, 707 aa, Homo sapiens
MSRDRFRSRGGGGGGFHRRGGGGGRGGLHDFRSPPPGMGLNQNRGPMGPGPGQSGPKPPIPPPPPHQQQQQPPPQQPPPQQPPPHQPPPHPQPHQQQQPPPPPQDSSKPVVAQGPGPAPGVGSAPPASSSAPPATPPTSGAPPGSGPGPTPTPPPAVTSAPPGAPPPTPPSSGVPTTPPQAGGPPPPPAAVPGPGPGPKQGPGPGGPKGGKMPGGPKPGGGPGLSTPGGHPKPPHRGGGEPRGGRQHHPPYHQQHHQGPPPGGPGGRSEEKISDSEGFKANLSLLRRPGEKTYTQRCRLFVGNLPADITEDEFKRLFAKYGEPGEVFINKGKGFGFIKLESRALAEIAKAELDDTPMRGRQLRVRFATHAAALSVRNLSPYVSNELLEEAFSQFGPIERAVVIVDDRGRSTGKGIVEFASKPAARKAFERCSEGVFLLTTTPRPVIVEPLEQLDDEDGLPEKLAQKNPMYQKERETPPRFAQHGTFEYEYSQRWKSLDEMEKQQREQVEKNMKDAKDKLESEMEDAYHEHQANLLRQDLMRRQEELRRMEELHNQEMQKRKEMQLRQEEERRRREEEMMIRQREMEEQMRRQREESYSRMGYMDPRERDMRMGGGGAMNMGDPYGSGGQKFPPLGGGGGIGYEANPGVPPATMSGSMMGSDMRTERFGQGGAGPVGGQGPRGMGPGTPAGYGRGREEYEGPNKKPRF

SEQ ID NO: 15608 - protein, 292 aa, Homo sapiens
MEELTAFVSKSFDQKSKDGNGGGGGGGGKKDSITYREVLESGLARSRELGTSDSSLQDITEGGGHCPVHLFKDHVDNDKEKLKEFGTARVAEGIYECKEKREDVKSEDEDGQTKLKQRRSRTNFTLEQLNELERLFDETHYPDAFMREELSQRLGLSEARVQVWFQNRRAKCRKQENQMHKGVILGTANHLDACRVAPYVNMGALRMPFQQVQAQLQLEGVAHAHPHLHPHLAAHAPYLMFPPPPFGLPIASLAESASAAAVVAAAAKSNSKNSSIADLRLKARKHAEALGL

SEQ ID NO: 15609 - protein, 331 aa, Homo sapiens
MEELTAFVSKSFDQKVKEKKEAITYREVLESGPLRGAKEPTGCTEAGRDDRSSPAVRAAGGGGGGGGGGGGGGGGGGVGGGGAGGGAGGGRSPVRELDMGAAERSREPGSPRLTEVSPELKDRKEDAKGMEDEGQTKIKQRRSRTNFTLEQLNELERLFDETHYPDAFMREELSQRLGLSEARVQVWFQNRRAKCRKQENQLHKGVLIGAASQFEACRVAPYVNVGALRMPFQQDSHCNVTPLSFQVQAQLQLDSAVAHAHHHLHPHLAAHAPYMMFPAPPFGLPLATLAADSASAASVVAAAAAAKTTSKNSSIADLRLKAKKHAAALGL

SEQ ID NO: 15610 - protein, 766 aa, Homo sapiens
MKEKSKNAARTRREKENSEFYELAKLLPLPSAITSQLDKASIIRLTTSYLKMRVVFPEGLGEAWGHSSRTSPLDNVGRELGSHLLQTLDGFIFVVAPDGKIMYISETASVHLGLSQVELTGNSIYEYIHPADHDEMTAVLTAHQPYHSHFVQEYEIERSFFLRMKCVLAKRNAGLTCGGYKVIHCSGYLKIRQYSLDMSPFDGCYQNVGLVAVGHSLPPSAVTEIKLHSNMFMFRASLDMKLIFLDSRVAELTGYEPQDLIEKTLYHHVHGCDTFHLRCAHHLLLVKGQVTTKYYRFLAKHGGWVWVQSYATIVHNSRSSRPHCIVSVNYVLTDTEYKGLQLSLDQISASKPAFSYTSSSTPTMTDNRKGAKSRLSSSKSKSRTSPYPQYSGFHTERSESDHDSQWGGSPLTDTASPQLLDPADRPGSQHDASCAYRQFSDRSSLCYGFALDHSRLVEERHFHTQACEGGRCEAGRYFLGTPQAGREPWWGSRAALPLTKASPESREAYENSMPHIASVHRIHGRGHWDEDSVVSSPDPGSASESGDRYRTEQYQSSPHEPSKIETLIRATQQMIKEEENRLQLRKAPSDQLASINGAGKKHSLCFANYQQPPPTGEVCHGSALANTSPCDHIQQREGKMLSPHENDYDNSPTALSRISSPNSDRISKSSLILAKDYLHSDISPHQTAGDHPTVSPNCFGSHRQYFDKHAYTLTGYALEHLYDSETIRNYSLGCNGSHFDVTSHLRMQPDPAQGHKGTSVIITNGS

SEQ ID NO: 15611 - protein, 667 aa, Homo sapiens
MKEKSKNAAKTRREKENGEFYELAKLLPLPSAITSQLDKASIIRLTTSYLKMRAVFPEGLGDAWGQPSRAGPLDGVAKELGSHLLQTLDGFVFVVASDGKIMYISETASVHLGLSQVELTGNSIYEYIHPSDHDEMTAVLTAHQPLHHHLLQEYEIERSFFLRMKCVLAKRNAGLTCSGYKVIHCSGYLKIRQYMLDMSLYDSCYQIVGLVAVGQSLPPSAITEIKLYSNMFMFRASLDLKLIFLDSRVTEVTGYEPQDLIEKTLYHHVHGCDVFHLRYAHHLLLVKGQVTTKYYRLLSKRGGWVWVQSYATVVHNSRSSRPHCIVSVNYVLTEIEYKELQLSLEQVSTAKSQDSWRTALSTSQETRKLVKPKNTKMKTKLRTNPYPPQQYSSFQMDKLECGQLGNWRASPPASAAAPPELQPHSESSDLLYTPSYSLPFSYHYGHFPLDSHVFSSKKPMLPAKFGQPQGSPCEVARFFLSTLPASGECQWHYANPLVPSSSSPAKNPPEPPANTARHSLVPSYEAPAAAVRRFGEDTAPPSFPSCGHYREEPALGPAKAARQAARDGARLALARAAPECCAPPTPEAPGAPAQLPFVLLNYHRVLARRGPLGGAAPAASGLACAPGGPEAATGALRLRHPSPAATSPPGAPLPHYLGASVIITNGR

SEQ ID NO: 15612 - protein, 284 aa, Homo sapiens
MSMLPSFGFTQEQVACVCEVLQQGGNLERLGRFLWSLPACDHLHKNESVLKAKAVVAFHRGNFRELYKILESHQFSPHNHPKLQQLWLKAHYVEAEKLRGRPLGAVGKYRVRRKFPLPRTIWDGEETSYCFKEKSRGVLREWYAHNPYPSPREKRELAEATGLTTTQVSNWFKNRRQRDRAAEAKERENTENNNSSSNKQNQLSPLEGGKPLMSSSEEEFSPPQSPDQNSVLLLQGNMGHARSSNYSLPGLTASQPSHGLQTHQHQLQDSLLGPLTSSLVDLGS

SEQ ID NO: 15613 - protein, 291 aa, Homo sapiens
MSMLPTFGFTQEQVACVCEVLQQGGNIERLGRFLWSLPACEHLHKNESVLKAKAVVAFHRGNFRELYKILESHQFSPHNHAKLQQLWLKAHYIEAEKLRGRPLGAVGKYRVRRKFPLPRSIWDGEETSYCFKEKSRSVLREWYAHNPYPSPREKRELAEATGLTTTQVSNWFKNRRQRDRAAEAKERENNENSNSNSHNPLNGSGKSVLGSSEDEKTPSGTPDHSSSSPALLLSPPPPGLPSLHSLGHPPGPSAVPVPVPGGGGADPLQHHHGLQDSILNPMSANLVDLGS

SEQ ID NO: 15614 - protein, 332 aa, Homo sapiens
MVFRSPLDLYSSHFLLPNFADSHHRSILLASSGGGNGAGGGGGAGGGSGGGNGAGGGGAGGAGGGGGGGSRAPPEELSMFQLPTLNFSPEQVASVCETLEETGDIERLGRFLWSLPVAPGACEAINKHESILRARAVVAFHTGNFRDLYHILENHKFTKESHGKLQAMWLEAHYQEAEKLRGRPLGPVDKYRVRKKFPLPRTIWDGEQKTHCFKERTRSLLREWYLQDPYPNPSKKRELAQATGLTPTQVGNWFKNRRQRDRAAAAKNRLQHQAIGPSGMRSLAEPGCPTHGSAESPSTAASPTTSVSSLTERADTGTSILSVTSSDSECDV

SEQ ID NO: 15615 - protein, 781 aa, Homo sapiens
MSSSSPTGQIASAADIKQENGMESASEGQEAHREVAGGAAVGLSPPAPAPFPLEPGDAATAAARVSGEEGAVAAAAAGAAADQVQLHSELLGRHHHAAAAAAQTPLAFSPDHVACVCEALQQGGNLDRLARFLWSLPQSDLLRGNESLLKARALVAFHQGIYPELYSILESHSFESANHPLLQQLWYKARYTEAERARGRPLGAVDKYRLRRKFPLPRTIWDGEETVYCFKEKSRNALKELYKQNRYPSPAEKRHLAKITGLSLTQVSNWFKNRRQRDRNPSETQSKSESDGNPSTEDESSKGHEDLSPHPLSSSSDGITNLSLSSHMEPVYMQQIGNAKISLSSSGVLLNGSLVPASTSPVFLNGNSFIQGPSGVILNGLNVGNTQAVALNPPKMSSNIVSNGISMTDILGSTSQDVKEFKVLQSSANSATTTSYSPSVPVSFPGLIPSTEVKREGIQTVASQDGGSVVTFTTPVQINQYGIVQIPNSGANSQFLNGSIGFSPLQLPPVSVAASQGNISVSSSTSDGSTFTSESTTVQQGKVFLSSLAPSAVVYTVPNTGQTIGSVKQEGLERSLVFSQLMPVNQNAQVNANLSSENISGSGLHPLASSLVNVSPTHNFSLSPSTLLNPTELNRDIADSQPMSAPVASKSTVTSVSNTNYATLQNCSLITGQDLLSVPMTQAALGEIVPTAEDQVGHPSPAVHQDFVQEHRLVLQSVANMKENFLSNSESKATSSLMMLDSKSKYVLDGMVDTVCEDLETDKKELAKLQTVQLDEDMQDL

SEQ ID NO: 15616 - protein, 739 aa, Homo sapiens
MATLPAEPSAGPAAGGEAVAAAAATEEEEEEARQLLQTLQAAEGEAAAAAGAGAGAAAAGAEGPGSPGVPGSPPEAASEPPTGLRFSPEQVACVCEALLQAGHAGRLSRFLGALPPAERLRGSDPVLRARALVAFQRGEYAELYRLLESRPFPAAHHAFLQDLYLRARYHEAERARGRALGAVDKYRLRKKFPLPKTIWDGEETVYCFKERSRAALKACYRGNRYPTPDEKRRLATLTGLSLTQVSNWFKNRRQRDRTGAGGGAPCKSESDGNPTTEDESSRSPEDLERGAAPVSAEAAAQGSIFLAGTGPPAPCPASSSILVNGSFLAASGSPAVLLNGGPVIINGLALGEASSLGPLLLTGGGGAPPPQPSPQGASETKTSLVLDPQTGEVRLEEAQSEAPETKGAQVAAPGPALGEEVLGPLAQVVPGPPTAATFPLPPGPVPAVAAPQVVPLSPPPGYPTGLSPTSPLLNLPQVVPTSQVVTLPQAVGPLQLLAAGPGSPVKVAAAAGPANVHLINSGVGVTALQLPSATAPGNFLLANPVSGSPIVTGVALQQGKIILTATFPTSMLVSQVLPPAPGLALPLKPETAISVPEGGLPVAPSPALPEAHALGTLSAQQPPPAAATTSSTSLPFSPDSPGLLPNFPAPPPEGLMLSPAAVPVWSAGLELSAGTEGLLEAEKGLGTQAPHTVLRLPDPDPEGLLLGATAGGEVDEGLEAEAKVLTQLQSVPVEEPLEL

SEQ ID NO: 15617 - protein, 246 aa, Homo sapiens
MFQLPILNFSPQQVAGVCETLEESGDVERLGRFLWSLPVAPAACEALNKNESVLRARAIVAFHGGNYRELYHILENHKFTKESHAKLQALWLEAHYQEAEKLRGRPLGPVDKYRVRKKFPLPRTIWDGEQKTHCFKERTRHLLREWYLQDPYPNPSKKRELAQATGLTPTQVGNWFKNRRQRDRAAAAKNRLQQQVLSQGSGRALRAEGDGTPEVLGVATSPAASLSSKAATSAISITSSDSECDI

SEQ ID NO: 15618 - protein, 728 aa, Homo sapiens
MEAAAGGRGCFQPHPGLQKTLEQFHLSSMSSLGGPAAFSARWAQEAYKKESAKEAGAAAVPAPVPAATEPPPVLHLPAIQPPPPVLPGPFFMPSDRSTERCETVLEGETISCFVVGGEKRLCLPQILNSVLRDFSLQQINAVCDELHIYCSRCTADQLEILKVMGILPFSAPSCGLITKTDAERLCNALLYGGAYPPPCKKELAASLALGLELSERSVRVYHECFGKCKGLLVPELYSSPSAACIQCLDCRLMYPPHKFVVHSHKALENRTCHWGFDSANWRAYILLSQDYTGKEEQARLGRCLDDVKEKFDYGNKYKRRVPRVSSEPPASIRPKTDDTSSQSPAPSEKDKPSSWLRTLAGSSNKSLGCVHPRQRLSAFRPWSPAVSASEKELSPHLPALIRDSFYSYKSFETAVAPNVALAPPAQQKVVSSPPCAAAVSRAPEPLATCTQPRKRKLTVDTPGAPETLAPVAAPEEDKDSEAEVEVESREEFTSSLSSLSSPSFTSSSSAKDLGSPGARALPSAVPDAAAPADAPSGLEAELEHLRQALEGGLDTKEAKEKFLHEVVKMRVKQEEKLSAALQAKRSLHQELEFLRVAKKEKLREATEAKRNLRKEIERLRAENEKKMKEANESRLRLKRELEQARQARVCDKGCEAGRLRAKYSAQIEDLQVKLQHAEADREQLRADLLREREAREHLEKVVKELQEQLWPRARPEAAGSEGAAELEP

SEQ ID NO: 15619 - protein, 684 aa, Homo sapiens
MENLQTNFSLVQGSTKKLNGMGDDGSPPAKKMITDIHANGKTINKVPTVKKEHLDDYGEAPVETDGEHVKRTCTSVPETLHLNPSLKHTLAQFHLSSQSSLGGPAAFSARHSQESMSPTVFLPLPSPQVLPGPLLIPSDSSTELTQTVLEGESISCFQVGGEKRLCLPQVLNSVLREFTLQQINTVCDELYIYCSRCTSDQLHILKVLGILPFNAPSCGLITLTDAQRLCNALLRPRTFPQNGSVLPAKSSLAQLKETGSAFEVEHECLGKCQGLFAPQFYVQPDAPCIQCLECCGMFAPQTFVMHSHRSPDKRTCHWGFESAKWHCYLHVNQKYLGTPEEKKLKIILEEMKEKFSMRSGKRNQSKTDAPSGMELQSWYPVIKQEGDHVSQTHSFLHPSYYLYMCDKVVAPNVSLTSAVSQSKELTKTEASKSISRQSEKAHSSGKLQKTVSYPDVSLEEQEKMDLKTSRELCSRLDASISNNSTSKRKSESATCNLVRDINKVGIGLVAAASSPLLVKDVICEDDKGKIMEEVMRTYLKQQEKLNLILQKKQQLQMEVKMLSSSKSMKELTEEQQNLQKELESLQNEHAQRMEEFYVEQKDLEKKLEQIMKQKCTCDSNLEKDKEAEYAGQLAELRQRLDHAEADRQELQDELRQEREARQKLEMMIKELKLQILKSSKTAKE

SEQ ID NO: 15620 - protein, 965 aa, Homo sapiens
MALLCGLGQVTLRIWVSLPSQSENGIGFLAARAFLRSGGMEALTTQLGPGREGSSSPNSKQELQPYSGSSALKPNQVGETSLYGVPIVSLVIDGQERLCLAQISNTLLKNYSYNEIHNRRVALGITCVQCTPVQLEILRRAGAMPISSRRCGMITKREAERLCKSFLGEHKPPKLPENFAFDVVHECAWGSRGSFIPARYNSSRAKCIKCGYCSMYFSPNKFIFHSHRTPDAKYTQPDAANFNSWRRHLKLSDKSATDELSHAWEDVKAMFNGGTRKRTFSLQGGGGGGANGGSGGQGKGGAGGGGGGGPGCGAEMAPGPPPHKSLRCGEDEAAGPPGPPPPHPQRGLGLATGASGPAGPGGPGGGAGVRSYPVIPVPSKGFGLLQKLPPPLFPHPYGFPTAFGLCPKKDDPVLGAGEPKGGPGTGSGGGGAGTGGGAGGPGASHLPPGAGAGPGGGAMFWGHQPSGAAKDAAAVAAAAAAATVYPTFPMFWPAAGSLPVPSYPAAQSQAKAVAAAVAAAAAAAAAAAGSGAPEPLDGAEPAKESGLGAEERCPSALSRGPLDEDGTDEALPPPLAPLPPPPPPPARKGSYVSAFRPVVKDTESIAKLYGSAREAYGAGPARGPGPGAGSGGYVSPDFLSEGSSSYNSASPDVDTADEPEVDVESNRFPDDEDAQEETEPSAPSAGGGPDGEQPTGPPSATSSGADGPANSPDGGSPRPRRRLGPPPAGRPAFGDLAAEDLVRRPERSPPSGGGGYELREPCGPLGGPAPAKVFAPERDEHVKSAAVALGPAASYVCTPEAHEPDKEDNHSPADDLETRKSYPDQRSISQPSPANTDRGEDGLTLDVTGTHLVEKDIENLAREELQKLLLEQMELRKKLEREFQSLKDNFQDQMKRELAYREEMVQQLQIVRDTLCNELDQERKARYAIQQKLKEAHDALHHFSCKMLTPRHCTGNCSFKPPLLP

SEQ ID NO: 15621 - protein, 1001 aa, Homo sapiens
MASSPLPGPNDILLASPSSAFQPDTLSQPRPGHANLKPNQVGQVILYGIPIVSLVIDGQERLCLAQISNTLLKNFSYNEIHNRRVALGITCVQCTPVQLEILRRAGAMPISSRRCGMITKREAERLCKSFLGENRPPKLPDNFAFDVSHECAWGCRGSFIPARYNSSRAKCIKCSYCNMYFSPNKFIFHSHRTPDAKYTQPDAANFNSWRRHLKLTDKSPQDELVFAWEDVKAMFNGGSRKRALPQPGAHPACHPLSSVKAAAVAAAAAVAGGGGLLGPHLLGAPPPPPPPPPPLAELAGAPHAHHKRPRFDDDDDSLQEAAVVAAASLSAAAASLSVAAASGGAGTGGGGAGGGCVAGVGVGAGAGAGAGAGAKGPRSYPVIPVPSKGSFGGVLQKFPGCGGLFPHPYTFPAAAAAFSLCHKKEDAGAAAEALGGAGAGGAGAAPKAGLSGLFWPAGRKDAFYPPFCMFWPPRTPGGLPVPTYLQPPPQPPSALGCALGESPALLRQAFLDLAEPGGAAGSAEAAPPPGQPPQVVANGPGSGPPPPAGGAGSRDALFESPPGGSGGDCSAGSTPPADSVAAAGAGAAAAGSGPAGSRVPAPHHPHLLEGRKAGGGSYHHSSAFRPVGGKDDAESLAKLHGASAGAPHSAQTHPHHHHHPHHHHHHHHPPQPPSPLLLLPPQPDEPGSERHHPAPPPPPPPPPPPPLAQHPHHRGLLSPGGTSCCYPSEDSSEDEDDEEEEQEVDVEGHKPPEGEEEEEGRDPDDDEEEDEETEVLLGDPLVGGGRFLQGRGPSEKGSSRDRAPAVAGAFPLGLNSSRLLQEDGKLGDPGSDLPPPPPPPLAPQKASGGGSSSPGSPVHHPSLEEQPSYKDSQKTKENNQVIVSTKDDNSFSDKNKEHSFFITDSDASGGDFWRERSGEHTQETNSPHSLKKDVENMGKEELQKVLFEQIDLRRRLEQEFQVLKGNTSFPVFNNFQDQMKRELAYREEMVQQLQIVSCIST

SEQ ID NO: 15622 - protein, 568 aa, Homo sapiens
MLPGLAAAAAHRCSWSSLCRLRLRCRAAACNPSDRQEWQNLVTFGSFSNMVPCSHPYIGTLSQVKLYSTNVQKEGQGSQTLRVEKVPSFETAEGIGTELKAPLKQEPLQVRVKAVLKKREYGSKYTQNNFITGVRAINEFCLKSSDLEQLRKIRRRSPHEDTESFTVYLRSDVEAKSLEVWGSPEALAREKKLRKEAEIEYRERLFRNQKILREYRDFLGNTKPRSRTASVFFKGPGKVVMVAICINGLNCFFKFLAWIYTGSASMFSEAIHSLSDTCNQGLLALGISKSVQTPDPSHPYGFSNMRYISSLISGVGIFMMGAGLSWYHGVMGLLHPQPIESLLWAYCILAGSLVSEGATLLVAVNELRRNARAKGMSFYKYVMESRDPSTNVILLEDTAAVLGVIIAATCMGLTSITGNPLYDSLGSLGVGTLLGMVSAFLIYTNTEALLGRSIQPEQVQRLTELLENDPSVRAIHDVKATDLGLGKVRFKAEVDFDGRVVTRSYLEKQDFDQMLQEIQEVKTPEELETFMLKHGENIIDTLGAEVDRLEKELKKRNPEVRHVDLEIL

SEQ ID NO: 15623 - protein, 465 aa, Homo sapiens
MNVTSLFSFTSPAVKRLLGWKQGDEEEKWAEKAVDALVKKLKKKKGAMEELEKALSCPGQPSNCVTIPRSLDGRLQVSHRKGLPHVIYCRVWRWPDLQSHHELKPLECCEFPFGSKQKEVCINPYHYKRVESPVLPPVLVPRHSEYNPQHSLLAQFRNLGQNEPHMPLNATFPDSFQQPNSHPFPHSPNSSYPNSPGSSSSTYPHSPTSSDPGSPFQMPADTPPPAYLPPEDPMTQDGSQPMDTNMMAPPLPSEINRGDVQAVAYEEPKHWCSIVYYELNNRVGEAFHASSTSVLVDGFTDPSNNKNRFCLGLLSNVNRNSTIENTRRHIGKGVHLYYVGGEVYAECLSDSSIFVQSRNCNYHHGFHPTTVCKIPSGCSLKIFNNQEFAQLLAQSVNHGFETVYELTKMCTIRMSFVKGWGAEYHRQDVTSTPCWIEIHLHGPLQWLDKVLTQMGSPHNPISSVS

SEQ ID NO: 15624 - protein, 467 aa, Homo sapiens
MSSILPFTPPVVKRLLGWKKSAGGSGGAGGGEQNGQEEKWCEKAVKSLVKKLKKTGRLDELEKAITTQNCNTKCVTIPSTCSEIWGLSTPNTIDQWDTTGLYSFSEQTRSLDGRLQVSHRKGLPHVIYCRLWRWPDLHSHHELKAIENCEYAFNLKKDEVCVNPYHYQRVETPVLPPVLVPRHTEILTELPPLDDYTHSIPENTNFPAGIEPQSNYIPETPPPGYISEDGETSDQQLNQSMDTGSPAELSPTTLSPVNHSLDLQPVTYSEPAFWCSIAYYELNQRVGETFHASQPSLTVDGFTDPSNSERFCLGLLSNVNRNATVEMTRRHIGRGVRLYYIGGEVFAECLSDSAIFVQSPNCNQRYGWHPATVCKIPPGCNLKIFNNQEFAALLAQSVNQGFEAVYQLTRMCTIRMSFVKGWGAEYRRQTVTSTPCWIELHLNGPLQWLDKVLTQMGSPSVRCSSMS

SEQ ID NO: 15625 - protein, 425 aa, Homo sapiens
MSSILPFTPPIVKRLLGWKKGEQNGQEEKWCEKAVKSLVKKLKKTGQLDELEKAITTQNVNTKCITIPRSLDGRLQVSHRKGLPHVIYCRLWRWPDLHSHHELRAMELCEFAFNMKKDEVCVNPYHYQRVETPVLPPVLVPRHTEIPAEFPPLDDYSHSIPENTNFPAGIEPQSNIPETPPPGYLSEDGETSDHQMNHSMDAGSPNLSPNPMSPAHNNLDLQPVTYCEPAFWCSISYYELNQRVGETFHASQPSMTVDGFTDPSNSERFCLGLLSNVNRNAAVELTRRHIGRGVRLYYIGGEVFAECLSDSAIFVQSPNCNQRYGWHPATVCKIPPGCNLKIFNNQEFAALLAQSVNQGFEAVYQLTRMCTIRMSFVKGWGAEYRRQTVTSTPCWIELHLNGPLQWLDKVLTQMGSPSIRCSSVS

SEQ ID NO: 15626 - protein, 552 aa, Homo sapiens
MDNMSITNTPTSNDACLSIVHSLMCHRQGGESETFAKRAIESLVKKLKEKKDELDSLITAITTNGAHPSKCVTIQRTLDGRLQVAGRKGFPHVIYARLWRWPDLHKNELKHVKYCQYAFDLKCDSVCVNPYHYERVVSPGIDLSGLTLQSNAPSSMMVKDEYVHDFEGQPSLSTEGHSIQTIQHPPSNRASTETYSTPALLAPSESNATSTANFPNIPVASTSQPASILGGSHSEGLLQIASGPQPGQQQNGFTGQPATYHHNSTTTWTGSRTAPYTPNLPHHQNGHLQHHPPMPPHPGHYWPVHNELAFQPPISNHPAPEYWCSIAYFEMDVQVGETFKVPSSCPIVTVDGYVDPSGGDRFCLGQLSNVHRTEAIERARLHIGKGVQLECKGEGDVWVRCLSDHAVFVQSYYLDREAGRAPGDAVHKIYPSAYIKVFDLRQCHRQMQQQAATAQAAAAAQAAAVAGNIPGPGSVGGIAPAISLSAAAGIGVDDLRRLCILRMSFVKGWGPDYPRQSIKETPCWIEIHLHRALQLLDEVLHTMPIADPQPLD

SEQ ID NO: 15627 - protein, 465 aa, Homo sapiens
MTSMASLFSFTSPAVKRLLGWKQGDEEEKWAEKAVDALVKKLKKKKGAMEELEKALSSPGQPSKCVTIPRSLDGRLQVSHRKGLPHVIYCRVWRWPDLQSHHELKPLDICEFPFGSKQKEVCINPYHYKRVESPVLPPVLVPRHNEFNPQHSLLVQFRNLSHNEPHMPQNATFPDSFHQPNNTPFPLSPNSPYPPSPASSTYPNSPASSGPGSPFQLPADTPPPAYMPPDDQMGQDNSQPMDTSNNMIPQIMPSISSRDVQPVAYEEPKHWCSIVYYELNNRVGEAFHASSTSVLVDGFTDPSNNKSRFCLGLLSNVNRNSTIENTRRHIGKGVHLYYVGGEVYAECLSDSSIFVQSRNCNFHHGFHPTTVCKIPSSCSLKIFNNQEFAQLLAQSVNHGFEAVYELTKMCTIRMSFVKGWGAEYHRQDVTSTPCWIEIHLHGPLQWLDKVLTQMGSPLNPISSVS

SEQ ID NO: 15628 - protein, 496 aa, Homo sapiens
MFRSKRSGLVRRLWRSRVVPDREEGGSGGGGGGDEDGSLGSRAEPAPRAREGGGCGRSEVRPVAPRRPRDAVGQRGAQGAGRRRRAGGPPRPMSEPGAGAGSSLLDVAEPGGPGWLPESDCETVTCCLFSERDAAGAPRDASDPLAGAALEPAGGGRSREARSRLLLLEQELKTVTYSLLKRLKERSLDTLLEAVESRGGVPGGCVLVPRADLRLGGQPAPPQLLLGRLFRWPDLQHAVELKPLCGCHSFAAAADGPTVCCNPYHFSRLCGPESPPPPYSRLSPRDEYKPLDLSDSTLSYTETEATNSLITAPGEFSDASMSPDATKPSHWCSVAYWEHRTRVGRLYAVYDQAVSIFYDLPQGSGFCLGQLNLEQRSESVRRTRSKIGFGILLSKEPDGVWAYNRGEHPIFVNSPTLDAPGGRALVVRKVPPGYSIKVFDFERSGLQHAPEPDAADGPYDPNSVRISFAKGWGPCYSRQFITSCPCWLEILLNNPR

SEQ ID NO: 15629 - protein, 426 aa, Homo sapiens
MFRTKRSALVRRLWRSRAPGGEDEEEGAGGGGGGGELRGEGATDSRAHGAGGGGPGRAGCCLGKAVRGAKGHHHPHPPAAGAGAAGGAEADLKALTHSVLKKLKERQLELLLQAVESRGGTRTACLLLPGRLDCRLGPGAPAGAQPAQPPSSYSLPLLLCKVFRWPDLRHSSEVKRLCCCESYGKINPELVCCNPHHLSRLCELESPPPPYSRYPMDFLKPTADCPDAVPSSAETGGTNYLAPGGLSDSQLLLEPGDRSHWCVVAYWEEKTRVGRLYCVQEPSLDIFYDLPQGNGFCLGQLNSDNKSQLVQKVRSKIGCGIQLTREVDGVWVYNRSSYPIFIKSATLDNPDSRTLLVHKVFPGFSIKAFDYEKAYSLQRPNDHEFMQQPWTGFTVQISFVKGWGQCYTRQFISSCPCWLEVIFNSR

SEQ ID NO: 15630 - protein, 467 aa, Homo sapiens
MHSTTPISSLFSFTSPAVKRLLGWKQGDEEEKWAEKAVDSLVKKLKKKKGAMDELERALSCPGQPSKCVTIPRSLDGRLQVSHRKGLPHVIYCRVWRWPDLQSHHELKPLECCEFPFGSKQKEVCINPYHYRRVETPVLPPVLVPRHSEYNPQLSLLAKFRSASLHSEPLMPHNATYPDSFQQPPCSALPPSPSHAFSQSPCTASYPHSPGSPSEPESPYQHSVDTPPLPYHATEASETQSGQPVDATADRHVVLSIPNGDFRPVCYEEPQHWCSVAYYELNNRVGETFQASSRSVLIDGFTDPSNNRNRFCLGLLSNVNRNSTIENTRRHIGKGVHLYYVGGEVYAECVSDSSIFVQSRNCNYQHGFHPATVCKIPSGCSLKVFNNQLFAQLLAQSVHHGFEVVYELTKMCTIRMSFVKGWGAEYHRQDVTSTPCWIEIHLHGPLQWLDKVLTQMGSPHNPISSVS

SEQ ID NO: 15631 - protein, 1054 aa, Homo sapiens
MEQDTAAVAATVAAADATATIVVIEDEQPGPSTSQEEGAAAAATEATAATEKGEKKKEKNVSSFQLKLAAKAPKSEKEMDPEYEEKMKADRAKRFEFLLKQTELFAHFIQPSAQKSPTSPLNMKLGRPRIKKDEKQSLISAGDYRHRRTEQEEDEELLSESRKTSNVCIRFEVSPSYVKGGPLRDYQIRGLNWLISLYENGVNGILADEMGLGKTLQTIALLGYLKHYRNIPGPHMVLVPKSTLHNWMNEFKRWVPSLRVICFVGDKDARAAFIRDEMMPGEWDVCVTSYEMVIKEKSVFKKFHWRYLVIDEAHRIKNEKSKLSEIVREFKSTNRLLLTGTPLQNNLHELWALLNFLLPDVFNSADDFDSWFDTKNCLGDQKLVERLHAVLKPFLLRRIKTDVEKSLPPKKEIKIYLGLSKMQREWYTKILMKDIDVLNSSGKMDKMRLLNILMQLRKCCNHPYLFDGAEPGPPYTTDEHIVSNSGKMVVLDKLLAKLKEQGSRVLIFSQMTRLLDILEDYCMWRGYEYCRLDGQTPHEEREDKFLEVEFLGQREAIEAFNAPNSSKFIFMLSTRAGGLGINLASADVVILYDSDWNPQVDLQAMDRAHRIGQKKPVRVFRLITDNTVEERIVERAEIKLRLDSIVIQQGRLIDQQSNKLAKEEMLQMIRHGATHVFASKESELTDEDITTILERGEKKTAEMNERLQKMGESSLRNFRMDIEQSLYKFEGEDYREKQKLGMVEWIEPPKRERKANYAVDAYFREALRVSEPKIPKAPRPPKQPNVQDFQFFPPRLFELLEKEILYYRKTIGYKVPRNPDIPNPALAQREEQKKIDGAEPLTPEETEEKEKLLTQGFTNWTKRDFNQFIKANEKYGRDDIDNIAREVEGKSPEEVMEYSAVFWERCNELQDIEKIMAQIERGEARIQRRISIKKALDAKIARYKAPFHQLRIQYGTSKGKNYTEEEDRFLICMLHKMGFDRENVYEELRQCVRNAPQFRFDWFIKSRTAMEFQRRCNTLISLIEKENMEIEERERAEKKKRATKTPMVKFSAFS

SEQ ID NO: 15632 - protein, 1590 aa, Homo sapiens; identical to SEQ ID NO: 12555

SEQ ID NO: 15633 - protein, 1647 aa, Homo sapiens
MSTPDPPLGGTPRPGPSPGPGPSPGAMLGPSPGPSPGSAHSMMGPSPGPPSAGHPIPTQGPGGYPQDNMHQMHKPMESMHEKGMSDDPRYNQMKGMGMRSGGHAGMGPPPSPMDQHSQGYPSPLGGSEHASSPVPASGPSSGPQMSSGPGGAPLDGADPQALGQQNRGPTPFNQNQLHQLRAQIMAYKMLARGQPLPDHLQMAVQGKRPMPGMQQQMPTLPPPSVSATGPGPGPGPGPGPGPGPAPPNYSRPHGMGGPNMPPPGPSGVPPGMPGQPPGGPPKPWPEGPMANAAAPTSTPQKLIPPQPTGRPSPAPPAVPPAASPVMPPQTQSPGQPAQPAPMVPLHQKQSRITPIQKPRGLDPVEILQEREYRLQARIAHRIQELENLPGSLAGDLRTKATIELKALRLLNFQRQLRQEVVVCMRRDTALETALNAKAYKRSKRQSLREARITEKLEKQQKIEQERKRRQKHQEYLNSILQHAKDFKEYHRSVTGKIQKLTKAVATYHANTEREQKKENERIEKERMRRLMAEDEEGYRKLIDQKKDKRLAYLLQQTDEYVANLTELVRQHKAAQVAKEKKKKKKKKKAENAEGQTPAIGPDGEPLDETSQMSDLPVKVIHVESGKILTGTDAPKAGQLEAWLEMNPGYEVAPRSDSEESGSEEEEEEEEEEQPQAAQPPTLPVEEKKKIPDPDSDDVSEVDARHIIENAKQDVDDEYGVSQALARGLQSYYAVAHAVTERVDKQSALMVNGVLKQYQIKGLEWLVSLYNNNLNGILADEMGLGKTIQTIALITYLMEHKRINGPFLIIVPLSTLSNWAYEFDKWAPSVVKVSYKGSPAARRAFVPQLRSGKFNVLLTTYEYIIKDKHILAKIRWKYMIVDEGHRMKNHHCKLTQVLNTHYVAPRRLLLTGTPLQNKLPELWALLNFLLPTIFKSCSTFEQWFNAPFAMTGEKVDLNEEETILIIRRLHKVLRPFLLRRLKKEVEAQLPEKVEYVIKCDMSALQRVLYRHMQAKGVLLTDGSEKDKKGKGGTKTLMNTIMQLRKICNHPYMFQHIEESFSEHLGFTGGIVQGLDLYRASGKFELLDRILPKLRATNHKVLLFCQMTSLMTIMEDYFAYRGFKYLRLDGTTKAEDRGMLLKTFNEPGSEYFIFLLSTRAGGLGLNLQSADTVIIFDSDWNPHQDLQAQDRAHRIGQQNEVRVLRLCTVNSVEEKILAAAKYKLNVDQKVIQAGMFDQKSSSHERRAFLQAILEHEEQDESRHCSTGSGSASFAHTAPPPAGVNPDLEEPPLKEEDEVPDDETVNQMIARHEEEFDLFMRMDLDRRREEARNPKRKPRLMEEDELPSWIIKDDAEVERLTCEEEEEKMFGRGSRHRKEVDYSDSLTEKQWLKAIEEGTLEEIEEEVRQKKSSRKRKRDSDAGSSTPTTSTRSRDKDDESKKQKKRGRPPAEKLSPNPPNLTKKMKKIVDAVIKYKDSSSGRQLSEVFIQLPSRKELPEYYELIRKPVDFKKIKERIRNHKYRSLNDLEKDVMLLCQNAQTFNLEGSLIYEDSIVLQSVFTSVRQKIEKEDDSEGEESEEEEEGEEEGSESESRSVKVKIKLGRKEKAQDRLKGGRRRPSRGSRAKPVVSDDDSEEEQEEDRSGSGSEED

SEQ ID NO: 15634 - protein, 1052 aa, Homo sapiens
MSSAAEPPPPPPPESAPSKPAASIASGGSNSSNKGGPEGVAAQAVASAASAGPADAEMEEIFDDASPGKQKEIQEPDPTYEEKMQTDRANRFEYLLKQTELFAHFIQPAAQKTPTSPLKMKPGRPRIKKDEKQNLLSVGDYRHRRTEQEEDEELLTESSKATNVCTRFEDSPSYVKWGKLRDYQVRGLNWLISLYENGINGILADEMGLGKTLQTISLLGYMKHYRNIPGPHMVLVPKSTLHNWMSEFKRWVPTLRSVCLIGDKEQRAAFVRDVLLPGEWDVCVTSYEMLIKEKSVFKKFNWRYLVIDEAHRIKNEKSKLSEIVREFKTTNRLLLTGTPLQNNLHELWSLLNFLLPDVFNSADDFDSWFDTNNCLGDQKLVERLHMVLRPFLLRRIKADVEKSLPPKKEVKIYVGLSKMQREWYTRILMKDIDILNSAGKMDKMRLLNILMQLRKCCNHPYLFDGAEPGPPYTTDMHLVTNSGKMVVLDKLLPKLKEQGSRVLIFSQMTRVLDILEDYCMWRNYEYCRLDGQTPHDERQDSINAYNEPNSTKFVFMLSTRAGGLGINLATADVVILYDSDWNPQVDLQAMDRAHRIGQTKTVRVFRFITDNTVEERIVERAEMKLRLDSIVIQQGRLVDQNLNKIGKDEMLQMIRHGATHVFASKESEITDEDIDGILERGAKKTAEMNEKLSKMGESSLRNFTMDTESSVYNFEGEDYREKQKIAFTEWIEPPKRERKANYAVDAYFREALRVSEPKAPKAPRPPKQPNVQDFQFFPPRLFELLEKEILFYRKTIGYKVPRNPELPNAAQAQKEEQLKIDEAESLNDEELEEKEKLLTQGFTNWNKRDFNQFIKANEKWGRDDIENIAREVEGKTPEEVIEYSAVFWERCNELQDIEKIMAQIERGEARIQRRISIKKALDTKIGRYKAPFHQLRISYGTNKGKNYTEEEDRFLICMLHKLGFDKENVYDELRQCIRNSPQFRFDWFLKSRTAMELQRRCNTLITLIERENMELEEKEKAEKKKRGPKPSTQKRKMDGAPDGRGRKKKLKL

SEQ ID NO: 15635 - protein, 1026 aa, Homo sapiens
MNLFNLDRFRFEKRNKIEEAPEATPQPSQPGPSSPISLSAEEENAEGEVSRANTPDSDITEKTEDSSVPETPDNERKASISYFKNQRGIQYIDLSSDSEDVVSPNCSNTVQEKTFNKDTVIIVSEPSEDEESQGLPTMARRNDDISELEDLSELEDLKDAKLQTLKELFPQRSDNDLLKLIESTSTMDGAIAAALLMFGDAGGGPRKRKLSSSSEPYEEDEFNDDQSIKKTRLDHGEESNESAESSSNWEKQESIVLKLQKEFPNFDKQELREVLKEHEWMYTEALESLKVFAEDQDMQYVSQSEVPNGKEVSSRSQNYPKNATKTKLKQKFSMKAQNGFNKKRKKNVFNPKRVVEDSEYDSGSDVGSSLDEDYSSGEEVMEDGYKGKILHFLQDASIGELTLIPQCSQKKAQKITELRPFNSWEALFTKMSKTNGLSEDLIWHCKTLIQERDVVIRLMNKCEDISNKLTKQVTMLTGNGGGWNIEQPSILNQSLSLKPYQKVGLNWLALVHKHGLNGILADEMGLGKTIQAIAFLAYLYQEGNNGPHLIVVPASTIDNWLREVNLWCPTLKVLCYYGSQEERKQIRFNIHSRYEDYNVIVTTYNCAISSSDDRSLFRRLKLNYAIFDEGHMLKNMGSIRYQHLMTINANNRLLLTGTPVQNNLLELMSLLNFVMPHMFSSSTSEIRRMFSSKTKSADEQSIYEKERIAHAKQIIKPFILRRVKEEVLKQLPPKKDRIELCAMSEKQEQLYLGLFNRLKKSINNLEKNTEMCNVMMQLRKMANHPLLHRQYYTAEKLKEMSQLMLKEPTHCEANPDLIFEDMEVMTDFELHVLCKQYRHINNFQLDMDLILDSGKFRVLGCILSELKQKGDRVVLFSQFTMMLDILEVLLKHHQHRYLRLDGKTQISERIHLIDEFNTDMDIFVFLLSTKAGGLGINLTSANVVILHDIDCNPYNDKQAEDRCHRVGQTKEVLVIKLISQGTIEESMLKINQQKLKLEQDMTTVDEGDEGSMPADIATLLKTSMGL

SEQ ID NO: 15636 - protein, 954 aa, Homo sapiens
MSLPLTEEQRKKIEENRQKALARRAEKLLAEQHQRTSSGTSIAGNPFQAKQGPSQNFPRESCKPVSHGVIFKQQNLSSSSNADQRPHDSHSFQAKGIWKKPEEMPTACPGHSPRSQMALTGISPPLAQSPPEVPKQQLLSYELGQGHAQASPEIRFTPFANPTHKPLAKPKSSQETPAHSSGQPPRDAKLEAKTAKASPSGQNISYIHSSSESVTPRTEGRLQQKSGSSVQKGVNSQKGKCVRNGDRFQVLIGYNAELIAVFKTLPSKNYDPDTKTWNFSMNDYSALMKAAQSLPTVNLQPLEWAYGSSESPSTSSEGQAGLPSAPSLSFVKGRCMLISRAYFEADISYSQDLIALFKQMDSRRYDVKTRKWSFLLEEHSKLIAKVRCLPQVQLDPLPTTLTLAFASQLKKTSLSLTPDVPEADLSEVDPKLVSNLMPFQRAGVNFAIAKGGRLLLADDMGLGKTIQAICIAAFYRKEWPLLVVVPSSVRFTWEQAFLRWLPSLSPDCINVVVTGKDRLTAGLINIVSFDLLSKLEKQLKTPFKVVIIDESHFLKNSRTARCRAAMPVLKVAKRVILLSGTPAMSRPAELYTQIIAVKPTFFPQFHAFGLRYCDAKRMPWGWDYSGSSNLGELKLLLEEAVMLRRLKSDVLSQLPAKQRKIVVIAPGRINARTRAALDAAAKEMTTKDKTKQQQKDALILFFNRTAEAKIPSVIEYILDLLESGREKFLVFAHHKVVLDAITQELERKHVQHIRIDGSTSSAEREDLCQQFQLSERHAVAVLSITAANMGLTFSSADLVVFAELFWNPGVLIQAEDRVHRIGQTSSVGIHYLVAKGTADDYLWPLIQEKIKVLAEAGLSETNFSEMTESTDYLYKDPKQQKIYDLFQKSFEKEGSDMELLEAAESFDPGSASGTSGSSSQNMGDTLDESSLTASPQKKRRFEFFDNWDSFTSPL

SEQ ID NO: 15637 - protein, 385 aa, Homo sapiens
MMMMALSKTFGQKPVKFQLEDDGEFYMIGSEVGNYLRMFRGSLYKRYPSLWRRLATVEERKKIVASSHGKKTKPNTKDHGYTTLATSVTLLKASEVEEILDGNDEKYKAVSISTEPPTYLREQKAKRNSQWVPTLPNSSHHLDAVPCSTTINRNRMGRDKKRTFPLCFDDHDPAVIHENASQPEVLVPIRLDMEIDGQKLRDAFTWNMNEKLMTPEMFSEILCDDLDLNPLTFVPAIASAIRQQIESYPTDSILEDQSDQRVIIKLNIHVGNISLVDQFEWDMSEKENSPEKFALKLCSELGLGGEFVTTIAYSIRGQLSWHQKTYAFSENPLPTVEIAIRNTGDADQWCPLLETLTDAEMEKKIRDQDRNTRRMRRLANTAPAW

SEQ ID NO: 15638 - protein, 1105 aa, Homo sapiens
MAAAAGGGGPGTAVGATGSGIAAAAAGLAVYRRKDGGPATKFWESPETVSQLDSVRVWLGKHYKKYVHADAPTNKTLAGLVVQLLQFQEDAFGKHVTNPAFTKLPAKCFMDFKAGGALCHILGAAYKYKNEQGWRRFDLQNPSRMDRNVEMFMNIEKTLVQNNCLTRPNIYLIPDIDLKLANKLKDIIKRHQGTFTDEKSKASHHIYPYSSSQDDEEWLRPVMRKEKQVLVHWGFYPDSYDTWVHSNDVDAEIEDPPIPEKPWKVHVKWILDTDIFNEWMNEEDYEVDENRKPVSFRQRISTKNEEPVRSPERRDRKASANARKRKHSPSPPPPTPTESRKKSGKKGQASLYGKRRSQKEEDEQEDLTKDMEDPTPVPNIEEVVLPKNVNLKKDSENTPVKGGTVADLDEQDEETVTAGGKEDEDPAKGDQSRSVDLGEDNVTEQTNHIIIPSYASWFDYNCIHVIERRALPEFFNGKNKSKTPEIYLAYRNFMIDTYRLNPQEYLTSTACRRNLTGDVCAVMRVHAFLEQWGLVNYQVDPESRPMAMGPPPTPHFNVLADTPSGLVPLHLRSPQVPAAQQMLNFPEKNKEKPVDLQNFGLRTDIYSKKTLAKSKGASAGREWTEQETLLLLEALEMYKDDWNKVSEHVGSRTQDECILHFLRLPIEDPYLENSDASLGPLAYQPVPFSQSGNPVMSTVAFLASVVDPRVASAAAKAALEEFSRVREEVPLELVEAHVKKVQEAARASGKVDPTYGLESSCIAGTGPDEPEKLEGAEEEKMEADPDGQQPEKAENKVENETDEGDKAQDGENEKNSEKEQDSEVSEDTKSEEKETEENKELTDTCKERESDTGKKKVEHEISEGNVATAAAAALASAATKAKHLAAVEERKIKSLVALLVETQMKKLEIKLRHFEELETIMDREKEALEQQRQQLLTERQNFHMEQLKYAELRARQQMEQQQHGQNPQQAHQHSGGPGLAPLGAAGHPGMMPHQQPPPYPLMHHQMPPPHPPQPGQIPGPGSMMPGQHMPGRMIPTVAANIHPSGSGPTPPGMPPMPGNILGPRVPLTAPNGMYPPPPQQQPPPPPPADGVPPPPAPGPPASAAP

SEQ ID NO: 15639 - protein, 1214 aa, Homo sapiens
MAVRKKDGGPNVKYYEAADTVTQFDNVRLWLGKNYKKYIQAEPPTNKSLSSLVVQLLQFQEEVFGKHVSNAPLTKLPIKCFLDFKAGGSLCHILAAAYKFKSDQGWRRYDFQNPSRMDRNVEMFMTIEKSLVQNNCLSRPNIFLCPEIEPKLLGKLKDIIKRHQGTVTEDKNNASHVVYPVPGNLEEEEWVRPVMKRDKQVLLHWGYYPDSYDTWIPASEIEASVEDAPTPEKPRKVHAKWILDTDTFNEWMNEEDYEVNDDKNPVSRRKKISAKTLTDEVNSPDSDRRDKKGGNYKKRKRSPSPSPTPEAKKKNAKKGPSTPYTKSKRGHREEEQEDLTKDMDEPSPVPNVEEVTLPKTVNTKKDSESAPVKGGTMTDLDEQEDESMETTGKDEDENSTGNKGEQTKNPDLHEDNVTEQTHHIIIPSYAAWFDYNSVHAIERRALPEFFNGKNKSKTPEIYLAYRNFMIDTYRLNPQEYLTSTACRRNLAGDVCAIMRVHAFLEQWGLINYQVDAESRPTPMGPPPTSHFHVLADTPSGLVPLQPKTPQQTSASQQMLNFPDKGKEKPTDMQNFGLRTDMYTKKNVPSKSKAAASATREWTEQETLLLLEALEMYKDDWNKVSEHVGSRTQDECILHFLRLPIEDPYLEDSEASLGPLAYQPIPFSQSGNPVMSTVAFLASVVDPRVASAAAKSALEEFSKMKEEVPTALVEAHVRKVEEAAKVTGKADPAFGLESSGIAGTTSDEPERIEESGNDEARVEGQATDEKKEPKEPREGGGAIEEEAKEKTSEAPKKDEEKGKEGDSEKESEKSDGDPIVDPEKEKEPKEGQEEVLKEVVESEGERKTKVERDIGEGNLSTAAAAALAAAAVKAKHLAAVEERKIKSLVALLVETQMKKLEIKLRHFEELETIMDREREALEYQRQQLLADRQAFHMEQLKYAEMRARQQHFQQMHQQQQQPPPALPPGSQPIPPTGAAGPPAVHGLAVAPASVVPAPAGSGAPPGSLGPSEQIGQAGSTAGPQQQQPAGAPQPGAVPPGVPPPGPHGPSPFPNQQTPPSMMPGAVPGSGHPGVAGNAPLGLPFGMPPPPPPPAPSIIPFGSLADSISINLPAPPNLHGHHHHLPFAPGTLPPPNLPVSMANPLHPNLPATTTMPSSLPLGPGLGSAAAQSPAIVAAVQGNLLPSASPLPDPGTPLPPDPTAPSPGTVTPVPPPQ

SEQ ID NO: 15640 - protein, 515 aa, Homo sapiens
MAARAGFQSVAPSGGAGASGGAGAAAALGPGGTPGPPVRMGPAPGQGLYRSPMPGAAYPRPGMLPGSRMTPQGPSMGPPGYGGNPSVRPGLAQSGMDQSRKRPAPQQIQQVQQQAVQNRNHNAKKKKMADKILPQRIRELVPESQAYMDLLAFERKLDQTIMRKRLDIQEALKRPIKQKRKLRIFISNTFNPAKSDAEDGEGTVASWELRVEGRLLEDSALSKYDATKQKRKFSSFFKSLVIELDKDLYGPDNHLVEWHRTATTQETDGFQVKRPGDVNVRCTVLLMLDYQPPQFKLDPRLARLLGIHTQTRPVIIQALWQYIKTHKLQDPHEREFVICDKYLQQIFESQRMKFSEIPQRLHALLMPPEPIIINHVISVDPNDQKKTACYDIDVEVDDTLKTQMNSFLLSTASQQEIATLDNKIHETIETINQLKTQREFMLSFARDPQGFINDWLQSQCRDLKTMTDVVGNPEEERRAEFYFQPWAQEAVCRYFYSKVQQRRQELEQALGIRNT

SEQ ID NO: 15641 - protein, 531 aa, Homo sapiens
MSGRGAGGFPLPPLSPGGGAVAAALGAPPPPAGPGMLPGPALRGPGPAGGVGGPGAAAFRPMGPAGPAAQYQRPGMSPGNRMPMAGLQVGPPAGSPFGAAAPLRPGMPPTMMDPFRKRLLVPQAQPPMPAQRRGLKRRKMADKVLPQRIRELVPESQAYMDLLAFERKLDQTIARKRMEIQEAIKKPLTQKRKLRIYISNTFSPSKAEGDSAGTAGTPGGTPAGDKVASWELRVEGKLLDDPSKQKRKFSSFFKSLVIELDKELYGPDNHLVEWHRMPTTQETDGFQVKRPGDLNVKCTLLLMLDHQPPQYKLDPRLARLLGVHTQTRAAIMQALWLYIKHNQLQDGHEREYINCNRYFRQIFSCGRLRFSEIPMKLAGLLQHPDPIVINHVISVDPNDQKKTACYDIDVEVDDPLKAQMSNFLASTTNQQEIASLDVKIHETIESINQLKTQRDFMLSFSTDPQDFIQEWLRSQRRDLKIITDVIGNPEEERRAAFYHQPWAQEAVGRHIFAKVQQRRQELEQVLGIRLT

SEQ ID NO: 15642 - protein, 483 aa, Homo sapiens
MAADEVAGGARKATKSKLFEFLVHGVRPGMPSGARMPHQGAPMGPPGSPYMGSPAVRPGLAPAGMEPARKRAAPPPGQSQAQSQGQPVPTAPARSRSAKRRKMADKILPQRIRELVPESQAYMDLLAFERKLDQTIMRKRVDIQEALKRPMKQKRKLRLYISNTFNPAKPDAEDSDGSIASWELRVEGKLLDDPSKQKRKFSSFFKSLVIELDKDLYGPDNHLVEWHRTPTTQETDGFQVKRPGDLSVRCTLLLMLDYQPPQFKLDPRLARLLGLHTQSRSAIVQALWQYVKTNRLQDSHDKEYINGDKYFQQIFDCPRLKFSEIPQRLTALLLPPDPIVINHVISVDPSDQKKTACYDIDVEVEEPLKGQMSSFLLSTANQQEISALDSKIHETIESINQLKIQRDFMLSFSRDPKGYVQDLLRSQSRDLKVMTDVAGNPEEERRAEFYHQPWSQEAVSRYFYCKIQQRRQELEQSLVVRNT

SEQ ID NO: 15643 - protein, 411 aa, Homo sapiens
MSKRPSYAPPPTPAPATQMPSTPGFVGYNPYSHLAYNNYRLGGNPGTNSRVTASSGITIPKPPKPPDKPLMPYMRYSRKVWDQVKASNPDLKLWEIGKIIGGMWRDLTDEEKQEYLNEYEAEKIEYNESMKAYHNSPAYLAYINAKSRAEAALEEESRQRQSRMEKGEPYMSIQPAEDPDDYDDGFSMKHTATARFQRNHRLISEILSESVVPDVRSVVTTARMQVLKRQVQSLMVHQRKLEAELLQIEERHQEKKRKFLESTDSFNNELKRLCGLKVEVDMEKIAAEIAQAEEQARKRQEEREKEAAEQAERSQSSIVPEEEQAANKGEEKKDDENIPMETEETHLEETTESQQNGEEGTSTPEDKESGQEGVDSMAEEGTSDSNTGSESNSATVEEPPTDPIPEDEKKE

SEQ ID NO: 15644 - protein, 264 aa, Homo sapiens
MPRSFLVRKPSDPNRKPNYSELQDSNPEFTFQQPYDQAHLLAAIPPPEILNPTASLPMLIWDSVLAPQAQPIAWASLRLQESPRVAELTSLSDEDSGKGSQPPSPPSPAPSSFSSTSVSSLEAEAYAAFPGLGQVPKQLAQLSEAKDLQARKAFNCKYCNKEYLSLGALKMHIRSHTLPCVCGTCGKAFSRPWLLQGHVRTHTGEKPFSCPHCSRAFADRSNLRAHLQTHSDVKKYQCQACARTFSRMSLLHKHQESGCSGCPR

SEQ ID NO: 15645 - protein, 268 aa, Homo sapiens
MPRSFLVKKHFNASKKPNYSELDTHTVIISPYLYESYSMPVIPQPEILSSGAYSPITVWTTAAPFHAQLPNGLSPLSGYSSSLGRVSPPPPSDTSSKDHSGSESPISDEEERLQSKLSDPHAIEAEKFQCNLCNKTYSTFSGLAKHKQLHCDAQSRKSFSCKYCDKEYVSLGALKMHIRTHTLPCVCKICGKAFSRPWLLQGHIRTHTGEKPFSCPHCNRAFADRSNLRAHLQTHSDVKKYQCKNCSKTFSRMSLLHKHEESGCCVAH

SEQ ID NO: 15646 - protein, 292 aa, Homo sapiens
MPRSFLVKTHSSHRVPNYRRLETQREINGACSACGGLVVPLLPRDKEAPSVPGDLPQPWDRSSAVACISLPLLPRIEEALGASGLDALEVSEVDPRASRAAIVPLKDSLNHLNLPPLLVLPTRWSPTLGPDRHGAPEKLLGAERMPRAPGGFECFHCHKPYHTLAGLARHRQLHCHLQVGRVFTCKYCDKEYTSLGALKMHIRTHTLPCTCKICGKAFSRPWLLQGHVRTHTGEKPYACSHCSRAFADRSNLRAHLQTHSDAKKYRCRRCTKTFSRMSLLARHEESGCCPGP

SEQ ID NO: 15647 - protein, 1469 aa, Homo sapiens
MDVDAEREKITQEIKELERILDPGSSGSHVEISESSLESDSEADSLPSEDLDPADPPISEEERWGEASNDEDDPKDKTLPEDPETCLQLNMVYQEVIQEKLAEANLLLAQNREQQEELMRDLAGSKGTKVKDGKSLPPSTYMGHFMKPYFKDKVTGVGPPANEDTREKAAQGIKAFEELLVTKWKNWEKALLRKSVVSDRLQRLLQPKLLKLEYLHQKQSKVSSELERQALEKQGREAEKEIQDINQLPEEALLGNRLDSHDWEKISNINFEGSRSAEEIRKFWQNSEHPSINKQEWSREEEERLQAIAAAHGHLEWQKIAEELGTSRSAFQCLQKFQQHNKALKRKEWTEEEDRMLTQLVQEMRVGSHIPYRRIVYYMEGRDSMQLIYRWTKSLDPGLKKGYWAPEEDAKLLQAVAKYGEQDWFKIREEVPGRSDAQCRDRYLRRLHFSLKKGRWNLKEEEQLIELIEKYGVGHWAKIASELPHRSGSQCLSKWKIMMGKKQGLRRRRRRARHSVRWSSTSSSGSSSGSSGGSSSSSSSSSEEDEPEQAQAGEGDRALLSPQYMVPDMDLWVPARQSTSQPWRGGAGAWLGGPAASLSPPKGSSASQGGSKEASTTAAAPGEETSPVQVPARAHGPVPRSAQASHSADTRPAGAEKQALEGGRRLLTVPVETVLRVLRANTAARSCTQKEQLRQPPLPTSSPGVSSGDSVARSHVQWLRHRATQSGQRRWRHALHRRLLNRRLLLAVTPWVGDVVVPCTQASQRPAVVQTQADGLREQLQQARLASTPVFTLFTQLFHIDTAGCLEVVRERKALPPRLPQAGARDPPVHLLQASSSAQSTPGHLFPNVPAQEASKSASHKGSRRLASSRVERTLPQASLLASTGPRPKPKTVSELLQEKRLQEARAREATRGPVVLPSQLLVSSSVILQPPLPHTPHGRPAPGPTVLNVPLSGPGAPAAAKPGTSGSWQEAGTSAKDKRLSTMQALPLAPVFSEAEGTAPAASQAPALGPGQISVSCPESGLGQSQAPAASRKQGLPEAPPFLPAAPSPTPLPVQPLSLTHIGGPHVATSVPLPVTWVLTAQGLLPVPVPAVVSLPRPAGTPGPAGLLATLLPPLTETRAAQGPRAPALSSSWQPPANMNREPEPSCRTDTPAPPTHALSQSPAEADGSVAFVPGEAQVAREIPEPRTSSHADPPEAEPPWSGRLPAFGGVIPATEPRGTPGSPSGTQEPRGPLGLEKLPLRQPGPEKGALDLEKPPLPQPGPEKGALDLGLLSQEGEAATQQWLGGQRGVRVPLLGSRLPYQPPALCSLRALSGLLLHKKALEHKATSLVVGGEAERPAGALQASLGLVRGQLQDNPAYLLLRARFLAAFTLPALLATLAPQGVRTTLSVPSRVGSESEDEDLLSELELADRDGQPGCTTATCPIQGAPDSGKCSASSCLDTSNDPDDLDVLRTRHARHTRKRRRLV

SEQ ID NO: 15648 - protein, 328 aa, Homo sapiens
MASRCSEPYPEVSRIPTVRGCNGSLSGALSCCEDSARGSGPPKAPTVAEGPSSCLRRNVISERERRKRMSLSCERLRALLPQFDGRREDMASVLEMSVQFLRLASALGPSQEQHAILASSKEMWHSLQEDVLQLTLSSQIQAGVPDPGTGASSGTRTPDVKAFLESPWSLDPASASPEPVPHILASSRQWDPASCTSLGTDKCEALLGLCQVRGGLPPFSEPSSLVPWPPGRSLPKAVRPPLSWPPFSQQQTLPVMSGEALGWLGQAGPLAMGAAPLGEPAKEDPMLAQEAGSALGSDVDDGTSFLLTAGPSSWPGEWGPGFRAGPPA

SEQ ID NO: 15649 - protein, 425 aa, Homo sapiens
MASSIICQEHCQISGQAKIDILLVGDVTVGYLADTVQKLFANIAEVTITISDTKEAAALLDDCIFNMVLLKVPSSLSAEELEAIKLIRFGKKKNTHSLFVFIIPENFKGCISGHGMDIALTEPLTMEKMSNVVKYWTTCPSNTVKTENATGPEELGLPLQRSYSEHLGYFPTDLFACSESLRNGNGLELNASLSEFEKNKKISLLHSSKEKLRRERIKYCCEQLRTLLPYVKGRKNDAASVLEATVDYVKYIREKISPAVMAQITEALQSNMRFCKKQQTPIELSLPGTVMAQRENSVMSTYSPERGLQFLTNTCWNGCSTPDAESSLDEAVRVPSSSASENAIGDPYKTHISSAALSLNSLHTVRYYSKVTPSYDATAVTNQNISIHLPSAMPPVSKLLPRHCTSGLGQTCTTHPNCLQQFWAY

SEQ ID NO: 15650 - protein, 391 aa, Homo sapiens
MYSMMMETDLHSPGGAQAPTNLSGPAGAGGGGGGGGGGGGGGGAKANQDRVKRPMNAFMVWSRGQRRKMAQENPKMHNSEISKRLGAEWKVMSEAEKRPFIDEAKRLRALHMKEHPDYKYRPRRKTKTLLKKDKYSLAGGLLAAGAGGGGAAVAMGVGVGVGAAAVGQRLESPGGAAGGGYAHVNGWANGAYPGSVAAAAAAAAMMQEAQLAYGQHPGAGGAHPHAHPAHPHPHHPHAHPHNPQPMHRYDMGALQYSPISNSQGYMSASPSGYGGLPYGAAAAAAAAAGGAHQNSAVAAAAAAAAASSGALGALGSLVKSEPSGSPPAPAHSRAPCPGDLREMISMYLPAGEGGDPAAAAAAAAQSRLHSLPQHYQGAGAGVNGTVPLTHI

SEQ ID NO: 15651 - protein, 466 aa, Homo sapiens
MAEEQDLSEVELSPVGSEEPRCLSPGSAPSLGPDGGGGGSGLRASPGPGELGKVKKEQQDGEADDDKFPVCIREAVSQVLSGYDWTLVPMPVRVNGASKSKPHVKRPMNAFMVWAQAARRKLADQYPHLHNAELSKTLGKLWRLLNESDKRPFIEEAERLRMQHKKDHPDYKYQPRRRKNGKAAQGEAECPGGEAEQGGTAAIQAHYKSAHLDHRHPGEGSPMSDGNPEHPSGQSHGPPTPPTTPKTELQSGKADPKRDGRSMGEGGKPHIDFGNVDIGEISHEVMSNMETFDVAELDQYLPPNGHPGHVSSYSAAGYGLGSALAVASGHSAWISKPPGVALPTVSPPGVDAKAQVKTETAGPQGPPHYTDQPSTSQIAYTSLSLPHYGSAFPSISRPQFDYSDHQPSGPYYGHSGQASGLYSAFSYMGPSQRPLYTAISDPSPSGPQSHSPTHWEQPVYTTLSRP

SEQ ID NO: 15652 - protein, 441 aa, Homo sapiens
MVQQAESLEAESNLPREALDTEEGEFMACSPVALDESDPDWCKTASGHIKRPMNAFMVWSKIERRKIMEQSPDMHNAEISKRLGKRWKMLKDSEKIPFIREAERLRLKHMADYPDYKYRPRKKPKMDPSAKPSASQSPEKSAAGGGGGSAGGGAGGAKTSKGSSKKCGKLKAPAAAGAKAGAGKAAQSGDYGGAGDDYVLGSLRVSGSGGGGAGKTVKCVFLDEDDDDDDDDDELQLQIKQEPDEEDEEPPHQQLLQPPGQQPSQLLRRYNVAKVPASPTLSSSAESPEGASLYDEVRAGATSGAGGGSRLYYSFKNITKQHPPPLAQPALSPASSRSVSTSSSSSSGSSSGSSGEDADDLMFDLSLNFSQSAHSASEQQLGGGAAAGNLSLSLVDKDLDSFSEGSLGSHFEFPDYCTPELSEMIAGDWLEANFSDLVFTY

SEQ ID NO: 15653 - protein, 315 aa, Homo sapiens
MVQQRGARAKRDGGPPPPGPGPAEEGAREPGWCKTPSGHIKRPMNAFMVWSQHERRKIMDQWPDMHNAEISKRLGRRWQLLQDSEKIPFVREAERLRLKHMADYPDYKYRPRKKSKGAPAKARPRPPGGSGGGSRLKPGPQLPGRGGRRAAGGPLGGGAAAPEDDDEDDDEELLEVRLVETPGRELWRMVPAGRAARGQAERAQGPSGEGAAAAAAASPTPSEDEEPEEEEEEAAAAEEGEEETVASGEESLGFLSRLPPGPAGLDCSALDRDPDLQPPSGTSHFEFPDYCTPEVTEMIAGDWRPSSIADLVFTY

SEQ ID NO: 15654 - protein, 622 aa, Homo sapiens
MSMRSPISAQLALDGVGTMVNCTIKSEEKKEPCHEAPQGSATAAEPQPGDPARASQDSADPQAPAQGNFRGSWDCSSPEGNGSPEPKRPGVSEAASGSQEKLDFNRNLKEVVPAIEKLLSSDWKERFLGRNSMEAKDVKGTQESLAEKELQLLVMIHQLSTLRDQLLTAHSEQKNMAAMLFEKQQQQMELARQQQEQIAKQQQQLIQQQHKINLLQQQIQQVNMPYVMIPAFPPSHQPLPVTPDSQLALPIQPIPCKPVEYPLQLLHSPPAPVVKRPGAMATHHPLQEPSQPLNLTAKPKAPELPNTSSSPSLKMSSCVPRPPSHGGPTRDLQSSPPSLPLGFLGEGDAVTKAIQDARQLLHSHSGALDGSPNTPFRKDLISLDSSPAKERLEDGCVHPLEEAMLSCDMDGSRHFPESRNSSHIKRPMNAFMVWAKDERRKILQAFPDMHNSSISKILGSRWKSMTNQEKQPYYEEQARLSRQHLEKYPDYKYKPRPKRTCIVEGKRLRVGEYKALMRTRRQDARQSYVIPPQAGQVQMSSSDVLYPRAAGMPLAQPLVEHYVPRSLDPNMPVIVNTCSLREEGEGTDDRHSVADGEMYRYSEDEDSEGEEKSDGELVVLTD

SEQ ID NO: 15655 - protein, 240 aa, Homo sapiens
MSKPSDHIKRPMNAFMVWSRGQRRKMAQENPKMHNSEISKRLGAEWKLLSEAEKRPYIDEAKRLRAQHMKEHPDYKYRPRRKPKNLLKKDRYVFPLPYLGDTDPLKAAGLPVGASDGLLSAPEKARAFLPPASAPYSLLDPAQFSSSAIQKMGEVPHTLATGALPYASTLGYQNGAFGSLSCPSQHTHTHPSPTNPGYVVPCNCTAWSASTLQPPVAYILFPGMTKTGIDPYSSAHATAM

SEQ ID NO: 15656 - protein, 233 aa, Homo sapiens [sequence omitted]

SEQ ID NO: 15657 - protein, 414 aa, Homo sapiens [sequence omitted]

SEQ ID NO: 15658 - protein, 384 aa, Homo sapiens [sequence omitted]

SEQ ID NO: 15659 - protein, 317 aa, Homo sapiens
MYNMMETELKPPGPQQTSGGGGGNSTAAAAGGNQKNSPDRVKRPMNAFMVWSRGQRRKMAQENPKMHNSEISKRLGAEWKLLSETEKRPFIDEAKRLRALHMKEHPDYKYRPRRKTKTLMKKDKYTLPGGLLAPGGNSMASGVGVGAGLGAGVNQRMDSYAHMNGWSNGSYSMMQDQLGYPQHPGLNAHGAAQMQPMHRYDVSALQYNSMTSSQTYMNGSPTYSMSYSQQGTPGMALGSMGSVVKSEASSSPPVVTSSSHSRAPCQAGDLRDMISMYLPGAEVPEPAAPSRLHMSQHYQSGPVPGTAINGTLPLSHM

SEQ ID NO: 15660 - protein, 276 aa, Homo sapiens
MSKPVDHVKRPMNAFMVWSRAQRRKMAQENPKMHNSEISKRLGAEWKLLTESEKRPFIDEAKRLRAMHMKEHPDYKYRPRRKPKTLLKKDKFAFPVPYGLGGVADAEHPALKAGAGLHAGAGGGLVPESLLANPEKAAAAAAAAAARVFFPQSAAAAAAAAAAAAAGSPYSLLDLGSKMAEISSSSSGLPYASSLGYPTAGAGAFHGAAAAAAAAAAAAGGHTHSHPSPGNPGYMIPCNCSAWPSPGLQPPLAYILLPGMGKPQLDPYPAAYAAAL

SEQ ID NO: 15661 - protein, 446 aa, Homo sapiens
MRPVRENSSGARSPRVPADLARSILISLPFPPDSLAHRPPSSAPTESQGLFTVAAPAPGAPSPPATLAHLLPAPAMYSLLETELKNPVGTPTQAAGTGGPAAPGGAGKSSANAAGGANSGGGSSGGASGGGGGTDQDRVKRPMNAFMVWSRGQRRKMALENPKMHNSEISKRLGADWKLLTDAEKRPFIDEAKRLRAVHMKEYPDYKYRPRRKTKTLLKKDKYSLPSGLLPPGAAAAAAAAAAAAAAASSPVGVGQRLDTYTHVNGWANGAYSLVQEQLGYAQPPSMSSPPPPPALPPMHRYDMAGLQYSPMMPPGAQSYMNVAAAAAAASGYGGMAPSATAAAAAAYGQQPATAAAAAAAAAAMSLGPMGSVVKSEPSSPPPAIASHSQRACLGDLRDMISMYLPPGGDAADAASPLPGGRLHGVHQHYQGAGTAVNGTVPLTHI

SEQ ID NO: 15662 - protein, 753 aa, Homo sapiens [sequence omitted]

SEQ ID NO: 15663 - protein, 474 aa, Homo sapiens
MVQQTNNAENTEALLAGESSDSGAGLELGIASSPTPGSTASTGGKADDPSWCKTPSGHIKRPMNAFMVWSQIERRKIMEQSPDMHNAEISKRLGKRWKLLKDSDKIPFIREAERLRLKHMADYPDYKYRPRKKVKSGNANSSSSAAASSKPGEKGDKVGGSGGGGHGGGGGGGSSNAGGGGGGASGGGANSKPAQKKSCGSKVAGGAGGGVSKPHAKLILAGGGGGGKAAAAAAASFAAEQAGAAALLPLGAAADHHSLYKARTPSASASASSAASASAALAAPGKHLAEKKVKRVYLFGGLGTSSSPVGGVGAGADPSDPLGLYEEEGAGCSPDAPSLSGRSSAASSPAAGRSPADHRGYASLRAASPAPSSAPSHASSSASSHSSSSSSSGSSSSDDEFEDDLLDLNPSSNFESMSLGSFSSSSALDRDLDFNFEPGSGSHFEFPDYCTPEVSEMISGDWLESSISNLVFTY

SEQ ID NO: 15664 - protein, 763 aa, Homo sapiens [sequence omitted]

SEQ ID NO: 15665 - protein, 828 aa, Homo sapiens
MSSKQATSPFACAADGEDAMTQDLTSREKEEGSDQHVASHLPLHPIMHNKPHSEELPTLVSTIQQDADWDSVLSSQQRMESENNKLCSLYSFRNTSTSPHKPDEGSRDREIMTSVTFGTPERRKGSLADVVDTLKQKKLEEMTRTEQEDSSCMEKLLSKDWKEKMERLNTSELLGEIKGTPESLAEKERQLSTMITQLISLREQLLAAHDEQKKLAASQIEKQRQQMDLARQQQEQIARQQQQLLQQQHKINLLQQQIQVQGHMPPLMIPIFPHDQRTLAAAAAAQQGFLFPPGITYKPGDNYPVQFIPSTMAAAAASGLSPLQLQKGHVSHPQINQRLKGLSDRFGRNLDTFEHGGGHSYNHKQIEQLYAAQLASMQVSPGAKMPSTPQPPNTAGTVSPTGIKNEKRGTSPVTQVKDEAAAQPLNLSSRPKTAEPVKSPTSPTQNLFPASKTSPVNLPNKSSIPSPIGGSLGRGSSLDILSSLNSPALFGDQDTVMKAIQEARKMREQIQREQQQQQPHGVDGKLSSINNMGLNSCRNEKERTRFENLGPQLTGKSNEDGKLGPGVIDLTRPEDAEGSKAMNGSAAKLQQYYCWPTGGATVAEARVYRDARGRASSEPHIKRPMNAFMVWAKDERRKILQAFPDMHNSNISKILGSRWKSMSNQEKQPYYEEQARLSKIHLEKYPNYKYKPRPKRTCIVDGKKLRIGEYKQLMRSRRQEMRQFFTVGQQPQIPITTGTGVVYPGAITMATTTPSPQMTSDCSSTSASPEPSLPVIQSTYGMKTDGGSLAGNEMINGEDEMEMYDDYEDDPKSDYSSENEAPEAVSAN

SEQ ID NO: 15666 - protein, 388 aa, Homo sapiens [sequence omitted]

SEQ ID NO: 15667 - protein, 446 aa, Homo sapiens [sequence omitted]

SEQ ID NO: 15668 - protein, 509 aa, Homo sapiens
MNLLDPFMKMTDEQEKGLSGAPSPTMSEDSAGSPCPSGSGSDTENTRPQENTFPKGEPDLKKESEEDKFPVCIREAVSQVLKGYDWTLVPMPVRVNGSSKNKPHVKRPMNAFMVWAQAARRKLADQYPHLHNAELSKTLGKLWRLLNESEKRPFVEEAERLRVQHKKDHPDYKYQPRRRKSVKNGQAEAEEATEQTHISPNAIFKALQADSPHSSSGMSEVHSPGEHSGQSQGPPTPPTTPKTDVQPGKADLKREGRPLPEGGRQPPIDFRDVDIGELSSDVISNIETFDVNEFDQYLPPNGHPGVPATHGQVTYTGSYGISSTAATPASAGHVWMSKQQAPPPPPQQPPQAPPAPQAPPQPQAAPPQQPAAPPQQPQAHTLTTLSSEPGQSQRTHIKTEQLSPSHYSEQQQHSPQQIAYSPFNLPHYSPSYPPITRSQYDYTDHQNSSSYYSHAAGQGTGLYSTFTYMNPAQRPMYTPIADTSGVPSIPQTHSPQHWEQPVYTQLTRP

SEQ ID NO: 15669 - protein, 785 aa, Homo sapiens
MSDQDHSMDEMTAVVKIEKGVGGNNGGNGNGGGAFSQARSSSTGSSSSTGGGGQESQPSPLALLAATCSRIESPNENSNNSQGPSQSGGTGELDLTATQLSQGANGWQIISSSSGATPTSKEQSGSSTNGSNGSESSKNRTVSGGQYVVAAAPNLQNQQVLTGLPGVMPNIQYQVIPQFQTVDGQQLQFAATGAQVQQDGSGQIQIIPGANQQIITNRGSGGNIIAAMPNLLQQAVPLQGLANNVLSGQTQYVTNVPVALNGNITLLPVNSVSAATLTPSSQAVTISSSGSQESGSQPVTSGTTISSASLVSSQASSSSFFTNANSYSTTTTTSNMGIMNFTTSGSSGTNSQGQTPQRVSGLQGSDALNIQQNQTSGGSLQAGQQKEGEQNQQTQQQQILIQPQLVQGGQALQALQAAPLSGQTFTTQAISQETLQNLQLQAVPNSGPIIIRTPTVGPNGQVSWQTLQLQNLQVQNPQAQTITLAPMQGVSLGQTSSSNTTLTPIASAASIPAGTVTVNAAQLSSMPGLQTINLSALGTSGIQVHPIQGLPLAIANAPGDHGAQLGLHGAGGDGIHDDTAGGEEGENSPDAQPQAGRRTRREACTCPYCKDSEGRGSGDPGKKKQHICHIQGCGKVYGKTSHLRAHLRWHTGERPFMCTWSYCGKRFTRSDELQRHKRTHTGEKKFACPECPKRFMRSDHLSKHIKTHQNKKGGPGVALSVGTLPLDSGAGSEGSGTATPSALITTNMVAMEAICPEGIARLANSGINVMQVADLQSINISGNGF

SEQ ID NO: 15670 - protein, 189 aa, Homo sapiens; identical to SEQ ID NO: 3951

SEQ ID NO: 15671 - protein, 879 aa, Homo sapiens
MAGGGGDLSTRRLNECISPVANEMNHLPAHSHDLQRMFTEDQGVDDRLLYDIVFKHFKRNKVEISNAIKKTFPFLEGLRDRDLITNKMFEDSQDSCRNLVPVQRVVYNVLSELEKTFNLPVLEALFSDVNMQEYPDLIHIYKGFENVIHDKLPLQESEEEEREERSGLQLSLEQGTGENSFRSLTWPPSGSPSHAGTTPPENGLSEHPCETEQINAKRKDTTSDKDDSLGSQQTNEQCAQKAEPTESCEQIAVQVNNGDAGREMPCPLPCDEESPEAELHNHGIQINSCSVRLVDIKKEKPFSNSKVECQAQARTHHNQASDIIVISSEDSEGSTDVDEPLEVFISAPRSEPVINNDNPLESNDEKEGQEATCSRPQIVPEPMDFRKLSTFRESFKKRVIGQDHDFSESSEEEAPAEASSGALRSKHGEKAPMTSRSTSTWRIPSRKRRFSSSDFSDLSNGEELQETCSSSLRRGSGSQPQEPENKKCSCVMCFPKGVPRSQEARTESSQASDMMDTMDVENNSTLEKHSGKRRKKRRHRSKVNGLQRGRKKDRPRKHLTLNNKVQKKRWQQRGRKANTRPLKRRRKRGPRIPKDENINFKQSELPVTCGEVKGTLYKERFKQGTSKKCIQSEDKKWFTPREFEIEGDRGASKNWKLSIRCGGYTLKVLMENKFLPEPPSTRKKRILESHNNTLVDPCEEHKKKNPDASVKFSEFLKKCSETWKTIFAKEKGKFEDMAKADKAHYEREMKTYIPPKGEKKKKFKDPNAPKRPPLAFFLFCSEYRPKIKGEHPGLSIDDVVKKLAGMWNNTAAADKQFYEKKAAKLKEKYKKDIAAYRAKGKPNSAKKRVVKAEKSKKKKEEEEDEEDEQEEENEEDDDK

SEQ ID NO: 15672 - protein, 689 aa, Homo sapiens
MFTMTRAMEEALFQHFMHQKLGIAYAIHKPFPFFEGLLDNSIITKRMYMESLEACRNLIPVSRVVHNILTQLERTFNLSLLVTLFSQINLREYPNLVTIYRSFKRVGASYEWQSRDTPILLEAPTGLAEGSSLHTPLALPPPQPPQPSCSPCAPRVSEPGTSSQQSDEILSESPSPSDPVLPLPALIQEGRSTSVTNDKLTSKMNAEEDSEEMPSLLTSTVQVASDNLIPQIRDKEDPQEMPHSPLGSMPEIRDNSPEPNDPEEPQEVSSTPSDKKGKKRKRCIWSTPKRRHKKKSLPGGTASSRHGIQKKLKRVDQVPQKKDDSTCNSTVETRAQKARTECARKSRSEEIIDGTSEMNEGKRSQKTPSTPRRVTQGAASPGHGIQEKLQVVDKVTQRKDDSTWNSEVMMRVQKARTKCARKSRLKEKKKEKDICSSSKRRFQKNIHRRGKPKSDTVDFHCSKLPVTCGEAKGILYKKKMKHGSSVKCIRNEDGTWLTPNEFEVEGKGRNAKNWKRNIRCEGMTLGELLKRKNSDECEVCCQGGQLLCCGTCPRVFHEDCHIPPVEAKRMLWSCTFCRMKRSSGSQQCHHVSKTLERQMQPQDQLIRDYGEPFQEAMWLDLVKERLITEMYTVAWFVRDMRLMFRNHKTFYKASDFGQVGLDLEAEFEKDLKDVLGFHEANDGGFWTLP

SEQ ID NO: 15673 - protein, 867 aa, Homo sapiens
MAQQGQQGQMASGDSNLNFRMVAEIQNVEGQNLQEQVCPEPIFRFFRENKVEIASAITRPFPFLMGLRDRSFISEQMYEHFQEAFRNLVPVTRVMYCVLSELEKTFGWSHLEALFSRINLMAYPDLNEIYRSFQNVCYEHSPLQMNNVNDLEDRPRLLPYGKQENSNACHEMDDIAVPQEALSSSPRCEPGFSSESCEQLALPKAGGGDAEDAPSLLPGGGVSCKLAIQIDEGESEEMPKLLPYDTEVLESNGMIDAARTYSTAPGEKQGEEEGRNSPRKRNQDKEKYQESPEGRDKETFDLKTPQVTNEGEPEKGLCLLPGEGEEGSDDCSEMCDGEEPQEASSSLARCGSVSCLSAETFDLKTPQVTNEGEPEKELSLLPGEGEEGSDDCSEMCDGEERQEASSSLARRGSVSSELENHPMNEEGESEELASSLLYDNVPGAEQSAYENEKCSCVMCFSEEVPGSPEARTESDQACGTMDTVDIANNSTLGKPKRKRRKKRGHGWSRMRMRRQENSQQNDNSKADGQVVSSEKKANVNLKDLSKIRGRKRGKPGTRFTQSDRAAQKRVRSRASRKHKDETVDFKAPLLPVTCGGVKGILHKKKLQQGILVKCIQTEDGKWFTPTEFEIKGGHARSKNWRLSVRCGGWPLRWLMENGFLPDPPRIRYRKKKRILKSQNNSSVDPCMRNLDECEVCRDGGELFCCDTCSRVFHEDCHIPPVEAERTPWNCIFCRMKESPGSQQCCQESEVLERQMCPEEQLKCEFLLLKVYCCSESSFFAKIPYYYYIREACQGLKEPMWLDKIKKRLNEHGYPQVEGFVQDMRLIFQNHRASYKYKDFGQMGFRLEAEFEKNFKEVFAIQETNGNN

SEQ ID NO: 15674 - protein, 580 aa, Homo sapiens
MAGGGSDLSTRGLNGGVSQVANEMNHLPAHSQSLQRLFTEDQDVDEGLVYDTVFKHFKRHKLEISNAIKKTFPFLEGLRDRELITNKMFEDSEDSCRNLVPVQRVVYNVLSELEKTFNLSVLEALFSEVNMQEYPDLIHIYKSFKNAIQDKLSFQESDRKEREERPDIKLSLKQGEVPESPEARKESDQACGKMDTVDIANNSTLGKPKRKRRKKKGHGWSRMGTRTQKNNQQNDNSKADGQLVSSEKKANMNLKDLSKIRGRKRGKPGTHFTQSDRAPQKRVRSRASRKHKDETVDFQAPLLPVTCGGVKGILHKEKLEQGTLAKCIQTEDGKWFTPMEFEIKGGYARSKNWRLSVRCGGWPLRRLMEEGSLPNPPRIYYRNKKRILKSQNNSSVDPCMRNLDECEVCRDGGELFCCDTCSRVFHEDCHIPPVESEKTPWNCIFCRMKESPGSQQCCQESEVLERQMCPEEQLKCEFLLLKVYCCSESSFFAKIPYYYYIREACQGLKEPMWLDKIKKRLNEHGYPQVEGFVQDMRLIFQNHRASYKYKDFGQMGLRLEAEFEKDFKEVFAIQETNGNS

SEQ ID NO: 15675 - protein, 613 aa, Homo sapiens
MSDPQTSMAATAAVSPSDYLQPAASTTQDSQPSPLALLAATCSKIGPPAVEAAVTPPAPPQPTPRKLVPIKPAPLPLSPGKNSFGILSSKGNILQIQGSQLSASYPGGQLVFAIQNPTMINKGTRSNANIQYQAVPQIQASNSQTIQVQPNLTNQIQIIPGTNQAIITPSPSSHKPVPIKPAPIQKSSTTTTPVQSGANVVKLTGGGGNVTLTLPVNNLVNASDTGAPTQLLTESPPTPLSKTNKKARKKSLPASQPPVAVAEQVETVLIETTADNIIQAGNNLLIVQSPGGGQPAVVQQVQVVPPKAEQQQVVQIPQQALRVVQAASATLPTVPQKPSQNFQIQAAEPTPTQVYIRTPSGEVQTVLVQDSPPATAAATSNTTCSSPASRAPHLSGTSKKHSAAILRKERPLPKIAPAGSIISLNAAQLAAAAQAMQTININGVQVQGVPVTITNTGGQQQLTVQNVSGNNLTISGLSPTQIQLQMEQALAGETQPGEKRRRMACTCPNCKDGEKRSGEQGKKKHVCHIPDCGKTFRKTSLLRAHVRLHTGERPFVCNWFFCGKRFTRSDELQRHARTHTGDKRFECAQCQKRFMRSDHLTKHYKTHLVTKNL

SEQ ID NO: 15676 - protein, 781 aa, Homo sapiens
MTAPEKPVKQEEMAALDVDSGGGGGGGGGHGEYLQQQQQHGNGAVAAAAAAQDTQPSPLALLAATCSKIGPPSPGDDEEEAAAAAGAPAAAGATGDLASAQLGGAPNRWEVLSATPTTIKDEAGNLVQIPSAATSSGQYVLPLQNLQNQQIFSVAPGSDSSNGTVSSVQYQVIPQIQSADGQQVQIGFTGSSDNGGINQESSQIQIIPGSNQTLLASGTPSANIQNLIPQTGQVQVQGVAIGGSSFPGQTQVVANVPLGLPGNITFVPINSVDLDSLGLSGSSQTMTAGINADGHLINTGQAMDSSDNSERTGERVSPDINETNTDTDLFVPTSSSSQLPVTIDSTGILQQNTNSLTTSSGQVHSSDLQGNYIQSPVSEETQAQNIQVSTAQPVVQHLQLQESQQPTSQAQIVQGITPQTIHGVQASGQNISQQALQNLQLQLNPGTFLIQAQTVTPSGQVTWQTFQVQGVQNLQNLQIQNTAAQQITLTPVQTLTLGQVAAGGAFTSTPVSLSTGQLPNLQTVTVNSIDSAGIQLHPGENADSPADIRIKEEEPDPEEWQLSGDSTLNTNDLTHLRVQVVDEEGDQQHQEGKRLRRVACTCPNCKEGGGRGTNLGKKKQHICHIPGCGKVYGKTSHLRAHLRWHSGERPFVCNWMYCGKRFTRSDELQRHRRTHTGEKKFVCPECSKRFMRSDHLAKHIKTHQNKKGIHSSSTVLASVEAARDDTLITAGGTTLILANIQQGSVSGIGTVNTSATSNQDILTNTEIPLQLVTVSGNETME

SEQ ID NO: 15677 - protein, 784 aa, Homo sapiens
MSDQKKEEEEEAAAAAAMATEGGKTSEPENNNKKPKTSGSQDSQPSPLALLAATCSKIGTPGENQATGQQQIIIDPSQGLVQLQNQPQQLELVTTQLAGNAWQLVASTPPASKENNVSQPASSSSSSSSSNNGSASPTKTKSGNSSTPGQFQVIQVQNPSGSVQYQVIPQLQTVEGQQIQINPTSSSSLQDLQGQIQLISAGNNQAILTAANRTASGNILAQNLANQTVPVQIRPGVSIPLQLQTLPGTQAQVVTTLPINIGGVTLALPVINNVAAGGGTGQVGQPAATADSGTSNGNQLVSTPTNTTTSASTMPESPSSSTTCTTTASTSLTSSDTLVSSADTGQYASTSASSSERTIEESQTPAATESEAQSSSQLQPNGMQNAQDQSNSLQQVQIVGQPILQQIQIQQPQQQIIQAIPPQSFQLQSGQTIQTIQQQPLQNVQLQAVNPTQVLIRAPTLTPSGQISWQTVQVQNIQSLSNLQVQNAGLSQQLTITPVSSSGGTTLAQIAPVAVAGAPITLNTAQLASVPNLQTVSVANLGAAGVQVQGVPVTITSVAGQQQGQDGVKVQQATIAPVTVAVGGIANATIGAVSPDQLTQVHLQQGQQTSDQEVQPGKRLRRVACSCPNCREGEGRGSNEPGKKKQHICHIEGCGKVYGKTSHLRAHLRWHTGERPFICNWMFCGKRFTRSDELQRHRRTHTGEKRFECPECSKRFMRSDHLSKHVKTHQNKKGGGTALAIVTSGELDSSVTEVLGSPRIVTVAAISQDSNPATPNVSTNMEEF

SEQ ID NO: 15678 - protein, 398 aa, Homo sapiens
MAAVAVLRNDSLQAFLQDRTPSASPDLGKHSPLALLAATCSRIGQPGAAAPPDFLQVPYDPALGSPSRLFHPWTADMPAHSPGALPPPHPSLGLTPQKTHLQPSFGAAHELPLTPPADPSYPYEFSPVKMLPSSMAALPASCAPAYVPYAAQAALPPGYSNLLPPPPPPPPPPTCRQLSPNPAPDDLPWWSIPQAGAGPGASGVPGSGLSGACAGAPHAPRFPASAAAAAAAAAALQRGLVLGPSDFAQYQSQIAALLQTKAPLAATARRCRRCRCPNCQAAGGAPEAEPGKKKQHVCHVPGCGKVYGKTSHLKAHLRWHTGERPFVCNWLFCGKSFTRSDELQRHLRTHTGEKRFACPECGKRFMRSDHLAKHVKTHQNKKLKVAEAGVKREDARDL

SEQ ID NO: 15679 - protein, 376 aa, Homo sapiens
MLTAVCGSLGSQHTEAPHASPPRLDLQPLQTYQGHTSPEAGDYPSPLQPGELQSLPLGPEVDFSQGYELPGASSRVTCEDLESDSPLAPGPFSKLLQPDMSHHYESWFRPTHPGAEDGSWWDLHPGTSWMDLPHTQGALTSPGHPGALQAGLGGYVGDHQLCAPPPHPHAHHLLPAAGGQHLLGPPDGAKALEVAAPESQGLDSSLDGAARPKGSRRSVPRSSGQTVCRCPNCLEAERLGAPCGPDGGKKKHLHNCHIPGCGKAYAKTSHLKAHLRWHSGDRPFVCNWLFCGKRFTRSDELQRHLQTHTGTKKFPCAVCSRVFMRSDHLAKHMKTHEGAKEEAAGAASGEGKAGGAVEPPGGKGKREAEGSVAPSN

SEQ ID NO: 15680 - protein, 431 aa, Homo sapiens
MASSLLEEEVHYGSSPLAMLTAACSKFGGSSPLRDSTTLGKAGTKKPYSVGSDLSASKTMGDAYPAPFTSTNGLLSPAGSPPAPTSGYANDYPPFSHSFPGPTGTQDPGLLVPKGHSSSDCLPSVYTSLDMTHPYGSWYKAGIHAGISPGPGNTPTPWWDMHPGGNWLGGGQGQGDGLQGTLPTGPAQPPLNPQLPTYPSDFAPLNPAPYPAPHLLQPGPQHVLPQDVYKPKAVGNSGQLEGSGGAKPPRGASTGGSGGYGGSGAGRSSCDCPNCQELERLGAAAAGLRKKPIHSCHIPGCGKVYGKASHLKAHLRWHTGERPFVCNWLFCGKRFTRSDELERHVRTHTREKKFTCLLCSKRFTRSDHLSKHQRTHGEPGPGPPPSGPKELGEGRSTGEEEASQTPRPSASPATPEKAPGGSPEQSNLLEI

SEQ ID NO: 15681 - protein, 490 aa, Homo sapiens
MLAATCNKIGSPSPSPSSLSDSSSSFGKGFHPWKRSSSSSSASCNVVGSSLSSFGVSGASRNGGSSSAAAAAAAAAAAAAALVSDSFSCGGSPGSSAFSLTSSSAAAAAAAAAAAASSSPFANDYSVFQAPGVSGGSGGGGGGGGGGSSAHSQDGSHQPVFISKVHTSVDGLQGIYPRVGMAHPYESWFKPSHPGLGAAGEVGSAGASSWWDVGAGWIDVQNPNSAAALPGSLHPAAGGLQTSLHSPLGGYNSDYSGLSHSAFSSGASSHLLSPAGQHLMDGFKPVLPGSYPDSAPSPLAGAGGSMLSAGPSAPLGGSPRSSARRYSGRATCDCPNCQEAERLGPAGASLRRKGLHSCHIPGCGKVYGKTSHLKAHLRWHTGERPFVCNWLFCGKRFTRSDELQRHLRTHTGEKRFACPVCNKRFMRSDHLSKHVKTHSGGGGGGGSAGSGSGGKKGSDTDSEHSAAGSPPCHSPELLQPPEPGHRNGLE

SEQ ID NO: 15682 - protein, 484 aa, Homo sapiens
MATSILGEEPRFGTTPLAMLAATCNKIGNTSPLTTLPESSAFAKGGFHPWKRSSSSCNLGSSLSGFAVATGGRGSGGLAGGSGAANSAFCLASTSPTSSAFSSDYGGLFSNSAAAAAAAAGVSPQEAGGQSAFISKVHTTAADGLYPRVGMAHPYESWYKSGFHSTLAAGEVTNGAASSWWDVHSSPGSWLEVQNPAGGLQSSLHSGAPQASLHSQLGTYNPDFSSLTHSAFSSTGLGSSAAAASHLLSTSQHLLAQDGFKPVLPSYSDSSAAVAAAAASAMISGAAAAAAGGSSARSARRYSGRATCDCPNCQEAERLGPAGASLRRKGLHSCHIPGCGKVYGKTSHLKAHLRWHTGERPFVCNWLFCGKRFTRSDELQRHLRTHTGEKRFACPVCNKRFMRSDHLSKHIKTHNGGGGGKKGSDSDTDASNLETPRSESPDLILHDSGVSAARAAAAAAAAAAAAAAAASAGGKEAASGPNDS

SEQ ID NO: 15683 - protein, 335 aa, Homo sapiens
MGSASPGLSSVSPSHLLLPPDTVSRTGLEKAAAGAVGLERRDWSPSPPATPEQGLSAFYLSYFDMLYPEDSSWAAKAPGASSREEPPEEPEQCPVIDSQAPAGSLDLVPGGLTLEEHSLEQVQSMVVGEVLKDIETACKLLNITADPMDWSPSNVQKWLLWTEHQYRLPPMGKAFQELAGKELCAMSEEQFRQRSPLGGDVLHAHLDIWKSAAWMKERTSPGAIHYCASTSEESWTDSEVDSSCSGQPIHLWQFLKELLLKPHSYGRFIRWLNKEKGIFKIEDSAQVARLWGIRKNRPAMNYDKLSRSIRQYYKKGIIRKPDISQRLVYQFVHPI

SEQ ID NO: 15684 - protein, 270 aa, Homo sapiens
MLQACKMEGFPLVPPPSEDLVPYDTDLYQRQTHEYYPYLSSDGESHSDHYWDFHPHHVHSEFESFAENNFTELQSVQPPQLQQLYRHMELEQMHVLDTPMVPPHPSLGHQVSYLPRMCLQYPSLSPAQPSSDEEEGERQSPPLEVSDGEADGLEPGPGLLPGETGSKKKIRLYQFLLDLLRSGDMKDSIWWVDKDKGTFQFSSKHKEALAHRWGIQKGNRKKMTYQKMARALRNYGKTGEVKKVKKKLTYQFSGEVLGRGGLAERRHPPH

SEQ ID NO: 15685 - protein, 262 aa, Homo sapiens
MLALEAAQLDGPHFSCLYPDGVFYDLDSCKHSSYPDSEGAPDSLWDWTVAPPVPATPYEAFDPAAAAFSHPQAAQLCYEPPTYSPAGNLELAPSLEAPGPGLPAYPTENFASQTLVPPAYAPYPSPVLSEEEDLPLDSPALEVSDSESDEALVAGPEGKGSEAGTRKKLRLYQFLLGLLTRGDMRECVWWVEPGAGVFQFSSKHKELLARRWGQQKGNRKRMTYQKLARALRNYAKTGEIRKVKRKLTYQFDSALLPAVRRA

SEQ ID NO: 15686 - protein, 248 aa, Homo sapiens
MTCVEQDKLGQAFEDAFEVLRQHSTGDLQYSPDYRNYLALINHRPHVKGNSSCYGVLPTEEPVYNWRTVINSAADFYFEGNIHQSLQNITENQLVQPTLLQQKGGKGRKKLRLFEYLHESLYNPEMASCIQWVDKTKGIFQFVSKNKEKLAELWGKRKGNRKTMTYQKMARALRNYGRSGEITKIRRKLTYQFSEAILQRLSPSYFLGKEIFYSQCVQPDQEYLSLNNWNANYNYTYANYHELNHHDC

SEQ ID NO: 15687 - protein, 430 aa, Homo sapiens
MASSAKSAEMPTISKTVNPTPDPHQEYLDPRITIALFEIGSHSPSSWGSLPFLKNSSHQVTEQQTAQKFNNLLKEIKDILKNMAGFEEKITEAKELFEETNITEDVSAHKENIRGLDKINEMLSTNLPVSLAPEKEDNEKKQEMILETNITEDVSAHKENIRGLDKINEMLSTNLPVSLAPEKEDNEKKQQMIMENQNSENTAQVFARDLVNRLEEKKVLNETQQSQEKAKNRLNVQEETMKIRNNMEQLLQEAEHWSKQHTELSKLIKSYQKSQKDISETLGNNGVGFQTQPNNEVSAKHELEEQVKKLSHDTYSLQLMAALLENECQILQQRVEILKELHHQKQGTLQEKPIQINYKQDKKNQKPSEAKKVEMYKQNKQAMKGTFWKKDRSCRSLDVCLNKKACNTQFNIHVARKALRGKMRSASSLR

SEQ ID NO: 15688 - protein, 1147 aa, Homo sapiens
MDEPPFSEAALEQALGEPCDLDAALLTDIEDMLQLINNQDSDFPGLFDPPYAGSGAGGTDPASPDTSSPGSLSPPPATLSSSLEAFLSGPQAAPSPLSPPQPAPTPLKMYPSMPAFSPGPGIKEESVPLSILQTPTPQPLPGALLPQSFPAPAPPQFSSTPVLGYPSPPGGFSTGSPPGNTQQPLPGLPLASPPGVPPVSLHTQVQSVVPQQLLTVTAAPTAAPVTTTVTSQIQQVPVLLQPHFIKADSLLLTAMKTDGATVKAAGLSPLVSGTTVQTGPLPTLVSGGTILATVPLVVDAEKLPINRLAAGSKAPASAQSRGEKRTAHNAIEKRYRSSINDKIIELKDLVVGTEAKLNKSAVLRKAIDYIRFLQHSNQKLKQENLSLRTAVHKSKSLKDLVSACGSGGNTDVLMEGVKTEVEDTLTPPPSDAGSPFQSSPLSLGSRGSGSGGSGSDSEPDSPVFEDSKAKPEQRPSLHSRGMLDRSRLALCTLVFLCLSCNPLASLLGARGLPSPSDTTSVYHSPGRNVLGTESRDGPGWAQWLLPPVVWLLNGLLVLVSLVLLFVYGEPVTRPHSGPAVYFWRHRKQADLDLARGDFAQAAQQLWLALRALGRPLPTSHLDLACSLLWNLIRHLLQRLWVGRWLAGRAGGLQQDCALRVDASASARDAALVYHKLHQLHTMGKHTGGHLTATNLALSALNLAECAGDAVSVATLAEIYVAAALRVKTSLPRALHFLTRFFLSSARQACLAQSGSVPPAMQWLCHPVGHRFFVDGDWSVLSTPWESLYSLAGNPVDPLAQVTQLFREHLLERALNCVTQPNPSPGSADGDKEFSDALGYLQLLNSCSDAAGAPAYSFSISSSMATTTGVDPVAKWWASLTAVVIHWLRRDEEAAERLCPLVEHLPRVLQESERPLPRAALHSFKAARALLGCAKAESGPASLTICEKASGYLQDSLATTPASSSIDKAVQLFLCDLLLVVRTSLWRQQQPPAPAPAAQGTSSRPQASALELRGFQRDLSSLRRLAQSFRPAMRRVFLHEATARLMAGASPTRTHQLLDRSLRRRAGPGGKGGAVAELEPRPTRREHAEALLLASCYLPPGFLSAPGQRVGMLAEAARTLEKLGDRRLLHDCQQMLMRLGGGTTVTSS

SEQ ID NO: 15689 - protein, 1141 aa, Homo sapiens
MDDSGELGGLETMETLTELGDELTLGDIDEMLQFVSNQVGEFPDLFSEQLCSSFPGSGGSGSSSGSSGSSSSSSNGRGSSSGAVDPSVQRSFTQVTLPSFSPSAASPQAPTLQVKVSPTSVPTTPRATPILQPRPQPQPQPQTQLQQQTVMITPTFSTTPQTRIIQQPLIYQNAATSFQVLQPQVQSLVTSSQVQPVTIQQQVQTVQAQRVLTQTANGTLQTLAPATVQTVAAPQVQQVPVLVQPQIIKTDSLVLTTLKTDGSPVMAAVQNPALTALTTPIQTAALQVPTLVGSSGTILTTMPVMMGQEKVPIKQVPGGVKQLEPPKEGERRTTHNIIEKRYRSSINDKIIELKDLVMGTDAKMHKSGVLRKAIDYIKYLQQVNHKLRQENMVLKLANQKNKLLKGIDLGSLVDNEVDLKIEDFNQNVLLMSPPASDSGSQAGFSPYSIDSEPGSPLLDDAKVKDEPDSPPVALGMVDRSRILLCVLTFLCLSFNPLTSLLQWGGAHDSDQHPHSGSGRSVLSFESGSGGWFDWMMPTLLLWLVNGVIVLSVFVKLLVHGEPVIRPHSRSSVTFWRHRKQADLDLARGDFAAAAGNLQTCLAVLGRALPTSRLDLACSLSWNVIRYSLQKLRLVRWLLKKVFQCRRATPATEAGFEDEAKTSARDAALAYHRLHQLHITGKLPAGSACSDVHMALCAVNLAECAEEKIPPSTLVEIHLTAAMGLKTRCGGKLGFLASYFLSRAQSLCGPEHSAVPDSLRWLCHPLGQKFFMERSWSVKSAAKESLYCAQRNPADPIAQVHQAFCKNLLERAIESLVKPQAKKKAGDQEEESCEFSSALEYLKLLHSFVDSVGVMSPPLSRSSVLKSALGPDIICRWWTSAITVAISWLQGDDAAVRSHFTKVERIPKALEVTESPLVKAIFHACRAMHASLPGKADGQQSSFCHCERASGHLWSSLNVSGATSDPALNHVVQLLTCDLLLSLRTALWQKQASASQAVGETYHASGAELAGFQRDLGSLRRLAHSFRPAYRKVFLHEATVRLMAGASPTRTHQLLEHSLRRRTTQSTKHGEVDAWPGQRERATAILLACRHLPLSFLSSPGQRAVLLAEAARTLEKVGDRRSCNDCQQMIVKLGGGTAIAAS

SEQ ID NO: 15690 - protein, 508 aa, Homo sapiens
MLPTQAGAAAALGRGSALGGSLNRTPTGRPGGGGGTRGANGGRVPGNGAGLGPGRLEREAAAAAATTPAPTAGALYSGSEGDSESGEEEELGAERRGLKRSLSEMEIGMVVGGPEASAAATGGYGPVSGAVSGAKPGKKTRGRVKIKMEFIDNKLRRYTTFSKRKTGIMKKAYELSTLTGTQVLLLVASETGHVYTFATRKLQPMITSETGKALIQTCLNSPDSPPRSDPTTDQRMSATGFEETDLTYQVSESDSSGETKDTLKPAFTVTNLPGTTSTIQTAPSTSTTMQVSSGPSFPITNYLAPVSASVSPSAVSSANGTVLKSTGSGPVSSGGLMQLPTSFTLMPGGAVAQQVPVQAIQVHQAPQQASPSRDSSTDLTQTSSSGTVTLPATIMTSSVPTTVGGHMMYPSPHAVMYAPTSGLGDGSLTVLNAFSQAPSTMQVSHSQVQEPGGVPQVFLTASSGTVQIPVSAVQLHQMAVIGQQAGSSSNLTELQVVNLDTAHSTKSE

SEQ ID NO: 15691 - protein, 204 aa, Homo sapiens
MQSYASAMLSVFNSDDYSPAVQENIPALRRSSSFLCTESCNSKYQCETGENSKGNVQDRVKRPMNAFIVWSRDQRRKMALENPRMRNSEISKQLGYQWKMLTEAEKWPFFQEAQKLQAMHREKYPNYKYRPRRKAKMLPKNCSLLPADPASVLCSEVQLDNRLYRDDCTKATHSRMEHQLGHLPPINAASSPQQRDRYSHWTKL

SEQ ID NO: 15692 - protein, 709 aa, Homo sapiens
MAETLEFNDVYQEVKGSMNDGRLRLSRQGIIFKNSKTGKVDNIQAGELTEGIWRRVALGHGLKLLTKNGHVYKYDGFRESEFEKLSDFFKTHYRLELMEKDLCVKGWNWGTVKFGGQLLSFDIGDQPVFEIPLSNVSQCTTGKNEVTLEFHQNDDAEVSLMEVRFYVPPTQEDGVDPVEAFAQNVLSKADVIQATGDAICIFRELQCLTPRGRYDIRIYPTFLHLHGKTFDYKIPYTTVLRLFLLPHKDQRQMFFVISLDPPIKQGQTRYHFLILLFSKDEDISLTLNMNEEEVEKRFEGRLTKNMSGSLYEMVSRVMKALVNRKITVPGNFQGHSGAQCITCSYKASSGLLYPLERGFIYVHKPPVHIRFDEISFVNFARGTTTTRSFDFEIETKQGTQYTFSSIEREEYGKLFDFVNAKKLNIKNRGLKEGMNPSYDEYADSDEDQHDAYLERMKEEGKIREENANDSSDDSGEETDESFNPGEEEEDVAEEFDSNASASSSSNEGDSDRDEKKRKQLKKAKMAKDRKSRKKPVEVKKGKDPNAPKRPMSAYMLWLNASREKIKSDHPGISITDLSKKAGEIWKGMSKEKKEEWDRKAEDARRDYEKAMKEYEGGRGESSKRDKSKKKKKVKVKMEKKSTPSRGSSSKSSSRQLSESFKSKEFVSSDESSSGENKSKKKRRRSEDSEEEELASTPPSSEDSASGSDE

SEQ ID NO: 15693 - protein, 1047 aa, Homo sapiens
MDAEAEDKTLRTRSKGTEVPMDSLIQELSVAYDCSMAKKRTAEDQALGVPVNKRKSLLMKPRHYSPKADCQEDRSDRTEDDGPLETHGHSTAEEIMIKPMDESLLSTAQENSSRKEDRYSCYQELMVKSLMHLGKFEKNVSVQTVSENLNDSGIQSLKAESDEADECFLIHSDDGRDKIDDSQPPFCSSDDNESNSESAENGWDSGSNFSEETKPPRVPKYVLTDHKKDLLEVPEIKTEGDKFIPCENRCDSETERKDPQNALAEPLDGNAQPSFPDVEEEDSESLAVMTEEGSDLEKAKGNLSLLEQAIALQAERGCVFHNTYKELDRFLLEHLAGERRQTKVIDMGGRQIFNNKHSPRPEKRETKCPIPGCDGTGHVTGLYPHHRSLSGCPHKVRVPLEILAMHENVLKCPTPGCTGRGHVNSNRNTHRSLSGCPIAAAEKLAMSQDKNQLDSPQTGQCPDQAHRTSLVKQIEFNFPSQAITSPRATVSKEQEKFGKVPFDYASFDAQVFGKRPLIQTVQGRKTPPFPESKHFPNPVKFPNRLPSAGAHTQSPGRASSYSYGQCSEDTHIAAAAAILNLSTRCREATDILSNKPQSLHAKGAEIEVDENGTLDLSMKKNRILDKSAPLTSSNTSIPTPSSSPFKTSSILVNAAFYQALCDQEGWDTPINYSKTHGKTEEEKEKDPVSSLENLEEKKFPGEASIPSPKPKLHARDLKKELITCPTPGCDGSGHVTGNYASHRSVSGCPLADKTLKSLMAANSQELKCPTPGCDGSGHVTGNYASHRSLSGCPRARKGGVKMTPTKEEKEDPELKCPVIGCDGQGHISGKYTSHRTASGCPLAAKRQKENPLNGASLSWKLNKQELPHCPLPGCNGLGHVNNVFVTHRSLSGCPLNAQVIKKGKVSEELMTIKLKATGGIESDEEIRHLDEEIKELNESNLKIEADMMKLQTQITSMESNLKTIEEENKLIEQNNESLLKELAGLSQALISSLADIQLPQMGPISEQNFEAYVNTLTDMYSNLERDYSPECKALLESIKQAVKGIHV

SEQ ID NO: 15694 - protein, 750 aa, Homo sapiens
MSQWYELQQLDSKFLEQVHQLYDDSFPMEIRQYLAQWLEKQDWEHAANDVSFATIRFHDLLSQLDDQYSRFSLENNFLLQHNIRKSKRNLQDNFQEDPIQMSMIIYSCLKEERKILENAQRFNQAQSGNIQSTVMLDKQKELDSKVRNVKDKVMCIEHEIKSLEDLQDEYDFKCKTLQNREHETNGVAKSDQKQEQLLLKKMYLMLDNKRKEVVHKIIELLNVTELTQNALINDELVEWKRRQQSACIGGPPNACLDQLQNWFTIVAESLQQVRQQLKKLEELEQKYTYEHDPITKNKQVLWDRTFSLFQQLIQSSFVVERQPCMPTHPQRPLVLKTGVQFTVKLRLLVKLQELNYNLKVKVLFDKDVNERNTVKGFRKFNILGTHTKVMNMEESTNGSLAAEFRHLQLKEQKNAGTRTNEGPLIVTEELHSLSFETQLCQPGLVIDLETTSLPVVVISNVSQLPSGWASILWYNMLVAEPRNLSFFLTPPCARWAQLSEVLSWQFSSVTKRGLNVDQLNMLGEKLLGPNASPDGLIPWTRFCKENINDKNFPFWLWIESILELIKKHLLPLWNDGCIMGFISKERERALLKDQQPGTFLLRFSESSREGAITFTWVERSQNGGEPDFHAVEPYTKKELSAVTFPDIIRNYKVMAAENIPENPLKYLYPNIDKDHAFGKYYSRPKEAPEPMELDGPKGTGYIKTELISVSEVHPSRLQTTDNLLPMSPEEFDEVSRIVGSVEFDSMMNTV

SEQ ID NO: 15695 - protein, 851 aa, Homo sapiens
MAQWEMLQNLDSPFQDQLHQLYSHSLLPVDIRQYLAVWIEDQNWQEAALGSDDSKATMLFFHFLDQLNYECGRCSQDPESLLLQHNLRKFCRDIQPFSQDPTQLAEMIFNLLLEEKRILIQAQRAQLEQGEPVLETPVESQQHEIESRILDLRAMMEKLVKSISQLKDQQDVFCFRYKIQAKGKTPSLDPHQTKEQKILQETLNELDKRRKEVLDASKALLGRLTTLIELLLPKLEEWKAQQQKACIRAPIDHGLEQLETWFTAGAKLLFHLRQLLKELKGLSCLVSYQDDPLTKGVDLRNAQVTELLQRLLHRAFVVETQPCMPQTPHRPLILKTGSKFTVRTRLLVRLQEGNESLTVEVSIDRNPPQLQGFRKFNILTSNQKTLTPEKGQSQGLIWDFGYLTLVEQRSGGSGKGSNKGPLGVTEELHIISFTVKYTYQGLKQELKTDTLPVVIISNMNQLSIAWASVLWFNLLSPNLQNQQFFSNPPKAPWSLLGPALSWQFSSYVGRGLNSDQLSMLRNKLFGQNCRTEDPLLSWADFTKRESPPGKLPFWTWLDKILELVHDHLKDLWNDGRIMGFVSRSQERRLLKKTMSGTFLLRFSESSEGGITCSWVEHQDDDKVLIYSVQPYTKEVLQSLPLTEIIRHYQLLTEENIPENPLRFLYPRIPRDEAFGCYYQEKVNLQERRKYLKHRLIVVSNRQVDELQQPLELKPEPELESLELELGLVPEPELSLDLEPLLKAGLDLGPELESVLESTLEPVIEPTLCMVSQTVPEPDQGPVSQPVPEPDLPCDLRHLNTEPMEIFRNCVKIEEIMPNGDPLLAGQNTVDEVYVSRPSHFYTDGPLMPSDF

SEQ ID NO: 15696 - protein, 770 aa, Homo sapiens
MAQWNQLQQLDTRYLEQLHQLYSDSFPMELRQFLAPWIESQDWAYAASKESHATLVFHNLLGEIDQQYSRFLQESNVLYQHNLRRIKQFLQSRYLEKPMEIARIVARCLWEESRLLQTAATAAQQGGQANHPTAAVVTEKQQMLEQHLQDVRKRVQDLEQKMKVVENLQDDFDFNYKTLKSQGDMQDLNGNNQSVTRQKMQQLEQMLTALDQMRRSIVSELAGLLSAMEYVQKTLTDEELADWKRRQQIACIGGPPNICLDRLENWITSLAESQLQTRQQIKKLEELQQKVSYKGDPIVQHRPMLEERIVELFRNLMKSAFVVERQPCMPMHPDRPLVIKTGVQFTTKVRLLVKFPELNYQLKIKVCIDKDSGDVAALRGSRKFNILGTNTKVMNMEESNNGSLSAEFKHLTLREQRCGNGGRANCDASLIVTEELHLITFETEVYHQGLKIDLETHSLPVVVISNICQMPNAWASILWYNMLTNNPKNVNFFTKPPIGTWDQVAEVLSWQFSSTTKRGLSIEQLTTLAEKLLGPGVNYSGCQITWAKFCKENMAGKGFSFWVWLDNIIDLVKKYILALWNEGYIMGFISKERERAILSTKPPGTFLLRFSESSKEGGVTFTWVEKDISGKTQIQSVEPYTKQQLNNMSFAEIIMGYKIMDATNILVSPLVYLYPDIPKEEAFGKYCRPESQEHPEADPGSAAPYLKTKFICVTPTTCSNTIDLPMSPRTLDSLMQFGNNGEGAEPSAGGQFESLTFDMELTSECATSPM

SEQ ID NO: 15697 - protein, 748 aa, Homo sapiens
MSQWNQVQQLEIKFLEQVDQFYDDNFPMEIRHLLAQWIENQDWEAASNNETMATILLQNLLIQLDEQLGRVSKEKNLLLIHNLKRIRKVLQGKFHGNPMHVAVVISNCLREERRILAAANMPVQGPLEKSLQSSSVSERQRNVEHKVAAIKNSVQMTEQDTKYLEDLQDEFDYRYKTIQTMDQSDKNSAMVNQEVLTLQEMLNSLDFKRKEALSKMTQIIHETDLLMNTMLIEELQDWKRRQQIACIGGPLHNGLDQLQNCFTLLAESLFQLRRQLEKLEEQSTKMTYEGDPIPMQRTHMLERVTFLIYNLFKNSFVVERQPCMPTHPQRPLVLKTLIQFTVKLRLLIKLPELNYQVKVKASIDKNVSTLSNRRFVLCGTNVKAMSIEESSNGSLSVEFRHLQPKEMKSSAGGKGNEGCHMVTEELHSITFETQICLYGLTIDLETSSLPVVMISNVSQLPNAWASIIWYNVSTNDSQNLVFFNNPPPATLSQLLEVMSWQFSSYVGRGLNSDQLHMLAEKLTVQSSYSDGHLTWAKFCKEHLPGKSFTFWTWLEAILDLIKKHILPLWIDGYVMGFVSKEKERLLLKDKMPGTFLLRFSESHLGGITFTWVDHSESGEVRFHSVEPYNKGRLSALPFADILRDYKVIMAENIPENPLKYLYPDIPKDKAFGKHYSSQPCEVSRPTERGDKGYVPSVFIPISTIRSDSTEPHSPSDLLPMSPSVYAVLRENLSPTTIETAMKSPYSAE

SEQ ID NO: 15698 - protein, 794 aa, Homo sapiens
MAGWIQAQQLQGDALRQMQVLYGQHFPIEVRHYLAQWIESQPWDAIDLDNPQDRAQATQLLEGLVQELQKKAEHQVGEDGFLLKIKLGHYATQLQKTYDRCPLELVRCIRHILYNEQRLVREANNCSSPAGILVDAMSQKHLQINQTFEELRLVTQDTENELKKLQQTQEYFIIQYQESLRIQAQFAQLAQLSPQERLSRETALQQKQVSLEAWLQREAQTLQQYRVELAEKHQKTLQLLRKQQTIILDDELIQWKRRQQLAGNGGPPEGSLDVLQSWCEKLAEIIWQNRQQIRRAEHLCQQLPIPGPVEEMLAEVNATITDIISALVTSTFIIEKQPPQVLKTQTKFAATVRLLVGGKLNVHMNPPQVKATIISEQQAKSLLKNENTRNECSGEILNNCCVMEYHQATGTLSAHFRNMSLKRIKRADRRGAESVTEEKFTVLFESQFSVGSNELVFQVKTLSLPVVVIVHGSQDHNATATVLWDNAFAEPGRVPFAVPDKVLWPQLCEALNMKFKAEVQSNRGLTKENLVFLAQKLFNNSSSHLEDYSGLSVSWSQFNRENLPGWNYTFWQWFDGVMEVLKKHHKPHWNDGAILGFVNKQQAHDLLINKPDGTFLLRFSDSEIGGITIAWKFDSPERNLWNLKPFTTRDFSIRSLADRLGDLSYLIYVFPDRPKDEVFSKYYTPVLAKAVDGYVKPQIKQVVPEFVNASADAGGSSATYMDQAPSPAVCPQAPYNMYPQNPDHVLDQDGEFDLDETMDVARHVEELLRRPMDSLDSRLSPPAGLFTSARGSLS

SEQ ID NO: 15699 - protein, 794 aa, Homo sapiens; identical to SEQ ID NO: 15698

SEQ ID NO: 15700 - protein, 787 aa, Homo sapiens
MAVWIQAQQLQGEALHQMQALYGQHFPIEVRHYLSQWIESQAWDSVDLDNPQENIKATQLLEGLVQELQKKAEHQVGEDGFLLKIKLGHYATQLQNTYDRCPMELVRCIRHILYNEQRLVREANNGSSPAGSLADAMSQKHLQINQTFEELRLVTQDTENELKKLQQTQEYFIIQYQESLRIQAQFGPLAQLSPQERLSRETALQQKQVSLEAWLQREAQTLQQYRVELAEKHQKTLQLLRKQQTIILDDELIQWKRRQQLAGNGGPPEGSLDVLQSWCEKLAEIIWQNRQQIRRAEHLCQQLPIPGPVEEMLAEVNATITDIISALVTSTFIIEKQPPQVLKTQTKFAATVRLLVGGKLNVHMNPPQVKATIISEQQAKSLLKNENTRNDYSGEILNNCCVMEYHQATGTLSAHFRNMSLKRIKRSDRRGAESVTEEKFTILFESQFSVGGNELVFQVKTLSLPVVVIVHGSQDNNATATVLWDNAFAEPGRVPFAVPDKVLWPQLCEALNMKFKAEVQSNRGLTKENLVFLAQKLFNNSSSHLEDYSGLSVSWSQFNRENLPGRNYTFWQWFDGVMEVLKKHLKPHWNDGAILGFVNKQQAHDLLINKPDGTFLLRFSDSEIGGITIAWKFDSQERMFWNLMPFTTRDFSIRSLADRLGDLNYLIYVFPDRPKDEVYSKYYTPVPCESATAKAVDGYVKPQIKQVVPEFVNASADAGGGSATYMDQAPSPAVCPQAHYNMYPQNPDSVLDTDGDFDLEDTMDVARRVEELLGRPMDSQWIPHAQS

SEQ ID NO: 15701 - protein, 847 aa, Homo sapiens
MSLWGLVSKMPPEKVQRLYVDFPQHLRHLLGDWLESQPWEFLVGSDAFCCNLASALLSDTVQHLQASVGEQGEGSTILQHISTLESIYQRDPLKLVATFRQILQGEKKAVMEQFRHLPMPFHWKQEELKFKTGLRRLQHRVGEIHLLREALQKGAEAGQVSLHSLIETPANGTGPSEALAMLLQETTGELEAAKALVLKRIQIWKRQQQLAGNGAPFEESLAPLQERCESLVDIYSQLQQEVGAAGGELEPKTRASLTGRLDEVLRTLVTSCFLVEKQPPQVLKTQTKFQAGVRFLLGLRFLGAPAKPPLVRADMVTEKQARELSVPQGPGAGAESTGEIINNTVPLENSIPGNCCSALFKNLLLKKIKRCERKGTESVTEEKCAVLFSASFTLGPGKLPIQLQALSLPLVVIVHGNQDNNAKATILWDNAFSEMDRVPFVVAERVPWEKMCETLNLKFMAEVGTNRGLLPEHFLFLAQKIFNDNSLSMEAFQHRSVSWSQFNKEILLGRGFTFWQWFDGVLDLTKRCLRSYWSDRLIIGFISKQYVTSLLLNEPDGTFLLRFSDSEIGGITIAHVIRGQDGSPQIENIQPFSAKDLSIRSLGDRIRDLAQLKNLYPKKPKDEAFRSHYKPEQMGKDGRGYVPATIKMTVERDQPLPTPELQMPTMVPSYDLGMAPDSSMSMQLGPDMVPQVYPPHSHSIPPYQGLSPEESVNVLSAFQEPHLQMPPSLGQMSLPFDQPHPQGLLPCQPQEHAVSSPDPLLCSDVTMVEDSCLSQPVTAFPQGTWIGEDIFPPLLPPTEQDLTKLLLEGQGESGGGSLGAQPLLQPSHYGQSGISMSHMDLRANPSW

SEQ ID NO: 15702 - protein, 443 aa, Homo sapiens
MDRLGPFSNDPSDKPPCRGCSSYLMEPYIKCAECGPPPFFLCLQCFTRGFEYKKHQSDHTYEIMTSDFPVLDPSWTAQEEMALLEAVMDCGFGNWQDVANQMCTKTKEECEKHYMKHFINNPLFASTLLNLKQAEEAKTADTAIPFHSTDDPPRPTFDSLLSRDMAGYMPARADFIEEFDNYAEWDLRDIDFVEDDSDILHALKMAVVDIYHSRLKERQRRKKIIRDHGLINLRKFQLMERRYPKEVQDLYETMRRFARIVGPVEHDKFIESHALEFELRREIKRLQEYRTAGITNFCSARTYDHLKKTREEERLKRTMLSEVLQYIQDSSACQQWLRRQADIDSGLSPSIPMASNSGRRSAPPLNLTGLPGTEKLNEKEKELCQMVRLVPGAYLEYKSALLNECNKQGGLRLAQARALIKIDVNKTRKIYDFLIREGYITKG

SEQ ID NO: 15703 - protein, 420 aa, Homo sapiens
MAELGKKYCVYCLAEVSPLRFRCTECQDIELCPECFSAGAEIGHHRRYHGYQLVDGGRFTLWGPEAEGGWTSREEQLLLDAIEQFGFGNWEDMAAHVGASRTPQEVMEHYVSMYIHGNLGKACIPDTIPNRVTDHTCPSGGPLSPSLTTPLPPLDISVAEQQQLGYMPLRDDYEIEYDQDAETLISGLSVNYDDDDVEIELKRAHVDMYVRKLKERQRRKNIARDYNLVPAFLGKDKKEKEKALKRKITKEEKELRLKLRPLYQFMSCKEFDDLFENMHKEKMLRAKIRELQRYRRNGITKMEESAEYEAARHKREKRKENKNLAGSKRGKEDGKDSEFAAIENLPGFELLSDREKVLCSSLNLSPARYVTVKTIIIKDHLQKRQGIPSKSRLPSYLDKVLKKRILNFLTESGWISRDAS

SEQ ID NO: 15704 - protein, 1872 aa, Homo sapiens
MGPGCDLLLRTAATITAAAIMSDTDSDEDSAGGGPFSLAGFLFGNINGAGQLEGESVLDDECKKHLAGLGALGLGSLITELTANEELTGTDGALVNDEGWVRSTEDAVDYSDINEVAEDESRRYQQTMGSLQPLCHSDYDEDDYDADCEDIDCKLMPPPPPPPGPMKKDKDQDSITGEKVDFSSSSDSESEMGPQEATQAESEDGKLTLPLAGIMQHDATKLLPSVTELFPEFRPGKVLRFLRLFGPGKNVPSVWRSARRKRKKKHRELIQEEQIQEVECSVESEVSQKSLWNYDYAPPPPPEQCLSDDEITMMAPVESKFSQSTGDIDKVTDTKPRVAEWRYGPARLWYDMLGVPEDGSGFDYGFKLRKTEHEPVIKSRMIEEFRKLEENNGTDLLADENFLMVTQLHWEDDIIWDGEDVKHKGTKPQRASLAGWLPSSMTRNAMAYNVQQGFAATLDDDKPWYSIFPIDNEDLVYGRWEDNIIWDAQAMPRLLEPPVLTLDPNDENLILEIPDEKEEATSNSPSKESKKESSLKKSRILLGKTGVIKEEPQQNMSQPEVKDPWNLSNDEYYYPKQQGLRGTFGGNIIQHSIPAVELRQPFFPTHMGPIKLRQFHRPPLKKYSFGALSQPGPHSVQPLLKHIKKKAKMREQERQASGGGEMFFMRTPQDLTGKDGDLILAEYSEENGPLMMQVGMATKIKNYYKRKPGKDPGAPDCKYGETVYCHTSPFLGSLHPGQLLQAFENNLFRAPIYLHKMPETDFLIIRTRQGYYIRELVDIFVVGQQCPLFEVPGPNSKRANTHIRDFLQVFIYRLFWKSKDRPRRIRMEDIKKAFPSHSESSIRKRLKLCADFKRTGMDSNWWVLKSDFRLPTEEEIRAMVSPEQCCAYYSMIAAEQRLKDAGYGEKSFFAPEEENEEDFQMKIDDEVRTAPWNTTRAFIAAMKGKCLLEVTGVADPTGCGEGFSYVKIPNKPTQQKDDKEPQPVKKTVTGTDADLRRLSLKNAKQLLRKFGVPEEEIKKLSRWEVIDVVRTMSTEQARSGEGPMSKFARGSRFSVAEHQERYKEECQRIFDLQNKVLSSTEVLSTDTDSSSAEDSDFEEMGKNIENMLQNKKTSSQLSREREEQERKELQRMLLAAGSAASGNNHRDDDTASVTSLNSSATGRCLKIYRTFRDEEGKEYVRCETVRKPAVIDAYVRIRTTKDEEFIRKFALFDEQHREEMRKERRRIQEQLRRLKRNQEKEKLKGPPEKKPKKMKERPDLKLKCGACGAIGHMRTNKFCPLYYQTNAPPSNPVAMTEEQEEELEKTVIHNDNEELIKVEGTKIVLGKQLIESADEVRRKSLVLKFPKQQLPPKKKRRVGTTVHCDYLNRPHKSIHRRRTDPMVTLSSILESIINDMRDLPNTYPFHTPVNAKVVKDYYKIITRPMDLQTLRENVRKRLYPSREEFREHLELIVKNSATYNGPKHSLTQISQSMLDLCDEKLKEKEDKLARLEKAINPLLDDDDQVAFSFILDNIVTQKMMAVPDSWPFHHPVNKKFVPDYYKVIVNPMDLETIRKNISKHKYQSRESFLDDVNLILANSVKYNGPESQYTKTAQEIVNVCYQTLTEYDEHLTQLEKDICTAKEAALEEAELESLDPMTPGPYTPQPPDLYDTNTSLSMSRDASVFQDESNMSVLDIPSATPEKQVTQEGEDGDGDLADEEEGTVQQPQASVLYEDLLMSEGEDDEEDAGSDEEGDNPFSAIQLSESGSDSDVGSGGIRPKQPRMLQENTRMDMENEESMMSYEGDGGEASHGLEDSNISYGSYEEPDPKSNTQDTSFSSIGGYEVSEEEEDEEEEEQRSGPSVLSQVHLSEDEEDSEDFHSIAGDSDLDSDE

SEQ ID NO: 15705 - protein, 331 aa, Homo sapiens
MTERPPSEAARSDPQLEGRDAAEASMAPPHLVLLNGVAKETSRAAAAEPPVIELGARGGPGGGPAGGGGAARDLKGRDAATAEARHRVPTTELCRPPGPAPAPAPASVTAELPGDGRMVQLSPPALAAPAAPGRALLYSLSQPLASLGSGFFGEPDAFPMFTTNNRVKRRPSPYEMEITDGPHTKVVRRIFTNSRERWRQQNVNGAFAELRKLIPTHPPDKKLSKNEILRLAMKYINFLAKLLNDQEEEGTQRAKTGKDPVVGAGGGGGGGGGGAPPDDLLQDVLSPNSSCGSSLDGAASPDSYTEEPAPKHTARSLHPAMLPAADGAGPR

SEQ ID NO: 15706 - protein, 108 aa, Homo sapiens
MTRKIFTNTRERWRQQNVNSAFAKLRKLIPTHPPDKKLSKNETLRLAMRYINFLVKVLGEQSLQQTGVAAQGNILGLFPQGPHLPGLEDRTLLENYQVPSPGPSHHIP

SEQ ID NO: 15707 - protein, 789 aa, Homo sapiens
MTSFQEVPLQTSNFAHVIFQNVAKSYLPNAHLECHYTLTPYIHPHPKDWVGIFKVGWSTARDYYTFLWSPMPEHYVEGSTVNCVLAFQGYYLPNDDGEFYQFCYVTHKGEIRGASTPFQFRASSPVEELLTMEDEGNSDMLVVTTKAGLLELKIEKTMKEKEELLKLIAVLEKETAQLREQVGRMERELNHEKERCDQLQAEQKGLTEVTQSLKMENEEFKKRFSDATSKAHQLEEDIVSVTHKAIEKETELDSLKDKLKKAQHEREQLECQLKTEKDEKELYKVHLKNTEIENTKLMSEVQTLKNLDGNKESVITHFKEEIGRLQLCLAEKENLQRTFLLTTSSKEDTCFLKEQLRKAEEQVQATRQEVVFLAKELSDAVNVRDRTMADLHTARLENEKVKKQLADAVAELKLNAMKKDQDKTDTLEHELRREVEDLKLRLQMAADHYKEKFKECQRLQKQINKLSDQSANNNNVFTKKTGNQQKVNDASVNTDPATSASTVDVKPSPSAAEADFDIVTKGQVCEMTKEIADKTEKYNKCKQLLQDEKAKCNKYADELAKMELKWKEQVKIAENVKLELAEVQDNYKELKRSLENPAERKMEGQNSQSPQCFKTCSEQNGYVLTLSNAQPVLQYGNPYASQETRDGADGAFYPDEIQRPPVRVPSWGLEDNVVCSQPARNFSRPDGLEDSEDSKEDENVPTAPDPPSQHLRGHGTGFCFDSSFDVHKKCPLCELMFPPNYDQSKFEEHVESHWKVCPMCSEQFPPDYDQQVFERHVQTHFDQNVLNFD

SEQ ID NO: 15708 - protein, 124 aa, Homo sapiens
MSYIPGQPVTAVVQRVEIHKLRQGENLILGFSIGGGIDQDPSQNPFSEDKTDKGIYVTRVSEGGPAEIAGLQIGDKIMQVNGWDMTMVTHDQARKRLTKRSEEVVRLLVTRQSLQKAVQQSMLS

SEQ ID NO: 15709 - protein, 535 aa, Homo sapiens
MGIVEPGCGDMLTGTEPMPGSDEGRAPGADPQHRYFYPEPGAQDADERRGGGSLGSPYPGGALVPAPPSRFLGAYAYPPRPQAAGFPGAGESFPPPADAEGYQPGEGYAAPDPRAGLYPGPREDYALPAGLEVSGKLRVALNNHLLWSKFNQHQTEMIITKQGRRMFPFLSFTVAGLEPTSHYRMFVDVVLVDQHHWRYQSGKWVQCGKAEGSMPGNRLYVHPDSPNTGAHWMRQEVSFGKLKLTNNKGASNNVTQMIVLQSLHKYQPRLHIVEVNDGEPEAACNASNTHIFTFQETQFIAVTAYQNAEITQLKIDNNPFAKGFRENFESMYTSVDTSIPSPPGPNCQFLGGDHYSPLLPNQYPVPSRFYPDLPGQAKDVVPQAYWLGAPRDHSYEAEFRAVSMKPAFLPSAPGPTMSYYRGQEVLAPGAGWPVAPQYPPKMGPASWFRPMRTLPMEPGPGGSEGRGPEDQGPPLVWTEIAPIRPESSDSGLGEGDSKRRRVSPYPSSGDSSSPAGAPSPFDKEAEGQFYNYFPN

SEQ ID NO: 15710 - protein, 339 aa, Homo sapiens
MDQNNSLPPYAQGLASPQGAMTPGIPIFSPMMPYGTGLTPQPIQNTNSLSILEEQQRQQQQQQQQQQQQQQQQQQQQQQQQQQQQQQQQQQQQQQAVAAAAVQQSTSQQATQGTSGQAPQLFHSQTLTTAPLPGTTPLYPSPMTPMTPITPATPASESSGIVPQLQNIVSTVNLGCKLDLKTIALRARNAEYNPKRFAAVIMRIREPRTTALIFSSGKMVCTGAKSEEQSRLAARKYARVVQKLGFPAKFLDFKIQNMVGSCDVKFPIRLEGLVLTHQQFSSYEPELFPGLIYRMIKPRIVLLIFVSGKVVLTGAKVRAEIYEAFENIYPILKGFRKTT

SEQ ID NO: 15711 - protein, 186 aa, Homo sapiens
MDADSDVALDILITNVVCVFRTRCHLNLRKIALEGANVIYKRDVGKVLMKLRKPRITATIWSSGKIICTGATSEEEAKFGARRLARSLQKLGFQVIFTDFKVVNVLAVCNMPFEIRLPEFTKNNRPHASYEPELHPAVCYRIKSLRATLQIFSTGSITVTGPNVKAVATAVEQIYPFVFESRKEIL

SEQ ID NO: 15712 - protein, 375 aa, Homo sapiens
MASAPWPERVPRLLAPRLPSYPPPPPTVGLRSMEQEETYLELYLDQCAAQDGLAPPRSPLFSPVVPYDMYILNASNPDTAFNSNPEVKETSGDFSSVDLSFLPDEVTQENKDQPVISKHETEENSESQSPQSRLPSPSEQDVGLGLNSSSLSNSHSQLHPGDTDSVQPSPEKPNSDSLSLASITPMTPMTPISECCGIVPQLQNIVSTVNLACKLDLKKIALHAKNAEYNPKRFAAVIMRIREPRTTALIFSSGKMVCTGAKSEEQSRLAARKYARVVQKLGFPARFLDFKIQNMVGSCDVRFPIRLEGLVLTHQQFSSYEPELFPGLIYRMVKPRIVLLIFVSGKVVLTGAKERSEIYEAFENIYPILKGFKKA

SEQ ID NO: 15713 - protein, 682 aa, Homo sapiens
MQLEHCLSPSIMLSKKFLNVSSSYPHSGGSELVLHDHPIISTTDNLERSSPLKKITRGMTNQSDTDNFPDSKDSPGDVQRSKLSPVLDGVSELRHSFDGSAADRYLLSQSSQPQSAATAPSAMFPYPGQHGPAHPAFSIGSPSRYMAHHPVITNGAYNSLLSNSSPQGYPTAGYPYPQQYGHSYQGAPFYQFSSTQPGLVPGKAQVYLCNRPLWLKFHRHQTEMIITKQGRRMFPFLSFNISGLDPTAHYNIFVDVILADPNHWRFQGGKWVPCGKADTNVQGNRVYMHPDSPNTGAHWMRQEISFGKLKLTNNKGASNNNGQMVVLQSLHKYQPRLHVVEVNEDGTEDTSQPGRVQTFTFPETQFIAVTAYQNTDITQLKIDHNPFAKGFRDNYDTIYTGCDMDRLTPSPNDSPRSQIVPGARYAMAGSFLQDQFVSNYAKARFHPGAGAGPGPGTDRSVPHTNGLLSPQQAEDPGAPSPQRWFVTPANNRLDFAASAYDTATDFAGNAATLLSYAAAGVKALPLQAAGCTGRPLGYYADPSGWGARSPPQYCGTKSGSVLPCWPNSAAAAARMAGANPYLGEEAEGLAAERSPLPPGAAEDAKPKDLSDSSWIETPSSIKSIDSSDSGIYEQAKRRRISPADTPVSESSSPLKSEVLAQRDCEKNCAKDISGYYGFYSHS

SEQ ID NO: 15714 - protein, 398 aa, Homo sapiens
MHFSTVTRDMEAFTASSLSSLGAAGGFPGAASPGADPYGPREPPPPPPRYDPCAAAAPGAPGPPPPPHAYPFAPAAGAATSAAAEPEGPGASCAAAAKAPVKKNAKVAGVSVQLEMKALWDEFNQLGTEMIVTKAGRRMFPTFQVKLFGMDPMADYMLLMDFVPVDDKRYRYAFHSSSWLVAGKADPATPGRVHYHPDSPAKGAQWMKQIVSFDKLKLTNNLLDDNGHIILNSMHRYQPRFHVVYVDPRKDSEKYAEENFKTFVFEETRFTAVTAYQNHRITQLKIASNPFAKGFRDCDPEDWPRNHRPGALPLMSAFARSRNPVASPTQPSGTEKGGHVLKDKEVKAETSRNTPEREVELLRDAGGCVNLGLPCPAECQPFNTQGLVAGRTAGDRLC

SEQ ID NO: 15715 - protein, 385 aa, Homo sapiens; identical to SEQ ID NO: 13046

SEQ ID NO: 15716 - protein, 602 aa, Homo sapiens
MSERRRSAVALSSRAHAFSVEALIGSNKKRKLRDWEEKGLDLSMEALSPAGPLGDTEDAAAHGLEPHPDSEQSTGSDSEVLTERTSCSFSTHTDLASGAAGPVPAAMSSMEEIQVELQCADLWKRFHDIGTEMIITKAGRRMFPAMRVKITGLDPHQQYYIAMDIVPVDNKRYRYVYHSSKWMVAGNADSPVPPRVYIHPDSLASGDTWMRQVVSFDKLKLTNNELDDQGHIILHSMHKYQPRVHVIRKDFSSDLSPTKPVPVGDGVKTFNFPETVFTTVTAYQNQQITRLKIDRNPFAKGFRDSGRNRTGLEAIMETYAFWRPPVRTLTFEDFTTMQKQQGGSTGTSPTTSSTGTPSPSASSHLLSPSCSPPTFHLAPNTFNVGCRESQLCNLNLSDYPPCARSNMAALQSYPGLSDSGYNRLQSGTTSATQPSETFMPQRTPSLISGIPTPPSLPGNSKMEAYGGQLGSFPTSQFQYVMQAGNAASSSSSPHMFGGSHMQQSSYNAFSLHNPYNLYGYNFPTSPRLAASPEKLSASQSTLLCSSPSNGAFGERQYLPSGMEHSMHMISPSPNNQQATNTCDGRQYGAVPGSSSQMSVHMV

SEQ ID NO: 15717 - protein, 607 aa, Homo sapiens
MAEKRRGSPCSMLSLKAHAFSVEALIGAEKQQQLQKKRRKLGAEEAAGAVDDGGCSRGGGAGEKGSSEGDEGAALPPPAGATSGPARSGADLERGAAGGCEDGFQQGASPLASPGGSPKGSPARSLARPGTPLPSPQAPRVDLQGAELWKRFHEIGTEMIITKAGRRMFPAMRVKISGLDPHQQYYIAMDIVPVDNKRYRYVYHSSKWMVAGNADSPVPPRVYIHPDSPASGETWMRQVISFDKLKLTNNELDDQGHIILHSMHKYQPRVHVIRKDCGDDLSPIKPVPSGEGVKAFSFPETVFTTVTAYQNQQITRLKIDRNPFAKGFRDSGRNRMGLEALVESYAFWRPSLRTLTFEDIPGIPKQGNASSSTLLQGTGNGVPATHPHLLSGSSCSSPAFHLGPNTSQLCSLAPADYSACARSGLTLNRYSTSLAETYNRLTNQAGETFAPPRTPSYVGVSSSTSVNMSMGGTDGDTFSCPQTSLSMQISGMSPQLQYIMPSPSSNAFATNQTHQGSYNTFRLHSPCALYGYNFSTSPKLAASPEKIVSSQGSFLGSSPSGTMTDRQMLPPVEGVHLLSSGGQQSFFDSRTLGSLTLSSSQVSAHMV

SEQ ID NO: 15718 - protein, 448 aa, Homo sapiens
MAMSELGTRKPSDGTVSHLLNVVESELQAGREKGDPTEKQLQIILEDAPLWQRFKEVTNEMIVTKNGRRMFPVLKISVTGLDPNAMYSLLLDFVPTDSHRWKYVNGEWVPAGKPEVSSHSCVYIHPDSPNFGAHWMKAPISFSKVKLTNKLNGGGQIMLNSLHKYEPQVHIVRVGSAHRMVTNCSFPETQFIAVTAYQNEEITALKIKYNPFAKAFLDAKERNHLRDVPEAISESQHVTYSHLGGWIFSNPDGVCTAGNSNYQYAAPLPLPAPHTHHGCEHYSGLRGHRQAPYPSAYMHRNHSPSVNLIESSSNNLQVFSGPDSWTSLSSTPHASILSVPHTNGPINPGPSPYPCLWTISNGAGGPSGPGPEVHASTPGAFLLGNPAVTSPPSVLSTQAPTSAGVEVLGEPSLTSIAVSTWTAVASHPFAGWGGPGAGGHHSPSSLDG

SEQ ID NO: 15719 - protein, 712 aa, Homo sapiens
MREPALAASAMAYHPFHAPRPADFPMSAFLAAAQPSFFPALALPPGALAKPLPDPGLAGAAAAAAAAAAAAEAGLHVSALGPHPPAAHLRSLKSLEPEDEVEDDPKVTLEAKELWDQFHKLGTEMVITKSGRRMFPPFKVRVSGLDKKAKYILLMDIVAADDCRYKFHNSRWMVAGKADPEMPKRMYIHPDSPATGEQWMAKPVAFHKLKLTNNISDKHGFTILNSMHKYQPRFHIVRANDILKLPYSTFRTYVFPETDFIAVTAYQNDKITQLKIDNNPFAKGFRDTGNGRREKRKQLTLPSLRLYEEHCKPERDGAESDASSCDPPPAREPPTSPGAAPSPLRLHRARAEEKSCAADSDPEPERLSEERAGAPLGRSPAPDSASPTRLTEPERARERRSPERGKEPAESGGDGPFGLRSLEKERAEARRKDEGRKEAAEGKEQGLAPLVVQTDSASPLGAGHLPGLAFSSHLHGQQFFGPLGAGQPLFLHPGQFTMGPGAFSAMGMGHLLASVAGGGNGGGGGPGTAAGLDAGGLGPAASAASTAAPFPFHLSQHMLASQGIPMPTFGGLFPYPYTYMAAAAAAASALPATSAAAAAAAAAGSLSRSPFLGSARPRLRFSPYQIPVTIPPSTSLLTTGLASEGSKAAGGNSREPSPLPELALRKVGAPSRGALSPSGSAKEAANELQSIQRLVSGLESQRALSPGRESPK

SEQ ID NO: 15720 - protein, 447 aa, Homo sapiens
MEFTASPKPQLSSRANAFSIAALMSSGGSKEKEATENTIKPLEQFVEKSSCAQPLGELTSLDAHGEFGGGSGSSPSSSSLCTEPLIPTTPIIPSEEMAKIACSLETKELWDKFHELGTEMIITKSGRRMFPTIRVSFSGVDPEAKYIVLMDIVPVDNKRYRYAYHRSSWLVAGKADPPLPARLYVHPDSPFTGEQLLKQMVSFEKVKLTNNELDQHGHIILNSMHKYQPRVHIIKKKDHTASLLNLKSEEFRTFIFPETVFTAVTAYQNQLITKLKIDSNPFAKGFRDSSRLTDIERESVESLIQKHSYARSPIRTYGGEEDVLGDESQTTPNRGSAFTTSDNLSLSSWVSSSSSFPGFQHPQSLTALGTSTASIATPIPHPIQGSLPPYSRLGMPLTPSAIASSMQGSGPTFPSFHMPRYHHYFQQGPYAAIQGLRHSSAVMTPFV

SEQ ID NO: 15721 - protein, 535 aa, Homo sapiens; identical to SEQ ID NO: 15709

SEQ ID NO: 15722 - protein, 520 aa, Homo sapiens
MALSSRARAFSVEALVGRPSKRKLQDPIQAEQPELREKKGGEEEEERRSSAAGKSEPLEKQPKTEPSTSASSGCGSDSGYGNSSESLEEKDIQMELQGSELWKRFHDIGTEMIITKAGRRMFPSVRVKVKGLDPGKQYHVAIDVVPVDSKRYRYVYHSSQWMVAGNTDHLCIIPRFYVHPDSPCSGETWMRQIISFDRMKLTNNEMDDKGHIILQSMHKYKPRVHVIEQGSSVDLSQIQSLPTEGVKTFSFKETEFTTVTAYQNQQITKLKIERNPFAKGFRDTGRNRGVLDGLLETYPWRPSFTLDFKTFGADTQSGSSGSSPVTSSGGAPSPLNSLLSPLCFSPMFHLPTSSLGMPCPEAYLPNVNLPLCYKICPTNFWQQQPLVLPAPERLASSNSSQSLAPLMMEVPMLSSLGVTNSKSGSSEDSSDQYLQAPNSTNQMLYGLQSPGNIFLPNSITPEALSCSFHPSYDFYRYNFSMPSRLISGSNHLKVNDDSQVSFGEGKCNHVHWYPAINHYL

SEQ ID NO: 15723 - protein, 743 aa, Homo sapiens
MSLSMRDPVIPGTSMAYHPFLPHRAPDFAMSAVLGHQPPFFPALTLPPNGAAALSLPGALAKPIMDQLVGAAETGIPFSSLGPQAHLRPLKTMEPEEEVEDDPKVHLEAKELWDQFHKRGTEMVITKSGRRMFPPFKVRCSGLDKKAKYILLMDIIAADDCRYKFHNSRWMVAGKADPEMPKRMYIHPDSPATGEQWMSKVVTFHKLKLTNNISDKHGFTLAFPSDHATWQGNYSFGTQTILNSMHKYQPRFHIVRANDILKLPYSTFRTYLFPETEFIAVTAYQNDKITQLKIDNNPFAKGFRDTGNGRREKRKQLTLQSMRVFDERHKKENGTSDESSSEQAAFNCFAQASSPAASTVGTSNLKDLCPSEGESDAEAESKEEHGPEACDAAKISTTTSEEPCRDKGSPAVKAHLFAAERPRDSGRLDKASPDSRHSPATISSSTRGLGAEERRSPVREGTAPAKVEEARALPGKEAFAPLTVQTDAAAAHLAQGPLPGLGFAPGLAGQQFFNGHPLFLHPSQFAMGGAFSSMAAAGMGPLLATVSGASTGVSGLDSTAMASAAAAQGLSGASAATLPFHLQQHVLASQGLAMSPFGSLFPYPYTYMAAAAAASSAAASSSVHRHPFLNLNTMRPRLRYSPYSIPVPVPDGSSLLTTALPSMAAAAGPLDGKVAALAASPASVAVDSGSELNSRSSTLSSSSMSLSPKLCAEKEAATSELQSIQRLVSGLEAKPDRSRSASP

SEQ ID NO: 15724 - protein, 545 aa, Homo sapiens
MLQDKGLSESEEAFRAPGPALGEASAANAPEPALAAPGLSGAALGSPPGPGADVVAAAAAEQTIENIKVGLHEKELWKKFHEAGTEMIITKAGRRMFPSYKVKVTGMNPKTKYILLIDIVPADDHRYKFCDNKWMVAGKAEPAMPGRLYVHPDSPATGAHWMRQLVSFQKLKLTNNHLDPFGHIILNSMHKYQPRLHIVKADENNAFGSKNTAFCTHVFPETSFISVTSYQNHKITQLKIENNPFAKGFRGSDDSDLRVARLQSKEYPVISKSIMRQRLISPQLSATPDVGPLLGTHQALQHYQHENGAHSQLAEPQDLPLSTFPTQRDSSLFYHCLKRRDGTRHLDLPCKRSYLEAPSSVGEDHYFRSPPPYDQQMLSPSYCSEVTPREACMYSGSGPEIAGVSGVDDLPPPPLSCNMWTSVSPYTSYSVQTMETVPYQPFPTHFTATTMMPRLPTLSAQSSQPPGNAHFSVYNQLSQSQVRERGPSASFPRERGLPQGCERKPPSPHLNAANEFLYSQTFSLSRESSLQYHSGMGTVENWTDG

SEQ ID NO: 15725 - protein, 518 aa, Homo sapiens
MADADEGFGLAHTPLEPDAKDLPCDSKPESALGAPSKSPSSPQAAFTQQGMEGIKVFLHERELWLKFHEVGTEMIITKAGRRMFPSYKVKVTGLNPKTKYILLMDIVPADDHRYKFADNKWSVTGKAEPAMPGRLYVHPDSPATGAHWMRQLVSFQKLKLTNNHLDPFGHIILNSMHKYQPRLHIVKADENNGFGSKNTAFCTHVFPETAFIAVTSYQNHKITQLKIENNPFAKGFRGSDDMELHRMSRMQSKEYPVVPRSTVRQKVASNHSPFSSESRALSTSSNLGSQYQCENGVSGPSQDLLPPPNPYPLPQEHSQIYHCTKRKEEECSTTDHPYKKPYMETSPSEEDSFYRSSYPQQQGLGASYRTESAQRQACMYASSAPPSEPVPSLEDISCNTWPSMPSYSSCTVTTVQPMDRLPYQHFSAHFTSGPLVPRLAGMANHGSPQLGEGMFQHQTSVAHQPVVRQCGPQTGLQSPGTLQPPEFLYSHGVPRTLSPHQYHSVHGVGMVPEWSDNS

SEQ ID NO: 15726 - protein, 436 aa, Homo sapiens
MYHPRELYPSLGAGYRLGPAQPGADSSFPPALAEGYRYPELDTPKLDCFLSGMEAAPRTLAAHPPLPLLPPAMGTEPAPSAPEALHSLPGVSLSLENRELWKEFSSVGTEMIITKAGRRMFPACRVSVTGLDPEARYLFLLDVIPVDGARYRWQGRRWEPSGKAEPRLPDRVYIHPDSPATGAHWMRQPVSFHRVKLTNSTLDPHGHLILHSMHKYQPRIHLVRAAQLCSQHWGGMASFRFPETTFISVTAYQNPQITQLKIAANPFAKGFRENGRNCKRERDARVKRKLRGPEPAATEAYGSGDTPGGPCDSTLGGDIRESDPEQAPAPGEATAAPAPLCGGPSAEAYLLHPAAFHGAPSHLPTRSPSFPEAPDSGRSAPYSAAFLELPHGSGGSGYPAAPPAVPFAPHFLQGGPFPLPYTAPGGYLDVGSKPMY

SEQ ID NO: 15727 - protein, 682 aa, Homo sapiens; identical to SEQ ID NO: 13050

SEQ ID NO: 15728 - protein, 199 aa, Homo sapiens
MAFALLRPVGAHVLYPDVRLLSEDEENRSESDASDQSFGCCEGPEAARRGPGPGGGRRAGGGGGAGPVVVVRQRQAANARERDRTQSVNTAFTALRTLIPTEPVDRKLSKIETVRLASSYIAHLANVLLLGDSADDGQPCFRAAGSAKGAVPAAADGGRQPRSICTFCLSNQRKGGGRRDLGGSCLKVRGVAPLRGPRR

SEQ ID NO: 15729 - protein, 345 aa, Homo sapiens
MLPCFQLLRIGGGRGGDLYTFHPPAGAGCTYRLGHRADLCDVALRPQQEPGLISGIHAELHAEPRGDDWRVSLEDHSSQGTLVNNVRLPRGHRLELSDGDLLTFGPEGPPGTSPSEFYFMFQQVRVKPQDFAAITIPRSRGEARVGAGFRPMLPSQGAPQRPLSTFSPAPKATLILNSIGSLSKLRPQPLTFSPSWGGPKSLPVPAPPGEMGTTPSAPPQRNRRKSVHRVLAELDDESEPPENPPPVLMEPRKKLRVDKAPLTPTGNRRGRPRKYPVSAPMAPPAVGGGEPCAAPCCCLPQEETVAWVQCDGCDVWFHVACVGCSIQAAREADFRCPGCRAGIQT

SEQ ID NO: 15730 - protein, 1960 aa, Homo sapiens [sequence omitted]

SEQ ID NO: 15731 - protein, 179 aa, Homo sapiens
MSTGSLSDVEDLQEVEMLECDGLKMDSNKEFVTSNESTEESSNCENGSPQKGRGGLGKRRKAPTKKSPLSGVSQEGKQVQRNAANARERARMRVLSKAFSRLKTTLPWVPPDTKLSKLDTLRLASSYIAHLRQILANDKYENGYIHPVNLTWPFMVAGKPESDLKEVVTASRLCGTTAS

SEQ ID NO: 15732 - protein, 214 aa, Homo sapiens
MSQRKARGPPAMPGVGHSQTQAKARLLPGADRKRSRLSRTRQDPWEERSWSNQRWSRATPGPRGTRAGGLALGRSEASPENAARERSRVRTLRQAFLALQAALPAVPPDTKLSKLDVLVLAASYIAHLTRTLGHELPGPAWPPFLRGLRYLHPLKKWPMRSRLYAGGLGYSDLDSTTASTPSQRTRDAEVGSQVPGEADALLSTTPLSPALGDK

SEQ ID NO: 15733 - protein, 167 aa, Homo sapiens
MDRGRPAGSPLSASAEPAPLAAAIRDSRPGRTGPGPAGPGGGSRSGSGRPAAANAARERSRVQTLRHAFLELQRTLPSVPPDTKLSKLDVLLLATTYIAHLTRSLQDDAEAPADAGLGALRGDGYLHPVKKWPMRSRLYIGATGQFLKHSVSGEKTNHDNTPTDSQP

SEQ ID NO: 15734 - protein, 676 aa, Homo sapiens
MSRRALRRLRGEQRGQEPLGPGALHFDLRDDDDAEEEGPKRELGVRRPGGAGKEGVRVNNRFELINIDDLEDDPVVNGERSGCALTDAVAPGNKGRGQRGNTESKTDGDDTETVPSEQSHASGKLRKKKKKQKNKKSSTGEASENGLEDIDRILERIEDSTGLNRPGPAPLSSRKHVLYVEHRHLNPDTELKRYFGARAILGEQRPRQRQRVYPKCTWLTTPKSTWPRYSKPGLSMRLLESKKGLSFFAFEHSEEYQQAQHKFLVAVESMEPNNIVVLLQTSPYHVDSLLQLSDACRFQEDQEMARDLVERALYSMECAFHPLFSLTSGACRLDYRRPENRSFYLALYKQMSFLEKRGCPRTALEYCKLILSLEPDEDPLCMLLLIDHLALRARNYEYLIRLFQEWEAHRNLSQLPNFAFSVPLAYFLLSQQTDLPECEQSSARQKASLLIQQALTMFPGVLLPLLESCSVRPDASVSSHRFFGPNAEISQPPALSQLVNLYLGRSHFLWKEPATMSWLEENVHEVLQAVDAGDPAVEACENRRKVLYQRAPRNIHRHVILSEIKEAVAALPPDVTTQSVMGFDPLPPSDTIYSYVRPERLSPISHGNTIALFFRSLLPNYTMEGERPEEGVAGGLNRNQGLNRLMLAVRDMMANFHLNDLEAPHEDDAEGEGEWD

SEQ ID NO: 15735 - protein, 654 aa, Homo sapiens
MNQPQRMAPVGTDKELSDLLDFSMMFPLPVTNGKGRPASLAGAQFGGSGLEDRPSSGSWGSGDQSSSSFDPSRTFSEGTHFTESHSSLSSSTFLGPGLGGKSGERGAYASFGRDAGVGGLTQAGFLSGELALNSPGPLSPSGMKGTSQYYPSYSGSSRRRAADGSLDTQPKKVRKVPPGLPSSVYPPSSGEDYGRDATAYPSAKTPSSTYPAPFYVADGSLHPSAELWSPPGQAGFGPMLGGGSSPLPLPPGSGPVGSSGSSSTFGGLHQHERMGYQLHGAEVNGGLPSASSFSSAPGATYGGVSSHTPPVSGADSLLGSRGTTAGSSGDALGKALASIYSPDHSSNNFSSSPSTPVGSPQGLAGTSQWPRAGAPGALSPSYDGGLHGLQSKIEDHLDEAIHVLRSHAVGTAGDMHTLLPGHGALASGFTGPMSLGGRHAGLVGGSHPEDGLAGSTSLMHNHAALPSQPGTLPDLSRPPDSYSGLGRAGATAAASEIKREEKEDEENTSAADHSEEEKKELKAPRARTSPDEDEDDLLPPEQKAEREKERRVANNARERLRVRDINEAFKELGRMCQLHLNSEKPQTKLLILHQAVSVILNLEQQVRERNLNPKAACLKRREEEKVSGVVGDPQMVLSAPHPGLSEAHNPAGHM

SEQ ID NO: 15736 - protein, 667 aa, Homo sapiens
MHHQQRMAALGTDKELSDLLDFSAMFSPPVSSGKNGPTSLASGHFTGSNVEDRSSSGSWGNGGHPSPSRNYGDGTPYDHMTSRDLGSHDNLSPPFVNSRIQSKTERGSYSSYGRESNLQGCHQQSLLGGDMDMGNPGTLSPTKPGSQYYQYSSNNPRRRPLHSSAMEVQTKKVRKVPPGLPSSVYAPSASTADYNRDSPGYPSSKPATSTFPSSFFMQDGHHSSDPWSSSSGMNQPGYAGMLGNSSHIPQSSSYCSLHPHERLSYPSHSSADINSSLPPMSTFHRSGTNHYSTSSCTPPANGTDSIMANRGSGAAGSSQTGDALGKALASIYSPDHTNNSFSSNPSTPVGSPPSLSAGTAVWSRNGGQASSSPNYEGPLHSLQSRIEDRLERLDDAIHVLRNHAVGPSTAMPGGHGDMHGIIGPSHNGAMGGLGSGYGTGLLSANRHSLMVGTHREDGVALRGSHSLLPNQVPVPQLPVQSATSPDLNPPQDPYRGMPPGLQGQSVSSGSSEIKSDDEGDENLQDTKSSEDKKLDDDKKDIKSITSNNDDEDLTPEQKAEREKERRMANNARERLRVRDINEAFKELGRMVQLHLKSDKPQTKLLILHQAVAVILSLEQQVRERNLNPKAACLKRREEEKVSSEPPPLSLAGPHPGMGDASNHMGQM

SEQ ID NO: 15737 - protein, 384 aa, Homo sapiens
MPQLDSGGGGAGGGDDLGAPDELLAFQDEGEEQDDKSRDSAAGPERDLAELKSSLVNESEGAAGGAGIPGVPGAGAGARGEAEALGREHAAQRLFPDKLPEPLEDGLKAPECTSGMYKETVYSAFNLLMHYPPPSGAGQHPQPQPPLHKANQPPHGVPQLSLYEHFNSPHPTPAPADISQKQVHRPLQTPDLSGFYSLTSGSMGQLPHTVSWFTHPSLMLGSGVPGHPAAIPHPAIVPPSGKQELQPFDRNLKTQAESKAEKEAKKPTIKKPLNAFMLYMKEMRAKVIAECTLKESAAINQILGRRWHALSREEQAKYYELARKERQLHMQLYPGWSARDNYGKKKRRSREKHQESTTETNWPRELKDGNGQESLSMSSSSSPA

SEQ ID NO: 15738 - protein, 588 aa, Homo sapiens
MPQLGGGGGGGGGGSGGGGGSSAGAAGGGDDLGANDELIPFQDEGGEEQEPSSDSASAQRDLDEVKSSLVNESENQSSSSDSEAERRPQPVRDTFQKPRDYFAEVRRPQDSAFFKGPPYPGYPFLMIPDLSSPYLSNGPLSPGGARTYLQMKWPLLDVPSSATVKDTRSPSPAHLSNKVPVVQHPHHMHPLTPLITYSNDHFSPGSPPTHLSPEIDPKTGIPRPPHPSELSPYYPLSPGAVGQIPHPLGWLVPQQGQPMYSLPPGGFRHPYPALAMNASMSSLVSSRFSPHMVAPAHPGLPTSGIPHPAIVSPIVKQEPAPPSLSPAVSVKSPVTVKKEEEKKPHVKKPLNAFMLYMKEMRAKVVAECTLKESAAINQILGRKWHNLSREEQAKYYELARKERQLHSQLYPTWSARDNYGKKKKRKREKQLSQTQSQQQVQEAEGALASKSKKPCVQYLPPEKPCDSPASSHGSMLDSPATPSAALASPAAPAATHSEQAQPLSLTTKPETRAQLALHSAAFLSAKAAASSSGQMGSQPPLLSRPLPLGSMPTALLASPPSFPATLHAHQALPVLQAQPLSLVTKSAH

SEQ ID NO: 15739 - protein, 619 aa, Homo sapiens
MPQLNGGGGDDLGANDELISFKDEGEQEEKSSENSSAERDLADVKSSLVNESETNQNSSSDSEAERRPPPRSESFRDKSRESLEEAAKRQDGGLFKGPPYPGYPFIMIPDLTSPYLPNGSLSPTARTLHFQSGSTHYSAYKTIEHQIAVQYLQMKWPLLDVQAGSLQSRQALKDARSPSPAHIVSNKVPVVQHPHHVHPLTPLITYSNEHFTPGNPPPHLPADVDPKTGIPRPPHPPDISPYYPLSPGTVGQIPHPLGWLVPQQGQPVYPITTGGFRHPYPTALTVNASMSRFPPHMVPPHHTLHTTGIPHPAIVTPTVKQESSQSDVGSLHSSKHQDSKKEEEKKKPHIKKPLNAFMLYMKEMRAKVVAECTLKESAAINQILGRRWHALSREEQAKYYELARKERQLHMQLYPGWSARDNYGKKKKRKRDKQPGETNEHSECFLNPCLSLPPITDLSAPKKCRARFGLDQQNNWCGPCRRKKKCVRYIQGEGSCLSPPSSDGSLLDSPPPSPNLLGSPPRDAKSQTEQTQPLSLSLKPDPLAHLSMMPPPPALLLAEATHKASALCPNGALDLPPAALQPAAPSSSIAQPSTSSLHSHSSLAGTQPQPLSLVTKSLE

SEQ ID NO: 15740 - protein, 500 aa, Homo sapiens
MSGPGPREPPPEAGAAGGEAAVEGAGGGDAALGEPGLSFTTTDLSLVEMTEVEYTQLQHILCSHMEAAADGELETRLNSALLAAAGPGAGAGGFAAGGQGGAAPVYPVLCPSALAADAPCLGHIDFQELRMMLLSEAGAAEKTSGGGDGARARADGAAKEGAGAAAAAAGPDGAPEARAKPAVRVRLEDRFNSIPAEPPPAPRGPEPPEPGGALNNLVTLIRHPSELMNVPLQQQNKCTALVKNKTAATTTALQFTYPLFTTNACSTSGNSNLSQTQSSSNSCSVLEAAKHQDIGLPRAFSFCYQQEIESTKQTLGSRNKVLPEQVWIKVGEAALCKQALKRNRSRMRQLDTNVERRALGEIQNVGEGATATQGAWQSSESSQANLGEQAQSGPQGGRSQRRERHNRMERDRRRRIRICCDELNLLVPFCNAETDKATTLQWTTAFLKYIQERHGDSLKKEFESVFCGKTGRRLKLTRPDSLVTCPAQGSLQSSPSMEIK

SEQ ID NO: 15741 - protein, 426 aa, Homo sapiens
MEPSSWSGSESPAENMERMSDSADKPIDNDAEGVWSPDIEQSFQEALAIYPPCGRRKIILSDEGKMYGRNELIARYIKLRTGKTRTRKQVSSHIQVLARRKSRDFHSKLKDQTAKDKALQHMAAMSSAQIVSATAIHNKLGLPGIPRPTFPGAPGFWPGMIQTGQPGSSQDVKPFVQQAYPIQPAVTAPIPGFEPASAPAPSVPAWQGRSIGTTKLRLVEFSAFLEQQRDPDSYNKHLFVHIGHANHSYSDPLLESVDIRQIYDKFPEKKGGLKELFGKGPQNAFFLVKFWADLNCNIQDDAGAFYGVTSQYESSENMTVTCSTKVCSFGKQVVEKVETEYARFENGRFVYRINRSPMCEYMINFIHKLKHLPEKYMMNSVLENFTILLVVTNRDTQETLLCMACVFEVSNSEHGAQHHIYRLVKD

SEQ ID NO: 15742 - protein, 447 aa, Homo sapiens
MGEPRAGAALDDGSGWTGSEEGSEEGTGGSEGAGGDGGPDAEGVWSPDIEQSFQEALAIYPPCGRRKIILSDEGKMYGRNELIARYIKLRTGKTRTRKQVSSHIQVLARRKSREIQSKLKDQVSKDKAFQTMATMSSAQLISAPSLQAKLGPTGPQASELFQFWSGGSGPPWNVPDVKPFSQTPFTLSLTPPSTDLPGYEPPQALSPLPPPTPSPPAWQARGLGTARLQLVEFSAFVEPPDAVDSYQRHLFVHISQHCPSPGAPPLESVDVRQIYDKFPEKKGGLRELYDRGPPHAFFLVKFWADLNWGPSGEEAGAGGSISSGGFYGVSSQYESLEHMTLTCSSKVCSFGKQVVEKVETERAQLEDGRFVYRLLRSPMCEYLVNFLHKLRQLPERYMMNSVLENFTILQVVTNRDTQELLLCTAYVFEVSTSERGAQHHIYRLVRD

SEQ ID NO: 15743 - protein, 435 aa, Homo sapiens
MASNSWNASSSPGEAREDGPEGLDKGLDNDAEGVWSPDIEQSFQEALAIYPPCGRRKIILSDEGKMYGRNELIARYIKLRTGKTRTRKQVSSHIQVLARKKVREYQVGIKAMNLDQVSKDKALQSMASMSSAQIVSASVLQNKFSPPSPLPQAVFSTSSRFWSSPPLLGQQPGPSQDIKPFAQPAYPIQPPLPPTLSSYEPLAPLPSAAASVPVWQDRTIASSRLRLLEYSAFMEVQRDPDTYSKHLFVHIGQTNPAFSDPPLEAVDVRQIYDKFPEKKGGLKELYEKGPPNAFFLVKFWADLNSTIQEGPGAFYGVSSQYSSADSMTISVSTKVCSFGKQVVEKVETEYARLENGRFVYRIHRSPMCEYMINFIHKLKHLPEKYMMNSVLENFTILQVVTSRDSQETLLVIAFVFEVSTSEHGAQHHVYKLVKD

SEQ ID NO: 15744 - protein, 434 aa, Homo sapiens
MEGTAGTITSNEWSSPTSPEGSTASGGSQALDKPIDNDAEGVWSPDIEQSFQEALAIYPPCGRRKIILSDEGKMYGRNELIARYIKLRTGKTRTRKQVSSHIQVLARRKAREIQAKLKDQAAKDKALQSMAAMSSAQIISATAFHSSMALARGPGRPAVSGFWQGALPGQAGTSHDVKPFSQQTYAVQPPLPLPGFESPAGPAPSPSAPPAPPWQGRSVASSKLWMLEFSAFLEQQQDPDTYNKHLFVHIGQSSPSYSDPYLEAVDIRQIYDKFPEKKGGLKDLFERGPSNAFFLVKFWADLNTNIEDEGSSFYGVSSQYESPENMIITCSTKVCSFGKQVVEKVETEYARYENGHYSYRIHRSPLCEYMINFIHKLKHLPEKYMMNSVLENFTILQVVTNRDTQETLLCIAYVFEVSASEHGAQHHIYRLVKE

SEQ ID NO: 15745 - protein, 303 aa, Homo sapiens
MSDAGGGKKPPVDPQAGPGPGPGRAAGERGLSGSFPLVLKKLMENPPREARLDKEKGKEKLEEDEAAAASTMAVSASLMPPIWDKTIPYDGESFHLEYMDLDEFLLENGIPASPTHLAHNLLLPVAELEGKESASSSTASPPSSSTAIFQPSETVSSTESSLEKERETPSPIDPNCVEVDVNFNPDPADLVLSSVPGGELFNPRKHKFAEEDLKPQPMIKKAKKVFVPDEQKDEKYWTRRKKNNVAAKRSRDARRLKENQITIRAAFLEKENTALRTEVAELRKEVGKCKTIVSKYETKYGPL

SEQ ID NO: 15746 - protein, 439 aa, Homo sapiens
MAEDVSSAAPSPRGCADGRDADPTEEQMAETERNDEEQFECQELLECQVQVGAPEEEEEEEEDAGLVAEAEAVAAGWMLDFLCLSLCRAFRDGRSEDFRRTRNSAEAIIHGLSSLTACQLRTIYICQFLTRIAAGKTLDAQFENDERITPLESALMIWGSIEKEHDKLHEEIQNLIKIQAIAVCMENGNFKEAEEVFERIFGDPNSHMPFKSKLLMIISQKDTFHSFFQHFSYNHMMEKIKSYVNYVLSEKSSTFLMKAAAKVVESKRTRTITSQDKPSGNDVEMETEANLDTRKSVSDKQSAVTESSEGTVSLLRSHKNLFLSKLQHGTQQQDLNKKERRVGTPQSTKKKKESRRATESRIPVSKSQPVTPEKHRARKRQAWLWEEDKNLRSGVRKYGEGNWSKILLHYKFNNRTSVMLKDRWRTMKKLKLISSDSED

SEQ ID NO: 15747 - protein, 542 aa, Homo sapiens
MAAGAGTAGPASGPGVVRDPAASQPRKRPGREGGEGARRSDTMAGGGGSSDGSGRAAGRRASRSSGRARRGRHEPGLGGPAERGAGEARLEEAVNRWVLKFYFHEALRAFRGSRYGDFRQIRDIMQALLVRPLGKEHTVSRLLRVMQCLSRIEEGENLDCSFDMEAELTPLESAINVLEMIKTEFTLTEAVVESSRKLVKEAAVIICIKNKEFEKASKILKKHMSKDPTTQKLRNDLLNIIREKNLAHPVIQNFSYETFQQKMLRFLESHLDDAEPYLLTMAKKALKSESAASSTGKEDKQPAPGPVEKPPREPARQLRNPPTTIGMMTLKAAFKTLSGAQDSEAAFAKLDQKDLVLPTQALPASPALKNKRPRKDENESSAPADGEGGSELQPKNKRMTISRLVLEEDSQSTEPSAGLNSSQEAASAPPSKPTVLNQPLPGEKNPKVPKGKWNSSNGVEEKETWVEEDELFQVQAAPDEDSTTNITKKQKWTVEESEWVKAGVQKYGEGNWAAISKNYPFVNRTAVMIKDRWRTMKRLGMN

SEQ ID NO: 15748 - protein, 2136 aa, Homo sapiens
MSRSRHARPSRLVRKEDVNKKKKNSQLRKTTKGANKNVASVKTLSPGKLKQLIQERDVKKKTEPKPPVPVRSLLTRAGAARMNLDRTEVLFQNPESLTCNGFTMALRSTSLSRRLSQPPLVVAKSKKVPLSKGLEKQHDCDYKILPALGVKHSENDSVPMQDTQVLPDIETLIGVQNPSLLKGKSQETTQFWSQRVEDSKINIPTHSGPAAEILPGPLEGTRCGEGLFSEETLNDTSGSPKMFAQDTVCAPFPQRATPKVTSQGNPSIQLEELGSRVESLKLSDSYLDPIKSEHDCYPTSSLNKVIPDLNLRNCLALGGSTSPTSVIKFLLAGSKQATLGAKPDHQEAFEATANQQEVSDTTSFLGQAFGAIPHQWELPGADPVHGEALGETPDLPEIPGAIPVQGEVFGTILDQQETLGMSGSVVPDLPVFLPVPPNPIATFNAPSKWPEPQSTVSYGLAVQGAIQILPLGSGHTPQSSSNSEKNSLPPVMAISNVENEKQVHISFLPANTQGFPLAPERGLFHASLGIAQLSQAGPSKSDRGSSQVSVTSTVHVVNTTVVTMPVPMVSTSSSSYTTLLPTLEKKKRKRCGVCEPCQQKTNCGECTYCKNRKNSHQICKKRKCEELKKKPSVVVPLEVIKENKRPQREKKPKVLKADFDNKPVNGPKSESMDYSRCGHGEEQKLELNPHTVENVTKNEDSMTGIEVEKWTQNKKSQLTDHVKGDFSANVPEAEKSKNSEVDKKRTKSPKLFVQTVRNGIKHVHCLPAETNVSFKKFNIEEFGKTLENNSYKFLKDTANHKNAMSSVATDMSCDHLKGRSNVLVFQQPGFNCSSIPHSSHSIINHHASIHNEGDQPKTPENIPSKEPKDGSPVQPSLLSLMKDRRLTLEQVVAIEALTQLSEAPSENSSPSKSEKDEESEQRTASLLNSCKAILYTVRKDLQDPNLQGEPPKLNHCPSLEKQSSCNTVVFNGQTTTLSNSHINSATNQASTKSHEYSKVTNSLSLFIPKSNSSKIDTNKSIAQGIITLDNCSNDLHQLPPRNNEVEYCNQLLDSSKKLDSDDLSCQDATHTQIEEDVATQLTQLASIIKINYIKPEDKKVESTPTSLVTCNVQQKYNQEKGTIQQKPPSSVHNNHGSSLTKQKNPTQKKTKSTPSRDRRKKKPTVVSYQENDRQKWEKLSYMYGTICDIWIASKFQNFGQFCPHDFPTVFGKISSSTKIWKPLAQTRSIMQPKTVFPPLTQIKLQRYPESAEEKVKVEPLDSLSLFHLKTESNGKAFTDKAYNSQVQLTVNANQKAHPLTQPSSPPNQCANVMAGDDQIRFQQVVKEQLMHQRLPTLPGISHETPLPESALTLRNVNVVCSGGITVVSTKSEEEVCSSSFGTSEFSTVDSAQKNFNDYAMNFFTNPTKNLVSITKDSELPTCSCLDRVIQKDKGPYYTHLGAGPSVAAVREIMENRYGQKGNAIRIEIVVYTGKEGKSSHGCPIAKWVLRRSSDEEKVLCLVRQRTGHHCPTAVMVVLIMVWDGIPLPMADRLYTELTENLKSYNGHPTDRRCTLNENRTCTCQGIDPETCGASFSFGCSWSMYFNGCKFGRSPSPRRFRIDPSSPLHEKNLEDNLQSLATRLAPIYKQYAPVAYQNQVEYENVARECRLGSKEGRPFSGVTACLDFCAHPHRDIHNMNNGSTVVCTLTREDNRSLGVIPQDEQLHVLPLYKLSDTDEFGSKEGMEAKIKSGAIEVLAPRRKKRTCFTQPVPRSGKKRAAMMTEVLAHKIRAVEKKPIPRIKRKNNSTTTNNSKPSSLPTLGSNTETVQPEVKSETEPHFILKSSDNTKTYSLMPSAPHPVKEASPGFSWSPKTASATPAPLKNDATASCGFSERSSTPHCTMPSGRLSGANAAAADGPGISQLGEVAPLPTLSAPVMEPLINSEPSTGVTEPLTPHQPNHQPSFLTSPQDLASSPMEEDEQHSEADEPPSDEPLSDDPLSPAEEKLPHIDEYWSDSEHIFLDANIGGVAIAPAHGSVLIECARRELHATTPVEHPNRNHPTRLSLVFYQHKNLNKPQHGFELNKIKFEAKEAKNKKMKASEQKDQAANEGPEQSSEVNELNQIPSHKALTLTHDNVVTVSPYALTHVAGPYNHWV

SEQ ID NO: 15749 - protein, 2002 aa, Homo sapiens
MEQDRTNHVEGNRLSPFLIPSPPICQTEPLATKLQNGSPLPERAHPEVNGDTKWHSFKSYYGIPCMKGSQNSRVSPDFTQESRGYSKCLQNGGIKRTVSEPSLSGLLQIKKLKQDQKANGERRNFGVSQERNPGESSQPNVSDLSDKKESVSSVAQENAVKDFTSFSTHNCSGPENPELQILNEQEGKSANYHDKNIVLLKNKAVLMPNGATVSASSVEHTHGELLEKTLSQYYPDCVSIAVQKTTSHINAINSQATNELSCEITHPSHTSGQINSAQTSNSELPPKPAAVVSEACDADDADNASKLAAMLNTCSFQKPEQLQQQKSVFEICPSPAENNIQGTTKLASGEEFCSGSSSNLQAPGGSSERYLKQNEMNGAYFKQSSVFTKDSFSATTTPPPPSQLLLSPPPPLPQVPQLPSEGKSTLNGGVLEEHHHYPNQSNTTLLREVKIEGKPEAPPSQSPNPSTHVCSPSPMLSERPQNNCVNRNDIQTAGTMTVPLCSEKTRPMSEHLKHNPPIFGSSGELQDNCQQLMRNKEQEILKGRDKEQTRDLVPPTQHYLKPGWIELKAPRFHQAESHLKRNEASLPSILQYQPNLSNQMTSKQYTGNSNMPGGLPRQAYTQKTTQLEHKSQMYQVEMNQGQSQGTVDQHLQFQKPSHQVHFSKTDHLPKAHVQSLCGTRFHFQQRADSQTEKLMSPVLKQHLNQQASETEPFSNSHLLQHKPHKQAAQTQPSQSSHLPQNQQQQQKLQIKNKEEILQTFPHPQSNNDQQREGSFFGQTKVEECFHGENQYSKSSEFETHNVQMGLEEVQNINRRNSPYSQTMKSSACKIQVSCSNNTHLVSENKEQTTHPELFAGNKTQNLHHMQYFPNNVIPKQDLLHRCFQEQEQKSQQASVLQGYKNRNQDMSGQQAAQLAQQRYLIHNHANVFPVPDQGGSHTQTPPQKDTQKHAALRWHLLQKQEQQQTQQPQTESCHSQMHRPIKVEPGCKPHACMHTAPPENKTWKKVTKQENPPASCDNVQQKSIIETMEQHLKQFHAKSLFDHKALTLKSQKQVKVEMSGPVTVLTRQTTAAELDSHTPALEQQTTSSEKTPTKRTAASVLNNFIESPSKLLDTPIKNLLDTPVKTQYDFPSCRCVEQIIEKDEGPFYTHLGAGPNVAAIREIMEERFGQKGKAIRIERVIYTGKEGKSSQGCPIAKWVVRRSSSEEKLLCLVRERAGHTCEAAVIVILILVWEGIPLSLADKLYSELTETLRKYGTLTNRRCALNEERTCACQGLDPETCGASFSFGCSWSMYYNGCKFARSKIPRKFKLLGDDPKEEEKLESHLQNLSTLMAPTYKKLAPDAYNNQIEYEHRAPECRLGLKEGRPFSGVTACLDFCAHAHRDLHNMQNGSTLVCTLTREDNREFGGKPEDEQLHVLPLYKVSDVDEFGSVEAQEEKKRSGAIQVLSSFRRKVRMLAEPVKTCRQRKLEAKKAAAEKLSSLENSSNKNEKEKSAPSRTKQTENASQAKQLAELLRLSGPVMQQSQQPQPLQKQPPQPQQQQRPQQQQPHHPQTESVNSYSASGSTNPYMRRPNPVSPYPNSSHTSDIYGSTSPMNFYSTSSQAAGSYLNSSNPMNPYPGLLNQNTQYPSYQCNGNLSVDNCSPYLGSYSPQSQPMDLYRYPSQDPLSKLSLPPIHTLYQPRFGNSQSFTSKYLGYGNQNMQGDGFSSCTIRPNVHHVGKLPPYPTHEMDGHFMGATSRLPPNLSNPNMDYKNGEHHSPSHIIHNYSAAPGMFNSSLHALHLQNKENDMLSHTANGLSKMLPALNHDRTACVQGGLHKLSDANGQEKQPLALVQGVASGAEDNDEVWSDSEQSFLDPDIGGVAVAPTHGSILIECAKRELHATTPLKNPNRNHPTRISLVFYQHKSMNEPKHGLALWEAKMAEKAREKEEECEKYGPDYVPQKSHGKKVKREPAEPHETSEPTYLRFIKSLAERTMSVTTDSTVTTSPYAFTRVTGPYNRYI

SEQ ID NO: 15750 - protein, 1660 aa, Homo sapiens
MDSGPVYHGDSRQLSASGVPVNGAREPAGPSLLGTGGPWRVDQKPDWEAAPGPAHTARLEDAHDLVAFSAVAEAVSSYGALSTRLYETFNREMSREAGNNSRGPRPGPEGCSAGSEDLDTLQTALALARHGMKPPNCNCDGPECPDYLEWLEGKIKSVVMEGGEERPRLPGPLPPGEAGLPAPSTRPLLSSEVPQISPQEGLPLSQSALSIAKEKNISLQTAIAIEALTQLSSALPQPSHSTPQASCPLPEALSPPAPFRSPQSYLRAPSWPVVPPEEHSSFAPDSSAFPPATPRTEFPEAWGTDTPPATPRSSWPMPRPSPDPMAELEQLLGSASDYIQSVFKRPEALPTKPKVKVEAPSSSPAPAPSPVLQREAPTPSSEPDTHQKAQTALQQHLHHKRSLFLEQVHDTSFPAPSEPSAPGWWPPPSSPVPRLPDRPPKEKKKKLPTPAGGPVGTEKAAPGIKPSVRKPIQIKKSRPREAQPLFPPVRQIVLEGLRSPASQEVQAHPPAPLPASQGSAVPLPPEPSLALFAPSPSRDSLLPPTQEMRSPSPMTALQPGSTGPLPPADDKLEELIRQFEAEFGDSFGLPGPPSVPIQDPENQQTCLPAPESPFATRSPKQIKIESSGAVTVLSTTCFHSEEGGQEATPTKAENPLTPTLSGFLESPLKYLDTPTKSLLDTPAKRAQAEFPTCDCVEQIVEKDEGPYYTHLGSGPTVASIRELMEERYGEKGKAIRIEKVIYTGKEGKSSRGCPIAKWVIRRHTLEEKLLCLVRHRAGHHCQNAVIVILILAWEGIPRSLGDTLYQELTDTLRKYGNPTSRRCGLNDDRTCACQGKDPNTCGASFSFGCSWSMYFNGCKYARSKTPRKFRLAGDNPKEEEVLRKSFQDLATEVAPLYKRLAPQAYQNQVTNEEIAIDCRLGLKEGRPFAGVTACMDFCAHAHKDQHNLYNGCTVVCTLTKEDNRCVGKIPEDEQLHVLPLYKMANTDEFGSEENQNAKVGSGAIQVLTAFPREVRRLPEPAKSCRQRQLEARKAAAEKKKIQKEKLSTPEKIKQEALELAGITSDPGLSLKGGLSQQGLKPSLKVEPQNHFSSFKYSGNAVVESYSVLGNCRPSDPYSMNSVYSYHSYYAQPSLTSVNGFHSKYALPSFSYYGFPSSNPVFPSQFLGPGAWGHSGSSGSFEKKPDLHALHNSLSPAYGGAEFAELPSQAVPTDAHHPTPHHQQPAYPGPKEYLLPKAPLLHSVSRDPSPFAQSSNCYNRSIKQEPVDPLTQAEPVPRDAGKMGKTPLSEVSQNGGPSHLWGQYSGGPSMSPKRTNGVGGSWGVFSSGESPAIVPDKLSSFGASCLAPSHFTDGQWGLFPGEGQQAASHSGGRLRGKPWSPCKFGNSTSALAGPSLTEKPWALGAGDFNSALKGSPGFQDKLWNPMKGEEGRIPAAGASQLDRAWQSFGLPLGSSEKLFGALKSEEKLWDPFSLEEGPAEEPPSKGAVKEEKGGGGAEEEEEELWSDSEHNFLDENIGGVAVAPAHGSILIECARRELHATTPLKKPNRCHPTRISLVFYQHKNLNQPNHGLALWEAKMKQLAERARARQEEAARLGLGQQEAKLYGKKRKWGGTVVAEPQQKEKKGVVPTRQALAVPTDSAVTVSSYAYTKVTGPYSRWI

SEQ ID NO: 15751 - protein, 246 aa, Homo sapiens; identical to SEQ ID NO: 13138

SEQ ID NO: 15752 - protein, 437 aa, Homo sapiens
MLWKLTDNIKYEDCEDRHDGTSNGTARLPQLGTVGQSPYTSAPPLSHTPNADFQPPYFPPPYQPIYPQSQDPYSHVNDPYSLNPLHAQPQPQHPGWPGQRQSQESGLLHTHRGLPHQLSGLDPRRDYRRHEDLLHGPHALSSGLGDLSIHSLPHAIEEVPHVEDPGINIPDQTVIKKGPVSLSKSNSNAVSAIPINKDNLFGGVVNPNEVFCSVPGRLSLLSSTSKYKVTVAEVQRRLSPPECLNASLLGGVLRRAKSKNGGRSLREKLDKIGLNLPAGRRKAANVTLLTSLVEGEAVHLARDFGYVCETEFPAKAVAEFLNRQHSDPNEQVTRKNMLLATKQICKEFTDLLAQDRSPLGNSRPNPILEPGIQSCLTHFNLISHGFGSPAVCAAVTALQNYLTEALKAMDKMYLSNNPNSHTDNNAKSSDKEEKHRK

SEQ ID NO: 15753 - protein, 460 aa, Homo sapiens
MHSPPRDQAAIMLWKLVENVKYEDIYEDRHDGVPSHSSRLSQLGSVSQGPYSSAPPLSHTPSSDFQPPYFPPPYQPLPYHQSQDPYSHVNDPYSLNPLHQPQQHPWGQRQRQEVGSEAGSLLPQPRAALPQLSGLDPRRDYHSVRRPDVLLHSAHHGLDAGMGDSLSLHGLGHPGMEDVQSVEDANNSGMNLLDQSVIKKVPVPPKSVTSLMMNKDGFLGGMSVNTGEVFCSVPGRLSLLSSTSKYKVTVGEVQRRLSPPECLNASLLGGVLRRAKSKNGGRSLRERLEKIGLNLPAGRRKAANVTLLTSLVEGEAVHLARDFGYICETEFPAKAVSEYLNRQHTDPSDLHSRKNMLLATKQLCKEFTDLLAQDRTPIGNSRPSPILEPGIQSCLTHFSLITHGFGAPAICAALTALQNYLTEALKGMDKMFLNNTTTNRHTSGEGPGSKTGDKEEKHRK

SEQ ID NO: 15754 - protein, 450 aa, Homo sapiens
MLWKITDNVKYEEDCEDRHDGSSNGNPRVPHLSSAGQHLYSPAPPLSHTGVAEYQPPPYFPPPYQQLAYSQSADPYSHLGEAYAAAINPLHQPAPTGSQQQAWPGRQSQEGAGLPSHHGRPAGLLPHLSGLEAGAVSARRDAYRRSDLLLPHAHALDAAGLAENLGLHDMPHQMDEVQNVDDQHLLLHDQTVIRKGPISMTKNPLNLPCQKELVGAVMNPTEVFCSVPGRLSLLSSTSKYKVTVAEVQRRLSPPECLNASLLGGVLRRAKSKNGGRSLREKLDKIGLNLPAGRRKAAHVTLLTSLVEGEAVHLARDFAYVCEAEFPSKPVAEYLTRPHLGGRNEMAARKNMLLAAQQLCKEFTELLSQDRTPHGTSRLAPVLETNIQNCLSHFSLITHGFGSQAICAAVSALQNYIKEALIVIDKSYMNPGDQSPADSNKTLEKMEKHRK

SEQ ID NO: 15755 - protein, 452 aa, Homo sapiens
MSTTFPGLVHDAEIRHDGSNSYRLMQLGCLESVANSTVAYSSSSPLTYSTTGTEFASPYFSTNHQYTPLHHQSFHYEFQHSHPAVTPDAYSLNSLHHSQQYYQQIHHGEPTDFINLHNARALKSSCLDEQRRELGCLDAYRRHDLSLMSHGSQYGMHPDQRLLPGPSLGLAAAGADDLQGSVEAQCGLVLNGQGGVIRRGGTCVVNPTDLFCSVPGRLSLLSSTSKYKVTIAEVKRRLSPPECLNASLLGGILRRAKSKNGGRCLREKLDRLGLNLPAGRRKAANVTLLTSLVEGEALHLARDFGYTCETEFPAKAVGEHLARQHMEQKEQTARKKMILATKQICKEFQDLLSQDRSPLGSSRPTPILDLDIQRHLTHFSLITHGFGTPAICAALSTFQTVLSEMLNYLEKHTTHKNGGAADSGQGHANSEKAPLRKTSEAAVKEGKTEKTD

SEQ ID NO: 15756 - protein, 442 aa, Homo sapiens
MLVHTYSAMERPDGLGAAAGGARLSSLPQAAYGPAPPLCHTPAATAAAEFQPPYFPPPYPQPPLPYGQAPDAAAAFPHLAGDPYGGLAPLAQPQPPQAAWAAPRAAARAHEEPPGLLAPPARALGLDPRRDYATAVPRLLHGLADGAHGLADAPLGLPGLAAAPGLEDLQAMDEPGMSLLDQSVIKKVPIPSKASSLSALSLAKDSLVGGITNPGEVFCSVPGRLSLLSSTSKYKVTVGEVQRRLSPPECLNASLLGGVLRRAKSKNGGRCLRERLEKIGLNLPAGRRKAANVTLLTSLVEGEAVHLARDFGYVCETEFPAKAAAEYLCRQHADPGELHSRKSMLLAAKQICKEFADLMAQDRSPLGNSRPALILEPGVQSCLTHFSLITHGFGGPAICAALTAFQNYLLESLKGLDKMFLSSVGSGHGETKASEKDAKHRK

SEQ ID NO: 15757 - protein, 338 aa, Homo sapiens
MEYFMVPTQKVPSLQHFRKTEKEVIGGLCSLANIPLTPETQRDQERRIRREIANSNERRRMQSINAGFQSLKTLIPHTDGEKLSKAAILQQTAEYIFSLEQEKTRLLQQNTQLKRFIQELSGSSPKRRRAEDKDEGIGSPDIWEDEKAEDLRREMIELRQQLDKERSVRMMLEEQVRSLEAHMYPEKLKVIAQQVQLQQQQEQVRLLHQEKLEREQQQLRTQLLPPPAPTHHPTVIVPAPPPPPSHHINVVTMGPSSVINSVSTSRQNLDTIVQAIQHIEGTQEKQELEEEQRRAVIVKPVRSCPEAPTSDTASDSEASDSDAMDQSREEPSGDGELP

SEQ ID NO: 15758 - protein, 346 aa, Homo sapiens
MAASGKLSTCRLPPLPTIREIIKLLRLQAAKQLSQNFLLDLRLTDKIVRKAGNLTNAYVYEVGPGPGGITRSILNADVAELLVVEKDTRFIPGLQMLSDAAPGKLRIVHGDVLTFKVEKAFSESLKRPWEDDPPNVHIIGNLPFSVSTPLIIKWLENISCRDGPFVYGRTQMTLTFQKEVAERLAANTGSKQRSRLSVMAQYLCNVRHIFTIPGQAFVPKPEVDVGVVHFTPLIQPKIEQPFKLVEKVVQNVFQFRRKYCHRGLRMLFPEAQRLESTGRLLELADIDPTLRPRQLSISHFKSLCDVYRKMCDEDPQLFAYNFREELKRRKSKNEEKEEDDAENYRL

SEQ ID NO: 15759 - protein, 396 aa, Homo sapiens
MWIPVVGLPRRLRLSALAGAGRFCILGSEAATRKHLPARNHCGLSDSSPQLWPEPDFRNPPRKASKASLDFKRYVTDRRLAETLAQIYLGKPSRPPHLLLECNPGPGILTQALLEAGAKVVALESDKTFIPHLESLGKNLDGKLRVIHCDFFKLDPRSGGVIKPPAMSSRGLFKNLGIEAVPWTADIPLKVVGMFPSRGEKRALWKLAYDLYSCTSIYKFGRIEVNMFIGEKEFQKLMADPGNPDLYHVLSVIWQLACEIKVLHMEPWSSFDIYTRKGPLENPKRRELLDQLQQKLYLIQMIPRQNLFTKNLTPMNYNIFFHLLKHCFGRRSATVIDHLRSLTPLDARDILMQIGKQEDEKVVNMHPQDFKTLFETIERSKDCAYKWLYDETLEDR

SEQ ID NO: 15760 - protein, 502 aa, Homo sapiens
MAWALKLPLADEVIESGLVQDFDASLSGIGQELGAGAYSMSDVLALPIFKQEESSLPPDNENKILPFQYVLCAATSPAVKLHDETLTYLNQGQSYEIRMLDNRKLGELPEINGKLVKSIFRVVFHDRRLQYTEHQQLEGWRWNRPGDRILDIDIPMSVGIIDPRANPTQLNTVEFLWDPAKRTSVFIQVHCISTEFTMRKHGGEKGVPFRVQIDTFKENENGEYTEHLHSASCQIKVFKPKGADRKQKTDREKMEKRTPHEKEKYQPSYETTILTECSPWPEITYVNNSPSPGFNSSHSSFSLGEGNGSPNHQPEPPPPVTDNLLPTTTPQEAQQWLHRNRFSTFTRLFTNFSGADLLKLTRDDVIQICGPADGIRLFNALKGRMVRPRLTIYVCQESLQLREQQQQQQQQQQKHEDGDSNGTFFVYHAIYLEELTAVELTEKIAQLFSISPCQISQIYKQGPTGIHVLISDEMIQNFQEEACFILDTMKAETNDSYHIILK

SEQ ID NO: 15761 - protein, 479 aa, Homo sapiens
MLFWHTQPEHYNQHNSGSYLRDVLALPIFKQEEPQLSPENEARLPPLQYVLCAATSPAVKLHEETLTYLNQGQSYEIRLLENRKLGDFQDLNTKYVKSIIRVVFHDRRLQYTEHQQLEGWRWSRPGDRILDIDIPLSVGILDPRASPTQLNAVEFLWDPAKRASAFIQVHCISTEFTPRKHGGEKGVPFRVQIDTFKQNENGEYTEHLHSASCQIKVFKPKGADRKQKTDREKMEKRTAQEKEKYQPSYETTILTECSPWPDVAYQVNSAPSPSYNGSPNSFGLGEGNASPTHPVEALPVGSDHLLPSASIQDAQQWLHRNRFSQFCRLFASFSGADLLKMSRDDLVQICGPADGIRLFNAIKGRNVRPKMTIYVCQELEQNRVPLQQKRDGSGDSNLSVYHAIFLEELTTLELIEKIANLYSISPQHIHRVYRQGPTGIHVVVSNEMVQNFQDESCFVLSTIKAESNDGYHIILKCGL

SEQ ID NO: 15762 - protein, 410 aa, Homo sapiens
MAKDAGLIEANGELKVFIDQNLSPGKGVVSLVAVHPSTVNPLGKQLLPKTFGQSNVNIAQQVVIGTPQRPAASNTLVVGSPHTPSTHFASQNQPSDSSPWSAGKRNRKGEKNGKGLRHFSMKVCEKVQRKGTTSYNEVADELVAEFSAADNHILPNESAYDQKNIRRRVYDALNVLMAMNIISKEKKEIKWIGLPTNSAQECQNLEVERQRRLERIKQKQSQLQELILQQIAFKNLVQRNRHAEQQASRPPPPNSVIHLPFIIVNTSKKTVIDCSISNDKFEYLFNFDNTFEIHDDIEVLKRMGMACGLESGSCSAEDLKMARSLVPKALEPYVTEMAQGTVGGVFITTAGSTSNGTRFSASDLTNGADGMLATSSNGSQYSGSRVETPVSYVGEDDEEDDDFNENDEDD

SEQ ID NO: 15763 - protein, 446 aa, Homo sapiens
MTAKNVGLTSTNAEVRGFIDQNLSPTKGNISFVAFPVSNTNSPTKILPKTLGPINVNVGPQMIISTPQRLTSSGSVLIGSPYTPAPAMVTQTHIAEATGWVPGDRKRARKFIDSDFSESKRSKKGDKNGKGLRHFSMKVCEKVQRKGTTSYNEVADELVSEFTNSNNHLAADSAYDQKNIRRRVYDALNVLMAMNIISKEKKEIKWIGLPTNSAQECQNLEIEKQRRIERIKQKRAQLQELLLQQIAFKNLVQRNRQNEQQNQGPPALNSTIQLPFIIINTSRKTVIDCSISSDKFEYLFNFDNTFEIHDDIEVLKRMGMSFGLESGKCSLEDLKLAKSLVPKALEGYITDISTGPSWLNQGLLLNSTQSVSNLDLTTGATLPQSSVNQGLCLDAEVALATGQFLAPNSHQSSSAASHCSESRGETPCSFNDEDEEDDEEDSSSPE

SEQ ID NO: 15764 - protein, 405 aa, Homo sapiens
MAKYVSLTEANEELKVLMDENQTSRPVAVHTSTVNPLGKQLLPKTFGQSSVNIDQQVVIGMPQRPAASNIPVVGSPNPPSTHFASQNQHSYSSPPWAGQHNRKGEKNGMGLCRLSMKVWETVQRKGTTSCQEVVGELVAKFRAASNHASPNESAYDVKNIKRRTYDALNVLMAMNIISREKKKIKWIGLTTNSAQNCQNLRVERQKRLERIKQKQSELQQLILQQIAFKNLVLRNQYVEEQVSQRPLPNSVIHVPFIIISSSKKTVINCSISDDKSEYLFKFNSSFEIHDDTEVLMWMGMTFGLESGSCSAEDLKMARNLVPKALEPYVTEMAQGTFGGVFTTAGSRSNGTWLSASDLTNIAIGMLATSSGGSQYSGSRVETPAVEEEEEEDNNDDDLSENDEDD

SEQ ID NO: 15765 - protein, 575 aa, Homo sapiens
MSHAAEPARDGVEASAEGPRAVFVLLEERRPADSAQLLSLNSLLPESGIVADIELENVLDPDSFYELKSQPLPLRSSLPISLQATPATPATLSASSSAGGSRTPAMSSSSSSRVLLRQQLMRAQAQEQERRERREQAAAAPFPSPAPASPAISVVGVSAGGHTLSRPPPAQVPREVLKVQTHLENPTRYHLQQARRQQVKQYLSTTLGPKLASQALTPPPGPASAQPLPAPEAAHTTGPTGSAPNSPMALLTIGSSSEKEIDDVIDEIISLESSYNDEMLSYLPGGTTGLQLPSTLPVSGNLLDVYSSQGVATPAITVSNSCPAELPNIKREISETEAKALLKERQKKDNHNLIERRRRFNINDRIKELGTLIPKSSDPEMRWNKGTILKASVDYIRKLQKEQQRSKDLESRQRSLEQANRSLQLRIQELELQAQIHGLPVPPTPGLLSLATTSASDSLKPEQLDIEEEGRPGAATFHVGGGPAQNAPHQQPPAPPSDALLDLHFPSDHLGDLGDPFHLGLEDILMEEEEGVVGGLSGGALSPLRAASDPLLSSVSPAVSKASSRRSSFSMEEES

SEQ ID NO: 15766 - protein, 476 aa, Homo sapiens
MASRIGLRMQLMREQAQQEEQRERMQQQAVMHYMQQQQQQQQQQLGGPPTPAINTPVHFQSPPPVPGEVLKVQSYLENPTSYHLQQSQHQKVREYLSETYGNKFAAHISPAQGSPKPPPAASPGVRAGHVLSSSAGNSAPNSPMAMLHIGSNPERELDDVIDNIMRLDDVLGYINPEMQMPNTLPLSSSHLNVYSSDPQVTASLVGVTSSSCPADLTQKRELTDAESRALAKERQKKDNHNLIERRRRFNINDRIKELGMLIPKANDLDVRWNKGTILKASVDYIRRMQKDLQKSRELENHSRRLEMTNKQLWLRIQELEMQARVHGLPTTSPSGMNMAELAQQVVKQELPSEEGPGEALMLGAEVPDPEPLPALPPQAPLPLPTQPPSPFHHLDFSHSLSFGGREDEGPPGYPEPLAPGHGSPFPSLSKKDLDLMLLDDSLLPLASDPLLSTMSPEASKASSRRSSFSMEEGDVL

SEQ ID NO: 15767 - protein, 347 aa, Homo sapiens
MTLDHQIINPTLKWSQPAVPSGGPLVQHAHTTLDSDAGLTENPLTKLLAIGKEDDNAQWHMEDVIEDIIGMESSFKEEGADSPLLMQRTLSGSILDVYSGEQGISPINMGLTSASCPSSLPMKREITETDTRALAKERQKKDNHNLIERRRRYNINYRIKELGTLIPKSNDPDMRWNKGTILKASVEYIKWLQKEQQRARELEHRQKKLEQANRRLLLRIQELEIQARTHGLPTLASLGTVDLGAHVTKQQSHPEQNSVDYCQQLTVSQGPSPELCDQAIAFSDPLSYFTDLSFSAALKEEQRLDGMLLDDTISPFGTDPLLSATSPAVSKESSRRSSFSSDDGDEL

SEQ ID NO: 15768 - protein, 401 aa, Homo sapiens
MVLAQSRVSAGVGSPHCSGSGGGGSDSFPWPASHPGNPQCSFSTAFLASPRLSRGTLAYLPPAPWSSLATPSALLGSSCAPPPPPARCPQPRALSPELGTKAGPRRPHRWELPRSPSQGAQGPAPRRRLLETMKGIVAASGSETEDEDSMDIPLDLSSSAGSGKRRRRGNLPKESVQILRDWLYEHRYNAYPSEQEKALLSQQTHLSTLQVCNWFINARRRLLPDMLRKDGKDPNQFTISRRGAKISETSSVESVMGIKNFMPALEETPFHSCTAGPNPTLGRPLSPKPSSPGSVLARPSVICHTTVTALKDVPFSLCQSVGVGQNTDIQQIAAKNFTDTSLMYPEDTCKSGPSTNTQSGLFNTPPPTPPDLNQDFSGFQLLVDVALKRAAEMELQAKLTA

SEQ ID NO: 15769 - protein, 237 aa, Homo sapiens
MSDSDLGEDEGLLSLAGKRKRRGNLPKESVKILRDWLYLHRYNAYPSEQEKLSLSGQTNLSVLQICNWFINARRRLLPDMLRKDGKDPNQFTISRRGGKASDVALPRGSSPSVLAVSVPAPTNVLSLSVCSMPLHSGQGEKPAAPFPRGELESPKPLVTPGSTLTLLTRAEAGSPTGGLFNTPPPTPPEQDKEDFSSFQLLVEVALQRAAEMELQKQQDPSLPLLHTPIPLVSENPQ

SEQ ID NO: 15770 - protein, 241 aa, Homo sapiens
MEAAADGPAETQSPVEKDSPAKTQSPAQDTSIMSRNNADTGRVLALPEHKKKRKGNLPAESVKILRDWMYKHRFKAYPSEEEKQMLSEKTNLSLLQISNWFINARRRILPDMLQQRRNDPIIGHKTGKDAHATHLQSTEASVPAKSGPSGPDNVQSLPLWPLPKGQMSREKQPDPESAPSQKLTGIAQPKKKVKVSVTSPSSPELVSPEEHADFSSFLLLVDAAVQRAAELELEKKQEPNP

SEQ ID NO: 15771 - protein, 185 aa, Homo sapiens
MEAAADGPAETQSPVEKDSPAKTQSPAQDTSIMSRNNADTGRVLALPEHKKKRKGNLPAESVKILRDWMYKHRFKAYPSEEEKQMLSEKTNLSLLRISNWFINARRRILPDMLQQRRNDPIIGHKTGKDAHATHLQSTEASVPAKSGPVVQTMYKACPCGPCQRARCQERSNQIRSRPLARSSPE

SEQ ID NO: 15772 - protein, 213 aa, Homo sapiens
MVQSCSAYGCKNRYDKDKPVSFHKFPLTRPSLCKEWEAAVRRKNFKPTKYSSICSEHFTPDCFKRECNNKLLKENAVPTIFLCTEPHDKKEDLLEPQEQLPPPPLPPPVSQVDAAIGLLMPPLQTPVNLSVFCDHNYTVEDTMHQRKRIHQLEQQVEKLRKKLKTAQQRCRRQERQLEKLKEVVHFQKEKDDVSERGYVILPNDYFEIVEVPA

SEQ ID NO: 15773 - protein, 257 aa, Homo sapiens
MPARCVAAHCGNTTKSGKSLFRFPKDRAVRLLWDRFVRGCRADWYGGNDRSVICSDHFAPACFDVSSVIQKNLRFSQRLRLVAGAVPTLHRVPAPAPKRGEEGDQAGRLDTRGELQAARHSEAAPGPVSCTRPRAGKQAAASQITCENELVQTQPHADNPSNTVTSVPTHCEEGPVHKSTQISLKRPRHRSVGIQAKVKAFGKRLCNATTQTEELWSRTSSLFDIYSSDSETDTDWDIKSEQSDLSYMAVQVKEETC

SEQ ID NO: 15774 - protein, 314 aa, Homo sapiens
MPGFTCCVPGCYNNSHRDKALHFYTFPKDAELRRLWLKNVSRAGVSGCFSTFQPTTGHRLCSVHFQGGRKTYTVRVPTIFPLRGVNERKVARRPAGAAAARRRQQQQQQQQQQQQQQQQQQQQQQQQQQQQQSSPSASTAQTAQLQPNLVSASAAVLLTLQATVDSSQAPGSVQPAPITPTGEDVKPIDLTVQVEFAAAEGAAAAAAASELQAATAGLEAAECPMGPQLVVVGEEGFPDTGSDHSYSLSSGTTEEELLRKLNEQRDILALMEVKMKEMKGSIRHLRLTEAKLREELREKDRLLAMAVIRKKHGM

SEQ ID NO: 15775 - protein, 761 aa, Homo sapiens
MPNFCAAPNCTRKSTQSDLAFFRFPRDPARCQKWVENCRRADLEDKTPDQLNKHYRLCAKHFETSMICRTSPYRTVLRDNAIPTIFDLTSHLNNPHSRHRKRIKELSEDEIRTLKQKKIDETSEQEQKHKETNNSNAQNPSEEEGEGQDEDILPLTLEEKENKEYLKSLFEILILMGKQNIPLDGHEADEIPEGLFTPDNFQALLECRINSGEEVLRKRFETTAVNTLFCSKTQQRQMLEICESCIREETLREVRDSHFFSIITDDVVDIAGEEHLPVLVRFVDESHNLREEFIGFLPYEADAEILAVKFHTMITEKWGLNMEYCRGQAYIVSSGFSSKMKVVASRLLEKYPQAIYTLCSSCALNMWLAKSVPVMGVSVALGTIEEVCSFFHRSPQLLLELDNVISVLFQNSKERGKELKEICHSQWTGRHDAFEILVELLQALVLCLDGINSDTNIRWNNYIAGRAFVLCSAVSDFDFIVTIVVLKNVLSFTRAFGKNLQGQTSDVFFAAGSLTAVLHSLNEVMENIEVYHEFWFEEATNLATKLDIQMKLPGKFRRAHQGNLESQLTSESYYKETLSVPTVEHIIQELKDIFSEQHLKALKCLSLVPSVMGQLKFNTSEEHHADMYRSDLPNPDTLSAELHCWRIKWKHRGKDIELPSTIYEALHLPDIKFFPNVYALLKVLCILPVMKVENERYENGRKRLKAYLRNTLTDQRSSNLALLNINFDIKHDLDLMVDTYIKLYTSKSELPTDNSETVENT

SEQ ID NO: 15776 - protein, 228 aa, Homo sapiens
MPTNCAAAGCATTYNKHINISFHRFPLDPKRRKEWVRLVRRKNFVPGKHTFLCSKHFEASCFDLTGQTRRLKMDAVPTIFDFCTHIKSMKLKSRNLLKKNNSCSPAGPSNLKSNISSQQVLLEHSYAFRNPMEAKKRIIKLEKEIASLRRKMKTCLQKERRATRRWIKATCLVKNLEANSVLPKGTSEHMLPTALSSLPLEDFKILEQDQQDKTLLSLNLKQTKSTFI

SEQ ID NO: 15777 - protein, 239 aa, Homo sapiens
MPKSCAARQCCNRYSSRRKQLTFHRFPFSRPELLKEWVLNIGRGNFKPKQHTVICSEHFRPECFSAFGNRKNLKHNAVPTVFAFQDPTQQVRENTDPASERGNASSSQKEKVLPEAGAGEDSPGRNMDTALEELQLPPNAEGHVKQVSPRRPQATEAVGRPTGPAGLRRTPNKQPSDHSYALLDLDSLKKKLFLTLKENEKLRKRLQAQRLVMRRMSSRLRACKGHQGLQARLGPEQQS

SEQ ID NO: 15778 - protein, 577 aa, Homo sapiens
MVICCAAVNCSNRQGKGEKRAVSFHRFPLKDSKRLIQWLKAVQRDNWTPTKYSFLCSEHFTKDSFSKRLEDQHRLLKPTAVPSIFHLTEKKRGAGGHGRTRRKDASKATGGVRGHSSAATSRGAAGWSPSSSGNPMAKPESRRLKQAALQGEATPRAAQEAASQEQAQQALERTPGDGLATMVAGSQGKAEASATDAGDESATSSIEGGVTDKSGISMDDFTPPGSGACKFIGSLHSYSFSSKHTRERPSVPREPIDRKRLKKDVEPSCSGSSLGPDKGLAQSPPSSSLTATPQKPSQSPSAPPADVTPKPATEAVQSEHSDASPMSINEVILSASGACKLIDSLHSYCFSSRQNKSQVCCLREQVEKKNGELKSLRQRVSRSDSQVRKLQEKLDELRRVSVPYPSSLLSPSREPPKMNPVVEPLSWMLGTWLSDPPGAGTYPTLQPFQYLEEVHISHVGQPMLNFSFNSFHPDTRKPMHRECGFIRLKPDTNKVAFVSAQNTGVVEVEEGEVNGQELCIASHSIARISFAKEPHVEQITRKFRLNSEGKLEQTVSMATTTQPMTQHLHVTYKKVTP

SEQ ID NO: 15779 - protein, 395 aa, Homo sapiens
MPRYCAAICCKNRRGRNNKDRKLSFYPFPLHDKERLEKWLKNMKRDSWVPSKYQFLCSDHFTPDSLDIRWGIRYLKQTAVPTIFSLPEDNQGKDPSKKKSQKKNLEDEKEVCPKAKSEESFVLNETKKNIVNTDVPHQHPELLHSSSLVKPPAPKTGSIQNNMLTLNLVKQHTGKPESTLETSVNQDTGRGGFHTCFENLNSTTITLTTSNSESIHQSLETQEVLEVTTSHLANPNFTSNSMEIKSAQENPFLFSTINQTVEELNTNKESVIAIFVPAENSKPSVNSFISAQKETTEMEDTDIEDSLYKDVDYGTEVLQIEHSYCRQDINKEHLWQKVSKLHSKITLLELKEQQTLGRLKSLEALIRQLKQENWLSEENVKIIENHFTTYEVTMI

SEQ ID NO: 15780 - protein, 222 aa, Homo sapiens
MVKCCSAIGCASRCLPNSKLKGLTFHVFPTDENIKRKWVLAMKRLDVNAAGIWEPKKGDVLCSRHFKKTDFDRSAPNIKLKPGVIPSIFDSPYHLQGKREKLHCRKNFTLKTVPATNYNHHLVGASSCIEEFQSQFIFEHSYSVMDSPKKLKHKLDHVIGELEDTKESLRNVLDREKRFQKSLRKTIRELKDECLISQETANRLDTFCWDCCQESIEQDYIS

SEQ ID NO: 15781 - protein, 309 aa, Homo sapiens
MPRHCSAAGCCTRDTRETRNRGISFHRLPKKDNPRRGLWLANCQRLDPSGQGLWDPASEYIYFCSKHFEEDCFELVGISGYHRLKEGAVPTIFESFSKLRRTTKTKGHSYPPGPAEVSRLRRCRKRCSEGRGPTTPFSPPPPADVTCFPVEEASAPATLPASPAGRLEPGLSSPFSDLLGPLGAQADEAGCSAQPSPERQPSPLEPRPVSPSAYMLRLPPPAGAYIQNEHSYQVGSALLWKRRAEAALDALDKAQRQLQACKRREQRLRLRLTKLQQERAREKRAQADARQTLKEHVQDFAMQLSSSMA

SEQ ID NO: 15782 - protein, 274 aa, Homo sapiens
MPKYCRAPNCSNTAGRLGADNRPVSFYKFPLKDGPRLQAWLQHMGCEHWVPSCHQHLCSEHFTPSCFQWRWGVRYLRPDAVPSIFSRGPPAKSQRRTRSTQKPVSPPPPLQKNTPLPQSPAIPVSGPVRLVVLGPTSGSPKTVATMLLTPLAPAPTPERSQPEVPAQQAQTGLGPVLGALQRRVRRLQRCQERHQAQLQALERLAQQLHGESLLARARRGLQRLTTAQTLGPEESQTFTIICGGPDIAMVLAQDPAPATVDAKPELLDTRIPSA

SEQ ID NO: 15783 - protein, 903 aa, Homo sapiens
MTRSCSAVGCSTRDTVLSRERGLSFHQFPTDTIQRSKWIRAVNRVDPRSKKIWIPGPGAILCSKHFQESDFESYGIRRKLKKGAVPSVSLYKIPQGVHLKGKARQKILKQPLPDNSQEVATEDHNYSLKTPLTIGAEKLAEVQQMLQVSKKRLISVKNYRMIKKRKGLRLIDALVEEKLLSEETECLLRAQFSDFKWELYNWRETDEYSAEMKQFACTLYLCSSKVYDYVRKILKLPHSSILRTWLSKCQPSPGFNSNIFSFLQRRVENGDQLYQYCSLLIKSMPLKQQLQWDPSSHSLQGFMDFGLGKLDADETPLASETVLLMAVGIFGHWRTPLGYFFVNRASGYLQAQLLRLTIGKLSDIGITVLAVTSDATAHSVQMAKALGIHIDGDDMKCTFQHPSSSSQQIAYFFDSCHLLRLIRNAFQNFQSIQFINGIAHWQHLVELVALEEQELSNMERIPSTLANLKNHVLKVNSATQLFSESVASALEYLLSLDLPPFQNCIGTIHFLRLINNLFDIFNSRNCYGKGLKGPLLPETYSKINHVLIEAKTIFVTLSDTSNNQIIKGKQKLGFLGFLLNAESLKWLYQNYVFPKVMPFPYLLTYKFSHDHLELFLKMLRQVLVTSSSPTCMAFQKAYYNLETRYKFQDEVFLSKVSIFDISIARRKDLALWTVQRQYGVSVTKTVFHEEGICQDWSHCSLSEALLDLSDHRRNLICYAGYVANKLSALLTCEDCITALYASDLKASKIGSLLFVKKKNGLHFPSESLCRVINICERVVRTHSRMAIFELVSKQRELYLQQKILCELSGHINLFVDVNKHLFDGEVCAINHFVKLLKDIIICFLNIRAKNVAQNPLKHHSERTDMKTLSRKHWSSVQDYKCSSFANTSSKFRHLLSNDGYPFK

SEQ ID NO: 15784 - protein, 539 aa, Homo sapiens
MGSPEDDLIGIPFPDHSSELLSCLNEQRQLGHLCDLTIRTQGLEYRTHRAVLAACSHYFKKLFTEGGGGAVMGAGGSGTATGGAGAGVCELDFVGPEALGALLEFAYTATLTTSSANMPAVLQAARLLEIPCVIAACMEILQGSGLEAPSPDEDDCERARQYLEAFATATASGVPNGEDSPPQVPLPPPPPPPPRPVARRSRKPRKAFLQTKGARANHLVPEVPTVPAHPLTYEEEEVAGRVGSSGGSGPGDSYSPPTGTASPPEGPQSYEPYEGEEEEEELVYPPAYGLAQGGGPPLSPEELGSDEDAIDPDLMAYLSSLHQDNLAPGLDSQDKLVRKRRSQMPQECPVCHKIIHGAGKLPRHMRTHTGEKPFACEVCGVRFTRNDKLKIHMRKHTGERPYSCPHCPARFLHSYDLKNHMHLHTGDRPYECHLCHKAFAKEDHLQRHLKGQNCLEVRTRRRRKDDAPPHYPPPSTAAASPAGLDLSNGHLDTFRLSLARFWEQSAPTGPPVSTPGPPDDDEEEGAPTTPQAEGAMESS

SEQ ID NO: 15785 - protein, 490 aa, Homo sapiens
MEQKPSKVECGSDPEENSARSPDGKRKRKNGQCSLKTSMSGYIPSYLDKDEQCVVCGDKATGYHYRCITCEGCKGFFRRTIQKNLHPTYSCKYDSCCVIDKITRNQCQLCRFKKCIAVGMAMDLVLDDSKRVAKRKLIEQNRERRRKEEMIRSLQQRPEPTPEEWDLIHIATEAHRSTNAQGSHWKQRRKFLPDDIGQSPIVSMPDGDKVDLEAFSEFTKIITPAITRVVDFAKKLPMFSELPCEDQIILLKGCCMEIMSLRAAVRYDPESDTLTLSGEMAVKREQLKNGGLGVVSDAIFELGKSLSAFNLDDTEVALLQAVLLMSTDRSGLLCVDKIEKSQEAYLLAFEHYVNHRKHNIPHFWPKLLMKEREVQSSILYKGAAAEGRPGGSLGVHPEGQQLLGMHVVQGPQVRQLEQQLGEAGSLQGPVLQHQSPKSPQQRLLELLHRSGILHARAVCGEDDSSEADSPSSSEEEPEVCEDLAGNAASP

SEQ ID NO: 15786 - protein, 461 aa, Homo sapiens
MTPNSMTENGLTAWDKPKHCPDREHDWKLVGMSEACLHRKSHSERRSTLKNEQSSPHLIQTTWTSSIFHLDHDDVNDQSVSSAQTFQTEEKKCKGYIPSYLDKDELCVVCGDKATGYHYRCITCEGCKGFFRRTIQKNLHPSYSCKYEGKCVIDKVTRNQCQECRFKKCIYVGMATDLVLDDSKRLAKRKLIEENREKRRREELQKSIGHKPEPTDEEWELIKTVTEAHVATNAQGSHWKQKRKFLPEDIGQAPIVNAPEGGKVDLEAFSHFTKIITPAITRVVDFAKKLPMFCELPCEDQIILLKGCCMEIMSLRAAVRYDPESETLTLNGEMAVTRGQLKNGGLGVVSDAIFDLGMSLSSFNLDDTEVALLQAVLLMSSDRPGLACVERIEKYQDSFLLAFEHYINYRKHHVTHFWPKLLMKVTDLRMIGACHASRFLHMKVECPTELFPPLFLEVFED

SEQ ID NO: 15787 - protein, 330 aa, Homo sapiens
MEHLGPHHLHPGHAEPISFGIDQILNSPDQGGCMGPASRLQDGEYGLGCLVGGAYTYGGGGSAAATGAGGAGAYGTGGPGGPGGPAGGGGACSMGPLTGSYNVNMALAGGPGPGGGGGSSGGAGALSAAGVIRVPAHRPLAGAVAHPQPLATGLPTVPSVPAMPGVNNLTGLTFPWMESNRRYTKDRFTGHPYQNRTPPKKKKPRTSFTRLQICELEKRFHRQKYLASAERAALAKALKMTDAQVKTWFQNRRTKWRRQTAEEREAERQQANRILLQLQQEAFQKSLAQPLPADPLCVHNSSLFALQNLQPWSDDSTKITSVTSVASACE

SEQ ID NO: 15788 - protein, 284 aa, Homo sapiens
MEPGMLGPHNLPHHEPISFGIDQILSGPETPGGGLGLGRGGQGHGENGAFSGGYHGASGYGPAGSLAPLPGSSGVGPGGVIRVPAHRPLPVPPPAGGAPAVPGPSGLGGAGGLAGLTFPWMDSGRRFAKDRLTAALSPFSGTRRIGHPYQNRTPPKRKKPRTSFSRSQVLELERRFLRQKYLASAERAALAKALRMTDAQVKTWFQNRRTKWRRQTAEEREAERHRAGRLLLHLQQDALPRPLRPPLPPDPLCLHNSSLFALQNLQPWAEDNKVASVSGLASVV

SEQ ID NO: 15789 - protein, 291 aa, Homo sapiens
MEAPASAQTPHPHEPISFGIDQILNSPDQDSAPAPRGPDGASYLGGPPGGRPGATYPSLPASFAGLGAPFEDAGSYSVNLSLAPAGVIRVPAHRPLPGAVPPPLPSALPAMPSVPTVSSLGGLNFPWMESSRRFVKDRFTAAAALTPFTVTRRIGHPYQNRTPPKRKKPRTSFSRVQICELEKRFHRQKYLASAERAALAKSLKMTDAQVKTWFQNRRTKWRRQTAEEREAERQQASRLMLQLQHDAFQKSLNDSIQPDPLCLHNSSLFALQNLQPWEEDSSKVPAVTSLV

SEQ ID NO: 15790 - protein, 510 aa, Homo sapiens
MAADSDDGAVSAPAASDGGVSKSTTSGEELVVQVPVVDVQSNNFKEMWPSLLLAIKTANFVAVDTELSGLGDRKSLLNQCIEERYKAVCHAARTRSILSLGLACFKRQPDKGEHSYLAQVFNLTLLCMEEYVIEPKSVQFLIQHGFNFNQQYAQGIPYHKGNDKGDESQSQSVRTLFLELIRARRPLVLHNGLIDLVFLYQNFYAHLPESLGTFTADLCEMFPAGIYDTKYAAEFHARFVASYLEYAFRKCERENGKQRAAGSPHLTLEFCNYPSSMRDHIDYRCCLPPATHRPHPTSICDNFSAYGWCPLGPQCPQSHDIDLIIDTDEAAAEDKRRRRRRREKRKRALLNLPGTQTSGEAKDGPPKKQVCGDSIKPEETEQEVAADETRNLPHSKQGNKNDLEMGIKAARPEIADRATSEVPGSQASPNPVPGDGLHRAGFDAFMTGYVMAYVEVSQGPQPCSSGPWLPECHNKVYLSGKAVPLTVAKSQFSRSSKAHNQKMKLTWGSS

SEQ ID NO: 15791 - protein, 1378 aa, Homo sapiens
MSLERELRQLSKAKAKAQRAGQRREEAALCHQLGELLAGHGRYAEALEQHWQELQLRERADDPLGCAVAHRKIGERLAEMEDYPAALQHQHQYLELAHSLRNHTELQRAWATIGRTHLDIYDHCQSRDALLQAQAAFEKSLAIVDEELEGTLAQGELNEMRTRLYLNLGLTFESLQQTALCNDYFRKSIFLAEQNHLYEDLFRARYNLGTIHWRAGQHSQAMRCLEGARECAHTMRKRFMESECCVVIAQVLQDLGDFLAAKRALKKAYRLGSQKPVQRAAICQNLQHVLAVVRLQQQLEEAEGRDPQGAMVICEQLGDLFSKAGDFPRAAEAYQKQLRFAELLDRPGAERAIIHVSLATTLGDMKDHHGAVRHYEEELRLRSGNVLEEAKTWLNIALSREEAGDAYELLAPCFQKALSCAQQAQRPQLQRQVLQHLHTVQLRLQPQEAPETETRLRELSVAEDEDEEEEAEEAAATAESEALEAGEVELSEGEDDTDGLTPQLEEDEELQGHLGRRKGSKWNRRNDMGETLLHRACIEGQLRRVQDLVRQGHPLNPRDYCGWTPLHEACNYGHLEIVRFLLDHGAAVDDPGGQGCEGITPLHDALNCGHFEVAELLLERGASVTLRTRKGLSPLETLQQWVKLYRRDLDLETRQKARAMEMLLQAAASGQDPHSSQAFHTPSSLLFDPETSPPLSPCPEPPSNSTRLPEASQAHVRVSPGQAAPAMARPRRSRHGPASSSSSSEGEDSAGPARPSQKRPRCSATAQRVAAWTPGPASNREAATASTSRAAYQAAIRGVGSAQSRLGPGPPRGHSKALAPQAALIPEEECLAGDWLELDMPLTRSRRPRPRGTGDNRRPSSTSGSDSEESRPRARAKQVRLTCMQSCSAPVNAGPSSLASEPPGSPSTPRVSEPSGDSSAAGQPLGPAPPPPIRVRVQVQDHLFLIPVPHSSDTHSVAWLAEQAAQRYYQTCGLLPRLTLRKEGALLAPQDLIPDVLQSNDEVLAEVTSWDLPPLTDRYRRACQSLGQGEHQQVLQAVELQGLGLSFSACSLALDQAQLTPLLRALKLHTALRELRLAGNRLGDKCVAELVAALGTMPSLALLDLSSNHLGPEGLRQLAMGLPGQATLQSLEELDLSMNPLGDGCGQSLASLLHACPLLSTLRLQACGFGPSFFLSHQTALGSAFQDAEHLKTLSLSYNALGAPALARTLQSLPAGTLLHLELSSVAAGKGDSDLMEPVFRYLAKEGCALAHLTLSANHLGDKAVRDLCRCLSLCPSLISLDLSANPEISCASLEELLSTLQKRPQGLSFLGLSGCAVQGPLGLGLWDKIAAQLRELQLCSRRLCAEDRDALRQLQPSRPGPGECTLDHGSKLFFRRL

SEQ ID NO: 15792 - protein, 1045 aa, Homo sapiens
MGSQPPLGSPLSREEGEAPPPAPASEGRRRSRRVRLRGSCRHRPSFLGCRELAASAPARPAPASSEIMASAAKEFKMDNFSPKAGTSKLQQTVPADASPDSKCPICLDRFDNVSYLDRCLHKFCFRCVQEWSKNKAECPLCKQPFDSIFHSVRAEDDFKEYVLRPSYNGSFVTPDRRFRYRTTLTRERNASVYSPSGPVNRRTTTPPDSGVLFEGLGISTRPRDVEIPQFMRQIAVRRPTTADERSLRKIQEQDIINFRRTLYRAGARVRNIEDGGRYRDISAEFFRRNPACLHRLVPWLKRELTVLFGAHGSLVNIVQHIIMSNVTRYDLESQAFVSDLRPFLLNRTEHFIHEFISFARSPFNMAAFDQHANYDCPAPSYEEGSHSDSSVITISPDEAETQELDINVATVSQAPWDDETPGPSYSSSEQVHVTMSSLLNTSDSSDEELVTGGATSQIQGVQTNDDLNNDSDDSSDNCVIVGFVKPLAERTPELVELSSDSEDLGSYEKMETVKTQEQEQSYSSGDSDVSRCSSPHSVLGKDEQINKGHCDSSTRIKSKKEEKRSTSLSSPRNLNSSVRGDRVYSPYNHRHRKRGRSRSSDSRSQSRSGHDQKNHRKHHGKKRMKSKRSRSRESSRPRGRRDKKRSRTRDSSWSRRSQTLSLSSESTSRSRSRSSDHGKRRSRSRNRDRYYLRNNYGSRYKWEYTYYSRNKDRDGYESSYRRRTLSRAHYSRQSSSPEFRVQSFSERTNARKKNNHSERKYYYYERHRSRSLSSNRSRTASTGTDRVRNEKPGGKRKYKTRHLEGTNEVAQPSREFASKAKDSHYQKSSSKLDGNYKNESDTFSDSRSSDRETKHKRRKRKTRSLSVEIVYEGKATDTTKHHKKKKKKHKKKHKKHHGDNASRSPVVITIDSDSDKDSEVKEDTECDNSGPQDPLQNEFLAPSLEPFETKDVVTIEAEFGVLDKECDIATLSNNLNNANKTVDNIPPLAASVEQTLDVREESTFVSDLENQPSNIVSLQTEPSRQLPSPRTSLMSVCLGRDCDMS

SEQ ID NO: 15793 - protein, 526 aa, Homo sapiens
MDVRFYPPPAQPAAAPDAPCLGPSPCLDPYYCNKFDGENMYMSMTEPSQDYVPASQSYPGPSLESEDFNIPPITPPSLPDHSLVHLNEVESGYHSLCHPMNHNGLLPFHPQNMDLPEITVSNMLGQDGTLLSNSISVMPDIRNPEGTQYSSHPQMAAMRPRGQPADIRQQPGMMPHGQLTTINQSQLSAQLGLNMGGSNVPHNSPSPPGSKSATPSPSSSVHEDEGDDTSKINGGEKRPASDMGKKPKTPKKKKKKDPNEPQKPVSAYALFFRDTQAAIKGQNPNATFGEVSKIVASMWDGLGEEQKQVYKKKTEAAKKEYLKQLAAYRASLVSKSYSEPVDVKTSQPPQLINSKPSVFHGPSQAHSALYLSSHYHQQPGMNPHLTAMHPSLPRNIAPKPNNQMPVTVSIANMAVSPPPPLQISPPLHQHLNMQQHQPLTMQQPLGNQLPMQVQSALHSPTMQQGFTLQPDYQTIINPTSTAAQVVTQAMEYVRSGCRNPPPQPVDWNNDYCSSGGMQRDKALYLT

SEQ ID NO: 15794 - protein, 488 aa, Homo sapiens
MQQTRTEAVAGAFSRCLGFCGMRLGLLLLARHWCIAGVFPQKFDGDSAYVGMSDGNPELLSTSQTYNGQSENNEDYEIPPITPPNLPEPSLLHLGDHEASYHSLCHGLTPNGLLPAYSYQAMDLPAIMVSNMLAQDSHLLSGQLPTIQEMVHSEVAAYDSGRPGPLLGRPAMLASHMSALSQSQLISQMGIRSSIAHSSPSPPGSKSATPSPSSSTQEEESEVHFKISGEKRPSADPGKKAKNPKKKKKKDPNEPQKPVSAYALFFRDTQAAIKGQNPSATFGDVSKIVASMWDSLGEEQKQSSPDQGETKSTQANPPAKMLPPKQPMYAMPGLASFLTPSDLQAFRSGASPASLARTLGSKSLLPGLSASPPPPPSFPLSPTLHQQLSLPPHAQGALLSPPVSMSPAPQPPVLPTPMALQVQLAMSPSPPGPQDFPHISEFPSSSGSCSPGPSNPTSSGDWDSSYPSGECGISTCSLLPRDKSLYLT

SEQ ID NO: 15795 - protein, 576 aa, Homo sapiens
MDVRFYPAAAGDPASLDFAQCLGYYGYSKFGNNNNYMNMAEANNAFFAASEQTFHTPSLGDEEFEIPPITPPPESDPALGMPDVLLPFQALSDPLPSQGSEFTPQFPPQSLDLPSITISRNLVEQDGVLHSSGLHMDQSHTQVSQYRQDPSLIMRSIVHMTDAARSGVMPPAQLTTINQSQLSAQLGLNLGGASMPHTSPSPPASKSATPSPSSSINEEDADEANRAIGEKRAAPDSGKKPKTPKKKKKKDPNEPQKPVSAYALFFRDTQAAIKGQNPNATFGEVSKIVASMWDSLGEEQKQVYKRKTEAAKKEYLKALAAYRASLVSKAAAESAEAQTIRSVQQTLASTNLTSSLLLNTPLSQHGTVSASPQTLQQSLPRSIAPKPLTMRLPMNQIVTSVTIAANMPSNIGAPLISSMGTTMVGSAPSTQVSPSVQTQQHQMQLQQQQQQQQQQMQQMQQQQLQQHQMHQQIQQQMQQQHFQHHMQQHLQQQQQHLQQQINQQQLQQQLQQRLQLQQLQHMQHQSQPSPRQHSPVASQITSPIPAIGSPQPASQQHQSQIQSQTQTQVLSQVSIF
